United States Patent Application Publication US 2024/0084332 A1 - sequence listing, part 3

SEQ ID NO: 8445 - protein, 516 aa, unknown
  TnpB Polypeptide
MDKVEDSTENKKVRRVKIFQIRKGSDEYAMLSGLCDITTKIYNNALFVLRQLHFASYPDKHDAQYYLDRIPDIFKKYVVANKKVVKSKNEEDREITVYSLRFTSETGVDYSYDRAMWRILESNEDRGVFGRCQLHTARNAVRKAHLEYKSYLALVKRYRDGYLEDEPHLPRYKKEGRRSSFIADSFRRTKTGGIIINNMVLLKTVFVRDIEGDIKQVRIIPVEAQNIYKVEVVYENTIDGNIVVGDKSLAIDIGIDNLCAITTDGGDAVLINGKPLKNINKFYNELVADICSTYSFQQIKSGRKRRMYNLKRNNKIDTYMHQVSRWIVEYAKSNGCGTIYIGHNNGWKHGVNLGRKNNQKFVQIPFNRLIERIRYKAEEYGIRTELVNEAYTSKCSAIDSEQICKHSSYCGRRGGRHNKEFVTGKGKLLNADVNGSLNILRLGTKKDVSSIGDIMFSPPKVKGIGMKGYEMKPQNHSAKLNGMFSDGQVIGSPIKVEATVDSHCDELSPYKKASAF

SEQ ID NO: 8446 - protein, 373 aa, Chlamydiae sp.
  misc_feature (346)..(370): Xaa can be any naturally occurring amino acid
VKRTIAIKLNISEFQREALCELQDMFANACNRTAAIAASEKERNRIRLHHLCYRSLRHSLPKLGAQMCCNAIAKTAACLKALRRPKQVLFKNGCSVHFDKRTYSLKNGVLSLFTLRGRIKIPLEISGFHKGFLDFGAPKEAELVRKGKRWFFHLVLDLPDVLPAIADKAMGVDLGENVLAATSTGKLFGGGPLRAQRDRFLGMRARLQSNGSQSAKQQLRHISGKERRNVKHVNHCISKEIVLEAQRNGCCTIIMEDLKNIRKKVKAGKKMRSRLHRWSFDQLRQFVEYKAEALGIQVQYVNPFYTSQTCSQCLSSGVRLKHRFSCSNCGSLQHSDLNASRNILRXXXXXXXXXXXXXXXXXXXXXXXXXEAS

SEQ ID NO: 8447 - protein, 264 aa, Ruminococcaceae sp.
LRKRHNYWVLSFSFEEKVKLTDIPLEEQVILSVDLGINSACACSAMRLDGTILGRKFLNLPKEEDSLTHALNKIKKAQQHGAMGTPRLWAKAKGINDQISVRTAQFIVDTAILYSAFTIVFEHLDTKGKKKGSKSKRQRIQHWRAQYVQSVVADKAHRLGIRISRVNAWNTSRLAFDGSGEVIRGKEAGFKTNAMCKFRNGKTYNCDLNASYNIGARYFIREILKSLPATSRLRIEANDPQCSKRSTSTYSQLINLCAELHAAA

SEQ ID NO: 8448 - protein, 372 aa, Arcobacter sp.
MIRTYKYKLYKTKKDKHIHDVINISGIIYNHCIALHKRYYKLYGKHLNKFQLQKHLTKIKKRDKYSFWKKVPSQSVQDITVRIDNAYKKFFDYTKGKTKLRISPPTFKAVKKYKSYTLKGRVGYKLENNVISLNGYKYKLWLSRPIDGAIKTVIVKRDNLGDFYICITIEKENPKYSVTSGKSVGIDFGLKTFLTLSDKTEIESPLYHLKNLSKQKKLNRNLSKKKKGSQGREKAKLQLSKLHIKTANQRRDYFHKLSNQLANNYDNIFIENLNMKAMQIMWGRKISDLAFSEFINILEYKAKVTKIDKFFPSSKTCSKCGTVKKDLDLKTRVFKCDTCYFEIDRDLNASINIKRVGASTLAGEVVRATSVA

SEQ ID NO: 8449 - protein, 522 aa, Christensenella sp.
MVVRTLVLKLHNPSAAKRELIDRAVLRYNRALSYLFEHTKENVEPIMREMREGGAYLTRRITGLLGKELMNRLNEFGVQPFKDALKLDYAMAMVAWLSLRKAQKGARYPQILEEADFDRQFSAALDAFDAGEIGREELRLRLERLYNGLGIRKPLLFGRYAKNRDYCLLYDKAHGRFYAKLYLMGVRDENRRGGIVRGDAELYYVAEGHEPLERDNKRERYIVVPLSFGKAQETVLRAGLENPRIFKTARLLKKNGDYYLSINVACESAQEGKNETYMGITRSLKDAARYAVTDLQGKVLAEGGIPRRKDICTKNGMHAAANELVEIAWKNKSAIITYRMGEIGDKLTCGREAAQLTAGEFNRMVSMVAYKAELRGLEKPVFVSARGIFTACPRCGSNTQKNRFAGGRMICVKCGFAGEIETIGPLNAARRLLKYNGTALLFYAKQTDGGILIHNDILGLSYLARPTQEGIRDFFRYAEKAAKDIKAGKDFPEGISIREISYRKRFANLRNVREEITIVDEE

SEQ ID NO: 8450 - protein, 549 aa, unknown
  TnpB Polypeptide
MPSTQPCTVIRLLAPLGDSERVEIVFLMKWYGYCIKLFLEALKSRELREKLVYQHKIRDEIVGVLKNKDNELLEKYAELRRNHQYVLLHVCQKIPQIPLLGRMWKLALEESVNTVRTYWASVATETKHQCWRHDWYRQTSKLQKDFIDWVLTANTPQFFHLLSHRLPTVSFKNLKAMGYKDKDKEKDEKLDQYCEAIVAKYQKLSRQEQKKLIQNVHKILKSVRKNIVHYPQHHENNRVDFDCECWSKGQDKEGQYVKVMTHEPRKRMRLNLKGFGLLRGTLQLYYQKKTGQYVIHVYHDQACKEPVKEGRIVGIDQGFTEFCATSEGKLIGDGFGKVISKASDSMCTRGKGRNKLRAVQKKHKNAGTKKGQQKAKNIEQFNLGRVRMNKAFNRAKALLISLINHWINLLLLSNPDEDEEQIAVLVIEKLTTFTKNKHFPKKINRRLSAWMHGYVHDRILFKCKKAGIKVVEVNPAWTSVTCSVCGCVHKENRNGDKFQCQNCGMTDHADVNAAKVIRSRIAWAFCTLYMTPRQIKYYLENDKDKLFDK

SEQ ID NO: 8451 - protein, 362 aa, unknown
  TnpB Polypeptide
LVLWKKEDDMLWLQEAPSQALQQCLMDASAAIEAFKAKKKGFPKFQARGDGDSFRIPQVRPTDWDEANGRVRIPKAGFVRFRKSRPIQGKIKQMTVSVECGHWFVSVVTEMDFVNDGPRRPGEVGIDLGIAQTVTLSDGTVFQLDVESIKKHEKQIAVLQRQLCRNKEARQKLAKLGKANPFDKREPSRKRRRLKAKIQNHHRCIRNIRRDFMLKTAHTIAQNYGGVAMEDLKLKNMTKSAKGTVEEPGKNVRQKTGLNQSLARVAPYAMRMAIHWAVFKANGRLILVDPKYTSQTCPICGCTSSSNRPLQAHFGCQKCGYTANADVVGATNVLKKSRTGSVRPCSELGNKTATGTVLFVAS

SEQ ID NO: 8452 - protein, 408 aa, unknown
  TnpB Polypeptide
MKKTLRYNFRLKPTPEQEAKLIEFSSYARGLWNLLLAENMRRYRYDKTFLFYVEMAKLIKELKQFEEFSWLKAFDAAAAQQVARDLETALKNSFTKGRLQKFPTFKVSFKIKKLHNDSFRCVNNSNCIRIENGVISIPKLGKIGVVQHRKLASKIKTVTVQISHGKWNVSLTQEVECKAAKQLLSTIVGYDINSQHTVVGSNGWYVKNPKTFKRSSTKLKQIQVQLSRRKKGSSRWHKAKNRLNKLHGKISRQRLAFAHEVSCSIAKASDIVVFEDLNVKGMQLFNGSMVNDNVMGMITSLTKYKVELNGGIYHEIGRFVKSSGICCECLHGHKFDLNVRSFACENCGTVQCRDQSAAVSVASTGENDLMVAGIVARVRPKFQQKSSSKTKVFERSKFDVGTEKKEAA

SEQ ID NO: 8453 - protein, 517 aa, unknown
  TnpB Polypeptide
MSVFFVPFFTIQKGGNNIMDGHKPIPIHDLRKANALENKDQWLKWRKEGIGGSDSAAARGKGKFKSTLELFWEKTSSFQREPKNWETLLCGQLLEPYARRMFSFKTGLRVIELPYMYQHPDHPFMLADLDGLVMMPDGSMAILECKVINAFTKKYYGTKENPKLPYQYEAQVRHYMCVMDIDVAYVIAIYGNTRNDVIIRKVTRDIKYEKIMIEELEEFWQHVQNNEEPGMFEDKDPNLLIKALEEKKYVDGTIELPYDPFKSLLEQYDMLMEEKEVKKQELSKIDQSLDRIKAYFINSLKGADDTRYDRGVIVHDDEKIILNYEQKEPKVTFNVESSQRLAEMYPDIYQKFCTVQKQSPRFSLKKENLKKGESTQKANIQKQRLKVQKLHHKIDNIRTDHINKTIAEIVKTKPSYITIEDLNVSGMMKNKHLSKAVASQKFYEFRTKLQAKCKEIGIELRVVDRWYPSSKTCHCCGAIKKDLKLSDRIFQCDCGYIEDRDFNAALNLRDATTYEVA

SEQ ID NO: 8454 - protein, 411 aa, unknown
  TnpB Polypeptide
MDSRHLAYRFELDPNDRQATTLARACGLARKVFNWGLAERQHQYETEIKPARERGEKIRSLSHFDQCKAWVAARAQVAPWASDFSAHIAEYALLDVDLAYRKFFSGLKAGRRVGFPRFKKYSEANSFRVRGIIKIEGNAVILPRLGALKLKGNPCRVTGIIKTATVSRRAGKWFVSLLVSQDFLSPTPSDKPTVGIDAGLKTSLTLSDGTVIQAPRPLLRSLHKLRGANKALARSQRNSAGRAKAKVHLARVHLRVANQRANWSHGVSDRLTKDYGQIVVENLAVQNLQHHKRHNGRSWADLGIAELYRQLEYKSAWRGVGFRQADRFYPSSQLCSGCGARQPMPLHLRVYDCPACGLSLDRDLNAALNLKSLAGMPSESLNARGGDVSLGSAQPTPLKREPSSDRDVFIS

SEQ ID NO: 8455 - protein, 411 aa, unknown; identical to SEQ ID NO: 8454
  TnpB Polypeptide

SEQ ID NO: 8456 - protein, 545 aa, unknown
  TnpB Polypeptide
LALLHDVGGDHVQGCTAGDVGPRPRPPCPPVMPGQLGDLLSKPPGGAALQGVDQRGQRRRGGKPTSRWTCSVSPLHSARSQPKSRQTARMTASMRARWTAVHTEYRELVTTTRLACNPKTPRRPARIRLMLSHAPSILRGMRLRYRYRLDPTPAERRALARALGCARVVYNDGLRLRQNAHRAGLPFIGDAELSRRVVTLAKQTPERAWLGEVSAVVLQQSVADLDRAYRNYFADLKRVKAARARGEQAKLKVHKPRFKSRHHQQAVRFTANSRFRVTPAGRLSLPKVGEVRVRWSRPLPAEPSSVTVTLDGAGRFHASFVVKIAEAPLPSADTEVGVDLGLTTFAALSTGEKVDNPRWLRQREKALRRSQRNMARKRKGSNNAEKARRRVARLHARVADARRDFHHQLSTRLIRQHQTVCLEALNVAGLSRSKLARSVHDAGWGQFMAMLEYKAELYGRRVVKVDPWYPSSQVCSACGRRYGPKPLKVRAWTCPGCGTTHDRDLNAAMNILAEGLSVAACGPGVRPDASRAVGDEAGTVLAGAA

SEQ ID NO: 8457 - protein, 482 aa, unknown
  TnpB Polypeptide
MKSIKFRVEQTEQLDEYVRMVRKFGNKISSILHNKLKTKKILDVKGFKYTVPTPEEEGGEYIFVKKKLKYDVPVKAMTEKWFMDLPEVAEQIENFFPEDKNPQRGYIGGYIWQVAARYEGCFQRNKVAPTKKIDPFRASIDLKKCEINLNLETGEVKIRDVYGKGKKENHNYYCFNLNLSETFLGNLENFKSKWADKYNEETGFYENLNGTYIYRQSNKRELMILCEEVSTVPSADKFLGLDLNKKPENFLALSWPIDGKQMYSKNPELTECEQEIRKREDRIKASIEETSKREKTSQRKERTLLRKQIKNWQRKQLRISKQLVNFLLDKAEEENPNKIIGLAIDTNSTGGKLGTYSHDSMRKAFKECANERGMTWYEVPAAYTTQHCLECGGFDSNARGRMPERFSDLKGESRKLIEKQYENIYSCLCGYEQDADIHAAKNHEARAMALQKNKVNMNNTYNKSIEIGYLSELKKLGFSPNK

SEQ ID NO: 8458 - protein, 367 aa, unknown
  TnpB Polypeptide
MRTYRFKLYNSKRNRKLHKQINAAGLVYNHCIALHKRYYRLFGKSLNMYQLQKHLTKLKEISKFAYLKEIGSQAVQDITQRIDRAYKLFFRNLKHKIRTAPPSFKKIRKYKSFTLKQAGWKLNEAGNSITIGRERYRYVKSREINGKVKTLTVKRDALGDIYLYFVCETSDPEVLVRTGKSVGFDFGLKMFLNASDGNDIDSPLFFRQNANAIKRANRNLSRKVKGSNNRKKAKLALARLYKKIANQRDNFHWQTVNNLVGEYALICIEDLNLKAMQRKFGRKISDLGFAGFVNKLKYKAHRTGASVVEIDRFYPSSQLCSDCGYQNTETKNLKIREWTCPKCGSTHNRDRNASINIEREGKRIFLA

SEQ ID NO: 8459 - protein, 397 aa, Scytonema sp.
MRRLKLNNKEKTFFSGCAGYSRFIYNYGLGLITEYRRTGGTGTNTKVLDAIKKVFTNYTKKTRKYRWCNDYSSRIYSNAFIALKKAFTNQREGRAKAPKFKKRKDGKSFTVDSSNGKVLLQAGNKIKIPTLGTFRLHESLSCSYVSQTFTISEHAGEWYVSFMVDAERLPIPSGEKWEKCGVDLGIKCFATVHTHELGTNEYKSPRPYKKAKAKLRKLQWRNKNKVLGSRWITDTETGKRRKIYITPSKSAKKYYKRLCLTHAKITNVRNDFLHKSSTELATTHCVVRLEDLNVKGMMQNGKLSAAIADQGFGEFRRQMVYKTNWYGGRVELVDRFYPSSKKCSNCGHVKPRLALSERVYHCESCNHVQDRDENAAMNLCYAPAEVVRVACPEDTDT

SEQ ID NO: 8460 - protein, 420 aa, Scytonema sp.
MQLAERHIIKSGTRFFEEIDALSFASKNLYNAANYIIRQNYIFGWGYLNYNKMHSLMKTHETYRYLPRKVSQQILMVLDRNWKSFFASVQEYKEHPDKFKASPAMPKYKDKAKGRNLLVYTIQAISKPGLVTGRVKLSGTNIDFPTQVANHVCQVRIVPKCDCYVIEVIYEQQESTPVNSDESAAIDLGLNNLATLTSNQKGFVPLLINGRPLKSINQFFNKRKAALQSKLSRKRQTSVRIQRLTRARNLQIDNYLHNSSRFLVDHLVEKQIGTLVIGKNDLWKQEINLGKRNNQNFVTVPYSRFIEMLTYKCQLAGIMVVVIEESYTSKSSFLDFDPIPTYGHVSDSPSFSGKRISRGLYRTSGNQFINSDVNGSYNILRKAIPNAFADGIGSCVVQPRRVTPNKVKAKGKSEMVSKAM

SEQ ID NO: 8461 - protein, 476 aa, unknown
  TnpB Polypeptide
MVVLAVEFHQFRIEVGAYAGEDAAQVVQYPFGEHLAAILCHKDQVDMHHKNAVSAVSNIVVIAHSPNYNLSMQRLQAYKFELMPNGQRQCDMRRFAGSCRFVFNKALALQKGRYEHGEKKLDYAGLCKALTEWRNSTETPWLKDAPVHPLQQTLKDLERAYTNFFAKRADFPRFKKKGMGDSFRYPDPKQIKLDQSNSRIFLPKLGWLRYRNSREVLGTGKNVTVSRSGDKWYFSIQTEREVEQPVHPSGSMVGIDMGIVRFATLSDGTVFEPLNSFKKHQQRLSRYQRAMSRNQKFSNNWKKAKAKVQKIHTLITDARRDYLHKATTTISQNHAIVCIEDLQVRNLSKSAAGSSEKPGKNVRAKSGLNRSILDQGWFEFRRQLEYKQAWRGGSVIAVPPRNTSRTCPACRHVSADNRQTQVWFACVECGFEENADLVGAINILAAGHAVIACGEPVQSGRSAKQEPTEATQAVSA

SEQ ID NO: 8462 - protein, 391 aa, Aliidiomarina sp.
MLKATKVRIYPTPEQAEFLNRQFGAVRFAYNKALHLISSQYKRRGLKLKAKKDLKPLLAVAKKSRKYHWLKDFDSIALQQACINLDKAFSRFFDPKLPARYPKFKCKHGRQSSYHCMSVDCGDEWVKIPKMEPIKARIHRKVEGKLKSITLSRTVTGEYYASLLHDDGQEAPSPIHDLDARQVLGLDMGLTHLAIDSSGKKEPNPRFLKKATANLRRKQKALSRCKKGSKSRAKARLKLAKAHQRLANARADFQHKLSRQLIDENQAVIVETLKVKNMLKNRKLSKHIADASWSGLIQKLEYKAKAQGKYLVKIEQWFASSKTCFCCGHKLESLSLKVRDWQCPACLIRHNRDLNAALNIRAQGILKLKAAGLSVSANGGKRKTSQALAAA

SEQ ID NO: 8463 - protein, 404 aa, unknown
  TnpB Polypeptide
VKSSWWLSVRVQATLSFAMKVAPEGATRVSILLKTMRVWREAVRHVVDYVIRTRQTGLAKVHHALYRLLRERYGLPARLATDAIRQGIWIAKGWLKNPKRGRRPVIRSLWMVLTPKNSYTFKAHDEVSILTLDGRRTYKLCYVERWHGQYRGWKPKEARLVFKDRRLWLKVVVEHEVPLIEPEGILGVDVNYTNITMSDGTRLELNAFKRAHGLKIEAERIQKKHRKSWRYIRAVRSRIKALGARARNIIIDACRKIGLEAAKHAYKARRAIVLEDLTGLKEANRKGRTARTWRARLALWAYRELQKWIEWKAHLYGVPVFKVSPRGTSSICPNCGSRLRSMGNRRLKCPVCSLEGDRDLIAAINLGMRGAQATLMAPDANETPRAMKGKLKMGAIARPPFLTA

SEQ ID NO: 8464 - protein, 374 aa, Caldicellulosiruptor sp.
MLKAYRYRIYPDKAQEEFFEKTFGCCRFVWNKMLEEKLEALRQGRKVPRITPARYKKEYPFLREVDSLALANVQLEQEKAFRDHFKNPKHFRMPKFKKKKDKQSYTTNNQQPKNGNETIRVDFEKGFTYLPKIKGGIKTVFHRKFEGKIKSATVAKTKAGKYYVSILVDVQDPRNDVKEPKNIVCGIDLGLKSFVTIIGDTGILKIEYPKYLIKGEERLKRLQRQLLRKKEGSKNWEKARERLAKEHEYVKNAREDFLHKLSKAIIDENQVVVVESLNVKGLSKTRLSKHILDSSWSKFLEYLRYKADWYGRRVIEVDRTFPSSKMCSRCGYINNELKLKDRVWKCPECRTIHDRDENAAKNLRNYGIVYISDK

SEQ ID NO: 8465 - protein, 350 aa, Helicobacter sp.
MALRHLVSAYDNFFSKRARYPKFKSKKNAKQSFAIPQNIEIKTETQTIALPKFKEGIKAKLHRDLPKDSVIKQAFISCIADQYFCSISYETKEPIPKPTIIKKAVGLDMGLRTLIVTSDKIEYPHIRFYQKLEKKLTKAQRRLSKKVKGSNNRKKQAKKVARLHLACSNTRDDYLHKISNEITNQYDLIGVETLNIKALMKTYHSKSLANASWGKFLTMLEYKAQRKGKTLLHIDRFFPSTQLCSYCGFNTGKKHERITQFTCPHCKITHHRDYNASVNIRNYALGMLDDRHKIKIDKSRVGIIRTDYAHYTDERIKACGASSNGVSSKYGNILDLASYGAMKQEKAQSL

SEQ ID NO: 8466 - protein, 369 aa, Staphylococcus sp.
MLRAYKVEIQPNNEQIEIIQQTIGTCRWVYNKFIEINQIRYKNKLKYMSGYDFSKWFNNDFIPNNPDKLWIKESASKSVKQSIMNAHRAYQDAFKKQKGFPKFKKKQSNGSYYLIGAIKVERYRIKLPNLKWVRLKEKGYIPKHNIKSATISKEFDRYYVSVLVDEEPKIIFKKPQTEGIGIDLGLKDTLFTPSGVKITDLRKNKRLIKINKSLKRQQRKLSRKQKKSNNWFKQLLKVQRLYRKISNLKRDIKRKNILSIVQENPQFITIENLNIKGMMKNKRLSNAFQQIGLGYIVEWLKWKCYQYGIELRQVDRFYPSSQICNQCGNRQKMPLNKRVYKCENCGTIEDRDINASINLKQAKDYTVIV

SEQ ID NO: 8467 - protein, 369 aa, Staphylococcus sp.
MITKKVRLRPTKQQELQLYKSAGTARFIYNWTLAKQQENYKQGKKFIQDSVLRKEITQLKKTEEYKWLKEVSNNIPKQAVKDACISYKRFFKGQAKFPKFKYKKKTKPSFYNDTHRLRVKENLVLLQRIGWVKTSEQLPTNTKYYNPRITFDGKYWYISVSIEEENIYEELTDESLGIDLGIKELAICSDGTIYGNINKTVKVKKLEKRLRRLQRKVSRKYQKNKEGGKFVKTCNIIKLEKQIKLLQRRLSNIRKNHLHQTTTSIVKTKPRRIVIEDLNVSGMMKNRHLAKAIQKQGFYEFRRQLEYKCKRKGIEVILADRFYPSSKTCSNCGTINQNLKLSDRIFNCECGFSLDRDLNASINLANYNI

SEQ ID NO: 8468 - protein, 230 aa, Desulfurococcales sp.
MERKWYEVIVSIDRSGRIWVSMPFRWIYKPYDPKKLISLDINLKKIAVYNGRRVRRINTRFTEALYLKHLAEEVQRRHSYAWRRNKKWLDIIRALHRRSRNIVIDWSRKFAKYIVLKAKRIRSAIALEDLEKLWFNASGKSPNLADKLSRFAYRKLQLAIITKAIEYNVPIIFMNPRGTSTVCPRCGAKLTYNHRLAICRNCGFIADRDTIGAINIYLKAIQALAPRPGS

SEQ ID NO: 8469 - protein, 539 aa, Bacillus sp.
MGKRDSILFGWICLFPIFIKIERGKEMLQTYQTKLSNIFLNTEWTTDMYLEEYGKFFGILERKLFVQTHIQGIPSYSLKKTFSKRYGITARQFNSIRMQLDGKVSSIFEKRKLEIQELKAKTAYLQNIIGKKTSQKELLYKKLLQISQTSTIFLKQRKNYQNLKLYLHQKKRRLRNLLQKLDKLKFNEANKKIPLCFGSKQLFHKQFHLEENKYTDHRQWREDWIAARSSQFLVIGSMDETFGNQTATYNLQNSLRLRVADHSIPKYGKYITFPEVKFPYGQEMMDRAKVSYMGVTRAGKHQKYYIAITYRFLKQKKGWYLNATVERNIPKVGTSNLNGLIGIDVNAGFLSMCEIDRFGNPIKSWRINVPMYSRQTEQVKASLSDAIKRILGYAVFVQKDVVIEKLDFSKKKIQLRESGRKYARMLSGFAYSSFNQLMESKGKKEGVRIRKINPAFTSQIGQMKFMARYGLSSHGSAACMIARRGYYFRMETPKYDTVLSLPKRFDKEKSNTSNWRTITKHLKKEYTFQDKIELLKADI

SEQ ID NO: 8470 - protein, 354 aa, Methylococcus sp.
VRDKHSALLRQCAFEVNQVWNEANSRSAELSWVPIPGFGWMNLGTSAFDLQTDLKDFSKERAPSLHSHSVQEVIAVHAKSRKQFKTNKLKWRCSGGAKRALGWVPFKVGSAVWKDGQVRFNGHFFKVWDSYGLSQYKFRSGSFSEDSRGRWYFNVVIESPLEQTKNTSAIGIDLGLKDYATCSNGVKLEAKQQYRQMEVKLGIAQRAGNKKQVKTIHAKIKNRRKDALHKFSRELVNNHGTIVIGNVSSSKLAKTKMAKSVLDAGWFMLKTQLSYKAKGQGVLFVEVDEADSTQACSCCGSIPASSPKGRTGLGVREWVCSDCGAEHDRDINAACDILNLGLGYQAPVDGIPAL

SEQ ID NO: 8471 - protein, 353 aa, unknown
  TnpB Polypeptide
MWKSAGTKRWVYNWVLEKQQKNYNTGGKFVKSNDLRKELTQLKKTDSYKWLNEVSNNVAKQAVKDACNAYLRFFKGIAEKPVYKSRKNSVISFYNDNVKLKVKKNEVLLEKVGWVKIKEDIPLNCRYTKPTVSHDGKYWYLSVGIEVKSNKVELTGKTLGIDVGIEKLAVCSNELVFRNINKTKKVKKLEKKLHRLQRKVSNKYEKNKKGASYQKTNNIKKLEKQIKLVYRRLNGIRKNHLHQATNKIVKTKPSKVVMETLNIQGMMKNKYLSKAIQQQNLYELKRQIQYKCEFNGIKFIEADKWYPSSKTCSKCGNVKKNLSLSERTYICEECGYKINRDLNAAINLSRYSA

SEQ ID NO: 8472 - protein, 548 aa, Streptomyces sp.
MRRSKQLRPIGVPFVALGPSGVAIRDRLRHLTPEDEEVLREVGAHLGSLASRDLKARCADGLDHSSDTWAARKRGLTAASSSRWAGSITKATHDQWALSRRCRLAHIQGLEAGVRTLRHRLSLPIGEKGTKRAPGGCRTKHEWFRKSRRLAVLEHRLDVARAERETGVVHVVRGGRELLGNRHNLDAAQLTEAEWRGRWEASRWFLQADGESGKRHGNETIRVSPEGEVSIKLPAPLAHLANARHGRYVLNSRVAFRHRGAQWRDRVEANRALAYRIHLDVRRGRWYLTASWTRPVVRTVPLETARAAGMVGVDTNADHFAAYHLDAHGNPIGDPRRFFYDLSGSADHRDAQVRHAITQVLHWAGRCGVAAIGIEDLDFTAEKTREQHGRNKRFRQLISGIPTGKLKARLVSMAAEHGLSIVAVDPAYTSMWGDEHWRKPLTSNNRKMSRHDAAGIAIGRRALGHPIRRRTTPPPAHRSDEQGHRTAQAGPGTRGREGTRPRIPGPRTRSVPPDAESTRATRTPKTVRDVRSDQEWVQDSLLLTDEER

SEQ ID NO: 8473 - protein, 477 aa, Sulfurovum sp.
MTKEKIVNFGYKYRLYPTKDQHQILDHQMFIYNQAYNICHNLWYKENNKNKDLPKELKKYRSAVSYDTVVKRALKFRKLSFSTVVTQQARINFLKAVKRAFSKDTVSKRLKAIESAQTPKEKAKAYSLGMPTFKSSRDVFQSFNWNNQGCHINKSPLNKRFGILRLLKTNFKFRYHRELPENHKLSSITISKDSTGYFVSFGIEFTKQIDLAVSSENIDISKSIGIDLNAYTIAVSNNVDFIAQQNISPVSMGHLIDNGATNRKGLKYKTSSLVLLRKQSRRVLKELENSKKNKTKFKLGSNHRKTQSKINRLTKKIANQKNDLYHKISTALTNTFDLIAVEDLKTKNMSKSSKGNEIVHGKKVKQKSGLNRTILNASFYQFVSMIHYKQTMLNDKLFVKVNPQYTSQECSQCGNIDKANRPKQDKFQCTACGFETNPDIQASKTILKRGLQSFGLGTSLVDSKHKAFRSTSLEVAS

SEQ ID NO: 8474 - protein, 172 aa, unknown
  TnpB Polypeptide
MIRSGTVSVKAGRFYVSVLVEIPDVNINNNLNEGIGIDLGLKDFAIISNGKTYRNINKSAGLKKLEKQLIREQRSLSRKYENLKKGEATQRANIQKQKLKVQKLHHKMDNIRTDHINKTIAEIVKTKPSYITIEDLNVKGMMKNRCLSKAVASQKFYEFRKRLKAKCDEKRH

SEQ ID NO: 8475 - protein, 515 aa, unknown
  TnpB Polypeptide
VLARNQTYRAFVARPTHILDLNGELLDSASVISQLAAEVRDISAYATYVVRNDVTLGERLALAGAVQPTTAGRRAGVTMPEFLVTGKSGRSRKEALIQHRVVTEYRSWQERIAAANGESGKYVSQGWKRTVDASAPSYGEAGFINLGAVNKQYAVIENTPLIDGEIVLKMVIQGSWYRLIFNFDNSRFTEGKVTLPVVKVEGGIPIFIFTIVTDNPVVQFSGDYVVGVDVGINDYATVVVRNSTTGRIVYETTLSQRVHSLWNSIRASERQVRALNKKADKLLYQHQAHMCAIDEAQLHREAASRKKRELAILAAQEIAYLSHSYGNAVVAVEDLSWISNTMQNGRWNRGAFVQWLTHYVSQNGGWVVAVSSANTSQVCHLCGEKVEHPAHRVSVCTKHGEMDRDINAAANIAARAVSKVEKARKTRAKNRKLQRRTALKTPVARDSLKYPGRDRTKNAPTPKRKKHISKGVNLPISPARVVMTRVLADWDAYGILETNQAAINQDYVTRECRLC

SEQ ID NO: 8476 - protein, 524 aa, unknown
  TnpB Polypeptide
LNGELLDSASVMSHLTSEVQGISSYATYTVRNDTKLKGELARVTANAPAEAGRQAGVAMPDFLVPDKKDEDGNPLTDKSGEPIKNKTGKSRKERLFRHRVVTEYRAWQERIATINSESSKYVSQGWKRTVDASAPSYGEDTVNLGAVDKHYAVIENNPFADGEIVLKMVIQGKWHRLIFSFDNVRFREGKVALPVVKVENSQPVFIFTVVTDNPVVQFSSDYVVGVSSDYVVGVDVGINDYATVVVRNSNTGHVVHKTTLSQRVHSLWNSVRASERQVKQLNKKADKLLYQRQAHMCAIDEAQFHREAASRKKRELAIVAAQEVAYLSHFYGNAVVAVEDLSWIRNTMQSGRWNRGTFTQWLTHYVTQNGGWVVAVNAANTSQLCHLCSSKVLHPEHKVSVCPKHGEMDRDVNAAANIAARAVPKVEKARKTRAKSRKLQRRTALKTPVARASLKYPGRDRTKHAPTRKKAKRVAREVKLPLSPARVVMTSVLADCGAYGAVETSKAAINQGYVTCKCKLYSLN

SEQ ID NO: 8477 - protein, 335 aa, Cyanobacteria sp.
MHKELYNAAIANRRVQYERFSHSVSYYEQQNSLPAFKEVWTEYKQLGSQTLQATLKRVDLAYQSFFKGLRGKPKFKSIRHYSGWTYPASSGWKIHSTGDNGCLELTDLKVNIRMRGKARTWGRPTTCTIVYEQGKWYASITVECTPVRETGDGAIGVDFGTYHAAALSDGTIIDNPRFSSLQGEKIKKASKQKQRKRAPNFKKKVKASKRWKKASKKVSKIQRKVVLQRQDWIHQVATQLVSGNSLIATEELNLKGMTCKAKKGSKRKAQKKGLNRSMLDVGIGELTKAIEYKLQEAGGFLVMVPTQKVKPSQTCPSCGHQRKKDLYGGKVTKLS

SEQ ID NO: 8478 - protein, 391 aa, Geobacillus sp.
MYKTLVVPVKCSKEDYLYLLNCNKLSAEVWNLCLKINEEYRKQNNGKWIQRNELQKLTKQCVPLHAKGIHHVVHKYLFARDAVLQAKKQGRQDEKCPYKQKKYFVTGWDYQSIKIEGNKILLAKPMGIKPDGKKYKQKPVICYVKNIPNNIVEIELIYRNKLYLAIKYKEKTQYHQIKSDNHAAIDLGEIHSITSIDSRGNAVIITGRKLRSIKYHRNKQQAKIYQRMKKCKQGSKQYWKYRNALRNLKFKYDKKINDAVHKITKLYLDFCIQNNISTVYYGDLDSATRNIKGRVNSYVGQKLKQWNYGEIMRQLENKLSRYGIKLVKVKEKYTSKKCPNCNELNKPVGRNYVCKCGYQQHRDLVGAINILNDNYNTNIKYYKTKKYLRIA

SEQ ID NO: 8479 - protein, 373 aa, Geobacillus sp.
MHKAFKFRIYPTKEQAELINKTFGCSRFVFNYFLAKWNETYEQTGKGLSYNVCAKQLTQLKKELSWLKEVDATALQNSLKHLDNAFKRFFEKQNNKPKFKSKRNPVQSYTSQCNYSSSRPSIEVIDNKIKLPKLGWVKFAKSREVEGKILSVTIRRNPTGKYFVSILCETEINSLPASEKAIGIDLGLKDFVILSTGEKISAPKYFRKYEKQLVKWQRILSRRKYGGSNWNKARLKVAKIHEKIVNARRDFLHKLSTKLIHENQVICLEDLQVENMMKNHHLSKSITDASWSEFVSMLEYKANWYGRTVVKIGKTFPSSQLCSECGYRNKEVKKLNLREWICPDCKTYHDRDVNAAVNILREGMRLFTVGQTG

SEQ ID NO: 8480 - protein, 397 aa, Microcoleus sp.
MIVLEFKLKGKAQQYRVIDEMIRTAQFVRNKALRYWIDNQGAKLSDLYKQCALMAKEFEWAGKLNSMARQASAERVIFAIQRFFLNCQAKKPGKKGYPQFKKHTRSVEYKTSGWKLSTDKRCLTFTDGFAAGTFKLIGSRDLHFYSPNEIKRVRVIRRADGYYAQLCINVERIEESIPTGKAIGIDVGLNHFYTDSSGETVPNPRYLRKSEKALKRLQKRVSRKKKGSSNRKKAINKLGRKHLKVSRQRKDFAIKTALCAVKSSDFLAYEDLQVRNMVKNHKLAKSISDAAWYQFAQWLQYLGKVYGKTVIAVAPEYTSQDCSACGNTVKKTLSTRTHICSCGAVLDRDHNAARNILAKGLRWTGITLNTVGHTEINAWGQNDLYSLVVTSTSKSTD

SEQ ID NO: 8481 - protein, 383 aa, Actinomadura sp.
VKLVVQVKLLPDDAAEAALRETLKLCNQAACHASRRAFATGVKGKTALQRLVYGEVKAMGLSAQPAIHCIRKAAEAYATLTQNVRAGNYGPVGSRRRIQAEGAPVRFRKDAAQPFDDRSLSWQMDARTVSIWTAQGRLKAIAFACSAEQAQQLAAYRRGESDLVWRGGTFYLYATCDVPQAPEYIPDGFTGVDLGIANIATTSEGTVHSGKHVNQVRHRNRRLRTKLQAKGTKSAKRLLRKLSGREARFAADTNHRISKQIVTEAQRTAHGIALEDLGGIRARVRLRKPQRVTLHSWSFAQLGAFITYKAKRVGVPVVFVDPRHTSQGCSECGHIHKQNRPDQATFQCTSCGFAEHADVNAARNIAARGAAGWAVSHAADDAA

SEQ ID NO: 8482 - protein, 405 aa, unknown
  TnpB Polypeptide
LILTKEQENEAWWFSKVSRNYWNLLVDIDKRNNKGEFDEILSRNGNKTYYSKFYDREVYRLNKSDYLNLAKIVVAKNCEEDSETWFWYYQPNQSFIYNFLAREVVKIRRQNKGRLNFRSIDKLQPNFNVTCCISSNKKRPSRIYLKDNGKLQIPTLGDVRFGSVREGFDLSCKKQVANISFDGKYWYLSYTEDVDTQVETLPDYTDGVGIDLGIKTLATVSDGTIVPNIKTFRRVRILEKRLKRLQRKVSRKYLINKCNKHNKTKNIIKLERQIKLIHRSIRNIRINHIRKFVSELVKKQPQYIAIEDLNVKGMMKNRYRAKDIANCSFYTIREHLIRKAKERHIAVRIVDRFYPSSKTCSNCGSYKKNLTLNNRVYCCDNCQDRLDRDFNASLNIARTDRYVLA

SEQ ID NO: 8483 - protein, 371 aa, unknown
  TnpB Polypeptide
MTIRQKSYKFRLYPNQEQKQLFAKTFGCSRAIWNMMLADKIKHYEETTETLYNTPAQYKKEFPWLKEVDSLALANVQLNLERAYKNFFSSGFGFPKFKKKSHRQSYKTNFKKGAVVLLDGKIKLPKVGRVKLKMHRQIEGVIKSATISMTTTGKYYISILCEAEITPLPKTDSSVGIDLGISDFAILSTGEKIGNMRFFNQLSKKLAKEQKILSRRALIAKKDGRKLSDSKNYQKQRIKVAKIHEKIANQRKDFLNKLSTNLIKNHDVVCIEDLSSKNLMKNHKLAKAIGDVSWYEFVRMLEYKANWHEKQVSKISRWYPSSQICSDCGFSSGKKSLSIREWICTNCGSHHDRDINASINILNEGLRLLQK

SEQ ID NO: 8484 - protein, 304 aa, unknown
  TnpB Polypeptide
VSSVPVQQALRHLQTAFANFFAKRALYPAFRRKDGKQSAEYTPSAFRWDGKVLRLAKMEAPLAIRWSRTLPKAAKLTTVTVSKDTTGRYFVSLLCDDVVEGKPEAAGKAGIDLGLTHFAILSSGEKIAAPNTFRKHEAKLARLQRRLAKKQKGSRNRAKAKRKVARLHARITDARKDFLHKLSTRLINENQVIAIESLAVSNMQKNRSLAKSIGDASWSEFVRQLEYKARWYGRTLIGIDRWYPSSKRCSDCGHTVSKLPLSVREWECPACGAIHDRDVNAARNVLAAGLAVSAHGELVSPVCI

SEQ ID NO: 8485 - protein, 373 aa, Streptomyces sp.
MKLVVQVKLLPSPDQATALKATLRSCNQAANTASEVAFANGLKRRNTLQSVVYHRLRADFRLGAQAAVRVVKKVCDAYSALNANLAAGNLGREGSKRRIRALAKPIRFRADAAQPFDDRILSWNLKQRTVSIWTIVGRLKGIKFISSEQALVLLTSRHGESDLVCSDGEFYLMATIEIAEPKPYEPNGFLGVDLGIVNIATTSDGHSMSGRSLNRYRKRQQALRAKLQKKRTKSAKRRLKRMCRRESRHATHTNHRIAKAIVETAERTSRGIALEDLGGIRQRVTAKKNQRSRLHSWAFAQLGKFVEYKARRVGVPVVFVDPRNTSRQCSECGYTHRTNRVNQAKFVCRSCGTVQHADHNGSRNISVRGDAVW

SEQ ID NO: 8486 - protein, 449 aa, Streptomyces sp.
MFDTSPVRANPNESRSRVRDLAVASTVMKLVVQVKLLPSPDQATALKATLRSCNQAANTASEVAFANGLKRRNTLQSVVYHRLRADFRLGAQAAVRVVKKVCDAYSALNANLAAGNLGREGSKRRIRALAKPIRFRADAAQPFDDRILSWNLKQRTVSIWTIVGRLKGIKFISSEQALVLLTSRHGESDLVCSDGEFYLMATIEIAEPKPYEPNGFLGVDLGIVNIATTSDGHSMSGRSLNRYRKRQQALRAKLQKKRTKSAKRRLKRMCRRESRHATHTNHRIAKAIVETAERTSRGIALEDLGGIRQRVTAKKNQRSRLHSWAFAQLGKFVEYKARRVGVPVVFVDPRNTSRQCSECGYTHRTNRVNQAKFVCRSCGTVQHADHNGSRNISVRGDAVWQRGAVNRPSTATDHRTGRRGPTPQPAALHLQSTPGKHRVTSSVCSGTRS

SEQ ID NO: 8487 - protein, 412 aa, unknown
  TnpB Polypeptide
LYIILFQLLVLLEYCSYLCIMKRAYKYRLYPNKMQQELLRQTFGCCRFVYNATLDAKIKAYETDKTSLSEFDCIRLITGLKKTNEWLHDVPSVCLPQAISDMYGAYRMFFKTKQGFPKFKSKHRSKLSCRFPVPFCSVDQETRHVKLSKIGLVRYKQDRLFKGQLRNVTVSCDGCDRYWVSCLVETGIPEPKPAPITSQSKCVGLDLGLKDFIVTSDGHKIPNPHFADVIDRRIARLQKIESRRQKGSRRRAEIRLKINKLYAKKRNLIHNFIHHTVNDILGENQAVFIEDLNVKGMMGNHRLAKSIQSVCWSEFVRVLEYKARWLGRTVFKVARFFPSSKTCGSCGFKNDGLTLKDRSWTCPVCGAVHDRDLNAAVNILREGLSKILPSVGRFEGRGDGGYDVGETPICII

SEQ ID NO: 8488 - protein, 336 aa, unknown
  TnpB Polypeptide
MIKRAYKYRFYPQNDLKVILAKTFGCVRFVYNQTLDFSEKHYADKLVLESQGLEYKHLTSSDRVNFVKSLKDSIEDNPDNVNFGKLKYPWLNEVSSIALQQAARHLNDAYSRFFKGQSGKPQFKSKHHNHHSFTITGKNSLHFDKDFAKNNIFYLPKYDKPLNVKWGKKKSKRHFNHLAVSSVTVSQNPSGQYFISFLVEEEITSMKPINDKLSFDLGLKTMAKAYDGKNFTDFNLPDLLKAIDKKLRKAQRVLSKKTKGSKNRDKQRLNVARLHQKRVNIITDYYHKKSTIMVNENQEIVLEDLNISGMKRNRKLSRAIHNVAWKKFIEMILYTI

SEQ ID NO: 8489 - protein, 394 aa, unknown
  TnpB Polypeptide
MEFSRMYQYRLYPSGKQQIRLLNQFKLCKETYNTLLDQSQKLYTTNKYDFNSLLLDIKICSPKIADVHSQVLQNVSDRLHKAFDNFFNRLKMRKKGIKVKAGFPRFKSKIQSITYPQSGFKFLSNKRLQVSKIGSLPIILHRIPQGKVKTMTIKRNKAGQWFAIFSCDVDIPEVKHPSTAKIGIDVGLETFLTDNKGKSIVNPRFYVHAEKKLARLQRIHSKRVKGSKNREKSRIKVSRQHLKVANQRTDFLHKLSYSLTKDYAIIYGERLNIQNMIQSNLAKHILDVSWGRFYQMLSYKAITSGGELRKNPKTRGSSHRCSNCGFYVEDIPLSKRTFKCPQCGFVGHRDKNSANNHMIGTDCAESITPVETLPLPLRFAKASRVVESGTINDC

SEQ ID NO: 8490 - protein, 478 aa, Streptomyces sp.
MPQPGFVVQAYRYALDPSATTRQMMFSHCGAARASFNWAVTWVEASWWQRRAEESYGVPEDGLTHWRPWSLPALRKVFNEAKKIDPRFAGWWEENSKEAYSTGLANAAAAFDNYAKSKQGKRKGKRVGMPRRKSKHRARLACRFTTGTIRVEADRRHVTLPRLGTIRTHESTRKLERRVSNGTARILSATIRYERGRWFVSFQVEVKRELERVARPQVAVGVDLGVKVLAVMADSLGEIRCIPNPAHYDTALKTLGRMSRRVCRRQGPDRRTGQKPSKRWLKANTERNRVHHRVAHLRADALHKLTTTITSEYGTVVVEDLNVAGMLRNRRLARKIADAGFGEIRRQITYKTKRNGCRTVVASRWYPSSKTCSDCGAVKAKLPLHVRVFDCDSCPLVMDRDENAARNLAALAAACMTGTGVAGDQDARAPKPRGADRKTRVTRPSRKAEAGRAGGTRLPHQQQKETRDRTQTKALTLW

SEQ ID NO: 8491 - protein, 438 aa, Escherichia sp.
MSVSGDKDQVNMHQENTMLPRRISVSLFIDQSIIWPVKRLQAFKFQLRPGGQQEREMRRFAGACRFVFNRALALQNENHEAGNKYIPYGKMASWLVEWKNATETQWLKDSPSQPLQQSLKGLERAYKNFFQKRAAFPRFKKRGQNDAFRYPQGVKLDQENSRIFLPKLGWMRYRNSRQVTGVVKNVTVSQSCGKWYISIQTESEVSTPVHPSASMVGLDAGVAKLATLSDGTVFEPVNSFQKNQKTPARLQRQLSRRVKFSNNWQKQKRKIQRLHSCIANIRRDYLHKVTTTVSKNHAMIVIEDLKVSNMSKSAAGTVSQPGRNVRAKSGLNRSILDQGWYEMRRQLEYKQLWRGGQVLAVPPAYTSQRCAYCGHTAKENRLSQSKFRCQVCGYTANADVNGARNILAAGHAVLACGEMVQSGRSLKQEPTEMIQATA

SEQ ID NO: 8492 - protein, 221 aa, unknown
  TnpB Polypeptide
VIYSYKYHVVFCPKYRRPVLVDGVVDACSNDNVMGVDLGIKCPAVSYCPDGSVKFYGNGRKNKYIRRHYNNLRKRIQKAKKPKAVVKINNKEQRIMKDIDHKISREIVNTAKAHDISVIKLERLQNIRSATRTSRKNNHSLHTWSFYRLATFIEYKAKLAGIEVEYVDPAYTSQICPICGSVHHANDRKYTCRCGYHTHRDLLGAINIYNSTEYIGNRYTA

SEQ ID NO: 8493 - protein, 231 aa, unknown
  TnpB Polypeptide
VILYSKKVTGKGDRYYVSVLVEIPDVKIANNSNGGIGIDLGLKDLAIVSNGKTYKNINKSTRIKKLEKKLRREQRCLSRKYENLKKGESTQKNIQKQKLKVQRLHHKIDNIRTDYINKSIAEIVKTKPSYITIENLNVSGMMKNRHLSKAVASQKFYEFRTKLKAKCDENGIELRVVDRWYPSSKICHCCGAIKKDLKLSDRIYHCDCGYVEDRDFNAALNLKDALTYEVA

SEQ ID NO: 8494 - protein, 254 aa, unknown
  TnpB Polypeptide
MRIFLHISATAKLPVTGNEDISNIVGLDRGIVNIVAAADQSGLTARYSGDDARNIRAGYNRTRASLQKKGTRGAKRVLKKLSGRENGYMNDVNHCLTKALCENYPEDTLFVLEDLTGVSFEERNFHSKEQTNELRSWAFYDFGEKLKYKATLRGQQVIEVDAYKTSQRCPHCGRYDKAARHRDTHEYICPECGHIENDDEIGALNLMFLGAEYLKGDKNPSFTKMEPKSKKRSTNAAKKNAEDTIAENAFVLIR

SEQ ID NO: 8495 - protein, 411 aa, Bacillales sp.
MYSYKVMIHPNNKQETKIRHTLNKCIECNNIVYDYLDSFIKNNEKIPSCGDVRKWFTIQKGILDNEAINKRKNMTKKEMISNHLDTLFYDVSNDALKQEIKDTYNSFIRYFNKLSKYPVRKKYNNYKKSFYVDPYKIEFSDKKVRLEKIANNIKKNRQKLNYIKLAEKDRIPTNVIYYNPRVILDGDRFYIVVSVADEFSPKKKIETTDNIIGIDINIKSVVTSDNDVYKAITYDKSYKKALKKEKREQKKLARKYIKAKELKKSLKESKNYKKQREIKNKYTRRINNLKESHIDYIITSIKNKRPKLICIEDLDINGMKEPKENKYIRKGIQQNPFRKLLKTLEDRCNNYGIKITKIDRYYPSSKTCNKCNYKKEDLKLSDRTFVCSKCGLIINRDYNAAINIKKYALEH

SEQ ID NO: 8496 - protein, 417 aa, Micromonospora sp.
MSSVQLRYNFRVYPTPGQQIELAKAFGCARVVFNDGLRARQEAREQGLPYVSDGDLSKQVITQAKLTPEREWLGEVSAVVLQQALADLNVAYRNFFASVTGKRKGRRVAPPKFRSRKDNRQAIRFTANARFKVLDNGRLRLPKIGDLDVRWSRGLPSDPSSVTIVKDAAGRHFASFVVTTTDEALPELDSEVGIDLGLTHFAVLSDGTKVTAPKFLRRAARKLKRLQQDLTRKQRGSNNRKKAVVKVARAHARVADTRRDWQHKLSTRIIRENQAVYVEDLCVVGLGRTRLAKSVHDAGWSSFVGMLEYKAARWGRTLGKIDRFAPTSQTCSVCGRIDGPKPLSVRSWACLCGAVHDRDVNAAINVLAQGRWDNSNACGTRVRPALVPAPRPTSRREAGIRPDAACSTRSVEGISAL

SEQ ID NO: 8497 - protein, 248 aa, unknown
  TnpB Polypeptide
MGFRIVGNCLKVTPFGEMKLKLHRPVKGKVKTLVLKRESSGKWFVIFTSEEESVEFFSNYGVKVGIDLGLSKLAVVSDGSVIANPRPIKKHEEKIALLGRGLSKKKKGSHNRVKAKVKLAGAYEKLANSRLDFLHKTSRNLVNKYSLISLENLNIKGMVQERFGKSINDAGWGLFASMLCYKAENAGCRVVFVNPEGATQQCSKCGIIVPKTLADRVHNCPSCGLVLDRDLNAAYNILKRGAGRAYGN

SEQ ID NO: 8498 - protein, 198 aa, Acinetobacter sp.
LGHSLKKSGLRQTRYGSLKAPQIYRQYEQKLGIAQRAKNKKRVKAIHAKIKNVRQNMLHQFSRKLVNEHAAIFVGNVNAKALAQTRLAKSVLDASWTTLRTMLKYKCENAGVCYEEVNEAYTTQICSCCGSRSSSLKGRAGLGIREWQCVECGTLHDRDVNSALNILALGHERLAVGISFRSGRMSISPFEYLIKKIA

SEQ ID NO: 8499 - protein, 418 aa, Mycobacterium sp.
VKQVVRVRLEADAAQLDVLVRTLAACNDTANLVSRVAHGEKVFRGRDLRAISYAQAREHAGLGAQAAQSCIRKVADSYTTLRANLRAGRYGKPGSNRRRKVEAGPIRFRELAAQPFDDRCLSWCHDTDTATGGVVSIWTVDGRLKNLRFTGESGQVALLRQYRCGETDLVIRRQRRGPQTLVAYLIATVDIPDTPVRTGAHLDTAAGWIGVDLGIENIAVTSDRILAAELMGTYGAGAPEGPAGRGSVKDRRTRNRELRQKLQAKNTKSAKRLLRRRSRREARFAADVNHQISKRIVAEAERTGRGIAVEELTGIRERVRLRKPQRATHSSWAFAQLGAFLTYKAARAGIPMIAVDPAYTSQRCTNCGHIDKRNRTSQARFVCQDCGYTAEHADILGADNIAHRAPTTWAQLTAPSAA

SEQ ID NO: 8500 - protein, 336 aa, Gloeocapsopsis sp.
MWGKHLSSKLQAHIAKLRKRHSCWQLVGSQAVQDICQRIEKAYQLFFKHHHKGVKPPGFKKLKKYKSFTLKQAGYKFLGGNRVKIGNKIYQFWKSRQIQGTVKTLTIKRTLLGELFMVIVVDDVVEPEAKFTTGKIAGFDFGLKTFLTCFDGTKTETIESPELFKQLLNSIVKASKQLSSKLKDSANRERARKNLVRRHEDIANRRRDWFWKLADELTNRFDVLCFETLNLKGMQRLWGRKVSDLAFGEFLQILEWVAKKKSKKIVFVDQWYPSSKTCSTCGQILEKLDLSIRQWRCPSCQSINGRDENASKNLQMVGASIIGLGDVRQAQLAIAV

SEQ ID NO: 8501 - protein, 451 aa, Thiotrichaceae sp.
MKKAKKVTRIAYSDDLNQAKYDALNEIAIICGSVRTEVWRNYGSVGGLGAKFRPVRDGWIADEHIKNLPQRIWRATLSDTLDDIKANREAAKEFVLRHIFRNIDESIQRRELLKKLKNDSVWVNDSYLRRLMRQYWKHGKNHTFNQIVLEPGSYKCFSHNGKNYIKVISLIRCQRIAIPIRTNYSITGQIRLILRDGKVEIHYTILNYDDRVCGEKEIGIDKGYTEAFVDSEGDFYGKGLGSVLSKESDYLKTKYQNRNKIKAVLEKVKTKNPKKAKKILKHNLGRKKLNRRKHKHTAAVKTIVFTAVNEVFDKAKTLVCEDLTKTFKSKSYGKNANRRLSGWVKGLMASAIDIVASRRGSRVVQVNAAYTSQMCSQCGCIGKRVGNTFHCAEGCGAVMQADLNAAVNVKARLDDKELARWLPFSKVKQILLERCRRSDETAHPELQLPLI

SEQ ID NO: 8502 - protein, 380 aa, unknown
  TnpB Polypeptide
MKRTIALKLILTQDQADALLETQKVFSEACNKIVPFSVEHRCWNQVALHQLGYYSVRESLPMLGSQMVCNAIKKVCSSYKVLKIKKSDSVQVIRFKESTSVHYDKRTYTLKDKHLSLFTVSGRIRCSFTTGPHQDQYLSQGTIKEGELIRKGKRWFFNLVLDIPDVKAVESGKILAVDMGENNLATTSNGVIYGGGELRHKRDRFLARRKKLQSNGSKSAKKCLKRISGKERRHVKETNHIISKAIIEDGVKAGVGIIVLEDLTNIRKRIKGNKRLRSRLHRWSWYELQQFTEYKAKAKGIEVIYVNPAYTSQLCSKCDSFGSRHKHQFKCSNCGSYQHSDCNAAINLLKLGESVVSSRASVNVPMVTTAFRPLVTSFRL

SEQ ID NO: 8503 - protein, 465 aa, Bacillus sp.
MNTPSRKEGSGMKQAKTLRYKITNHSRLFDTTVEIYNQALRFLIDVIDREFPNFDGISTKSMVTLVEKFIHRTSQNPQPKYPEFNHAFYKFPSYFRRSAIAMAFGKVKSYRSLLQNWHQEKELAHQEGKTFKKNPPSLTLDHHEFPVFYKGNMFERTGDCTARIKVFYQNDWVWMDIQFKGQDLYKRDVWDWKECNPKLVRVGKKYFLSISYEKEIKLNKTKTKDRIVCSVDLGLTNSAVCSIIDANGTVLARKFIDQAKEKDRLYRLTNKLKKAQRKSGRIGAPNFWRRIRGLQTHIVRDTSHNIVEFAKQHDADVIVFEYLQKMKVPKGFYGARRLRFKLHYWRKTAIQNKVTEMAHYNGIRISRINARNTSALAFDGSGFVSRNQKKDLATFTTGKVYHADLSASYNIGARYFIRELTKPFSEMERLSLQAKVPELAKRTWQTLALLISLHSAYETKALSHS

SEQ ID NO: 8504 - protein, 382 aa, Bacillus sp.
MIKKAYKFRIYPNQKQEILINKTIGCAQFVFNLFLEKWNTSYKEEGKGLSYNKCSSQLPVLKKEFPWLKEVDSTAVQTSLQHLSDSFERFFKKQTKAPRFKSKKNKVQSYTSKHTNGNIAIVGNKLKLPKLGLVTFAKSREIEGRILNATIRRSPSGKYFVSILAEQEVPPKVKTGSVVGVDMGLKDFAILSNGTSYKNPKFFRTMEEKLIKALRILSRRREQAIKNKKPLSEAKNYQKQKREVARLHEQIVNARSDYLQKISTEIIKNHDVVGIEDLQVYPLLKNHKLAKSISEVSWSQFRTMLEYKANWYGKKIVAVSKTFASSQLCSNCGYKHEGVKDLNLRKWVCPECGMEHDRDINAGRNLRNEAIRLLTVGTTGIA

SEQ ID NO: 8505 - protein, 224 aa, Bacillus sp.
MKQEPLRSNIMADEVLALDYSQTDLYMDSEGGKDGYPRYHKIIEKRQRRLNKSLARKRNKALVDSEGRILYSTTYQNMLKNYQKTMAKAKNQRKDFLHKRSNQITNDYAAIVVEDLDLSNLAQCLSLGKKLHDNGFGMFRTMLEYKAKKKGKHLIFADKFFPSTKLCSECNSKKETVKLSERVYVCEHCRTKMDRDYNAARNLKQYGIRKLSDLGFMAGVPVPV

SEQ ID NO: 8506 - protein, 351 aa, unknown
  TnpB Polypeptide
MIVRTIKLKLTSRQEQTLTQWMFHLTGVWNWGIKKIEANAKDKIYFSKQTFQNLLAEHGEKLDIPSHTIQGILIQAHNSWARCFKRLAKKPHLKGVRNRLNSIPFPDPIKPPKEGKISIPGLGKVRFHKQELPEAKIKCGRIVRRASGWYLCLWIDTDHKFPVRQTDASVGIDPGFHTLLTLSDGTKIENPRELRTGAKRLAQAQRGSKKHLAARLQERQANRRSDRNHKITRKLVENYQTICYSDDNFKSMARHFGKSVSEASLGQLIGMLTYKSRTGGRELIPVNSFHTTMTCSSCGALTGPTGFSGLAVRRWVCSVCGTDHDRDVNSAVVVLNAGVGTTHERGLRHVA

SEQ ID NO: 8507 - protein, 361 aa, Desulfobacteraceae sp.
MDITVRKSSKYRIYPTKSQITNMENQFSMCRHLYNWSLAERKESYDYDRSSISYNQQQNQLPLLKKERPWYKGVYSQVLQDVLKRLDKGYKAFFRRVKTGDNPGFPKFKKHGQWNSLTYPQYSKSPGSNIQVPKVGTVKLVYHRAIPDNAKIKTLTITKDGGKWFACFSFELLLEIEPKQNVLPSIGIDLGLKDFLYTSDGASVPVPKYLRAKEKQLKRLQRRLSKAAKRSKKYYKILLAIQKCHYRIRCRRSDFLHKTANNLLATSDAVFHEDLNIKNMIRKPEPKQNEDGTYIQNGASAKAGLNKSIADAGWGQFLSILTYKAVETGKILLAVPPHYTSQICSACGNMVKKSLSVRTHR

SEQ ID NO: 8508 - protein, 370 aa, unknown
  TnpB Polypeptide
MKKTFEYKLYRCRQTKYLAAHIVLAAEIYNHCIALHRRYYKLTGKYISANRMKIHLTKLKKQRKYAHWNKLNSQAIQDIAERIDRSYSAFFEHRKAKRRGKKSKPRFCKRSRYKSFTLKQTGYKFLEDNRVSIMGRTYKYSKHRDLEGIIKTVTVKRNALGEYFIYVVCDVEVSEILPRMGKATGYDFGVKCFMTDNDGRKIQAPEFYKHSLGELQKKQRALSHKKDGSKNRKRARLDLERTHRKVANQRKDWLNKLALELASGNATICIEDLNIRAWQRMWGRKVSDYGISACIRSLENACAKTGSTLVKIGRWEPSSKTCHDCGAVYHELRLKDREWTCPYCGKFHDRDINAAKNILDMGLARLLKEA

SEQ ID NO: 8509 - protein, 378 aa, unknown
  TnpB Polypeptide
MLRAIKIRLYPNKTQTEQFNKLLGCYRFVYNQCLARKIKSYNENKISENLSTLGKFIHHELLKDDNYIWLREQNTRVLKQALIDMLRAYKNFYTLHTGYPKFKSKKDNKLSCRFEIGTISRKNDYTTYHLSLANIKNIKFKCSKKYAEYLQKHKLNIKHATLTKLPCNEYYLSILVDGNLMHKEIKYTDNAIGIDLGIKDFVITSEGEVFNNLHFTKSKLNKIKRLHRQLSRKVKGSNNRNKIKIKLAKLYKNITDKKQYYLHYISNTLINENQIICMEDLNVKGMLKNHKLALSIQEMNFGEFRRILEYKSRWYNRQLVFVDRFYPSSKTCNHCGYINKTLKLSDRQWICPNCGNIIERDYNAALNILNEGLRILKG

SEQ ID NO: 8510 - protein, 398 aa, unknown
  TnpB Polypeptide
MLIAHKIALDPNNAQASYLTHACGVARFAYNWALAEWKRQYDAWKADNSLPKPSQAALRRQLNAIKREQFPWMLEVTKCAPQMAIIQLGQAFQNFFAGRARYPQFRKKGVHDRFTLTNDQFDIDGCRIRIPNLGWVRMRETLRFTGKILSATISRVADRWFVSIVVDTEDLSHLPKTENQGAVGVDLGVSSLATLSTGESIPGPKPHKALLGRLRRLSRSLSRKAKGSANRRKAKAKLAKLHARIANIRSDALHKLTSDLTRRFHTIGIENLSVRGMVRNRHLARSIADMGFFEFRRQLEYKAAMRGGQIVVADRFYASSKTCSACGKKLDELPLSVREWACPSCGVVHDRDVNAAINLKNMAVSSTVSACGEAGSGSGRKARVKPASMKQEVSFGPV

SEQ ID NO: 8511 - protein, 419 aa, Cyanobacteria sp.
MILNYTYRIYPNNQQAQLLDEWLETLRLSYNHALRELKDWIASRKCPIDRCSLESEYIMSADYPFPSYHQQQNNLPKAKKDFPRLKSVPSQVLQTNIRRLHDAWDFFRHRGYGFPRFKKMGQMKSFLFPQFRTNPITGWHIQLPKLGKVEVNLHRPIPDGFTIRQIRIVKKAKGWFAIITLYADVEIPSPSPRGRAIGVDVGLLSYLATSDGFIEPGRKFFKTEQSRLKVLQRRLAKKQKRSKNYEKARQKVEKQHNHIAFKRKDYQFKLAHKLCDMADTIFLEDIDFRTMAKGFLGKHSLDAGFGQFRTILNFVGGKRDVFVGEVDHRGTSQTCPNCRITVKKKLSDRKHSCPECLYEVDRDVASAQEICNRGIETYRGTPEKQEIGSQVEVSGAMCLDNWRRGAMLIREDEKPALYR

SEQ ID NO: 8512 - protein, 363 aa, Exiguobacterium sp.
MLKGYKYRLYPTAAQADFLVRTIGCARFVYNKLLEDRIKIREETKAGTGQKRKPPTPASYKPLFPFLCEADSLALANAKLHLDTAFTKFFAGTAGFPVFKSRRKARASYTTNNQHGTIRIEGGHVRLPKVGFIRFTQHRIFDGEIRSATVSMTKTGKFFVSLLVEQDDEPWVPAEHKIGIDLGLGHFAVMTNDALVTEKIPNPRNLREAEARLKRAQRALSRKKPGSRNREKARLLLAKKHEQVKNRRHDFLHKLSRRIVDENQVVVVETLKPREMMQDRRLAKSIGDAGWGEFVRQLEYKARFYGRTLIQADPWFASTQVCSACGENGGRKELDVREWTCAACGALHDRDVNASLNLLRLAD

SEQ ID NO: 8513 - protein, 209 aa, Serratia sp.
MKRAYKYRFYPNTGSEIEFLAHTFGCVRFVYNSVLRWRTDAYRERQEKIGYIQANARLTALKKEPEFTWLNDVSCVPLQQTLRHQQTAFSNFFAGRARYPTFKSKHHKQSAEFTASAFKYRNGTLYMAKSTTPLHVRWSRELPSTPSTVTISKDASGRYFVSCLCEFEPKSLPVTAKMTGIDMGLKDLFVTDSGFKTGIPATRRSTRNV

SEQ ID NO: 8514 - protein, 166 aa, Serratia sp.
LLQRRLSKKQKGSRNRAKARLKVAKLHAKIADCRMDSLHKLSRKLINENQVVCVESLKVKNMLRNPKLSKAISDAGWGEFVRQLQYKAKGSGRSVVTIDQFFPSSKRCSCCGFTMEKMPLDVRHWHCPECGAEHDRDINAARNIKAAGLAVLAHGEPVNPESQHAA

SEQ ID NO: 8515 - protein, 402 aa, Escherichia sp.
VKRLQAFKFQLRPGGQQEREMRRFAGACRFVFNRALALQNENHEAGNKYIPYGKMASWLVEWKNATETQWLKDAPSQPLQQSLKDLERAYKNFFQKRAAFPRFKKRGQNDAFRYPQGVKLDQENSRIFLPKLGWMRYRNSRQVTGVVKNVTVSQSCGKWYISIQTENEVSTPVHSSASMVGLDAGVAKLATLSDGTVFGPVNSFQKNQKTLARLQRQLSRKVKFSNNWQKQKRKIQRLHSCIANIRRDYLHKVTTTVSKNHAMIVIEDLKVSNMSKSAAGTVSQPGRNVRAKSGLNRSILDQGWYEMRRQLEYKQLWRGGQVLAVPPAYTSQRCACCGHTAKENRLSQSKFRCQACGYTANADVNGARNILAAGHAVLACGEMVQSGRSLKQEPTEMIQATA

SEQ ID NO: 8516 - protein, 377 aa, Bacillus sp.
MMINKAYKFRIYPNKEQETLIAKTIGCCRFVFNRFLEKWNDAYKETGQGLTYNTCSAELTQLKKELVWLKEVDSISLQSSLKNLADAFSRFFNKQNHAPCFKSKKNNVQSYTTKHTNENIAIVGNKIKLPKLDLVRFAKSREVDGRILNATVRRNPSGKYFVSILAEVEVQPLEKTESSIGIDLGITDFAIFSDGRKIDNNKFTSKMGKKLKREQRKLSRRTLMAKKNGFNLLDAKNYQKQKRKIARLHERVMNQRDDFLNKLSTEIIKNHDIICIENLNTKGMLRNHKLARSISDVSWSAFVTKLEYKATWYGKTIIKVSKWFPSSQICSDCGHQSGKKPLEIRSWTCPICHEHHDRDINASKNILAEGLRTLALA

SEQ ID NO: 8517 - protein, 364 aa, unknown
  TnpB Polypeptide
MRQEFVKNKHVLNAYDIQKLMQNMDCYKECGSQAAQKTIQMLDKMWKSFLVSIKDYHKNPTKYLGKPKIPKYLKKDGRQIFSLKNIQCSLNDGLFRISFKPFKGYTVRTHANGKLIQCRFVPKGLYYVMEIVYEIEVPDVSETSDRVAAIDIGVDNFITMVNNIGENPIAVKGGVIKSINQFYNKQKANIQSKLKKVNGKDWSKKLQKLTDKRYEMIKYQMHCISKYVVDWCVLYGIDTLIVGHNDEWKQKKQGMQNFTYIPYELFIQMLAYKCENNGIKFVENEEAYTSGTSFLDNEDPIKENYNKERRVHRGLFIADCGKKINADVNGAYQILKKVIPDAFSKGIEGAGSHPTIINLAMLRA

SEQ ID NO: 8518 - protein, 364 aa, unknown
  TnpB Polypeptide
VKLENAVQSLRSNEKSSLTYEQLSRSIPLSVLHSQTSQSFREIPLIRTLRFKLMRSKKNRKLHCEIEQFSRVYNHFITVIERYYRLFKKHPSASRLKMLLPKLKRTRRLSWLKTMPSQALQDVVERIDRAYKRFFEERKKGRRCGKPHFKQPENYKSFTLKQAGWELVGEHSLRIGDFVFKFHKSREIPSDKVKTVTVKRDRLGDIYVFFVVKSTEFVPKRCATGQSVGIDFGFDQFLTLSDGTSVDAPMFFKQDLRHIKQLSRSMSRKVHDSKSWNATRLDLNRAYRAIQHKRDDWHWRLAHELCQKYDLICFETLNFKFFQWVCPECGEHHERDFNAAKNIHDEGGRALVGLTKFKNFEIIS

SEQ ID NO: 8519 - protein, 556 aa, unknown
  TnpB Polypeptide
MVLSIASSKNFSEEKAHKFYITLECMLEFEKEEEKEKVLALMRRFSSATRYAYKRLLEGVAEKDIEKAIQEKHKLNARYVKNAVLIAKQVLKSCIRRGQNPKKLVFGSRELFEKLKKKHLTGKRREKLRQRWEERRYYYLYSRGEKSKNGNLNLRFVNMNNQWSLRINLGNGEYVWAEVVRNAKRHKDKWIDFTWRLLEAEKSGEWFAYNVRLKVRNGKFYAQVSWEEKTVQPVITKAYGVMGIDINAYPFHLALAYVSTDGNLEKFERIDLREMEGKTKNQREHIAWHIARQVVERALENGKAIVVEDLQKVPKGRRGDGLAKLRRKLHKWAYRSVLEKIEVYARRLGIQLIKVNPAYTSIIGKLKYSPMLGIDKDVAGAYVIARRGLGFEEKLPKNYRELLKDKEFLAYAIAKVDEQINKLKSELKKETNEYKKNALRERVKRLRKYLELLLSYTRDSGKSEPATQEPVTPTPATPRKMERVRGPTHVRQKSWRVLSVALAVLLATPCLEWCRDHSPLKRVLISGDWARVAGKGSPSLPGQGTAASNCSFIHFG

SEQ ID NO: 8520 - protein, 459 aa, unknown
  TnpB Polypeptide
MNITGLKRKINDKNWNDKGVKDRVLKYIIQATPELVEWFRKSICPCRIELNRQLYKELKGGVELLGKERDMITDEWKVILEKYGFTLNNHWRAFAYQVVTPYKAYEPRHGNKDSKLPPRPVNLKEFGAFRCDDGSGLFKDMTPEPDVRRGKIRITLSGKNGGKKTTTEPYYIPKCSAKDKQYVTASFSGNFKPILKDGEITQFEYGARAMIEFDWAYEPKKILSFDVGKRDDVYLAMNVNNELWGRTPELQDLVTQLRNINKDIDNKDKGDEQNHEKRRDSRYYWQDLQDKLKEVVKTQYISKIIKFALKHKCLICIDNVTTGSSNGEYGQIIARALKYECEQKAIPFIMVPTYHTSSRCYECGHVHESTVKAKKLWRPEIDQFVCQECGYEGHSDLNAAKNIALFGWNIWLYEENKRTDKDTGEILDVGLAYRRRNNCLNAIPATMLQYTTLDIVSEA

SEQ ID NO: 8521 - protein, 449 aa, unknown
  TnpB Polypeptide
MRETQEWRVARDMPKGKARTKAFSAVHKAFGLTEFGLTIIANNHRKASGRKDIGAHEAQSIGKAVRRALQRHMFRKAGRPRFKSFRRGLNSIEGTNNQEIMYKPERGAIVWRKHVMTYMKPDTGYMKEALASDRRVKYCRIVRRTLKGVRRWFVQLVVEGLPPVRKVYASKCEVVGIDPGSSRIAYFHERHAAIVEVAPHVDLKEPKIRLLQRRIDRSRRANNPDGTVKKGSSTWNTSNRGRRTAAKLAEHHRCLAATRKRDHGELVNDLLQIGGTIKIEKNNYRSFQRCFGRSTNRRGMGKFVEHLKRKAESAGCEVIELNAYKLKMSQYDPQTDAYRKKPLKERWHRWGNTGTLVQRDAMSAFLACHATEKGHDRALLLEKWTTAEALLSGSGLCRHEPCSDPEVSKDASGLTKPNCGSKAERERGLPRTLCTDGDVQAALPPERAV

SEQ ID NO: 8522 - protein, 374 aa, unknown
  TnpB Polypeptide
MLNTLTYAVRVETTPDQSKTLSDTCSAYLDCCNMVSKTAWEHRTLSQKTLRRLIYRRLRDEYHVSAQIAQSSIIRVIGNYRTIKTMHGSPWATSQPKYHSPGYDLIWNRDYSILKDGQLSISTINGRIKTTVDWTHMPQPYRNGKFGTARLLNRDGKWFLIIPSTVELPEPSRPQQVVGVDLGIRFLATSYDGDGHTDFYDGKEVKSKREHYKRLRASLQKRGTRSARRRLKNIGKRENRWMRDVNHQVSKALVSRQSKPTLFALEKLEGVRHATEKVRTRDRYVQVSWAFYQLRQMIEYKAKKAGHSIIMVDPRHTSQTCPKCGTVRKANRDKRLHEYQCSNCGYRSNDDRVAAMNIQRLGYQSLVESQSDKV

SEQ ID NO: 8523 - protein, 396 aa, unknown
  TnpB Polypeptide
VKRTNSFNIKWDNPEEIRDLAKGCAVLWNKLNYKRRQSFFDEEEEFGWSSDEFYDDFKGWVGSTTAQQIIRNNNSAWKSYFSLLKKYKNNGDDMERPSPPGYWKDRKKDELELKIIVRNDSYTIEDGTVKLPFGRTGEVVGKPHWEGKQGALWIYYDRLDECWRARQPVEVEPRHQPSGDKTAFVDLGVIYPITAKIEGVDKTIAYNGRPLLSKWWLYNKRIDKAKSKLKEENGKYTSERLKRLFRQRKRTFKDKIRKIAHDFIERCYQADVDTIVMGDLTGIRENKEKWNKKADSMVHNYWSHKYLIDRIRWTAENYGMDIELIDERGTSSRCPRCGSEEKVRRGRLYKCKNCGLEAHRDAVGALNISFVYQGRTNEPTDRGSINRVMAHPEVVS

SEQ ID NO: 8524 - protein, 249 aa, unknown
  TnpB Polypeptide
VVSSARKWQKYTPECAGTTISLPTEKTEWQAGNTQNHREIRKWTAQIAVTVEDKESTDAGVLGVDLGLKCPAVTVTETGKTRFFGNGRENKYMKRKFRNKRKKLGKAKTIQAIRKLSNKEQRWMKDKDHKTSRQIIDFAVQESIGTIRLEELSGIHQTARTSRKNEKNLHTWSFYRLAQYIEYKASLSGIKVEYVDPKYTSQTCPECKERNKAEDRKYRCSCGFRTHRDRVGAMNIIKAPVVDGNSLPA

SEQ ID NO: 8525 - protein, 224 aa, Verrucomicrobium sp.
VEHPQDAVGVDLGVTTLATLSRGEPIPGPKAHAQLLKRLRRENRRLSTKQKGSANRRKARKRIARIHQRITNIRRDATHKATTMLTQTYRRIGIEDLNVCSMARNRHLARSIMDGAFFEFRRQLAYKARFYGSTVIVADRWYPSSKTCSCCGSVKAELALSQRTYHCDACGHEVDRDLNAARNLEILAASSAVSACGEERSGARRRPRVKRASTKQEPNSTIAA

SEQ ID NO: 8526 - protein, 536 aa, unknown
  TnpB Polypeptide
MVLGKRNVRSSTQSSSGGKRFTATYHTRVREYAGTDLEAGDAALSAYGELYGRVQRKLFAAVLAGRSATSLKSEYLKRYGIPARKFNGVRVSLEGKVASVKEQQKLRLDSLGRRIARAERQVSDAVEHGRLDQVHQKKRRLASLRHRLAALEDDIAEERVRLCFGSKRLWRKQHHLKVNGYGSHEEWLRDWREVRSDEFFVLGSRDETAGCQLCVATVADDGTLTLRLRMPDCLPVQHGKYLTIEGVRFTHGHEQMLAALGNNAEYARHRREHGEQAVRETELGQAISYRFKRDERGWRVFATTHMMDVPVVTDHRRGAIGVDLNADHLAVAETDASGNPLHSFSVPLVTYGKSQHQAEAIVGDAVATVAAYAREAGKPIVIERLDFRQKKAALEGESRKYSRMLSSFSYGKTKACFLSRGYRQGVEVQQVSPAFSSVIGRVKFMERYGLSVHQAAALVLARRLLGCSERIPRRWVCPTGNGVQVAFTVPARKRVKHVWTYWGAISGQLRPALAAQHRPGKRRRRPNPVQATHVVA

SEQ ID NO: 8527 - protein, 565 aa, unknown
  TnpB Polypeptide
MVVDGPIRRYGLEVSEPAFWYPIAMVLGKRNGRSPTRSDIVGKRLTATYQTRVREYSGVDREAGDAALSAYAELYGRVERKLFADVAAGRSAGSLKSECLQRYGIPARMFNAVRVSLEGKVASVKEQQKPQLDSLCRRIARAERQIAGAAEHGRWDQVHQKRHRLANLQSRLAALETDTEEARVRLCFGSKRLWRKQHNLETNGYASHQEWLKDWREARSDEFFVLGSRDETGGCQLCVASVADDGTMTLRLRMPDCLATQHGKYLAIEGVRFAYGHEQVLAALDSNAEYRRYRGEHGDKAARATTLSQAISYRFKRDRKGWRVFVSTQMMDVPVVTDQRHGAIGVDLNVDHLAVCETDSSGNYINAFSVPLVTYGKSQHQAEAIIGDAVASVVEHAREVGKPIVIEKLDFRRKKATLEGESHRYSRMLSSFSYGKIKAYFLSRGNRQGVEVHQVSPAYSSVIGRVKFMERYGLSVHQAAALVLARRLLGCSERIPRRWVCPVGNDVQVAFTVPARKRVKHVWTHWGAISGQLRPALAAQHRLGKRRRRPNPVQAVARGETRGVA

SEQ ID NO: 8528 - protein, 206 aa, unknown
  TnpB Polypeptide
LKKEPLTDTILGIDLGIKDLAICSDGTVYKNINKTDTVRKTEKRLRRLQRRVSRKYEMNKQVRSFVKTCNIIKMEKRLKLLNRRLTNIRNNYIHQTTTSIVRTKPCVIVMENLNVSGMMKNRHLAKAIQEQKLYEFKRQIIYKCEKFGIKFIEADRFYPSSKQCSQCGHLKRDLKLSNRTYHCDCGLHIDRDLNAAINLAQYGTLA

SEQ ID NO: 8529 - protein, 398 aa, Streptomyces sp.
MAIRVKRAFKYRFYPTDAQAAELSRTFGCVRKVYNLALAARTEAWTLRAERINYNATSAMLTAWKKTEELAYLNEVSSVPLQQALRHLQVAFTNFFGKRAKYPRFKSRKKSRRSAEYTTSAFRFSDGRLTLAKMMEPLDIVWSRPLPGGAQPSTVTVSQDAAGRWYVSLLVEDPGVQPLPGNGSAVGVDAGLDHLLTLSTGEKIANPRHERRDRTRLAKAQRELSRKAKGSANRAKARRKVARVHARITDRRRDHLHKLTTRLVRENQTIVIEDLTVRNLLKNGRLARAISDAAWSEFRSLLEYKAQWYGREVIAVDRWFPSSKLCSNCGRLQDKMPLSVRTWTCEGCGVTHDRDVNAAHNLLAAGLAVSACGAGVRPQRSTPGGQSATKQETPRREP

SEQ ID NO: 8530 - protein, 418 aa, Halobellus sp.
MEVRRTVPVALDVDSDDAALLEDTVDMFLWCAQYVVDHAFQGEYVTTSKTTLDDETYDDVREATGGFNGGLVQAARNKGAEACKSVVERWKNGKKASKPTFTSPHVVYDHRTVTFHDDYVSLATTDGRIEADYILPDKDSDTPHSQYLFSNEYETTGAELHYHDGDWVLHVHCKKEVEFDTSEQATTENGTVLGVDLGVNNLAVASTGTFWTGDEFDHWRREYEKRRGSLQQCGTRWAHQNIQSVGRKEEGRFKLMLHRISNELVAEARENEYSVIAFEDLTDIRERTGASWGHKWAFDRLYEYVEYKAEEYGITVEQVDPENTSRRCSKCGFTHPDNREDEDFECLNCGYENHADYNAAKNIGLRYLRRNQTGGDGGAPLGVRLNSGTLNVNGGYSPADDESARTGVHAESHRFSGG

SEQ ID NO: 8531 - protein, 401 aa, Halobellus sp.
MKRTNTFEVRPRSESDEALLQGVIDATASFWNELTYACRQRFFDDESIWETDEFRGQYKGQLGAVGVQTVTRKNNAAWNSFFALLERGEDASPPGYWENTDDGRDLRVFVRNDSYEIQWGEYSRVEVPVGQDLKDKYNMGYFERLRLEVRGDPKWSGEQGELEIQYDEVEDTYRAYQPVTIDESELDSPLASEEAALDLGVNNLVACTTTTGEQYLYDGEELFEQFRATTEEIGRLKSKLPPEQDTSRQIRRLYRKRSRRRSHAQKALARDLVERLHDEGIATVYIGDLTGVMEPQPSPEINEKLNHFWAVTQFIDQLRSVCGEYGIQVQEKSETWTSQACPDCGEQAETVRHRETLACSCGLDGHADLTAAETLLRWNTDQQVRPMARPVRFQWDNYEWR

SEQ ID NO: 8532 - protein, 169 aa, Halobellus sp.
MLHKVSHHIVEWSQQFETPCIVFEDLKEMRDSIDYGTRMNRRLHHLPFRALQYYTSYKAAFEGVPTAWIDPEYTSQQCPMCGHTERANRNKKRFKCRDCGHQDHADRGASISIAVKGIEKHQDWNVPALNSLPQVRKVRRQASGAVDAPTVTSDAARGDHSNGIRGVSD

SEQ ID NO: 8533 - protein, 434 aa, Halobellus sp.
MGDVIRTVKVKLDVPTERCDDLHQTKNQFLYCANNTAEWAWRYPDDYCITSKQKAENALYEQLRSETELTANLVQKGIRRAIEATKSGVARLKKGETTTQPHFDAWSVVYDKRSATFHRDHVSLSTVNGRIECDYVLPDDPEGTPIGEYLLNDEYEFRMSTLQYDRQTGSFYLHARMRRIKSDEQEQSTTDSSDAKHGTVLGVDLNVDGSLAVTSTGAFIGNADEMNHRRREFEKTRGEMQQTGTRSAHLSIQSINDREHRWMQDELHRISNRLLKEACNHGCTHIAFENLTDIRDRMAGAKRFHAWAFRRLYQYVEYKAEMSDINVEQVSPAYTSQRCSKCGFTHETNRRSKHQFVCRKCEYELNADYNASKNIARKLLKRLHSGQKSSSGGALCQCALKSGTLNLNGEFHASVSPTAEGESTDKPSTLVMGN

SEQ ID NO: 8534 - protein, 376 aa, unknown
  TnpB Polypeptide
MVAQHGSNNIGRQFVRFAGACRFVWNKTLAINEERYLAGVPRLSYADSTRLLTLWKQSEEYGWLKSVHSQVLQQCLKDLDRAYTNLYAGRVEPPTYRKKFLSDAFRYPQGFAVEGNQVSLPKIGWVRFWKSRSIDGTIKNVTVSRTGKHWFVAFQVEMDLPDPVHPSDAWVGIDLGVATFAAFSDRTLLPPLNALRTNERKLARAQQTLARKVKFSHNWQKQKSRINRIHTKIANCRRDFLHQHSTQISKNHAVVVIEDLQVRNMSKSAKGTADEPGKNVAAKSGLNKAILDQGWGMFRRLLEYKQLWRGGEVIAVNPRYTSQRCPVCGYVSAKNRVQQALFSCQACDYSYHADIVAARNILALGQGERLNAYAPR

SEQ ID NO: 8535 - protein, 460 aa, unknown
  TnpB Polypeptide
LSQYAKKVGVTYRIAFRWWQNGQIKGYQLPSGTIVVTEGEESNSNRQIRRDRVKLVEQHLIRKSDPRFAAIDQAAFASKNLYNQANYQIRQAFIHEGQYLPYAEIFHRLKHHEAYCALPRKVSNSILIQLHKNWVAFFKANEAYKEDPSKFVGRPKIPGYKDKENGRNILIYDMQAILKKALKRGMIAPSGLSIEIPTKQMHKTIDQVRIVPRLDGYMVEVVYQKTEEQAEVSPSLIAALDLGVNTLAAVTSTKRGFQPLLVNGRPLKSLNQYYNKQRARHQKHLAKAKRFTSRQLDRITTKRNRRVNAYLHTASRRIINLLVQEGIGTLVVGKNPLWKQEVQMGRKNNQAFVHIPHARFIEMVTYKAKLVGIRVVITEESYTSKASFLDRDSLPTYDPKRTEKPRFSGKRETRGLYRASNGKRIHADINGSYNIACKAFPHSFGQGIEGAAVHPRRLAV

SEQ ID NO: 8536 - protein, 462 aa, Clostridiaceae sp.
MGTIIKTVKQYSYELDNEHLKELLFIGNQYKNVKNYVYSRFSGINSIALLNKPRQIRDEWVKNEFAKQWKLPARYWKLALSEAMSNIKTQWSSIKKRIKEQVRINDNLSNEDKHYINYILKFEDFYHKVLTNEVFPIPKIFQHNDLNYKYLNNLIKRYTRKYKNKIPYSYKGNTFSIDEGLYSYKDSCINITCTKKGERLPIKLTDNNKHIRTLIVKIMGNRLEIHCPLRIKSKENRNDEKIIGIDKGYRYLFAVSSEKFYGEKSNDYLGKETERLNKVNTARNRFWALYNRYLEENNHIKANNIKENNLGKVKYNHNKQKHDQILKSYINYSLNQLIKVEKPTEIVMEQLDFVNWKDRYPKLVKRRLSRWIKGYIRERLEYKCDYNSIRYTYINPAYTSKVCNICGSFGIRKEDIFTCLKCGEIHADYNASKNILNRKYDKEIDLYTSYRKVKEILEKRIS

SEQ ID NO: 8537 - protein, 367 aa, Photobacterium sp.
IKERAYKYRIYPTPVQVELLERTFGCVRFVYNSILRWRTDAYYNEQTKINYNKASSYLTELKKTPEFDWLNDVSSVPLQQAIRNQQTAFKNFFEGRAKYPTFKKKRSKQSAQMTKAAFKYVDGKLYMAKSKQPLNVRWSRELPSEPTTITISKDGAGRYFVSCLCRFEPKSLPISKNTVGIDLGLKDLVITSNGFKSGNPRFTQRYANKLAKAQRKLSKKKKGSSNFHKARKKVARIQVKIADCRRDFTHKLTSQLINENQVICCESLSVKNMVKNRKLSKAISDANWGEFVRQLIYKAEWYGRTVVQIDKWYPSSKRCNCCGHVVDSLPLHVRSWQCPECLTQLDRDINASLNIKAVGQTVLACGA

SEQ ID NO: 8538 - protein, 388 aa, unknown
  TnpB Polypeptide
MIKTYKCRTKISKSGHERLGEIFRLSAELYNAGLESRIDCYRKTGEGRSLYDQYKELVRVREELPEFEAVSSIVFRGVLSRLDKAYKRFFKHGGFPRWKSGRRWRTIEINDQCWRMLKKQGDKLVLKVKGLPRIEVKSSRELPPNALLKAIRITRKALRTEVALSYDLPTPEAKPVTNPVGIDLGISKRLTLSNGETVEKREIDRKKLIRLQRSVSRKVRGSNNRRKAVSLLAKEWQRVSDKERDYLHRLTSEIARMYDFIAVEKLKTKNMLRNGRLARSISEQTWGKTITLLNEKAESAGGKMVEVDPEGTSQECSNCGATVKKNLSVRTHRCSCGLVMDRDLNAAINILHRGLTIAGGNVTRMAGRMREKLEVAPVRSGTVYGSVN

SEQ ID NO: 8539 - protein, 371 aa, unknown
  TnpB Polypeptide
MKTYKYPLYDQSHTIRIGNYLDDMWQVHVYFHKWQDQRYKEGLPYANYNAMSAHLTDLKRTTHRHWNALPSQAIQEELRRIDNAYIRFFKKLGGKPKVKQKHKFKSFTLKQAGWSLLNNRITLTFRKWHPKTRKWQYDKVAYTFHKHRQWHGTIKHITLKRDSCGRYWLCITTTYKDFKPLPATGKSVGADFGMKDAYLTLSTGEKIQHPQPLKSNLKKLRSLNKALSRKVKGSNSWWQCVRQIARLYRKISNQRKDFQWQLASKLCKKFDTIVLETLNLDGMKRLWGRKVSDLAFYQFVGVLKYKCQNHKRDFRQVNQWTATTKPCSDCGFHNENLTLSDRQWICPECGSHHDRDINAARNILRAGIAVS

SEQ ID NO: 8540 - protein, 246 aa, Salmonella sp.
VKVTRTDLHRCYSPISFTVIRNGASAPEKPTYLKEEKITGLDMGLEHYAITSDAVKVPNPRHLINVSRNLRRKQKALSRKQKGSANRKKARIRLAALHERVANARADFQHKLSRAIVDENQAVIVETLKTANMMKNHNLARAIGDAGWHSFITKLEYKAATKGVHLVKLDQWFASSKTCHCCGYKMPEMPLHKRIWRCPECGAEHDRDINAALNIRQKGILELKAAGLVVSAHGGQRKSVAQTVAA

SEQ ID NO: 8541 - protein, 414 aa, Bifidobacterium sp.
MDESKTVKRAYRFRFYPTAQQENLLRRTLGCCRLVYNKALAIRSEAWTSEHRNVTFKDTCAMLPQWKKTPGLEFLKDVSSVALQQSLRHLQQAYANFFNQTGDYPTFKKKSHGGSATFMKTAFTWDEKRRELTLAKTDRPLPVRWSRTIPRGCEPSSVTVSLDSAQRWHVSILVETTVSRLRKRSKSVGVDLGLESFAVTSDGEKIDNPRHALREAKRLRRAQKALSRKARGSNNRRKARLKVARIHARIADRRRDFLHKLSTRLIRENQTIVIEDLNVHGMSSRVKAKPDPDRPGSYLRNGQKAKSGLNRSILDASWGEFRRMLEYKADWYGRRLVVIDRWYPSSQVCSTCGKRTGRKPLNVREWTCPYCGTHHDRDINAAENILAAGLAVIACGDGRTVERRIPRDTDPIRQ

SEQ ID NO: 8542 - protein, 475 aa, Bifidobacterium sp.
MAYTAYETDMPINQGKAEKIKAMLPLWQVGMKRTMCILSHTLLTEGKLPRWTDTKEWDDRLSQRQWNSVTRQAKGMMDSWMGLRQNDFKRIVSHSKLDTETRHRLYKINKRRAWWEPVDDEDHKLARRIIKHLRKRIPFPDPARCRTMVMDGKIAEIQPSHMGGVYYYWARVSTLEKNKPLYAPLAIHSNLEQHLNPDDPENLCNQLQVRVNEDGTLTTHLMTARPKAAPRETGSILGLDWGMKSLFATSDGRLYGLSLFAWLKARDNELTNLTRELGHARIPYKRSRRYRNLNRRIREHVTNEVNRVLNLIADQQVRELVVEDLDFRHGGLSKPLNRIVTRAGRHAVRMKLDRLNQIRGVTIIRINPAYTSQECPRCGYTSPKNRPDQAHFHCQCCGHTNNADIVAANNIKARRSRPEYWRWIGKQNILDRLRKEHAQRCPDRIHCPDHAERSTALPRQRNSQGRLTRGYKKVA

SEQ ID NO: 8543 - protein, 450 aa, Bifidobacterium sp.
MLDVKARNNKIKASRKATKERRQTQSCRVVTCKIDQSKLSATQREALRRMFLEAKWFVNSIIASDDLFQYEIKGNTVPVRCKDERDEWILEDRPIIALSRQMEQGLLQECKDAIHAMKAKRDKAIKEGRKPPKLGRLKYRKEVAEIPLKQFGKTYRFAGPDTVRIQNVPGKLHLEGASRLNPDHDTDRSLTVRLDALLGFENKPVEYANAKLLHREDGYYLAVTTYEDTDQYEARRNARESILHHTPADGSKLGIDAGQTDQLTLSNGETVNEYVPESLRLKKAARQFARRSKYSSGWWDALHVLRLEYLKEARQRKALADQAFHDLHAKAATLYVQDEQISKWKRKTSQARGSRKIQHGILGRLYAKFKQDEHTIMLDQWQPTTAWCPRCGRRTKHPPGRETYRCAYCDYTARRDPHAAGNMIILSWRPLTRQELYQDRSIPVGPYGSI

SEQ ID NO: 8544 - protein, 416 aa, unknown
  TnpB Polypeptide
VFGIKREGSDKNIKTQRCEQIIIKRNHPKFKVIDQQCFHSKNLYNEANYVLRQEFINNNKYIIYYDMNKEFKTHENYKLTFSQPANCTLRLLDKNWKSYFVAIKDWKKNTSKYLGKPKLPKYLKKDGRFIWMIPNNQLHYNYDKETIHISNRLVNDYNWKCRCLGRIIQVRFVPRGSCYVMEIIYEIEIPDVNKGSNNIAAIDLGVNNLVTMTNNIGLNPIIINGKGIKSINQCYNKRLAKERSMLKIRHNKNWSKKLDMITFKRFQRIKNYMHNTSHYIVSWCIENNIDTLVVGKNNKWKQESGMNKKSNQNFIMIPYQILLQQLKYKCENVGINYIEQEESYTSGTSFLDEENPIKENYNKNRRIQRGLFKSNSGLLINSDVNGSFQIMKKVFPNAISRYGIEGVLTPIVINVA

SEQ ID NO: 8545 - protein, 157 aa, Psychrobacter sp.
MGKKLAAAQRAKNKKRVKAIHAKIKNTRLDAIHKFTTQLVKDNALIVVGDVKSRSFTNSMTKLAKSTYDAGWFEFKRQLEYKCKYASCQLEIVNERYTTQICSHCGDMSSSPKGRAGLGIREWRCAECGTRHDRDINAAKNILAVGLDRLDVGISSV

SEQ ID NO: 8546 - protein, 439 aa, unknown
  TnpB Polypeptide
MKTTISAKLKLNATPEQFAQLRAVQLAYRDALNYASQYSFEHGKMSNQQKLQKALYAEVRQRYKLSSQLACNVPRQVGATYKALWTKLRQNIEARKNGRTKKRYKGFDQAPKYVSPTLTYNYERDYSFKKEQHVSILTLDGRVSVPYQGYNKHVAWIQHGAEIGAAKLWYDKPRKQFYLIVALEIELADPMPETHTDVVGVDVGVRYLATTTDTRNNSTFYPGKRIVATADHSHRLRKRLQRKGTRSATRRLIAVSGRERRFKRDVNHTLASRILATHPHSLIGVEHLTGIREGTKRRKGKRASKKQRRANRRASSWSFAELHGILAYKAPFHDSMTVNVDAHYTSQMCPKCGNTTRKNRPSGAIMFRCTVCTYECHSDLVGARNITMRTLFIRQDWMKTGALSVSLDVSDNEAKAARLQRYAELRWSPDTSPRVLREG

SEQ ID NO: 8547 - protein, 366 aa, unknown
  TnpB Polypeptide
MQRTIGLELPKYKELCDLIYSYNSIANEHICEALCNNTISKSRLHQLLYSRIRKDQPNFPSALIQCARDNAVEMLKGNQFNTFTRKRIDSSIRFDLRTCKVFLLSGELQLTTLEGRKKYTIKIPNYFQKYFSWKVKAVTLGIEKKYLKLKVIIEGENPKQCIYHEVLGIDLGLKEFAVLSDGHFAPSTQINRMKRKYAHNRKILQSKGTRSAKKKLKYLSGRERRFMLGYNHLLTKKIASLPYGAFALEDLKGIRNGKKGRVFNRKRNSWAYFQFRKMLEYKAQNKGKQVILVDPKYTSQECNFCGYIDKENRKEITFHCKECGFQCHADLNASKNISLRGYKIFYRQAVVNQPYISNYEINKDRV

SEQ ID NO: 8548 - protein, 404 aa, Streptomyces sp.
VTTNHVKRAFKYRFRPTDAQTAELSRTFGCVRKVYNLALAARTEAWAIRQERVNYNATSAMLTAWKKTEELAFLNEVSSVPLQQCLRHLQTAFTNFFAKQAKYPRLKSRKKSRKSAEYTTSGFRFRNGRLTLAKMTEPLDIVWHRPLPEDAKPSTVTVSQDAAGRWFVSLLCEDPSVQPLAATDLAVGVDVGLDHLLTLSTGEKIANPGHERRDRARLALAQRRLATKAKGDGANRAKARRKVAKIHARITDRRRDLLHKLSTRLVHENQVVVIEDLTVRNMLKNRTLARAISDAAWHQFRTMLEYKAQWYGREIVVVDRWFPSSKLCSVCGTLRDKMPLNVRTWTCDCGTTHDRDVNAAKNLLAAGLAVSACGAGVRPQRRTPGGQSAMKQEASRREPRSPRL

SEQ ID NO: 8549 - protein, 433 aa, Halorussus sp.
VGRGARFVHPEAQLGEPKVFKRPPETDTYNVADTDYSRRTAVTGLSVSPTDAERLRELVAEWKRGCQLAVNEAWDVCHTRSEVQQLTYDRLREETDLGSQHAVLATHRAAEAIKRARDRSGTRPEFTSPTVAFDTRTMTVFDDRTVSLTTTDERIRCDLKLAADGGYQSRYLDDEDWEPAKSGLHYRDGEFVFHLGFRTPRPAVDPPTEGATVLGVDLGVENLAVTSTARFFSGGELGHRREEFERVRSSLGATGTRSADRTLRQAGDRLDRFVRQRLHEVANGIVAEAEEYDCELIAFGELEEAHDLLPGAGAFHEWLFERLLSFVEYRAAERDIPVVEVNPEYTSQRCMECGFTHPQNRDVEAHQFECLKCDASAHDDYNAAKNIAFRCVRRGPLSSRGLGASACALQSGLVTPDDGFTPYAELSEPPKSD

SEQ ID NO: 8550 - protein, 384 aa, unknown
  TnpB Polypeptide
  misc_feature (295)..(347): Xaa can be any naturally occurring amino acid
MKTYKKKIRNHPQNMRLGNMLDDLGDVHNHFLAVENRYYRIYGKYAGRYRLQPHLTKLLQRTHQHWAWIPRDTLDAVIIRLHLAWEKFFEWLKKGRRGRRVGPPKFKRKGRYRSAKFQTGYKLTQGSVRISFKECDVEKQKLVFVPRNILYHHHRDWEGKVRYIQIRRDAAGTLWLYVVTDSICKKVLPATGESVGADFGMDTYLTLNTGEKIHHPQPLKRSLTQLRTLNKAVARKQKGSSNWWRAVRELARLHVKIANQRRDWHYKRATDLCKKFDTIALEKLNLDGMKRLWGXXXXXXXXXXXXXXXXXXXXXXXXXXXXXXXXXXXXXXXXXXXXXXXXXXXXXLSDRQWTCPECGSHHDRDVNAAMNILRAALGPSVEQM

SEQ ID NO: 8551 - protein, 379 aa, unknown
  TnpB Polypeptide
MLTYKRKLKLSKIQEDRISSWIGTCRFVYNMGLQIKITAYKKYFTNVSMYDLMKQLTEIKDYEWIADVPSQSLQNSLERLDRSYKNFFITFKAGAGFPKFKSKRTYNSILFKSAELTSKNTIKLPKIGELSFFKDKSPVVGKIKTATIVKEPTGFFICIVCDEVSKNISNPDESQVIGIDMGIAKFCVDSNGDLIENPKHFKKYEAKLRVENRSLSRKKKFSNRWKKQVKKLSLLHHKIANVRKDFLHKQSTIMAKKYHTVYLEDLNIKNMSKNKNLSKHILDCGWGMFRTMLEYKTNVFRVNPKYTSQTCNECGKKDAKNRLTQSEFVCTNCGYVSHADMNAAKNILSKGIALNRKRDSLECALVEEPRLDESVSVSY

SEQ ID NO: 8552 - protein, 307 aa, unknown
  TnpB Polypeptide
MRKTYQYRLFTTDAQYQALDAQLGEACRLYNAALQERREAYHKHGIALNYYAQANQLKAIRSRGHRGLANFSACQDILRRVDKTFQAFFRRVKAGQKAGYPRFKSRRRFDSYTFPSYGDGCRLTDARLYLQGVGHLKVKLHRPVDGTIKTITVKRACGKWYACFSVEYDSALLPENAASTGIDVGLEHFATLANGETIANPRYSRKAQARLRIAQRRVARRKRGGKNRRKAGALLQKAQAKVKNQRSDFQHKVARTLVNTYGIIAVEDLNIKGLASGGIVSKPVQKPVGKLTLFQGISQVLSHRKTT

SEQ ID NO: 8553 - protein, 445 aa, Brasilonema sp.
LHTKKVIVLQKDYGCQQVLLNRSLLVHPVLEYLCTQAAKLTNCGIYYGRQVWFKERRYLGKYDLEKEYKTNRNYQSLHSQCAQQVLRTVAESFKSFYELDKKARKGDLNQKPRLPNYRKNGLASCTYPKQALKLIDNQIRIPLGQTVNTWFGIDSFTIPAPSNLDFASIKELRILPRNREFYAEFVYEQSRAKRPRLNEKWALGIDPGINNWLTCVDSSSSGEGFIIDGRHVKSLNRWYNKQISTLKEGKPQGFWSKKLAAITEKRNRQMRDAINKAARIVVDYCLRMKVGNVVFGWNEGQRQEANMGRRNNQAFVQIPTYRLKERIRQLCLRHGINFVETEESYTSKASFLNHDFLPTFGEKPTSWKPSGRRTKRGLYKSLWYGTINADCNGAANIIRKVDTTLDIDTSRVSRGALTRPTRIKVWVTAKKSVCAAPLKGASGTG

SEQ ID NO: 8554 - protein, 408 aa, unknown
  TnpB Polypeptide
MNAKKPILRFIAKGTKKLLKSYKTEINPTPEQKQIINRTIGVCRYVYNFYLAHNQKIYKNEKRFVSGMDFSKWLNNEFVPNSPEFHWIKEVSSKSVKQSIMNAERAFKNFFRGNSRFPKFKKKAKSDVKMYFVRTNAKVIIPCERHRIKIPTLGWVRLKEKGYIPTNPNTHTIKSGAVSCKAGRYYVSVLVEEQEQQKPVLNEFGIGIDLGLKDFVICSNGKTYKNINKSSQIRKLEKKLRREQRSLSRKYESYKKLNKNLKGEATRQNIQKQKLKVQKLHQRLDNIRTDYVNKVISELVKTKPMWITIEDLNVSGMMKNRHLAKAIAQQKFFEFRTKLLAKCNECEIELRVVDRFYPSSKTCHCCGSVKSDLKLSDRTYHCNECGYTEDRDYNASLNLRDCQTYSIA

SEQ ID NO: 8555 - protein, 302 aa, Planktothrix sp.
VHGGFGGGKLKLLGKWDIQTYNIKDIKRVRLIRRADGYYAQFCLNINVTDIQPKTGKEIGLDVGIESFYTDSNGYQEANPKFLRKAEQSIKQSQKQIYKKVKGSSGRRKARKVYSKKHLKVSRQRNEHAKRIARNVCTSNDVVVYEDLSVRNMVKNHCLAKSISDVSWYLLRKWIEYFAAKFDKSAIPVAPHYTSQKCSNCGVIVKKSLSTRTHVCNCGCELHRDTNAAINILNLGQQARGGHPQSNANGLETSTPLDESLVEQVSRLKLESSVSSDGESVNLISIKQVGGKIHKSITNIIR

SEQ ID NO: 8556 - protein, 291 aa, Planktothrix sp.
MFQGYKFRIYPTTEQQITLAKSFGCCRWYWNYTLNLCQETYKQTRKGLSRKAIQGLLPQLKKEYPWLKDAYSQCLQVVALNLSTAYKNFFEKRARLPQFKSKHGRQSISYPQSVKFEGDYLKLPGKVGLIYCRRHREFKGLIKTVTISKNRDGKYHASVLVDDGKEIPNSSTNGKAIGIDLGLTHFAITSDGDKYSNPKHFAKHQRNLKRKQQKLSRIDIRSWTCEHCQTTHDRDINAAINIKTEALRILSLGTSDTASLMGCQSPEQTSVSSDAIPVDARSPHLLVEKCG

SEQ ID NO: 8557 - protein, 700 aa, unknown
  TnpB Polypeptide
MRVVVTAKVKAVTPNSQPLVSFLRGFRDWTQYVVDEIWKLEHIPSIKELHQRFYRVLRIQGFRAHHCHKIERRAREIVKATKKNKGSKPVLKKLTARLDYQDYKLDLNSKILKIAVLNEEWVELKLQWYSYLDKYLDGSWRLREIQVSYRDGRIYVYLTFSRDVQLRESKTLMGVDINFNNITYTVVDLNGNLVSMGVIPFNGLKRALAHRIIAEKMQRRYSREWRYVRGIRESVRKHGRRARSILTDSCHYVSRRLVEVAKEYSALIVLEDLNKLRTRVNGSRKFNKKLSLWAYRRIQFYIHYKALIEGLSVAYVDPRNTSKTSPIGGKLEFINYKWVKLPTGHVVTRDLVASWNLALRGLNSLTRDVGARGHVEPLNAPDQMQSQEGMREKPVQVSKVTLVTKKITHGQPQFWKYYNGGWALRSGARWKIAENKLYLYVVFAKNVEAKRENTSKIYGVDINENNVTIYEYPAKRAVTIVTNFSKIVLGYAYRRAKIQQRWSKTYGVNGNRRIRYALRKLRERNVKRDIKLKLVRKVLDVVKDGLAVLEKLPKRFQDRVIEKNKVLNSIDVHRLKQSSIRGIHKVVIEKLAEHRIPYVLVNPSHTSSACPICGSKLSPMTGCAQRNGWKPRAMRCPRCRFTHDRDVIGAMNLVRKYLLHVEGHAVDLPKGTHDPCVEWSVTTVKCGAEVQPVLAKPTTT

SEQ ID NO: 8558 - protein, 388 aa, Microcoleus sp.
LEVSQQQVEKLNAVLTAFAKCCEYVNTHTPEKLTNQIAVQSLIYKEARSHSGLSAQMTIHAIRRVCANRKTAKQKVKPVKKFAPTSATYDARTFTFGESDWLVSLTMLKGREKFKLHIGNYQKHLLQGQDPKTATLVKRNDGSFYLNIQLESEPPEKQKTDDVLGVDLGRTDIACTSAGEKFSGKQVTKARDRYNRVRASLQRKASKGTRSTRRRARQIWQRLSGRERRFQTWLNHTISYRLIQQAKTSNQAITLEDLTGIRERTNELPRSKTERRRSNSWAFYQLRQFLTYKGVKFGVDVRLVDPRYTSKTCHCCKVIGNRQGKRFECLNERCGWIGDADVNGARNIATLGQIVNLPGGSEIMSCSLQEVVLRATESPHSMQSMSVG

SEQ ID NO: 8559 - protein, 420 aa, unknown
  TnpB Polypeptide
MNYNYRYRLKPIESQRETLDYHRDTCRQLYNHALYRFNQISEDEGTVKQRVRKIRDELPDLKDWWDALTDIYSKVLQPTVMRIAKNINSLRKLKEQGYTVGELRWKSPREFRSFTYNQSGFELNKKGGQTVLSLSKLADIPIELHRPTPDNATIKEVTLKKEKTGEWFAIFGIEMDTVPPAKPSLDEIDAGNMVGIDVGILKYAHDTDGIAVESLDFSDERDRLKREQRNLSRKEYKSNNWKEQRQRVAACHLRIKRKRRDFLHKLSNYYAQEYELVAVEDLDTKGMLESPGNSSNTASAAWNTFTSMLETKCEREGTHFVEVEPAGTTKECASCSVETDKPLWVREHSCPACGFEADRDANAAWNILSRGLAKLGVGHSEGMPVETALPTGTAVVPAKRVVEAGSPCLKEPLKTASRQG

SEQ ID NO: 8560 - protein, 291 aa, unknown
  TnpB Polypeptide
MKEQKIRIVKTFGCCRFVYNQTLSHRKKAYENEKRTISKTDCNNFCNRELKKEYKWLKEVDKFALTNAIYNMDTAYQKFFKEHTGYPKYKSKHDSHKSYTTNFTNENIVVDYEKGKIKVPKLKLVRAKVHRKFTGKIRSATISQVLSGKYYVSVLVETEHEELQHTDKNIGLDLGIKDLCITSDGEKYENPKIIKKYEKKRTKLQRKLAHKEKGSNNYYRQKREIALSHEKIANTRKDYLHKVSYAIISENQMIVSENLQIRDMVKNYYLAKSISDISWYELTRQLEYKAK

SEQ ID NO: 8561 - protein, 403 aa, unknown
  TnpB Polypeptide
VIRRVSHNLNFATSKKKEELDSFFDEYARLVNAFIQLYWNQKSLPSRADSEVYSQIDSWLMGKARKCAVNQATKIVKSTRKKSRQLTYKAYQKVYSRAKKRNKDIALVNQRWGEWSKDRIFRHRVSLPFFKGFSIDLNSDLVRIQESKRSTFFDLWIRLGSIFGNRQSLILPTKHHKVSRRLENKGWKQKSSIAIRKTTKGYFADVYWEKLEESTVKTGSQTGSPIGVDIGIQKLLTTSDGQQLGKGLRSKLDKLNRRKQKSHNWDQTVQEIKDYIGYTTNRFPWNKASVVVMEDIKNITKNTKGRINKTVRKLLGHWNIDLLYRRMVEKAAANRVQLAFVNPAYSSQTCFSCKIVNKKSRTKEKFQCKDCGYADDADHNASMNILQKFLDGHFTVARSIKRM

SEQ ID NO: 8562 - protein, 125 aa, unknown
  TnpB Polypeptide
LHKESRKIANSYDVVCIEDLNMKEMSQDMRFGKSVHDNGWGMFTDFLAYKMEGAGKKLVRIDRWYPSSKTCSCCGNVKKDLQLSDRIYECVCGNRMNRDENAAINICREGIRISGIMLDTEKKIS

SEQ ID NO: 8563 - protein, 201 aa, Frankia sp.
MKVARIHGRIRDRRRDHLRMLSTRIIRENQTVVIEDLAVRVMVRNHALARAISDAGWRDLRFMLEYKGAWYGRTVVAVSGWYPGTRSCLACGALVASLSLHTREWTCRCGVVHDRDVNAAKNILAAGLAVAACGDGVGPPRSQHGEASVGEAGKPAREEGNPRRQAGEEANVGWPCARPSATLLRDLPGIERSRSDEHTVR

SEQ ID NO: 8564 - protein, 663 aa, Klosneuvirus sp.
MSVVEETKKKPPDYFKCVKIPIKHVLKNPDTNSPKITNGVIKSNKIIIHTLLFMKLYLLNYYEKNNKLPIIDKVFVNSCMKILCNENANGRPPKKEVKELKDTLTKFYNKEYKPLIQNDPLDYTHLNTVLDYLTVDIITMYENNIKLHYVEYVERYVNVMWKKKDTINKIKEDNKDETTQKELINEFCRQLRKIKLDILETTDKLTSDDKYHQWIQDKKKLITPNKAKYNKDNLYYDLQCNPQNYLQCMIKMMKEIEKEGVTINNVFPMRNTVTPHHIRLDTTTLVHLLFTSKQGNKTDYLLDGNLKKHENDIWKFFFRTERQCFKKPNYTFHHMIETDGVSCSILFIRNDLIGKRIPSNKIGTSEQYIDELADYSDLKNKKIVAIDPGKSDLLYCVDSDDKNANEFRYTQDSRRKECKIKKYAKIILEFKKEKIGNKTITQYETELSKLNRKTLDIKEFKKYIKKKCDINHKLFKFYEKYIFRKLKLNGYLNRKKNEQKMINNFKKIFGKPDNTIICIGDFEQKTHMKYKEPTKGIGLRKLLKQAGYKIFLVDEFRTSCKCSKCGGGTCEKFLTRKNPKPYKSGNMLVHGLISCKNCSNVWNRDVNGATNIYKIAKNAINGIERPKYLCREKKDEEVKQVKKKVVQKKQVKKSVRVDALTKS

SEQ ID NO: 8565 - protein, 428 aa, unknown
  TnpB Polypeptide
MRCPAGGQGFVGTAWQAARVRTAYRCRAYPDEAQQAVLNRTFGCTRVVWNCVLAARQQRYVTQRQGTSYGQASAALTALKQDPQRAWLNQVSCVPLQQALRHQQRAFAAFFAHRARYPRFKSRRGRQAAEYTRSAFTLRGGQLRLAKTPGPLAFVWSWPGVDVAGLDPSTVFVSKEPDGRWYVTFAVDASAPAPLPGTGRAAGVDLGVTSFAVISDGQRIANPRHLQRRARSLARYQRRLARCQRGSANRAKAKAKVARAHRKVRDARRDFLHKTTTGLVRGHDLIAIEDLAVKNMVRNRRLARAISDCGWGEFRRQLAYKCQRAGRRLIVIDRWHPSTKMCSACGFVLAELPLKARAWQCPSCRTRHDRDLNAAKNILAAGLAAARDNPDDACGADVRHPETPPVQSAVKQEPRLARAGIPVLQDGE

SEQ ID NO: 8566 - protein, 428 aa, Dolichospermum sp.
VYGCQQILINPNKDLKAILEYVCSEAKKLTNCGVYYSRQLYFKTGKIPSKADLHKQLGTVQKNAHYQALYSDTAQQILTTVAESFKSYLGLLKGIKKGTVTQKPKLPNYCKNVMSIATFTGRSLKLKDPMLRFPLGSKVKAWFGIDAFYIHKPSNLDHRSIREVRILPRNRCFYAEFVYEQSVKISDVDTSKVLGIDHGLNNWLTCVSSIGTSFIVDGLHLKSINQWYNKSVAKIKEKQPQGFWSNRLAAITEKRNRQMRDAVNKAARVVINHCIDNKIGTIVFGWNISQKDSINLGSKTNQKFVQIPTAKLKNRIAQLCEQYGIKFVETEESYTSKTSFLDNDFLPTFGAKPEGWKSSGTRISRGQFKTSIGIKINADCNGAVNVIRKVAAIFKFDLSGVGRGCLSQPTKVLLWTLQKSPRLQTGEA

SEQ ID NO: 8567 - protein, 370 aa, Arachidicoccus sp.
VKKAYIKAYKFRIYPTKKQEIFLAKQLGCCRYVYNYCLDLHNRVYKEEHRCLSKKEMNAQLPVLKKQEATKWLGEVIAQPLQMAVQDLDTAFKRFFNKTSAFPRFKSRNDRQCFKIPQNAKLSNGLLKIPKLDSLIKVNLSREITGKILYVHISKTTTGKYYASFTCAGEYAVFEKTGKQVGIDMGIKEAATLSDGTQYDNKKALKSIEKKLAYTQRQLSKKQKGGKSRQRLRRRVARLHESIKNIRHDHNDKMTTEIVKNHDLLAVEDLAVTNMLKNHKLAKSLQDVSMGAILTRLKYKSEWHNRDYIEVGRFFASSKRCSSCGFKKEDLLLKDRSWTCPTCLTNHDRDINAAINILNEGIKIQSGCGA

SEQ ID NO: 8568 - protein, 387 aa, Streptomyces sp.
MAVKLVTQVKLMPEAGQAAALRSTLRTVNEAACWVSAVAFDHGVPREYELRKHTYTELKARGLGAQAAQHVIKKTCDAYTTLKANIKAGNLGKPGSKRRIKAESKPVTFRPGAAQPYDDRCLSWQHDAATVSVWTVAGRLKGVRFACSPDALKMLREHRKGESDLIERDGVFYLVAVCDIPEPEVYEPDGFVGVDLGIVNIATTSTGYRAAGRGLKRHRKRQLDLRRTLQAKGTKSAKRLLKKRSRKEARHTANVNHIVSKKIVTTAERTGAGIALEELTGIRSRVRLRKDQRSSLHSWSFHQLASFVEYKARRAGVPLVYVDPAHTSRQCSECGHIDRKNRVGQATFACRACGFLANADDNASHNLARKGEAVWTAGRESRVPATP

SEQ ID NO: 8569 - protein, 388 aa, Streptomyces sp.
VIRVKVVVQVRLMPSPEVASALEVTLRTANDAANWLSGEAHRRGETSRKALQGFAYHDLKTRGLSAQPALHVLRKVADAYSALRANIRAGNLGKPGSKRRAGAESKQVVFRPGAAQPYDDRCLSWQVDEQTVSIWTTSGRVRGVRFACSGQARKLLAEHRKGESDLVHRDGVWFLIATCEIPEAERYEPTDFLGVDLGIVNIATTSDGKIHAGRELNRYRKRQLALRAKLQKKGTESAKRVLKRQCRKERRKATEANHIIAKRIVTEAERTGRGIGMEDLAGIRQRVRLRKPQRVALHSWAFAQLGQFVEYKARRAGVPVLFVDPVHTSRMCAECGYTDKLNRVSQGRFACRSCGFVDHADHNASRNIRARAWKLWRSGAESHAPAPS

SEQ ID NO: 8570 - protein, 227 aa, unknown
  TnpB Polypeptide
VCSIDIGVRNIVTMVNNMGIKPIAVKGGVVKSINQFYNKKRAKLMYIKDKQQYSHWTKRLKKLETKRNNILNNYFHQLSKHLVDFWIENNIGSVVIGYNQQWKQEVNMGKRNNQNFVYIPFWLLIRKIMYKAYLVGITVYLVREPYTSSCSFLDGEEIGFHEYYKGVRKGGLFRASNGRVINADVNAAYNIMIKAIKDAITADEIEDAALHPRRVDWHLLPMTGRNC

SEQ ID NO: 8571 - protein, 230 aa, Nostoc sp.
MYRTAEIESRLADAELGLDVGLEFLYSDSNGHHEENPRFLRKAEKAIKHAQRQIYKKEKGKNKRRQARQRYARHHLKVSRQRKEHAMRLARNVCKANALVAYEDLNVKGMVKNHCLAKSINDASWSLFRRWLEYFAAKFNSTVVAVNPRMTSQKCSDCGTIVQKSLSTRTHKCNCGCELQRDVNAAKNILNLAKASLGHKQSNASGVGTSTLIGVSLLEQVLTLNEESPD

SEQ ID NO: 8572 - protein, 381 aa, unknown
  TnpB Polypeptide
MYCYSVVTTADLIKKGIKLLVLEYKAKVKPSQALAIEEAIRTVQFVRNKALRFWIDAAREAKTDKFALNKYSTELRKEFSFVEDLNSMAVQSAAERAWSAISRFYDNCKSGKPGSKGYPRFQHDNRSVEYKTSGWKLHPTKRCITFSDKKGIGKLRLMGKWDIHSYSTKLIKRVRIVRQANGYYVQFCVDTECSESTPLTGLEIGLDMGLEYFLSDSNGNHEENPHFLRKSEELVKHCQRRIYSKQKGKKNRIKARKRYAKKHLKISRQRSEHAKRLARRVMQSNDLCAYENLQVRNLMKNHNLAKSIGDVGWRLFRLWLEHFATKFGKIAVAVAPHYTSQKCSSCGTIVKKSLSTRTHVCRCGCELQRDVKCSNKYPGFS

SEQ ID NO: 8573 - protein, 417 aa, Acaryochloridaceae sp.
MFTINYQYRVYPSLEQETRMVSWLEICRGVYNYALGERKDWIKSRKCDINSCSLVAEYIIGADVPSPDYYKQQNALTAIKGQLPHLKDVHSQVIQEPLRRVDAAFVAMKERGYGFPRFKKFGQYRSFLFPQFKENPVIDSRIKLPKIGEMPIVLHRQIPEGFEVKTVRVIRKHSGWYVTLCLQADVTIPDVAPHGQAIGIDVGLSYFLSTSDGEQVARPRFLDKLHRKLELLQRCLKRKQKRSNTRANLIAKIGKVHEQIAACRLDWQFKLAHHLCDRAQMIFVEDLDFRIMAKGMLGKHTLDAGLGQFVNQVLPWVCFKRGVYFGKVDPNGTSQTCPDCGARVKKDLSVRIHECHECGSIKPRDVASGQVICARGLSGVEIASGAEVSGVLETISRQLAAKLEDSKSDLGKPALYA

SEQ ID NO: 8574 - protein, 294 aa, Bacillus sp.
  misc_feature (150)..(183): Xaa can be any naturally occurring amino acid
MNLQTAYKNFFEGNADFPKFKNRKAKQSYTTNMVNGNIKLENGHIKLPKIKKPIKMKQHREIPADYKIKSCTISKTKTGKYYISILTEYEKDIRPVKIQKVVGLDFAMDGLYVESEQGKKANYPRYYRQALDKLAKAQRILSRRKKGSAXXXXXXXXXXXXXXXXXXXXXXXXXXXXXXXXXXKSKELATNYDAVIIEDLDMKGMSQALNFGKSVHDNGWGMFTTFLAYKLKEQGKQLVKIDKWFPSTKKCSCCGKEKEMPLSERVYKCSCGFVLDRDHNSAINIKNEGLRLLA

SEQ ID NO: 8575 - protein, 422 aa, unknown
  TnpB Polypeptide
MTEEQRLAKNASIKEAMKATHEKRKSQVCRVYMLKIQKNRLSARQKEDFKMLFVEAKWLYNDILNYGNVKGQSIFEYELGNTVEVKLPDGTFDGRSLNHIGSQMKQSVYTDIKSSVKALSRLKKKGFKVGKLKFKSEVKAVSLKQYGCTYKFHGEHFVKLQNIHGLVRVNGLGQIKENVEFANAKLLNKADGYYLAVTTYTNKKPYSNRPRADVGIDMGCHTSFTLSTGEEIDVKIKEPEHLKRLQRKQNRQKKGSNGRRRTIHKIRKKHQRLVNRKNDKANKIVANLNSRFGLIYIQDENLSGWHKGGHGKAVQHSCLGRVKAKLKSQDNVYVVNRWEPTTQKCINCGKKHTMPQNERTFKCDCGLCMPRDIHSANRMVQEGRKLVPPEQREFMSVDWESSIVPYLGHDKSPGMKHEAHRL

SEQ ID NO: 8576 - protein, 436 aa, unknown
  TnpB Polypeptide
MSEVVRTVVLKSAPLPRRVFRVFIELEGMYRNMVEQLVLYAARNTITSFTKLKALKYRELRALYTQLPSHYAYMACQDASTRIRSFLKLKRRGLTSRDYPEVKNITIWLDDHLWKLNGLTSIEIASHKGWVRVELELHKQYWKYVNTGWRPASEAKVKLDRKSRRLIVYLTFKKTVEVYKPSGFVSVDVNENHVAVLIEGRVYLFETGFKDIVLGYYYRRKRIQERHDKLCGVKYRVKRKVLRKLKERKRKNDLKWKLANIIAKIAREKQYAIVLERLGKNPAREMINHVGDDQLRHRIYQASFRGVQRAIEEKARERGVPIVYVNPRSTSRLCPVHGARIIYNNGFRVGKCSVGGELWHRDVVACLNLLFRVRPGDGSNAPSLGGCSVDVTRVPFGSTAAHDPTQIPCEAWARRKSLDATIEHKLMRMSHLGTNG

SEQ ID NO: 8577 - protein, 294 aa, Bacillus sp.
  misc_feature (294)..(294): Xaa can be any naturally occurring amino acid
MSVGDSRNGYHYDKMETNVLVEVELMLVNKAYKFRIYPNQKQEILIAKTIGCSRFVFNHFLAKWKDAYKETGKGLTYNSCSAELPQLKKELVWLKEVDSTAIQSSLKNLADSYSRFFKKQNRAPRFKSKKNKVQSYTTKHTNGNIAIEGNKIKLPKLGLVRFAKSRDIEGRILNATVRRNPSGKYFVSVLVETEVHELPKTGSSIGVDVGLKNFTILSNGTEYENPKWFRKLEEKLAKAQRILSRRQELAFKRKCKLDEAKNVQKQKRKVARLHEKVTNARTDYLHKISTDIVX

SEQ ID NO: 8578 - protein, 416 aa, unknown
  TnpB Polypeptide
MQRLQAFKFELMPNGQQMRKMSQFAGMCRFVFNQALALQKENHEAGNKFLNYAALTKHLTVWRNSPETAWLSQGPSQAQQQTLKDLEKAYKNFFEKRAAFPQFKRKGDNCSFRFPDPKQFKLDEPNARIFLPKLGWIRYRKSRNILGELRNITVSLRAGKWYFSVQTQREVQATVPLGTQAIGLDVGIASFATDSGGKHIEALHSFKRHETRLRRYQKSMSRKCKGSKNWKKSKARLQRMHARIANVRQDFLHKTSSEICSINAMVVVEDLRIKNMSKSARGNAQAPGKNVKAKSGLNKSILDQGWGEFRRQLEYKMQWSGGIFVAVDPKNTSRECPRCGHIHADNRKTQAVFCCVACDHTAHADHVGAINILARGHRVLACGENVSRAKPAKARCAISKKQEPAEAINGALNALH

SEQ ID NO: 8579 - protein, 446 aa, Kribbella sp.
VTLRAYKYALNPTPRQARYLDGHCGAARKAFNWGLGRVKAVLDQRAAEATYGIPAEMLTPAISWSMYSLRKTWNQAKVTVAPWWAEYSKETFASGLNQLATALKNWRDSRTGKRAGRVMGFPRFKSKRKTVKSCRFTTGGIRCEERYAVLPRIGRVRLHEAPASELLDGTVRIMAATIRLERGRWFVSFTVEQHTPARTPKRPDAVAGVDLGIKSLAVLAEPGRALAPIPNPKYLDASLRKLGKLSRRVSRRVGPDRHTGQVPSNRWKRANAQRNRVHHRIAYQRADALHKLTTRVAHEYGTVVVEDLNVAGMLKNRRLARRIGDAGFGEIRRQLAYKTEWNGGRLVVADRWFPSSKTCSGCGVVKAKLLLSERVYRCESCGLVMDRDENAARNLVALVVAASGAETLNGRGADQKTRPAGQVAMKRQPGSPVHETGTALPEAVSV

SEQ ID NO: 8580 - protein, 406 aa, unknown
  TnpB Polypeptide
MQRLQAFKFELMPNGEQVRKMRQFAGMARFVFNRGLVLQKARHEAGEKKLGYAALCKALTGWRNSAETPWLRDGPTHPLQQSLKDLERAYANFFAKRADFPRFKKKGQRDSFRYPDPKQIKLDQGNCRLYLPKLGWIRFRKSREVLGTVKNVTVSQSAGRWFVSIQTEREVAVPAPTGGAVGIDMGVARFATLSDGSYLGPLNSFRKHQAALRKAQQAMSRKAKFSNNWKKAKARVQKVQARIANARRDYLHKASTTISQNHALVVLEDLQVGNMSRSARGSVEQPGRHIRQKSGLNRSILDQGWYEFRRQLDYKLAWRGAHLVVVPPHNTSRTCPECGHVAAENRCSQARFACVDCGYKANADLVGAINVLRAGHARLACGVSGAVRPPAAGTHRSDSGAAQCRA

SEQ ID NO: 8581 - protein, 332 aa, Salinigranum sp.
MKSTVVDWRKGNSRPPPRFNEPSAVYDKRTLTIKDRSATLSTINGRVAVKYVLGDYQKSYLDDDDYQKRMGTLHYREEQDAFYLHIVIKKEVEERDGDKVLGVDVNLKNVAVTSTGSFYDGGELLWGQNHYFRVRRSLQHKGTRSAKQVLRRLSGRENRFVLNRLHTISGRIVKEADAHGCSYIAVERLTHIRERMDNGNDQIKRQMHNWAFRELQEMLAYKASEYGIRVEEIPPAFTSQTCSKCGHQSSSNRNSDGWFECNECGYSIDGDYNAAKNIGLKLLTLPEGKRPSGLGDGHLALKSGILNGNGDYTACDISSPDRESTDKPTSSQ

SEQ ID NO: 8582 - protein, 402 aa, Streptomyces sp.
VTQQVKRAFKYRFYPTDEQAAELSRTFGCVRLVYNKALEERTRAWYGEQRRVSYVQSSAALTEWKKTEELAFLAEVSSVPLQQALRHLQTAFGNFFAQRAKYPRFKRRKKSRASAEYTRSAFKWRDGKLTLAKMAEPLGIRWSRPLPQGVEPSTVTVSRDAAGRWFVSMLCEDTATPDPATAAAVGIDAGITSLVTLSTGEKISNPRHERRDRARLARAQRKLSRKAKGSANREKARREVARVHAQIADRRRDHLHKLSTRLVRENQTVVIEDLAVRNLLKNGKLARAISDASWTELRSMLEYKCAWYGRELVVIDRWFPSSKLCGACGTVRAKLPLNVREWTCECGAAHDRDVNAAKNILAAGLAVSACGDGVRPQRESSRTGQPSMKQEPQRVTAGIPRL

SEQ ID NO: 8583 - protein, 286 aa, unknown
  TnpB Polypeptide
MLKWKPPREYRSLTYNQSGFELKNTSGRPVLWLSKIGEIPIHLHRDIPENATIKQVTVEQEPTGEWYATFGFDVDEATPEKPENPERVVGIDVGILKYAHDTDGTAVESPDFSDEHERLERAQRELSRKEHGSNNREGQRKTVARRHADLKRKRRDFLHKLSNYYASEYELVAVEDCDAKGLIELPGNSRNRAGASWGTFLRMLEYKCEHEGTHFVGVDPRGTTKECASCGTETDKPRWVREHSCPSCGFEADRDANAAWNIRSRGLEEVGVGHSESTSSERRSLS

SEQ ID NO: 8584 - protein, 469 aa, unknown
  TnpB Polypeptide
MYFSRNVLVNDPELFEWCDTLAHKANNLYNAALFRIRQCMTSRKKDADKLTENELEVLSEIDRMNIALVSNDKKPRPIPRSGSLSYTFLDDLMKYTDNPDYICPELPKQTAQNMLKHASGDMKSFFEAIRAYNADSSRFTGKPELPHYKRKQGTCSFDVSNQDCVVRRNKKGNYVAKLPKTKCIVSLGRKVPGNLKEVHVTPMNGKYQISFVFDDQNTVPELLTEVPERIAAIDFGIDNFMAVTNNCRLDCLLYKGGVIKSANHLYNKRIAAIMSEQTKGGTDKFVPTPEYYNVTQCRNNTVNDFMLQTGKHFISWCVDNRIDTIVLGDNPFWKQEINIGHKNNQKFVQIPFDRMKKILEYQAERHGIRIMRQEESYTSKASFLDRDPMPVYEKNDSSCSFSGTRIHRGLYRTNTGELINADVNGSANIMRKCITDAFENNGLMHDRITVIKHPMYDAMVLNRTAQKNK

SEQ ID NO: 8585 - protein, 453 aa, Brasilonema sp.
VPLNVDNKQEFELLSRFQAGRQLYNACLNEAMKRLELVRNSELYLAVRQLPRTKKKERGDAFKKAREQYKYSEYDLHSFASITSKAAKWIAQKIDSTAQQKLATRAFKASERVMLGRAKDVRYKVPSRFRSMEGKSNKTGIRWKDDCLVWGKLVLQPIIDLDNPVVRHGLESPVKYVRLLWRILNGKRRWYAQLVNEGNPYQKPQNYVSDGLIGLDLNISNIAFVGDNHADLLPFAEKVSAFQDEITRLQRQMQRSQRANNLDNFEPNFEAKKGRKIIVKKGKVKKGKAQWKKSSNYLKAASKKRELERRKAVYAKTQNRRVVNEILRHGKYIKTENISVKGWQKRYGKAISAKSPGFVQSELVRKAEKAGDALGQKNGASPNNNTINRDASRSTQEGLPHFSSHSPGRSVTKFSTQTTALSQTHLDGTRIKKSLSQRVHRDVTGLPEHHRDL

SEQ ID NO: 8586 - protein, 370 aa, Klebsiella sp.
MKRAYKYRFYPTPEQAELLAQTFGCVRFVYNHILRWRTDAYYERQEKIGYTQANARLTTLKKEPNFEWLNDVSCVPLQQVLRHQQAAFSNFFAGRAKYPTFKSKRHKQSAEFTVSAFKYRDGKLYMAKSKEPLAVRWSRPLPSAPSTITISRDAAGRYFVSCLCEFEPALLPVVNKTVGIDVGLNTLFATDTGFKTGNPRQTERFADKLAKLQRRLSKKKLGSKNREKARQKVARLHAKIADCRMDNLHKLSRKLINENQVVCAESLKVKNMIRNPRLAKQIADVSWCEFVRQLEYKAEWAGRTLVRIDQFFPSSKRCSDCGYTMQKMPLSVRDWRCPECGSVHDRDINAARNIKAAGLAVLACGETVRP

SEQ ID NO: 8587 - protein, 417 aa, Eubacterium sp.
MRLVYKFNNYQNNDELFRLCRISKDLYNQALYVIKTNLKNENRFTFYSELDKILKDTPNLDGEINYRKLKAQVSQQCIKVLDKSIKGYVKSIKDWSKHKENYKGKPNLPNYKAKNGYNQLIYTNQCSSIKDGKIFFSKDLCISIPQWEKYKDKLTGFHQIRVNPKYGYTEIEIIYEYQEYSEYVDQNRFSSIDLGLGNLVSMVTDFSEPIIYSGAQIKSKNQFFNKRISFLKSITDTNNKKISTKQIKSLWDKRNKQLNDVFHKISRHIVNILIQNNVGNLIIGHNNGWKDSINIGKVNNQNFVMIPFDKLISYLKYKCEMSGIMVIETEESYTSKCDALALEIIHKHDKYKGKRVKRGMFQSSIGKLINADVNGALNIMRKVVGDSYVCKIIDSGLLFRPIKFNDLYSLKIVKVYE

SEQ ID NO: 8588 - protein, 397 aa, Kribbellaceae sp.
MSRFRLYPTVAQQSGLAEHCAHARYVWNLALEQWSMWTRGRRTGPGYVKQARQLTEARSAFAWLRAGSQTVQQQALRDFDQAVKNFFGGSHGRPTWRKAGVSEGFRIVGSQAARLVKLNRKWAAVNVPKVGWVRFRLSRAVPRAKSYRVTRDRAGRWHIAFAAVPPPIPAPGTGEVVGIDRGITVSAALSTGDRLHCPQLSAAEDARLKHLQVRLSRCLRGSKRRQRVKAAIAKLHARSHDRRKNWVETTSTDLARRFDIIRVEDLRVAQLTKRPRPKPDTERTGVWLPNGRRAKAGLNRGILVNAWAALVRRLEDKAVGRVEKVDPAYTSQTCSVCGHCASENRKSQAVFRCVVCGHSANADVNAAINIAAGRAVSARRETKDVSSKREPQLAAST

SEQ ID NO: 8589 - protein, 375 aa, Cohnella sp.
MNKAYRFRIYPSTEQLAMIRKTFGCVRFLYNQMLAERQTKVERYKDDKEQLKQQRYRTPAGFKNEFDWLREVDSLALCNAELNLKTAFRNFFRDKRLGYPKFKSRKNPVQSYTTNNQNGTVRIAEDGKHVRVPKLGCIRIKLHRQIPDGHAIKSATISRNPSGKYHISILTEYKANLELFIPRLESVLGLDYSSPSLYIDHMGTSADYPKYFRQMEARLKREQRILSRRKKGGSNWQKQKLRVARLHEKISNQRKDFLHKESRRLVEAWDAVAVEDLNMKAMSRTFSLGKATMDNGNGMFRAFLSYKLTERGKPLVRIDKWFPSSKRCRACGTINTGLMLKDRVWVCDGCGTTHQRDENAAGNIRDEGIRILGIA

SEQ ID NO: 8590 - protein, 402 aa, unknown
  TnpB Polypeptide
MYLIETTVIKPSQKALYRACDELCFLSKNLYNSALFIQRQNYFEGKPYISYFDMEKLMRKTKNLDFYALPSSPASYVISQLDESYKSYFALCKLKAAGKYQGPVRLPRYKDKINGRNVTIFHKTRLIKRTYKKEGLIHLSKTSIKFKSKIPLERIQEVRVVPKNGYYELQVVYHADEVLKLENSNYAAIDLGLNNLATVATNVSKPFIINGKPLKSINQRWNKRKAKLQSKLKKGRRTSKQIQTITNKRNRRVKNYLHQASRALVNELRRLAISKVVIGSNKEWKQGINLGRRTNQNFVQIPHTRFIEMVTYKAALTGIEVITKEESYTSKCSFLDNEPIEKHEEYAGRRVKRGLFKSKNGKLINADVNAAYNIIKKHLGISPSDLDPVQVLSTPNVLVFGS

SEQ ID NO: 8591 - protein, 234 aa, unknown
  TnpB Polypeptide
VDFGILCSAFVSDEREPRLMPSTLTAGQRRRLLGLERRKNRQITWAKKHNGGRRSNRLGRTISQIAKLRARQVRRRQDFIHKLTTDLAKNHGWVAIEHLRVKGMTKSAKGTREEPGRNVKAKARLNRAILDNAPYERQRQLAYKAPRFGSELRLVRPAFTSQTCSACGLRDSESRPGCGRLFVCTACGHVEHADLNAARNIHNLAAGQAVHSTRSHLRAARPSSRMREPVGTIA

SEQ ID NO: 8592 - protein, 411 aa, unknown
  TnpB Polypeptide
MHIIIPGIVHQGNSTALKQLMRDWSSCARYAYQRIHRDGLTGNAIKIACKPIYMEKLNQRYIADAVLKAQAIKKDHVIFGGKKRWRDLLSGLLPKKEWQEFRDSELYSRGDRTKKGNPNIRVLNTPEGYKLRIGLPGPREFLMFDLYIPEGRKNNKKDYKELLDLYRDCYDVRIKNKAGKFHVSIGIEIPDVKPIYLCSNGVIGIDTNPDGLALVEIEKDGNLIKHEFLKCSRLQFAQHDKRKNDIETLALQVVNKAIQGNKGIVVEDLKFNDGKRGSRKFNRMRHNFIYSQLLLAIERRAIKDGVELRKINPAFTSIAGILKYQGQYSLNRHTAAAFVIGRRGMGFMEQIKVRLELGENKKLNLEGRGFKIALTVKAYSYFRHLYRVVEMKMPAVTPPCLTPQLGNYGTG

SEQ ID NO: 8593 - protein, 191 aa, Escherichia sp.
MRTTSEKKDRLSTGQRSPYGAQKEPEYIWLNDVSCVPLQQSLRHQQAAFANFFAGRAAYPAFKSKRHKQVAEFTASAFKHRDGELYIAKSKSPLDVRWSRELPSAPSTVTISRDSAGRYFVSCLCEFEPVSMPVTAKTVGIDVGLKDLFVTDTGFKTDNPRHTAKYAKRLTLLQRRLSRKQKAQETVLKPA

SEQ ID NO: 8594 - protein, 355 aa, unknown
  TnpB Polypeptide
MPIHTKTLKVRVRDKHAKELSRQAAAVNHVWNYVNELSSRAIRERGQFLSAFDLHPYTKGAGKLLGLHSQTLQVVAQEYVIRRKQSRKQRLSWRKTHGVRRSLGWVPVNTGAAQWKNGQVFFNRQHFKVWDSYGLSQYRFRSGCFVEDARGRWYFCVAVTVKPESRCGTGSVGVDLGLKTTATPSEGEPLEAGRFYRDQEQKLAVAQRARKKNRVRAIHAKIRNRRHDALHKYSRELVKNNGLIVVGNVSSSGLAKTKQAKSVLDAGWSTLRTLLSYKCEHAGSVFLEVDERYTTQTCSCCGAISDNSPKGRAGLGIRVWTCECGVAHDRDINAARNILAAGHCRLAGGIPALTT

SEQ ID NO: 8595 - protein, 671 aa, Streptomyces sp.
MVMRAARTARRFRGKNKAPKWEKPDGGTVSVMVLPLAVTDTRDLTRLNKLFGAMWSIKRTVQRDARNRVDAYRAAHHEGGDQGAKAVRQRLGLSREAMERCAYAHLEDSGHLKHHASKALVMHMADEVWSGVQRHLFPDTTGKRHGRPKIGRWHDFTRIPGRARSHTTANKWETFRLVGTLYGHTMAYTDGGRCEVRQPHRMPKPVVPTGTVPTGKTTASGKPLARKATWWDHAGPFAVVFAGDPDSVRGDLVLPVRIPQGPGQRARVEHFLADSGRWHKVDLVRRRKASAPGGWVYEAHLTVLGPGHTSPAVCEMRRRAAALDRIGGVDGNVSNLSIVSFPATLDPAEGAPASTEITLTDAECTQLDKRAKKRRGRARALERSRRSMNTGQYGLSRKQTRRAERRVSKGLPVKTVTVPGGARATRADGVPKQAYRRDRLSVNYLQTRARQAEHAASAAQHRRHRARRIARQVIAVHGSVMVVEDCDIRTWYRLWGKSLSRTTPGMLIKALEIECQAAGGHLIRASTWSTTLSQRCMCGGRVSKTLRDREHKCGACGLVGKRDLVSAALAAFVRLTDADDPTTAYLDTVMSRHAQILYGQGLEEALRESTTPCQNIPWDAGHVAVPDQRETSAHRTAGKRPRATPDETRPVRGHAGKPGRRPGCDPWLALW

SEQ ID NO: 8596 - protein, 422 aa, Streptomyces sp.
VTYTKCSRINGLDRRGGLDDPCVQVPHAAHHPPESSPVRDAAGSLLPLQRRAPGTPRRLPARLEDKRQVRAAVRAAQGHPGDPERQGRWSFSSQQATLRRLDKAFAAFFRRVKSGETPGYPRFRGVNWFDTVDFPKDGDGCRWNSTPHDPVPRVRLQGVGHVKVNQHRAVAGRVKTVSVKREGRKWFVVLTAEQDQPEPLPPTGSAVGIDLGIADFLADSGGGFVSNPRHGRRAAAKLEAAQQALSRFPRCKAEDRTRNHRRAVDKVAQLHGKVRRQRLDHAHKTALDLVRRHEVIAHEDLKIRNMSKAPAPKPDPDKPGAFLPNGAAVKAGLNKSINDAGWGGVFLTILTSKAESAGREVIAVDPRNTSRRCPECGHTAKENRPTQKKFHCQACGHNAHADTVGAINVLRAGLVRRKADTA

SEQ ID NO: 8597 - protein, 389 aa, unknown
  TnpB Polypeptide
MYYQSYKYRIYPTKEQEVLLNKTFGCNRFIWNQMLNERIKVYEKYKEDTDSLYSYNYTTEKDYKGEYDWLKEIDSISLQQTRLDLKQSYTNFFRNLKKGQISFPKFKSRHRKNSYRTINVNGNIEVHPLRKRIKVPKLGWIKYRDDRVPLTKINSITLSKTKSGKFYVSILHQKKDFKELPITTNIVGLDIGIKNFLVTSDGEVFQNLNLKRINEKKLNKLHKDLSRKKKGSNNRQKSRIELSKLYEKLNNQKQDYLHKVTNSLINENQVIVIENLNVKGMLKNRNLSKSIQNLSIHKFIQMLKYKSEWNNKTVIQVDRYFPSSKLCSHCGTKNEDLTLKDREWTCKKCDTTHDRDHNASVNILHEGKRILNKDTAGTAEINACEVITQ

SEQ ID NO: 8598 - protein, 415 aa, Mycobacterium sp.
VLAGRRFRVEFTSEQQVFAEQIGAACRVVWNVGLEQRREYRRRGAWMNYVPQAKELVEAKAEHAWLAEVPGHCLQQALMDLDKACREHGTWRVRWRSGRRWAPAFRFPEGSKMAVEQLNRRHARIKLPKLGRVKFRSSRSLAGETIRSVTLMREGRHWYLSVLVEDGVLAVEHPNPHSAVGLDRGVAAAVATSSGQLLDQAFTTPAERRRVVLLQRRLSRCAKGSANRNKVRAQLAELRARERHRREDFCKKTAHGLAHNHALVVMEDLRTRNMTRRARPVADPDNPGGFLPNGRSAKSGLNKSILGKGWHRFELALISVSRYTGTEVVKVPAAFTSQRCSVCGHVDPKSRESQAVFRCTHCAHSEHADVNAANNILAAGLAVTACEAPGRPAGRPGTPKQEPAGNREELLLHTA

SEQ ID NO: 8599 - protein, 282 aa, Streptosporangium sp.
VRFRWTKDLPGLTRGGAAGRITGARLVKDAHGRQVVFRTQTLLAPVPAVHPGHTVGIDRGVTVAPALSDGTMREHAPWLTPGEKEHLRRLEKTSARRRRTRHRGEPTSHRPARTYDRIARLRARAKRRAVDWQHQTTTELVAAFSVVVVEDLKITNMVRSATGTVGNPGVNIAQEAGLNRSIAGEAWGRTAALLEYKTSDRGGHVVRVPARGTSQTCHRCGHRDPAARDGIRYACANPACGWVGHADTNAAINIKNAVGMPVSGRGDLGVTRSAKRQPPHAA

SEQ ID NO: 8600 - protein, 359 aa, Streptosporangium sp.
VAVRRSYKFLLRPTVGQAIALTACLDDHRALYNAALEHRRTAYAKARVNIRYGEQSADLKHIRAEDGDGQGRWSFSSQQATLRRLDKAFQAFFARVKAGRTPGFPRFKGKGRFDTVEWPKDGDGCRWNSRPEHPTTTYVRLQGVGHVRVHQHRPVRGRVKTISIIEREGSRWYVIVSCDDVPAETLPATGAAVGIDLGVASLVTTSDGDPLDNPRHLAASADRLATAQRTLTRKKRGSTRRRKQVARGAARQVRRQRLDGAHKAALALVDAYDVIVHEDLRITNMTKRAAPRPDGEGGYLPNGAAAKSGLNRSILDAGWGVFLTILSHKAESAGRELISVNPANILRAGLALREAAWAA

SEQ ID NO: 8601 - protein, 425 aa, unknown
  TnpB Polypeptide
MKLTKKVALYPNQTMTKVLDDLCDYRRYCWNQGLELWNDLYDQRVEMVPVDLRKKSQLAIKDKTITFSEEEQELLTLFPSPSHRVVQNILVADKADWQYSLSSRVLQMAIKDLAHSWSAFFNSKKPKKKGSKKKSSKKKKRKVGKPSFRSKKSPKQGFKTDYARIKNGKLVLDKPRAYKDAWYGISFKGYDLPDGKIKHCAITKIGNSYYASIVIDCPEQPLPKTGKKTAIDANVNHFDYTDGSFKVFPKRLERLYAQIKHYQRLLARKRHENGKKATRSKQYFKVRIKLQKCYQRVTAIQNDLLHKFTTMIYQMYDTVVIEDLDVHAMQMQKKAKNLHRSLFGRFRLYMEYKAIKFDKTLILADQFYPSTQRCSNCGYVKTGDEKIGLDGNKKHGTKHNEYVCYSCGFIADRDQNAVLNLLALA

SEQ ID NO: 8602 - protein, 412 aa, unknown
  TnpB Polypeptide
MIVKRVEKHIINRNHKHFSMLMDKCHEAKNIYNHANYLIRQEFINHGNWLRYEDIEKLLHDDLEYSDYWNWNLANSSQQILRVLDKNWKSFFKSIKDWKENPEKYTGRPKLPKYLPKNGYKEFYLTTNQAKLKKDGLIHFPKSMNGFYIKPKFIEYAYETFQQVRIIPKNDRVIVELIYTESIADNMLKTNDNYMSIDLGVDNFATIVSNTGIATIINGKGLKSVNRYYNKLIAKHKSIHDKSGNTGYSHKLYSITNKRNDKIDHFMNIASNYVIDLAIKHNISKIIIGKNDGWKQKVNLGKITNQKFTTIPFNMFIQKLTYKCEHLGIEIIIIEESYTSGTSFLDNELPTKEFYNKSRRIHRGLFKANTGKLINADINGACQIMRKVFVNAFDKLDNIGFVMHPVRVNLTF

SEQ ID NO: 8603 - protein, 386 aa, unknown
  TnpB Polypeptide
MTTVLKGFQYRIYPNKEQRKLINKTFGCCRFVYNFALAKQKKEETMWSTVNEMVQQGYFARNNYRTRFFNGTTAKTWLPELKKHNEWLKEVDSVSLQTSIEDLADAYDRYYKKQNDKPRFKSKNNPVKSYTTKSINGNIQLIQNKVKLPKLGFVRCKSSREINGTVKRATITRKASGKYTVTILAEVLVEQLPKTGSITALDLGLTDFAILYSGEIYENIKPLKALEDKLTKEQKVLSRRKINSSNWLKQKYKVARLHEKIANIRKNYLHEVSTEIIKNHDVIGIETLKVKNMLKNEKLAKSISDASWSTFKTMLEYKAKWYGKEVISVASTFPSSQLCSACGIQNPLVKDLGVRQWICSNCGAEHDRDYNATVNIYKKTQARLVA

SEQ ID NO: 8604 - protein, 337 aa, unknown
  TnpB Polypeptide
VETTGHPPRHETRADPPLQGQNHKSSEHAREYILVEYGTRGDIDIENLQQVRAVYQPALDRWELHLVCKHEIDTPEPPGEETAGIDLGINRFAAVSYSTGDTELYPGNRLKQDNYYFSKEIAKCDDPGGECATQLHHKKSERSHQFIHAWAATVADQCVEHGVSDVYVGEPKGIRTDDEGDARDWGSHGNLDLHSWPYATSTDVLEYKLKERGITLHRVSERRTSKTCCNCGRERDANRVERGLYDCDECGVVAHGDVGGAENIRLGLGEVIEDHIEPHEDGESNSESDESCQCSREEMNTVSLYTGEDRSTGRLARPDVYYYDLSNGFSPREQVVH

SEQ ID NO: 8605 - protein, 390 aa, unknown
  TnpB Polypeptide
MEREVTTTVRGKLHSLTNRKSELLDREYTAWQTAVHGGDADLYSATKQQASKVQSQKDPNEDTEQPLVLRNDKLRVEHDDDTVLSSWWVKIPVYDPDIDQGSSIWCPIHIPEKDTETIRDGDIRDSELVHDDGEWYVHLVVKRSVAVSEEYDDVLAVDMGAKWIACSVFLSDRDTMFHGAEVRRVREHYKQLRKSIGKAKVRQGAQVIEDLGDNESRTVEHELHNVALEVVHRAAERNAVIVVGDMTGIRYDNDEGRYVNDKTHKMPFAKMINFLTYKAHLHGIECLPVPEDDTSKTCWRCGSQNTTRDVQGRVECEECDLDDNGDKNGASNIGQRALGKDISSPLSSVGAVLAQPETQVVLKDSADEMEPANLPLELVGATPSGGTPRL

SEQ ID NO: 8606 - protein, 312 aa, Coprococcus sp.
VLKAYKYRIYPNREQRIQIAKTFGCCRFVYNQTLAYPNREQRIQIAKTFGCCRFVYNQTLAYRKEVYEEEKKSVSKTDCNNYCNRQLKKEYEWLKEVDKFALTNAIYNMDAAYRKFFKEHAGYPKFKSKHDNHKSYTTNITNGNITVDFERNRVKLPKLKDVKAKLHRNFSGQIKSATISQVPSGKYYVSILVETEHMEMPHTNQNTGIDLGIKELCITSDGKKYVNLKFIRKYEKKLIKLQRQLAHKEKRSQNYYKIKKKIALCHEKITNSRKDYLHKMSHEIISENQVIVSENLQIKNMVKKSSFGKSHK

SEQ ID NO: 8607 - protein, 415 aa, Streptomyces sp.
MKLTVLVKLLPTPEQASALAATLTACNEAANWASSIAYESGVSRNFGLRKLTYTQIRARWRLGAQAAQHVIKKTCDAYATLKANLRAGNFGRPGSKCYRKAAGKPITFRPEGAQPYDDRMLSWQIAERRVSIWTLAGRVKDVRFTASVEQLATLALHRRGESDLVYRDGMWFLMATCEVPEQPLNTGPADFLGIDLGIVNIATTSDGEILAGRCLNRTRARERALRTKLQRKNTPSARRRLKKRRRKEARRARDINHKIAKHVVAEAERTGRGIALEDLTGIRERVRLRKPQRATVHSWAFAQLGSFIEYKARKAGVPVVHVDPAYTSRTCAECGHIDKANRVSQAWFACRSCGFVDHADRNGSRNIRARARKLWRRGAQSTAPAPPRNPGVELDASAAPPPVTPAVQALRLSEG

SEQ ID NO: 8608 - protein, 359 aa, Domibacillus sp.
VETISLKLELMKPTHAKEQIYGKMTELNTGFSNWLLQYDELSKATSKVYKLFSADKLPSAIVNQTIREVKSQKKNQKAKTFRRFWCTFNNQKLKVEKENGLYKLSFPTLEKRVGVPVVAELYQQHWLDKVLSGEAKLGAGKLYEKKGKWYMSVAVSFEPKVVSSSSKVMGVDVGLNYLAVASIGTNSLFFKGNEAAFIRRTFSSRRKILGRNKLLSVIKASKNKESQWMKNLNHKISRQIVRFAAENGVRCIRMEDLTGIRRKAKSKKDAGRNLHSWAHYQLQQFIEYKAKMAGVQVEYVNPHHTSQTCKCGHVDKKNRKRHTFVCVKCQYKLHADANAAINISKAISGLSKKKHKQAA

SEQ ID NO: 8609 - protein, 504 aa, unknown
  TnpB Polypeptide
MHTVQLLLKTSKYERHEIDRRFHALAHLHNVCVKHARKCMIRLQHDKRYAELRQLYNELVKKEKMSKEEKSQKKKLAKQLAACRTEQGLSKASLEHYIKVCGKQFSKLLSSQQVQAEADRVWCGVERCLFGNGKELHFKKLMDFDTIGGKSNKNGARFDLDAMYVNWLGLSLKCYLPKSENSLSYVWESLKGKISYCNIKRLMFSSGWRYYAEIVVSGAAPTRVSIGTSTMGIDPGVSTIAGVSEDACVLEELAPNAIQYEKKIQKISQRMDRSRRISNPNKYNEDGTINRSNRDPWKYSKNYVKMCRLLKSLYRKKHAYIVDSHRKLCNKLITIARYFPVEKMHFQALQKRAKETKRQEKKTEVKQKDGTVKVIQKYKRKKRFGRSINRRAPARFLLELKRKAEAVGGVYAEVDTKEFKASQYNHVTDTYEKIPLSQREKEIGKRKVQRDLYSAFLIRNADLDFKHPDREKCEYEFEYFANLQDQLILKMKESGLSMRQCFGF

SEQ ID NO: 8610 - protein, 465 aa, unknown
  TnpB Polypeptide
MSNIQVIKFSLTPGHSDFKIAQQLCEESRVFYNSVNSCLRARYFHKSTKEYADHIYDIPQQFNIDVTINGSWYSYNWVWENVAKTVRKYLKNKNKVKLLTVKQQQQVIRKLCNNWSSYWELWKLYKKKELTNNPNIPKYKKNFNGIDFNNQMISKSLVKKGVFKLSGLSQGFIIPEYLDKTTIRSGRLVVNNAKSFTVELLYEVDNVYTVADNPVIPDDMLVAAIDPGVDNLFTIAFSDYREALLIDGKQLKDTNNKINHKISRIQSAHDIERNNLMLKTGDMKLPHIQSQRVDDLWDYRDRVLYHDYTTIVNEVVRTLCSTGVECVIIGYNQSIKQHMRMGKKNNRNFAYIPMKKILDNLAWKLSKAGIIVIWTEESYTSRASFIDNDPLPVYGDNTVKVFNGYRKHRGLYVSKNGGSIHADVNGAYNIMRKVVSWFQSKETGMMIRDTVVYPARRVRIISLTV

SEQ ID NO: 8611 - protein, 424 aa, unknown
  TnpB Polypeptide
MTIITEPLSLEKDDKRLIKNNKIKQSLKNTRDRRKNQEARTYECKIVKNKLTPQQLETLDKMFLEAKWYYNSIINHLENDNINTFDNKVKTVKVRMGSESNDYEDRVLEVLPASMKQKLVTRVKDSLSSLKAKKDKGYKVGRLDYTKNITSIPLKQYGIDYNILSNNKVKVSKVGHVNVRGLDQFSQDAEWSTANIIKKANDYYIHITVYVNKVIDKSWVNLPIIGLDFGIKDHITTSDGLKFNSVITITRRIKNLQRKLSRQVKGSKNYIKTLMKIRRSYDRLSNLKEDAANKIVHYLLDHYSNIIIQDENIKGWHSGLFGKQVQYSILGRVKARLVSNPRVIVLNRSVPTTQYCPDCGALNKHSLDKRVYSCDCGYFKDRDTHAAMNMINLYIKNSSNDNIVKKSPVECGSTLEELITSGTI

SEQ ID NO: 8612 - protein, 403 aa, unknown
  TnpB Polypeptide
MCNTIKDNTINSSLVDDNRILKNKRISETRKSTRIKRKSQVVKTIEVKIVNNKLSKIQKEKLELLFLEAKWFKNDIVSYTTTNDVKDYDTKIRTVQVRMGKDSDVYDERQLKVLTASSKQKILDDFISNIKTLKTQKNNGRKTGKIGYFKEVNSIPLKQYSKDYKINGSFVSISKIGRVRVRGLDQLSQGADISNAQLLKKPNGYYLHITTYYPITVDNTIMSDHCGLDFGIKDHITTSDGEKFNTLVPESPRLKKLQRKLTLQVKGSHNYVRNLVEIKKEYQKISNKKDDAANKIVHYLLSKYNTIYMQDENISGWHSGLFGKQVQHSILGRVKAKLVSNPRVIVLDRSVPTTQYCPDCGVLNKHSLDRRVYECSCGYFKDRDIHAACNMIVLGQYDNCIKR

SEQ ID NO: 8613 - protein, 356 aa, Prochloron sp.
MARKWLGVSRYVFNKTVELLRDGFVKANWKAIKIGIINGLPEWAKEVPYQIKSIAIRDACTAVREAKKKYKKTQKIQRVRFRSRKDLIQSCFIPKTAIKEKGIYHTKLGSLAYYQKLPNNLCDSRLISNNGNYYLCVAHKVTAPPAENQGRVVALDPGVRTFITFFSETSVGKIGHHDFSKIQRLCQHLDNLYSRISKAKQNQKRRMRKAARRMIIRIQNLISELHHKTARFLVDNFDVILLPTFETSQMSKKRGRKIRSKTVRNLLTFAHYRFKEFLRFKAQETGKIVVDVCEAYTSKTVSWTGEVLNIGGSKKIKSKVDGQVMDRDINGARGIFLRALGDTPWLRNQLALVSQC

SEQ ID NO: 8614 - protein, 376 aa, unknown
  TnpB Polypeptide
LGNGEYVWARVIRSAKRKTDKWAGFISEIEHAEKTNDWFPYTVRLKLRNGKVYAQFSREEKFPEVAITKNNGVLGIDINAYPFHLAIVHTAKDGNLEKYVRISLDNLLEGGSEKREYLSWQVAHQVVEIAKRERKALVVENLEKLPKGKRGDGLPKLRQKLQKWIYKGVLQKIEIVARRNGIQLIKVNPAYTSIIGKLKYAPLYNIDEDTAGAYVIARRGFGFKERLPKNYRKLLEDKEFLSYSVARVEDRITKLRKEIEAEKNEYKRNKLRSDLRRLKGKLKLLLGSLLDSGESETATQQTVNRKMERVRGLTHVRQKSWQVLSVALAFSCLVSFRDLSPLKRVLLLRDWVGAAKRDSPSLPGQGTTVQNMYSFV

SEQ ID NO: 8615 - protein, 412 aa, unknown
  TnpB Polypeptide
MTDDTMLLVEKQIIRPSNPLYKELDKLCFLSKNLYNAALYTIRQHYFNTKKYLTGFTIIKDFTKENQVDFRALPAKVSNYTLQLVDQNMKSFFALLKKKQANQYDKPVRLPKYLDKTTGRQVVHYHKQALRLKKDGFVKLSKSDIEFKTKVPNKDIQYLKLVPCGNHIKVMIGYYKTKEQVKATQKRIASIDIGQNNLMTVTSNVFHPVIYNGKPVKSVNQFYNKIKAKEQSRMMKQNNVYWSKKLSQLTLWRENQIANYFHKATHHFVNYCIANDIDTVIIGRNQQWKDNINLGKKINQNFVSIPFGKLYDLLKYKLELKGINYIETEESHTSKCSFIDKEEITHHDSYMGRRMRRGLFKSAEGVKYNADINGSLNILRKYITKNGTYTDELHEELVRHMTNPRKLKVKNK

SEQ ID NO: 8616 - protein, 412 aa, unknown
  TnpB Polypeptide
MTNDTMLLIEKQIVRPSNPLYKELDHLCFLSKNLYNSTLYTVRQHYFNTSKYLTAFTVIKDFTKENQVDFRALPAVVARYTVQLVDQNMRAFFALIKKKKAGKYTEPVRLPKYLDTTSGRQVVHYHKLALSLKKEGFVKLAKSDIEFQTKVPKNEIQYLKLVPCGNHIKVLIGYCKTKAKQKVTQKRIASIDIGQNNLMTVASNVFHPIIYNGKPVKSVNQFYNKIKAKEQSCLMKQNNVHWSKKLGQLSLWRENQIANYFHKVTHHFVNYCIANDIDTVIIGRNQQWKDSINLGKITNQNFASIPFGQLYDLLKYKLELKGITYIETEESYTSKCSFIDKEEITYHDSYVGRRVNRGLFRSKDGYKYNADINGSLNILRKYMTKAGTYTDELHNDLVAHMTNPRELKVVNK

SEQ ID NO: 8617 - protein, 369 aa, unknown
  TnpB Polypeptide
MDKALKYRLYPTKHQANLLQTQLDGCRWLYNTLLGERKGAWEKEQKSFSYFKQCQRITELKAEQPNLNNVYSQVLQNVADRLDKTFRAFFRRVRAGETPGYPRFKGYNRYDSFTYTQFGFSLNGSLRLAKVGGVKIKLHRQPFGEISTCTIRRQNNKWYACFATEYEPEPLPPSGKDVGIDVGLESFATMSTGDKIPNPRFFRTDEKALAKAQRKLFRMEKGTPERHKAKKVVSRIHERIANRRHNFIHQEARKVVNTFGLIAVEKLNIKGMLGNHCLAKSIADASWGQFINTLSVKAEEAGREFVAVSPNGTSQLCSRCHSIVPKELNVRVHFCPACGLVLDRDLNSAYNILALGLQSLGKVPRSLLL

SEQ ID NO: 8618 - protein, 414 aa, unknown
  TnpB Polypeptide
VRRTNTFKLSPTKEQEQKLFLLAENCARMFNEINYKRRQSLFSKNFDWNTDFFYHKYKKVIGSATAQQVTRKNNEAWKSFFALLRLKKQGKLPKHIRKVSPPGYWKDRKTGKRVLTILIRCNCYKLSDKRLKLPFNLEINWKGQNKWKGKKQGRLEIRYDNLSKKWYAHMPVEVEKPPPLPPPLHQLKGDKKKKKEAYVDLGVKVPIMVWVDGEVFGYKANSMLSDWWYWNTEKIAKHQEELKKKNNKHVSKRLKALYRKRKRRFRDKVNKIVKDFMEKCWAKGVSEIVCGDLRDIRKSANFNKKSNSMIHNFWSVGHVYKRLKEKAEEYGIKTVRIDERGTSSTCPRCSSKKIMRHKRLFKCKECKLEAHRDAVGCVNIGNIRLAQEDGNMFPAGVVNGAVARPSLATLHSVA

SEQ ID NO: 8619 - protein, 418 aa, Okeania sp.
MRTAYQYKLRPNSYQIATIEMWLELLRRQYNYRLGERFSWWSENRCPVNACPLVMPIPQLRDNPNYYSQKRDLVNTKDKFPDYRLIHSQVLQDCIKRVKLAFDRWFKADKNGHKLGKPRFKGRGRYRSFTYPQIKLDCIEENQISLPKIGKVKLIQHRPIPEGLTIKTVTISRKADGYYVTLSLEDKSVPTSTSKVEPTLKNTLGIDMGLKEFLVTSEGESVPIPQYYRSSQQRLKTLQKRLSRKKKGSKRWLKAVKAVAKQHKKVADQRKDFHFKTANELLSKAEVIAHVDAERGVPEANLNIKGLAKTRLSKSINDAGWGQFLTILTVKAGNAGQKTIAVNPKNTSQDCSNCGEKVKKELNIRTHSCPHCGAVIDRDLNAAINIKNRAVGHSVLKARGARRNTGAEKREAHTIGPA

SEQ ID NO: 8620 - protein, 447 aa, Okeania sp.
LKARYKYRIYPNHIQVTRINQLFGCCRYVWNQSLAHCNQLYANGSKKPSYVDLTKQFITKAKRELVWLKEVASTPLQQSLKDLDQAYKNLFNSCTGKRKGVGANGRSPVQPPLFKSRKSRQTARFVGENYQVGPDKIYLPKVGKIKIVWSRPLASKPSSVTIIKDSAGRYFASFVVETCAEHLPKLGKSIGIDLGISTFATLSNGDKINAPKPLKNNLKKLAKFQRKFARTESGSKRREKRRLKIGKLSYGMLRKHTKIKDIRTDFLHKLSTDLVRKYDVIVLEDLNVSGMVKKPPTEELRYRKLAKAISDLGWRQFRTITEAKCEKYGREFKVISRWEPTSQKCSFCGFKGGKKELNVREWTCLNCGTFHDRDVNAAVNILEVVQPKTKVETAKTKVVETSVQLSLFNEVAEGQPETIKRTRRRGKSSPKKDVRVSESSTRPESFL

SEQ ID NO: 8621 - protein, 375 aa, Nanoarchaeota sp.
MKSTIKIKLPYRKELVETMQQYSYSANRVIDFGWNIHTDNKRELHDLTYYKIRNETQLPAQLVCSSRDKAVEVLKASKFKHSKPIMKNYLTIRYDARSFSFKCDKENYYVSLSTIYGRIKFPIEIPEYYWKYLDWKVCSADLIYNKGLFLHIVFSKEIHATNVSKGFLGVDIGINNIAVTSDKRFFNAKQIKRKKLMFKRLRAKLQSKGTRSSKRRLKFLSGRENRWMTWVNHNISKEIVKCREGTIVMENIKGIRTNKGRKFNFWLHSWSYYQLQFFIEYKGIMQGKRIIKVSPYHTSKSCSRCGNIGFRSKCFFVCSHCGYSLNADLNASFNLAKHSSIRENVLVAVTQPYIQPCEHKGSLKAIACEIMDKIL

SEQ ID NO: 8622 - protein, 492 aa, unknown
  TnpB Polypeptide
MLRRAVAVEIEVTKELNKLLCSVESAYLGIVREVVAYAVANNVLNATQLHKLFYHKYRSEYQGLHAHLVIQAIRQASEVAKSFMERRRKGLASKPYPEVKAVSIRFTEFTWSYDQFIKSIAPVRLELSLLGVRRVVWLRLHKRFWLYWWRVLSGEAELASTLIVKRKANKWYAVFVFEIKPKKELPRAIVAFDINENTVAVSRVDLPSTVDKVVDWNRQYMVPELYTIKTDFGRLARRYEMVRNAIIEKLKPEFALLNGNYVNVTNTREYRKLVRKLREEDRKLGRVRQIANELTKTLAIIITEELGDNPQESMISDVGKGELRHRIKQIPFRKLESTVEDKALERGSKIFRVSAYRNSRVCPIHFTRLERTDDWHILQCPLGHLVDRDYASVMNMAWKTTPESWTKAFWWNMKQEMNWRKHESESNPLIPLSLVQYIHAVLKTLKASEESPAMLARGKPMNPTGEANEGGGEETTQKGGGQEKERGLMLIL

SEQ ID NO: 8623 - protein, 406 aa, Opitutaceae sp.
MLRLKAYSYRLQPTPTQLAELAAWSGALRFLWNWMLAQRSDSYKASEGRVKVGYGEQAAQLPAMKEMFPWMGLVPSQVLQQTLMDLDRAYVNFFEGRGQYPRFKRKSGSAPGLRWPQGVEVNGRCVWLPKLGRVKARFSRPITGTIKSATVRFDGLDWHVSLLVEQEVATPAMREGPAIGLDAGVTESLALSDGRILRLPVATDAEERRDAILARRVSRCEMGSHRHLVAKRRLLAFRRRISNRVNDARHKITTELAKNHGRIVVEELALASLTRSARGTVEAPGRNVPAKARLNRSLLEQGHAETVRQLGYKLGWLGGDLVKVPAAYTSQTCPQCGHVCPENRPTRDRFQCVACGHSGHADTVAATNILAAGLAVTARGGTWVPVKREPARKRRLLRRLAGIPAL

SEQ ID NO: 8624 - protein, 407 aa, Burkholderia sp.
MQRLQAFKYELMPTGEQQRQMRRFAGSCRFVYNKALALQKARYEQGDKKLGYAGLCKELTAWRNGAETPWLADAPVHPLQQSLKDLEHAYANFFAKRADFPRFKKKGRSDSFRYPDPKQIKLDQANGRLFLPKLGWLRYRNSRAALGVVRNVTVSQSCGKWYVSIQTQREVEQPVPQATTAIGIDMGIARFATLSNGAFYAPLNSFKRHEAALRKAQRAMSRKTRFSSNWKQAKARIQRIHARIGNARRDYLHKTTTTISQNHAMVCIEDLQVRNMSRSAAGTTENPGKHVRAKSGLNKAILDQGWFEFRRQLDYKLAWNGGWLIAVPPRNTSRTCPCCGHVSGDNRQTQDQFECVECGFEENADVVGAMNVLRAGHARCACEVSGESIPPAAGTHRSDSGAARCRA

SEQ ID NO: 8625 - protein, 381 aa, unknown
  TnpB Polypeptide
MNMQEIKRTVRIKLLPEDAQLLLETIKAYTDACNWICDIAWEKKLTNKVALHHEVYYPTRKLFNLSANLSCSARDKVAEAVKSSLKRKGSKPHFDFTPIRYDARTCTIKPDYCTLSTNGHRVRCRFILGDYQRSYLEDKSWEFGSADLVYRNKAFYLHLVLKKLIPSPNPPKCVIGVDLGVKNIAVISTNKFFNAGKLNWRRNHYFRVRKSLQSKGTRGAKRVLRRLSGRENRFHRWALHNISKWLVSHASTFDSPIIVFEKLTHIRSRAELGRKGNRQVHSWGFAILQRFVEYKALAQGIPVGFVDARYTSQKCSRCGHIAKGNRNGAIFKCKRCGFQLHSDLNASRSIALNFTEGYKSSGWAAVSQPLIAALAGESPRL

SEQ ID NO: 8626 - protein, 402 aa, Streptomyces sp.
VTQQVKRTFKYRFYPTGEQAEELSRTFGCARLVYNKALEERTAAWYGEQRRISYVQSSAALTEWKKTEELAFLTEVSSVPLQQALRHLQTAFANFFAKRAKYPRFKSKKKSRQSAEYTRSGFKWRDGMLTLAKMSAPLDIRWSRPLPEDAEPSTVTVSRDAAGRWFVSLLCEDTVTPAPATDHAVGVDAGVTSLVTLSTGEKVTNPRHERRDRARLARAQRELSRKAKGSANREKARRKVARVHARIADRRRDFLHKLSTRLVRENQTVVIEDLTVRNLVKNHKLARAISDASWTELRTMLEYKCAWYGRELVVIDRFFPSSKLCGACGTVREELPLNVREWTCDCGKVHDRDVNAARNILAAGLAASACGDGVRPQREFSRTGRSSVKQETQRATAGLPRL

SEQ ID NO: 8627 - protein, 341 aa, unknown
  TnpB Polypeptide
MEQWEAAGELSGKPNFTCENHAMPVFYRDVMYREGTEGKDEAYLKLYDGHDWRWFRVCLSHTDMEYLRRNWYGKKASAPTLEKRHHKYFLRFSYTEEVALTQTPVREQIICSVDLGINTDAVCTIMRADGTVLGRKFIDFPSEKDRMYRTLGRIRRFQREHGSAQAGERWAYTRRLNIELSRKIAGAVAEYAWENHADVIVFEYLEMNGKISGSKRQKLQLWRKRDIQKRCEHQAHRKGMRISRICAWNTSRLAYDGSGIVLRDWRNHSLCAFQTGKRYNCDLSASYNIGARYFIRELLKPLPATERSLLEAKVPAVKRRTSCVYADLRELSSEMGLLMAA

SEQ ID NO: 8628 - protein, 401 aa, Scytonema sp.
MAYKAFKTKLKLNNEQKTLMSKHAGYCRWVFNWGLRLWSEAYKQGLKTALASTGGTPATQCLPNVGMLKKFFTNYVKPQYSWMNELSSKVYQYAFINLADAFKRFFSKQGKYPKFKKKGRSDSFTIDNSGAPIKIGGLRHKLPFIGCVRTYEGLPECVTKKVTISQQAGDWYLSFHIEIPCPQPTPKQCLSVGVDLGINALATLSTGVVYPNLKAYRQAKQKLSILQRAITRKHKGSSNRRKAVLRLARQHRRVANIRTDYIHKITTHIAQNHGEVVIEDLNVSGMMTNHKLAAAIADCAFYEFRRQLEYKCERYGSTLVVVDRFYPSSQLCSSCGFQQKMPLNERVYVCPNCKVGRDRDLNAAINLSNWGRLSPGKPMEQVPPTVCDEVGNKRFEQPRLF

SEQ ID NO: 8629 - protein, 353 aa, unknown
  TnpB Polypeptide
MRATLDACRWLYNHLLEQRKTAYEERGATLTRYDQQATFEALKTERPALTGVHSQVLQNVAVRLDLAFQAFFRRVTAGETPGYPRFRGRERYDSFCYPQSGYKLDGDRVYLSKIGHVKAVVHRPLEGIVKTCCVRRTSAGKWFVALSCDVEARPLPPVDTAVGIDVGLEKFATLSTGERIANPRFFRRDERDLARAHRRLSKEPRPEKGQRATPARRTRRRVVARIHERIANRRADFAHQESRKVVNAYGVVAVEDLSINTMVHNHCLAKSIHDAAWRRFIAYLSYKAEDAGRTLVAVNPAYTSQTCSRCGHRARKELSERVHRCSRCGLVLDRDHNAARNILALGRQSLASA

SEQ ID NO: 8630 - protein, 425 aa, unknown
  TnpB Polypeptide
MRLTFKYPVYPTQEQETTLLRWLAHLCELQNSARHDRKVAWEVEGKRVSCNDQQGKLTIARKKYDDFREVPQDMQVCALERTDKVFDGFYRRCEEGAAKKGYPRHRKQMKSMSWKLRKHKIRDKSTGEYKRVRENPIRETAWKHDRLKVPKLGEVKIYMHRRLQGDPKSVTLVKKASGWYAHITCELPDTPKVEPTAAIAVDMGTTHYLTTSEGKKEENPRWYRQAEGLTRKHSKDLSRKKLGSHRRKKQQHKLALHHERTANRRKDFIGKLVYKLYHHKENNVLVAENLSVSNMVKNKHLSKSISDASWSTFFKWAGNIAERDGFHFHQVDPKNTSQTCSSCGEKSPKKLSLAIRTFDCSFCGTSLDRDHNAAINILLRAAAALRGERWVTTLNETRNKNEARDKGLQHATQLTLFDATASPSL

SEQ ID NO: 8631 - protein, 423 aa, Glycomyces sp.
MARFRMYPTGEQEWQLLLHCAQARYVWNLAVEQRSYWARHKGSLPGYVELARQLTEARAASEWLREGNAEVQQQALRDFDLAVKRRFDSGFGEPSWRKRYRHEGFRVIGSGRVPEFEPDGSPKLNRKGKQVMARSVVVQKLNKRWAQVKVPGCGWVRFRLTRRDLPAAKTFRVTWRRGQWHVAFAIVPEPVTAPGTGEVVGVDRGVKVTAALSDGRMLNCPQLNSKERARLRKHERRASRAPKDSPQKRAEHAKAAKIKATEADRRKDWCEKTSTMLASGFDVIRFEKLNIKTMTASAKGTAEAPGKGVAQKTGLNRAILAQGWGLLRRRTEQKAPGRVEDVPAPYTSLRCSDCGWIEKNSRKSQAEFSCVSCGFTCNADVNAANNVAAGQGGIPRPRSSTGAGGTTARQGSSVREPQRPPPQ

SEQ ID NO: 8632 - protein, 386 aa, Glycomyces sp.
VKQVVVVKLIPDAGVRAVLVETLRVCNAEANRIAQLAFDHRDAETGQVEREYALRGRAYAEAKATGIGSQLAQHAIKKTRDAYTALYAQIKAGMLRGKREAKALSNPVAFKPGAAQPFDDRCLSWDFYARTVSIRSIAGRLRGIGFACSKRDLAVLRAYRQGESDLYERDGELYLAATVDIPEAEQREPVDFIGVDRGIVNLATTSDEVNFQGRGLERYRRHMARVRAELQAKATKAAKKKLKQQARKEARHAAHVNHKIAKEIVSAAERTDRGIALEDLEGIRERVRLTRSQRGRISNWPFYQLAQYIAYKAKRAGVPVVVVDARHTSQKCPLCHHTERANRRNRDDFECRGCGLAGPADVIASVNVRARGRMAWVVSQGSGGSA

SEQ ID NO: 8633 - protein, 341 aa, Runella sp.
MNLTTLQYRIKDSTASKKLVVLGYSCNFVWNYCNQVNQESWKKFGKPLSAFDLNKLTASCAKELGLHSQTVQAVCEEYAKSCKQHKKRKLNWRSRKKSLGWIPFKGVGVKVSSDTVIYNGHKFRFWLSRSIASKVRFGSFCQDSKGNWFVNFVIEQAEIVREKNGRQVGIDLGLKTLATLSDGVEFNRDNLTKKYELKLAVAQRANKKKRVTAIHAKIKNKRKDWNHKISTAIVNEYDKIAVGNVSSLKLKKTRMAKSVSDAGWSDFKEMLAFKAVRLGVQMKEVNESFSTVTCSTCQQRTGPSGLSALGVRDWVCSCCGTSHLRDVNAAKNILQFSVRGI

SEQ ID NO: 8634 - protein, 394 aa, unknown
  TnpB Polypeptide
MFSLGLESFMRRKSSWLSISIQKIEEGFRVLTLRYPISEDVKKFIEEYRILASHLYWCKRLNLKPAEEVIKKLWEKVPSYWRWQLIDPKNPMYLYRGIENTPMPYKTILNLPLIDALHEKKGAYIKNNRLVLKLNRKLELDISERALRWLEKRLAEKPDKKYVRVFEKDNKLVVQIVLHKINRVKMPRDPLLVVVDINSLYGIVMHFWDKKLIKTMKFRPPNRGNGWSHVRNLMSHRDLLYNQGCLTQKQINVYSSLIRLTLKGSARGWIQQTVAKIVKRIRRMAKRHGKEPVVLIDKPDYSSLHGTPLQRTLYSFMKYLENLLSWYGIYWEEKRLYSSICPVCGNKLILEDREKSKRVRIMKCNSCGFKEDRDNIPLYWAIKILSALKGEASS

SEQ ID NO: 8635 - protein, 388 aa, unknown
  TnpB Polypeptide
LKRFCKRSFAPARPPAKDRDVKLTYQFRLCDKHSSELNRQARAVNVVWNFCNETQQKAVQHGRRWLNFCDLAKLTSGSSKLLGLHAHTINKVCWQYDLSRSAKRKPWLRWRGKKSLGWIPFNTGSVKFDGKGFRFLGRNYIPMHLRDIPIDAKLGAGNFSQDAKGRWYINIPIDIEEANFATLSRVGVDLGLKNLIALSDGTKVKAPQFYRKAEPAIKIAQRANKKRKESSLHRKVKNRRKDFLHKLSAQISEKYGLIVIGNVSPLKMAQTCMAKSTLDAGWSDLKGKLLYKAIMHGGSTLEVCERMSSQTCSSCGETDRKRPKGIAGLSIRRWSCCACGADHDRDINAAKNIVRLGLETLVVGARGRKPSGAANRQAILSSCKRGAA

SEQ ID NO: 8636 - protein, 369 aa, unknown
  TnpB Polypeptide
MLTYKYKLYNTPRTVWLDRMLRECAFVWNHALALQRRYYHMYGKYISSVNMQKHFAKRIKRNLLYSHNSVEVLQRLDAAYQRFFKKLAKRPPKFRRAADFQSFVYKLHYGYKIDGNCFTINRLKKTYKFHKSRDFNGAIKTVRVKRDPCGDFWLYITTDAEVEASNTTHDGAVVGIDFGLKTYLTLSDGHTYTNPEFFNQTLRDIRKAHCRLSRSVKGSNHHRRRRLELDRLYRKISNRRDAYQWRLAHELCRHYSTICLETLSLDGMRRLWGRKVSDLSHASFVSRLEYVATKYNTHIVHVDKWFASSKTCNDCGYVNKELRLVDRSWTCPQCGAHHDRDLNAALNIKRSGMDALISGSKPAFSGSHA

SEQ ID NO: 8637 - protein, 254 aa, unknown
  TnpB Polypeptide
MQKHFVKRIKRNLLYSHNSIEVLQRLDAAYQRFFKKLAKRPPKFRRAADFQSFVYKLHYGYKIDGNCFTINRLKKTYKFHKSRDFNGAIKTVRVKRDPCGDFWLYVTTDAKVESSNTTHDGAVVGIDFGLKTYLTLSDGRVYENPQFFKQSLRDIHKVHRRLSRSIKGSNNYRRRRLELGRLYRRISNHRDDYQWRLTHELCRRYSTICLETLSLEGMRRLWGRKLSDLSHASFVFRLEHVAVKYNTNVVHVDK

SEQ ID NO: 8638 - protein, 504 aa, unknown
  TnpB Polypeptide
VARSSTPSFITEVPLIATSQDEAELSARFQAGRQLYNALLNESMARMNLVRQSDLFKKAKRLSKGKIRNQAFQTAKEAYRYSEYDIQAYATVVANQSGWIAQKVDSNTQQTLAKRAFQAGEKVMFGRAKKVRFKVPNRFSSMEGKTNKQGIRWADGQLVWGKLRLDAIIDRENPLMMHGLTSKIKYVRLLKKEIHGKHRWFVQLVCEGLPYQKAANFITEGLVGLDLNISNVAYVADHNAGLLPFAEKVPTFEREIFAAQRQMQRSQRVTNPDNYEPSFEGRKGRRTITKQGKVKKGKRKWNQSKRYIKLAAKKRELERRKAAYSKSQNRKLVNDILRNGNQVKTENVSVKAWQKRYGKAISAKSPGYFQSELKRKAESAGGSFGKFSTQKTALSQTHLSGERVKKSLSERVHHDQTGIVMQRDLFSAFLARYVDEDQLSLQDAREAYLGKESTLLEAWQRYKQSANRVSIAESRSAHPPVEQISSDSEKANQIDAPRSGRKVS

SEQ ID NO: 8639 - protein, 394 aa, Halomicroarcula sp.
MLDASASLWNEINYERRQRFFSGEDIWESEEFYDRYVDVLGGATAQTIIRRNSDAWKSFFTLCDNPDEDPSPPGYWGNEDEGRDQRTYIRNDAYTLRWGERSRLEIRIGLDLKEEYGLGYYERLPLEVRGEPHWNGDSGRVTIEYDELTETFPGYQSVTVPEDQQDAPLAQQTVAIDIGINTLAACTTTTGQQYRYDGIEIFEQFRETTEYIADLESKLPDDRSCSRRIKRLYRKRTRRRDHATAALIRDLVPRLHEDGIDTVVIGDLSGGFGAKWTAEANEMIHNFWAYRKFNTQLESVCEEYGIEVVTRSEAETSQSCPDCGRTDTTTRHRDSLTCICGFDGHADLAASRNLLNRATEDSIPGPTARPMRFQWDNHEWRSIRDASETPTNSA

SEQ ID NO: 8640 - protein, 402 aa, Escherichia sp.
VKRLQAFKFQLRPGGQQEREMRRFAGACRFVFNRALARQNENHEAGNKYIPYGKMASWLVEWKNATETQWLKDSPSQPLQQSLKDLERAYKNFFQKRAAFPRFKKRGQNDAFRYPQGVKLDQENSRIFLPKLGWMRYRNSRQVTGVVKNVTVSQSCGKWYISIQTENEVSTPVHPSASMVGLDAGVAKLATLSDGTVFEPVNSFQKNQKKLARLQRQLSRKVKFSNNWQKQKRKIQRLHSCIANIRRDYLHKVTTTVSKNHAMIVIEDLKVSNMSKSAAGTVSQPGRNVRAKSGLNRSILDQGWYEMRRQLEYKQLWRGGQVLAVPPAYTSQRCACCGHTAKENRLSQSKFRCQACGYTANADVNGARNILAAGHAVLACGEMVQSGRSLKQEPPEMIQATA

SEQ ID NO: 8641 - protein, 316 aa, unknown
  TnpB Polypeptide
VITGQNPGEYRLDGQPCRYSIHIRVRVSQPIRDYTSIGVNWTRRTLVFVNDPLPIGRERTGAMVGLDRGCAHTLATSDNRFLDLPKQRLERIDREIRRRQKAQARRVNMSGKTVREYRRNPSRTYERTGREISRLYAKAHRIIDDWQHKTTSMLVHDYDLIGLEDLNLQGMSRKAKAKPDPDRPGAYLHNGQSAKHGLNHALRSAGLAGIVEKLEYKTRLTGQNRLILVNPAYTSQTCSECGYCDSRNRESQADFECKQCHMSMNADLNAANNILKRGLNHLIGLDEAEHARTEPDAQPAYRGKDASAMTCETSTR

SEQ ID NO: 8642 - protein, 396 aa, Cyanobacteria sp.
MIEQVFTVSCKLGVDEVLAQEIDATLQGFADCCNWINSTVDPKVTGRLAIHKETYHFCKQTFELPANLVCQAISRVSSNRKTAKLKNSPVKKFKPTSAGYDARIFSFNEHDWTVKLTLKNGRYSFPLLVGNYQKHLLSRETPTSATLVKRQSGEYYIQIQVKPKPPEVTNSDECLGVDLGRRSIAYTSEGDNWDADAIQELRDHYANLRKTLQQKASKGTRSSRRRCRRLLKRLSGKERRFQTWLNHTISYRIVKSAANNKKIVAIEDLTGIREDLNQERRSKEERRRTNSWAFYQLRVFLTYKCLKFGVKLITVPPAYTSKSCASCLRIGNRNGKSFKCECGWKCDADHNASIVISKLGASVNTLGGSGYLYCSLSTDSSGLLKAHAVPQAVSAG

SEQ ID NO: 8643 - protein, 161 aa, Leptotrichia sp.
MLEKKLKKLQKSLSRKVKFSKNWYKQKMKISKLHEYIKNCRRDFLHKLSKKLSETYNAVVVEDLNMRGMSQALNFGKSVGDNGWGIFLRMVEYKLMFLGKQFLKIDKWFPSSKTCSRCGNVKEKLKLSERIYKCECCGIEIDRDYNAALNIKDIGKLMLEY

SEQ ID NO: 8644 - protein, 234 aa, Leptotrichia sp.
MLKRSFTNFFHKRAKFPRFKSKKNNVKSYTTNCVNNSIRIEENKYLILPKLKRVKLKYHREIPEDYRIKSVTLTNSNGNYYVSVLTEFEKEIQKVASKDKMIGIDFSMSELFVSSENQRADYPKYFRMLEKKLKKLQKSLSRKVKFSKNWHKQKSKISKLHEYIKNCRRDFLHKLSKKLSEAYNAVVVEDLNMKGMSQTLNFGKSVGDNGWGMFLRMLEYKLMFLGKQFLKIDK

SEQ ID NO: 8645 - protein, 348 aa, Paraglaciecola sp.
MASLLKELKPYEEFNWIKEFDSAAAQQVARDLEIALKNAFSKGRLQRFPKHKISYKKQKLHNDSFRAVNNSNCIRIEDGAISIPKVGKVPIILHRELASKIKTVTIQYRHGKWECSITQEVECKAAKRVLHGIVGFDINSKQTVVGSNGFVAENPKFLKQSKAKLTQLQRQLARRNKGSNRWQETKQRINKLHGKISRQRLDFAHKISRQITNESDILCFENLNVRAMQKFNGSMVTDNVMGLITQLSKYKAEIEGKLYHEIGRFQKSTGICLECSQHHTLSLSDRNFTCTACQTYQSRDLSAAKSIVRTGELDLIAAGIVARVNPASQHKSAIKTKVFELLKFAAGY

SEQ ID NO: 8646 - protein, 411 aa, Streptomyces sp.
VKLVVQVKLLPTPDQAAALEATLHACNEAASWVSEVAFERGEFKNFPLRKHAYDHVKSRWCLGAQAAQHVIKKTCDAYTTLKANLKAGNLGKPGSKRYRRATEKPIMFRPRGAQPYDDRMLSWQIPERAVSIWTTGGRVKNVAFTASVEQLATLALYRKGESDLLERDGMWFLNATCEVPESELNTDPVDFLGIDLGIVNIATTSDGEILAGRELNRVRTRERGLRAKLQRKNTPSAKRRLKKRRRKEARRARDINHKIAKHVVAEAERTGRGIALEDLTGIRERVRLRKPQRATHSGWSFAQLGSFIAYKARRAGVLVLHVDPAYTSRTCAECGHVDKANRVSQAWFACRNCGFVDHADRNSSRNIRARAWELWRRGAQSIAPAPPPHQRGGAGRKRSITASDARCASPE

SEQ ID NO: 8647 - protein, 405 aa, Halobacterium sp.
VEYRRTAVIKLDTPEGADPLLRETVEQFNHCANTASDWCWHGDDGYHVTSKAKAEHALYDQLRDETDLTANLVQKGIRTAVEAVKSGVERLKRGENTSQPHFSADSAVYDKRSATFHRDHVSLSTVDGRIQCEYILPDDSETPPTKYVSDEDFEFRMGHLQYRDGDWYLHASMRKVEADEESPESEAKHSTVLGVDLGVNNLAVASTGRFWSADEFNHWRREYENRRASLQQCGSRHAHENIESVGRKESGRFEIHLHTVANELIEEAVENDCSHIVFEDLTRIWENIPEATWQHVWAFRRLYEYVEYKAEEHGVEAVQVDPRNTSKRCSTCGFTHDDNRHGEAFECQQCRYENHADYNAAKNIGLQYLRRRQNAGDGGAPVDVRLNRGTLNVSGEYVPPASVEA

SEQ ID NO: 8648 - protein, 372 aa, Halobacterium sp.
MAKEVVTRTYTASIRNQSRVQDDLDSLGFAASKLWNVGRWVCDRVWSEVGHIPDHNELTSYLKSHERYDDLHSQSSQRVLQELAEAFNGWYGKRQNGDTRANPPKYRKHGDEHPRSTVTFKAAGFKLDTQYERVRLSKGSNLKDYWSDFILCEYQTRPDVELSTVENVQQVRAVWTGNEWELHFVCKVEIDVDEAPGEKTMGVDLGINNFAALAYEDGHSELYPLNCLKEDDYYFSKRIARCDDSDSEQATRLNQKKSRRRTHYFHTLSKHIVQRCVDEGVGTIVVGDLSDIRTPTKTTTASTRAPTSSKPSTTSASATARTPAPPTPSKSGSTAANSGFGSTPPTNAPVIASNAAPPTPTPTPKSHPEPPE

SEQ ID NO: 8649 - protein, 234 aa, Halobacterium sp.
MDASTVENGAVLGVDLNVDGSLAVTSTGRFLGNADYLNHKRAEYERRRGSLQQAGTPHNESISGRFARWSKGSLHHVSKAIVRETRRNDRSTIAFEDLENIRERISNASKFQQWAFRTIQEYTEYKAEEHGILVDTVQPAYTSQRYSHGECGFTHKDNRDGVEFECLKCGKELHTDYNAAQNIRWRLVQYWLKSGAGRASCQVALKSGTVNVNGEYSSAESIGQSGSPLTIPPL

SEQ ID NO: 8650 - protein, 408 aa, Halobacterium sp.
MEYSHRYPAYPTQEGAVELEHHIDIHRQAYNYTLYEYENVDADDIGSAYKHHSRLPGWKDEFPVFSEVNSKALQRTVTRFYQNLDSLSEQKQTGRTVGKLTWKSPREFQSMTYSQSGFELKNTSGRHATLWLSKIGDINIRYHREIPDEADIKEVTVKKETTGEWFVSFGLETDDADLPDKPVLDKLDSTNSVGIDLGILNYIHTSDGKTVDWLDLEDEYERLRREQRKLSRKQNESNTYEKQRREVAKVKRHIKRKVLDYQHKITTWLVKEYDAVFVEDLDVKGMLEDSHNARSKQDAAWRQFITLPKYKADLYGSHVVQVEAQGTTKECASCGVETAKPIWVREHSCPACGFECDRDANAAMNVLQRGFAELGLGWPEDTPVETALPTDTTSVSAKRVIEAGSLGA

SEQ ID NO: 8651 - protein, 315 aa, Streptococcus sp.
MTMRKAFKYRLYPTKPQLQDLERTLSLCRQLYNAALQERRDAYRKAGKSLSFYEQSCWLPQIRAELPEYKHIHSQVLQNVIERVDLAFKGFFRRVKAGQKAGYPRFKGKGRYDSFTFPQAYETGVKLQDGGRRVLLYGIGSVKVKLHRPLEGKIKTATVKREGEHWYIIFITEVDPKPLPPSEEAIGIDLGTNPHFLVTSEGEMVEAPRHFQKAQAKLATAQRSLARKKRGSNRRRQARRRVARLHRKIANQRKDFHHKLARRLVNRYGTIVHEDLNVQALSRSYIAKGVHDAGWAQFSQSSPTKRRKLVGESSR

SEQ ID NO: 8652 - protein, 204 aa, Microcystis sp.
MLSDLLNKGQKSFGTKSQNDRDLQNFLKEKEWLGEVSAIPLQQSLRDLEPAYSNFFGSCQGKIKGIKVKHPRFKKRKYRQSAKFTKAGFKLKGEKVYLAKIGNLKVVWSRPLPSEPSSVTVIKNSTDRYFLSFVVEIQPQALADNGRSVGIDLGIATFATLSTGEKIDAPKPLKKRLKRLKKAQRGSSVCVMQWTGVIRSETLI

SEQ ID NO: 8653 - protein, 158 aa, Microcystis sp.
KEKEWLGEVSAIPLQQSLRDLEPAYSNFFGSCQGKIKGIKVKHPRFKKRKYRQSAKFTKAGFKLKGEKVYLAKIGNLKVVWSRPLPSEPSSVTVIKNSTDRYFLSFVVEIQPQALADNGRSVGIDLGIATFATLSTGEKIDAPKPLKKRLKRLKKAQR

SEQ ID NO: 8654 - protein, 387 aa, Thiomonas sp.
LAQGQEAISYYDQQNALPQIKAYRPEFVELGGHALQQTLRRLDRAFQSFFRRVKAGQTPGFPRFKSAKRFSGFAYPDPAGWKLMQHGGRGATLRLGSGDAALSIRARGRHRFGAEAKPNDITIMRRNGQSFVSVTLRVPESACVRQRTADMRRGMDFGITDWAAFDDGRTIDNPRWVRVDRPKLAALQRQRARKRKGSVRHKRLGHDIARLHDRIANLRRDFVHKKTRCMVQSCAVLATEQLAPKTMSRSARGTVETPGRPVRQKAGLNREILSAGFGMAHPMLAYKAEEAGTRLHLSNTRQLKPSQRCSACWEIVPKTLSQGMHICPPCGHVMPRDRNSAMVVLIDPHNTQDTPGTGLAARPKPLPRQRGKSRSVTRETPATTPCV

SEQ ID NO: 8655 - protein, 352 aa, Thiomonas sp.
VHPLQQALKDLERAYTKFFARRTDFPRFKKKGQGDSLRYPDPKQIKLDAGNSRIFLPKLGWLRYCNSRDVLGVVRNVTVSSSGGKWFISIQTEREVEQPIPSATRAIGIDVGIARFATFSDGAFLPPLNSFRTHAVRLARYQRAMSRKVKFSKNWRKAKAKVTKLHQRIGNARGDALHKATTTISQNHAMVCIEDLQVKNMSRSAAGTAERPGRNVRAKRGLNRSILDQGWAEFRRQLDYKLAWSGGCLIAVPPHNTSRTCPCCGHIAADNRRTQAQFKCVACGYANHADVVGALNILARGMEILRDEGQDTAHACAGRKSAARIACEVSGAVRPPAAGTRRSDSGTVQCRT

SEQ ID NO: 8656 - protein, 422 aa, Thiomonas sp.
MQRRKVTFKLDPNAAQAGRLKAWTRLHCELYNAAIEERIDAWGKAGKSISDYAQQNALPQIKADRPELNELGSHALQQTLRRLDLAFQSFFRRVNAGQTPGFPRFKAAKRFSGFAYPDPAGWKLLQNGHRGATLRLGSDSSAMSIRARGQHRFGADAKPDDITLTRRNDQWFVSVTLRVPEEACARQRTDDQRRGVDFGINDWATFDDGQTIANPRWMREELPRLAALQRQRARKRKGSIRYKRLSQRVARLHDRIGNLRRDFVHKETTKLVRQCAVLATEQLAPKTMSRSAKGTVDAPGRRVRQKAGLNREILSAGFGMAHPMLAYKAEETGTRLHLSNTRQLKPSRPKQRVGGAHRRAQHAWDERGGETQTSATATWQVEVCDPRNPHDNRASVLMAGEFIGPKGIVRFRSRSRSECART

SEQ ID NO: 8657 - protein, 427 aa, Thiomonas sp.
LLEVTPYALYIHPVMKRLQAFKYELMATGEQQRQMRRFAGSCRVVFNEALALQKTRHERGEQKLGYAGLCKELTAWRNGAPLPSGRVAPWLAEAPIHPLQQALKDLDRAYTHFFAKRADFPRFKKKGQGASFRYPDPKQIKLDAGNSRIALPKLGWLRYRNSRDVLGAVRNVTVSSSGGTWFVSIQTEREVEQPIPSATRAIGIDVGIARFATFSDGAFLPPLNSFRTHAVRLARYQRAMSRKVQFSKNWHKAKRRVQTLHTRIANARRDDLHKATTTISQNHAMVWIEDLQVRNMSRSAAGTAERPCRNVRAKSGLNKSILDQGWAEFRRQLDDKLQWSGGWLVAVPPHNTSRTCPDCGHIAADNRRTQAQFRCVACGYANHADVVGAMNILARGHRVAACGEVVHSGPSAKQEPTEATAYEVTHA

SEQ ID NO: 8658 - protein, 379 aa, Thiomonas sp.
MQVKRAYRFRFYPTPEQVDALARTFGCARFAYNHMLRLRSDAWMLRQERVGYHETSAALTMLKKTPEHAWLNEVSSVPVQQALRHLNTAFSNFFAKRARYPSFKRKDGPQAAEYTTSAFRWDAGRRELRLAKMDTPLDIRWSRTLPKVAKLTTVTISRDTAGRYFAALLCDDVVTSRKAASGQVGIDLGLTHFAVLSSGEKVASPKAFRRCEARLAVRQRRLARAKLGSKNRAKLKLKVAALHAHITDARRDFLHKLSTRLISENQVIAVETLSVSNMQRNRSLAKSISDASWAEFVRQLEYKAQWYGRTLIGIDRWYPSSKRCSVCGHTKTTMPLCVRTWACPECGTTHDRDINAARNVLAAGLAVSAHGEAVSPVSL

SEQ ID NO: 8659 - protein, 317 aa, Thiomonas sp.
MQHGGRDATLRLGSGDAAMSIRARGRHRFGADAKPNDITLTRKGGGWFVSVTLRVPESACARQRADDQRRGVDFGVTHWATFDDGRTIDNPRWVREELPRLAALQRQRARKKKGSLRFKRLGRRIAQLTTARPDFQSAPGLRAQGNNQAGAAMRRPGDRAACSEDHEPQREGHGGGTGPSRTAKGRTQPGDPLGRVRHGASDARVQSGRRWYADAPEQYAPAQTVATLRGVLGDCAQDACRAHACVPALRACHATRPKQRVGGSHRRAQHAGHAWDGRGGETQTSAPATGQVQVCDPRNPRYNAMRFAAGEFIFAPA

SEQ ID NO: 8660 - protein, 304 aa, Thiomonas sp.
MQNGHRGATLRLGSGPSAMSIRARGQHRFGADAKPNDITLTRRNGQWFVSVTLRVPEEACARQRTDDLRRGVDFGVTDWATFDDGRNIDNPRWVREELPRLAALQRQRARKRRGSIRHKRLGSAIARLHDRIGNLRRDFVHKETTRMVRQCAVLATEELAPKNMSRSAKGTVETPGRRVRQKAGLNRENLSAGFGMAHPMLAYKAEEAGTRLHLSNTPTRANSNRRSAARRVGRSCPRRSQSACMTCPHCGHVMQRDQNSALVVLVDANTPGTGVAARPKPLPRQRGKSKSVTRETPTTTAQAV

SEQ ID NO: 8661 - protein, 307 aa, Thiomonas sp.
LAVHAAWRQRRNPAHWQWRRGLVHPGARTAPLRAGCRTQRHHAHAPQRSVVCVVTLRVPDAACARERTGDFRRGVDFGVNDWATFDDGQIIANPRWLREELLRLAALQRQRARKRRGSIRHKRLGSAIARLHDRIGNLRRDFVHKETTKMVRQCAVLATEQLAPKNMSRSALGTVETPGRRVRQKAGLNREILSAAFGMAHPMLAYKAEEAGTRLHLSNTRQIKPSQRCSACWKFAPKTLAQRVHVCPQCGHTAPRDQNSAMVVLIDAHNTQDTPGTGVAARPKPLPRQRGKSRPVTRETPATTPCV

SEQ ID NO: 8662 - protein, 475 aa, Thiomonas sp.
MQTAFRFRCYPSATQEQTLLRWVGCQRFIYNAKVGEDRYFRTFARKSLQHAGQFAPIDQQYSHFITESTRWLREVPSVVLRNAATRWKQAYSRYFSKLGGRPTIKKRDRSSSVWLTSELFQFVPHTDAATGEITHRLLVGTKKFPLGEICFVADRDFKIPASITLSIKAGRWFVSGTCDDATVQPTFEETADWLQTFGQDELLQRTVGVDRGVAIPAMASNGVAFDISDVQKARIAKKQSAAKRWQRKLSRRAKGSANREKAKRRIDRLRQYERDVRRDFAHKASHAIVNDPRAAMIVFEDLGVQRMTRRAKPKQDASGRWMRNNAAAKSGLNAAILASSWGHIKQFSVYKALRAGKLCLDVSAHHTSQECAACGHSHPENRTTQALFLCQRCGHQDNADANASKVIARRGVDLVRSGQYRDKDRKRTMRLRSKQQLGPERSEVMPGESRVSHGTGNGAALLTQNQETPATTLCV

SEQ ID NO: 8663 - protein, 432 aa, Thiomonas sp.
MKRLQAFKFELRPNGQQQRQMRRFAGACRVVFNEALALQKARHERGEQKLGYAGLCKELTAWRNGAPLPSGRRAPWLAEAPVHPLQQALKDLERAYTNFFARRADFPRFKKKGQHDSLRYPDPKQIKFDQANSRIALPKLGWLRYRNSRDVLGAVRNATVSFSAGKWFVSIQTEREVEQPMPKGDAVGIDVGVARFATFSNGTFLAPLGSFGKHAVRLARYQRAMRRKVKFSKNWRKAKAKVTKLHQRIGNARRDFLHKATTTISQNHAMVCIEDLQVRNMSKSAAGTTEKPGTNVRAKSGLNKSILDQGWFEFRRQLDYKVQWSGGYLMAVPPHNTSRTCPCCGHIAADNRRTQAQFKCVACGYANHADLVGAINILSRGMQKLRDEGQDMAHACAGWETAARIACEVSGAVRPPAAGTHRSDSGTVQCRT

SEQ ID NO: 8664 - protein, 445 aa, Thiomonas sp.
MKRRKVTLKLYPNAAQMAQPEAWTRLHCELYNAALEERIDAWHKAGKSISYFDQQNVLPQIKADRPEFIALGSHALQQTLRRLDLAFQSFFRRVKAGQTPGFSRFKSSMRFSGFAYPDPAGWKLMQHGGSGATLRIGSGPSAMSIRARGQHRFGADAKPNDITLTRSNDQWFVSVTLRVPEEACARQRTDCMRRGVDFGVTDWATFDDGQIIANPRWLREELPRLAALQRQRARKKKGSLRFKRLGRRIAQLHDRISNLRRDFVHKETTRMVRQCAVLATEQLAPKTMSRSAKGTVDAPGRRVRQKAGLNREILSAGFGMAHPMLAYKAEEAGTRLHLSNTRQLKPSQRCAACWELAPKTLAQRVHVCPHCGHTAPRDRNSAMVVLIDAHNTQDTPGTGVAARPKPLPWQRGKSKSVTRETPTTTAQDAMDASLLRAGQWIGHKA

SEQ ID NO: 8665 - protein, 418 aa, Thiomonas sp.
MQRRKVTLKLSPNAAQMARLEAWTRLHCELYNAALEERIDAWRKAGKSIRYYAQQNALPQIKADRPELNELGSHALQQTLRRLDLAFQSFFRRVKAGQTPGFPRFKAAKRFSGFAYPDSAGWKLMQHGGSGATLRIGTGEAAMSIRARGRHRFGDQAKPNDITLTRKGGGWFVSVTLRVPDATCARQRAAGMRRGVDFGITDWATFDDGRTIDNPRWVREELPRLAALQRQRARKKKGSLRFKRLGRRIARLHERIGNRRRDFVHKETTRMVRQCAVLATEELAPKNMSRSAKGTVETPGRRVRQKAGLNREILSAAFGMAHPMLAYKAEEAGTRLHLSNTRQLKPSQRCSACWEIAPKTLSQRMHVCVPVRAHGAARPEQRNGGAHRRIQHAGHVWDGRGGAVAWFSTSATRAQRRG

SEQ ID NO: 8666 - protein, 254 aa, Thiomonas sp.
VSSSGGTWFISIQTEREVEQPIPSATRAIGIDVGIARFATFSDGTFLAPLNSFRTHAVRLARYQRAMSRKVKFSKNWHKAKRRVQTLHTRIANARRDALHKATTTISQNHAMVCIEDLQVKNMSRSAAGTAERPGRNVRAKSGLNRSILDQGWAEFRRQLDYKLQWSGGWLVAVPPHHTSRTCPCCGHVAAENRRTQSQFKCVACGYAHHADVVGAMNILARGHRVAACGEVAHSGPSMKQEPTEATAHEVTHA

SEQ ID NO: 8667 - protein, 425 aa, Thiomonas sp.
MQRLQAFKYELMPTGEQQRQMRRFAGSCRFVFNKALALQKERFDRGEKKLGYAGMCKLLTEWKAVPKTLWLNETPSQALQQALKNLERAYKNFFEKRADFPRLKKKGQSDSLRYPQGVKLDQANARVFLPKLGWLRYRKSRDALGALRNVTVSLSGSAWFISIQTEREVEQPAPISTSAVGIDMGIARFATFSDGAFIAPLNSFRKHEARLRRYQRAMSRKVKFSKNWSKAKARVSRIQSRIGNARRDFLHKATTTISQNHAMVCIEDLQVRNMSRSAAGTAEKPGRSVRAKSGLNKSILDQGWAEFRRQLDYKLQWSGGYLIAVPPQYTSRTCPHCGHLSADNRKTQARFACVACGFEEHADLVGAINILSRGIQMLRDEGQDTAHACAGCVSTARIACEVSGAARPPAAGTHRSDSGAAQCLA

SEQ ID NO: 8668 - protein, 429 aa, Thiomonas sp.
VDATGILVGLEVAPDALYIHPVMKRLQAFKFELRPNGQQQRQMRRFAGSCRFVFNKALALQKTNHEAGGRFIRYVDMARHLTAWRNGAETPWLKDAPIHPLQHALKDLDRAYTNVFAKRADFPHFKRKGQGASLRYPDPKQIKLDAANSRIFLPKLGWLRYRNSRDVLGAVRNVTVSSSGGTWFISIQTEREVEQPIPSATRAIGIDVGIARFATFSDGTFLAPLNSFRAHAVRLARYQRAMSRKVKFSKNWTKAKAKVTKLHQRIGNARRDALHKATTSISQNHAMVCIEDLQVKNMSRSAAGMAERPGRNVRAKSGLNRSILDQGWAEFRRQLDYKLQWSGGWLVAVPPHHTSRTCPCCGHVAAENRRTQSQFKCVACGYAHHADVVGAMNILARGHRVAACGEVAHSGPSMKQEPTEATAHEVTHA

SEQ ID NO: 8669 - protein, 468 aa, unknown
  TnpB Polypeptide
MHRASRYRLYPNQTQERQFARLCGAGRFVYNELLADQIREYGRFEAGEAEKPGCSEFDFGKRYVRLKAKEGNEWLREFSATVVRSTGAFPLGAAFSHFSRRIREGKCGKQAGYPRFKAKGRSRESFTIPEDVKIQSKRLWVPKVGWIRMNRKAASRTRGADPWDGGEAKAAAVYRELDKWYVSVLWEVPDPDWRWHGGVCGVDRNSENLAASWSGETKLIRIPYERILKYEARARHYQWRASRRKWTELKNDAGEPVRTKSGKLVREPTKRRRRLQQRAAKAKRKAAEIRKDFSHQASADLARRFGHLVLEELDVQAMRRSARGTKEKPGRCVKAKAALNRKMAQSSCMGMVDRFLQYKAMDMIRVPARNTSRACAECGHVDADNRKEQARFECLACGHTDNADANAARNILNLGLNRLLAGGAPVTGRGGDNEAEAFFMECLAETASDPSTMSWNYRGSPPDFHMES

SEQ ID NO: 8670 - protein, 381 aa, unknown
  TnpB Polypeptide
METIRTLSCKLVVPPQVATRLEATLEAFAQACNFVADWGNEHKKHRQYDLHKGCYREVREQFGLSANLAVRAIARVAPRMAKAKTRHSRFKPTSIDYDARIFKLDVSSETVSLRLIDGRCILALALGDFQRQALAGQQPTSATLKRGRKNRFYLDIQVKDEAPNPPKDDEIEGTLGVDLGLRHIATDSAGHQFQGQDLADYRLHRANVRAWLQAKADTGSKQTRKACRRALKRLSGRERRHQKQINHTISKHLVAYAKEHGLAIVFEVLKGIRDRCRFRKGQRRRLHSWAFYQLQQFVEYKARRAGVRVVSVDPRYTSKTCADCLHVGVRRQDDFSCKNCGQASHADFNAARNIARLGLAVIRGEYSLLSCALPSSGRVGG

SEQ ID NO: 8671 - protein, 484 aa, unknown
  TnpB Polypeptide
MMSKKQSPSKTYTTILKQDDNEKHNLEVIGRVLGIIRNDDYCYLVDCYNNDSKVSKHDRRKRLMNKYLISSREADSIVYSNNEQLELVKRTVKDNVKDWEKEIKQYQKQFNNLKDKNKSDNTAYKKRYYVGLIQKLQSKIIRAQEKSPSCCFGGKKLQKRITQYPNDYKSRQDWVNKRLFLSFMGNSGRCKGNDIIKLNINTGELTARISDGLQSLCAFNSKKLPIGKVNFKHGKNSIKNNIISNKAIYYKFVWNTRKRKWYAHTTIKISLEEQENNFNAKVKNSPVKVFDRTCGIDQNSGFITATIIDKHANPVNKLTLEHSHSKDISALVSKLVVWAMNNGVYRFSIEKLKSLNYKKRKSNGSSSGLNRIVSRIPFGEFKECLNTITSSYGLQVVEVNPYNTSKNTKYWNEDRFGVTVHEKASYLIARKSLGLSILRRDHFNDYPEENRVSWRAISLNDGSILHNSHDNSLVDSDRVVGCGS

SEQ ID NO: 8672 - protein, 369 aa, unknown
  TnpB Polypeptide
MEYAYKFRIYPSKQQETLILRTFGCARYVYNYYLNQRIQAYKNTGKSPSRFEQDKDLTNLKKQGETAWLREVDKCALQNSLKHLDRAYQNFFHSVNCGAHVGFPRFKSKRNRHQSYQTNSNIKVFDDCVQLPKLGKVKCRISKEVKGRILSATVSRNPSGKYFVALCCTDVKIDALPSIGAAVGLDMGIKSFAVTSDGMEYPNHKHLAKSEKKLAKLQRQLSRKTKGSNRWEKNRFQVARLHERIANQRQDMLHKLSTDLVHQYGVICIEDLAPKNMVKNHKLAKAIFDASWGEFRRQLIYKANWYGKQVVTIGRFYPSSQLCSVCGAQWLGTKDLAVREWTCPVCGAIHDRDINAAKNILNGGLLLID

SEQ ID NO: 8673 - protein, 381 aa, Kamptonema sp.
MKRTVSIPVDLPRERFLPLMGFCADIFNQHVDWALKERTWNKNKAHHALYANIRSSYPDIPSALVQTIRDNAMEAVKATKFKRKPRKKPTSGLRYDKRTMTLRGQQLTLSCLGKRAKLILDVPAHFREVFDNWEFGGGTLTYTKHTQQFWVRLVFEAETPAHQEGDLQGIDRGLYHLAVTSDGQFYKSNKIRATQRRYLHNRKTLQQKGTRSAKRRLRAMSGREKRFMRDVNHCATKKLARQSDYTTFVLENLSGIRAKRRGKKLNKRLSSWSFYQFEQFLSYKAEALGKRVVFVDARYTSQKCSRCGHIRKANRQKSRFRCDHCGYTAHADINAAVNVRDNYILSLAQQESGEQVAVNQPDASRCQPPCGRGELTHNVPI

SEQ ID NO: 8674 - protein, 329 aa, unknown
  TnpB Polypeptide
LGSPLRAASGCQPSGQGHRSGHQGEPVKLQQAGSPRSGLRGVPQAYRYALDPTPAQERRLRSHAGAAHYAWNWALTRVKARYEAEKKWYSAEELHRLWNVEKKTEPDLAWWSENSKCVYQEAFRNLDRALEDFSKSKKGLRKGRRLGFPRSKKKGRCRDSCRFSTGVMRCSGSTVTLPRLGTIRTHESTEALAGKIAEGKARILSATVSRTAQRWLVSFTVEVEREVPDHHRRPRTAVGLDLGISSLITAVDHQGKVIRFPGPKPLRAALRRLRRAARAHSRKKTGSANRRKSARRLARIHARIASLRLDALHKATTWGLDTRRWWSRT

SEQ ID NO: 8675 - protein, 395 aa, unknown
  TnpB Polypeptide
MTMLKSYKTEILPTAEQQDKICRSMGICRWLYNEYIARNKRLYRLYQRGYLDEHQKHFISAMDFDKFVNHHLKNREERIWINECGSKARKKAITDAETAFKKFFKGQAGFPKFKKRNRQSVGIYFPKNNKGDWTIERHRLQIPTIGKVKLKEYGYLPVGAVVKNGVVSQKADRYYVSIVVDIQPKHYAGSTGEALGIDLGVKDFAILSDGAKYKNISKITAIRQLKKHLRREQRRLSRKLENKKKRGEKSATHFANISKNVLKVQKLHQRLASIRTNYTNQVINEIVKREPSYITIEDLNVKGMMKNHHLAKAVAECKFYEFRTKLTAKCHEHGIELRVVDRFYPSSKTCHECGYIKHDLKLSDREYICPKCGNTIDRDYQAALNLRDVKEYEVA

SEQ ID NO: 8676 - protein, 530 aa, Streptomyces sp.
VINMQLRYSFRVYPSAGQRLALGRAFGCARVVFNDALRVREAPRQLTAVKKTPERAWLAEVSSVVLQQSLRDLDTAYRNFFDGLKGKRPRMGAPGFKSRKDTRQAIRFTANAGWKVTAGGKLRLPKVGDLAVKWSRSLPSAPSTVTVIKDSAGRYFASFVVETEPGTLPDTGSAVGIDLGLAHFAVLSDGTKITSPRFLRRAEKKLKKAQRDLGRKARGSANRAKARVRVARAHARAADARREFHHQLSTRIICDNQAVAVEDLAVRGLARTRMAKSIHDAGWSAFVTMLECKALKFGRCFHRVGRFEPTSQVCSVCGVKDGPIPLGIRVWECGACGAVLDRGHQRGGQRRPGRRTGGISLRSAGKTGTRPGTARRNRNPPEAPAGDHRQAGGNLRPLGRRGCQTTSWETYRPDPWEAVNQHSESRTSYAGWHDFVVTINDSNITYYVDGQEFGRDDARYLPERPMSINFNQWLIDLAGQTSTTPRAYDQKVDYVLHVKDQVLTPAQVAAKIAAYRTAGTTFEDTVPAGQ

SEQ ID NO: 8677 - protein, 424 aa, Paraburkholderia sp.
MERRKVTFKLYPDVREAERLTAWVRLHCELYNAALEERIDAYRKHGISLSYFDQQNTLPEIKAVRAEFVELGSHALQQTLRKLDLAFQAFFRRVKAGQAPGFPRFKSHRRFTGFCYPDPAGWKVMQLGGRGATLRIGSGKRALSLRARGKHRFGEGVKPNDLTITRRNGQWFASITLRVSAEACARQRTGDDHRGVDFGVTDWATFDNGETIANPRFVQNELPKLAQLQRERACKKKGSARYKRLSVQISTLHERIANLRRDFLHKETTRMAMTCAVIATEELRTQNMTRSARGTKDAPGRRVKQKAGLNREILSAGLSMAHQMLSYKVIDTGSTLHLSNTRQLKPSQRCAACWGIVPKTLAQRTHVCSCGHTAPRDRNAASVVLIDALTPGTGVAARRKPLPRKRGKSKSVTRETPATTPSGA

SEQ ID NO: 8678 - protein, 434 aa, Helicobacter sp.
MKVNKGFKFRLYPTKEQQDKLQHSFFVYNQAYNIGLNLQQEQYEKNKNLPPKERKWKKSSELDQAIKHHLNARGLSFNSVVTQQSRMNVERALKDSFKVKNRGFPKFKNSKFAKQSFSWNNQGFSIKESDDERFKIFTLMKMPLMMRMHRDFPPNAKVKQIGISCSHRKYFVSFSVEYEQDITIIKNPKNGVGLDLNVCDIACSCDINHHDKLTDFKQYQTDMKELLGIEIDEEVNTKRLIPTYSKLHSFKKYSKEYKRLQRKQSRRVLKSKQNKTKLGGNFYKTQKKLNQVFDKSSHQKTDRYHKITSELSKQFELIVVEDLQVKNMTKRAKLKNVKQKSGLNKAILNTSFYQIISFLDYKQQHNGKLLVKVPPQYTSKTCHCCGNINHKLKLNHRQYWCLECGYREHRDINAANNILSKGLSLRAGNVHARL

SEQ ID NO: 8679 - protein, 278 aa, unknown
  TnpB Polypeptide
MRGTARTWGTPTTCTIFCRNGKWYASITVKCQPTRQTGDGAVGIDLGCKNAITLSTGEKIGKPNFLKAGQHKVKVASKKLRRKRAPNRNKRVKGSRRWKRERKLVSKLQNKVARQREDWLHQTTSNIVSGNSLVAGEELNVKGMTVSAKKGKRTRQKAGLNRSILEVGFATVGQLFNYKLVEAGGFYLESPTKKLKPTQRCVKCWELTPKTLADRVHICSNPNCCHTEDRDINAAQVNLTWARGQELSSSDAESSSSTSCGSMRQLGAKKRQKPRPNS

SEQ ID NO: 8680 - protein, 333 aa, Microcoleus sp.
MDSAPDWVKQQPYNPRQLAVFQAFEAHKAAKKSRGAAKFRTFRDRSQTIRFQTDNWKSNTFYPQATKHLSFKASEPIAETMEHEPNLSLINGQWFISYAVSKTKSTTDSNLAVALDPGVRTFMTGFDGQEILEIGKYDIGRIYRLARHLDKVISRIGQSKGKSFKRLRYRLRKAAAQLRIKIENLICELHKKTAKYLCDQYKVIFLPTFETQQMVKKGKRRLNAKTARAMVTLSHYKFKQTLKHQAAKHGCVVVDVTEEYTSKTCSKCGHIHTKLGGNKLFACPSCGHKLDRDKNGAFNILLKALRDTSLTGILTDFQVLPYSVISDVRELPG

SEQ ID NO: 8681 - protein, 288 aa, unknown
  TnpB Polypeptide
LGKDSCRRKKGGVWVAIKPHCPIEPGMEICESKLFKRKGELSLNITVQKEVDTPKLELNNKTVIIACDIGETNPLVSVELWNQGKKRENAQFLGGEIRSVRAHYNHLKKRVGRKKIKHAVKWIKKHVGDKEKRKVNDILHKVTTKIVDRAETLKRSGYEAVIVFGDLKKVRRPRVKRKTRCKKNNRKIHTMPSYKIKHMLTYKALWKEIPAIPLNEAYTSKLCWRCGSLNTEIRKRSFRCKECGLEYNRDLNGAINIGNRLLGYMLKSRASVNMPQTSPEYIAPKGDC

SEQ ID NO: 8682 - protein, 211 aa, unknown
  TnpB Polypeptide
MREELRFDGKPLSATLSRKADRWFIAIPVEMERPEPVCESQASVGIDLGVSTALTLSTGEKIDSPKPLKKHLQRMKRRSRQHSRTQKGSANRRKSAARLAKLHARIAQVRQDFLHKTTTELTQRFGLIGIEDLNVKGMMANDKLSRAISDIGFYEFRRQLEYKAARSGGTVVVVVDRWFPSSKTCSACSGYHESMPLSEPLPSVWTANRLG

SEQ ID NO: 8683 - protein, 272 aa, unknown
  TnpB Polypeptide
VIYIYVYKLSRGYIERHTLHIGTCSLITKRYKPRDAIAVDINERKIVYGDDEINKERDTEIDEAHRWKKLAEDLQKRYSSPRYSVWRRRKAILNRIRSYHGKARNILEDWARKTSLRVVELSKKLGHAVAREDLTGLINSLRKIENKDHRTKLIIMGYSRLGRWIDWQLEKQGIPLAIADPNGTSSECPKCDSKLEENGYRRLRCPRCGFEADRDVIGKLNIRKRALKKLKIKANPGGVLATPTAPQMTDVNPNRWGEPMIRLKGMTIKMTT

SEQ ID NO: 8684 - protein, 391 aa, Chloracidobacterium sp.
VITLKLKIKNPTRHKAAKLESYTDQFVACVNWYLEQIHKLGTTSRKKLHDTCYREAREKFNLPSANIQLALDKAIEAYRSFLAKEGKKSIPVVESSFGVFRKDTIKIENEAIRLTLNGERVWFPLNVPTAFKEAFSWPVARSEIRFKKGYWYCYLTVHSPAPEPKPQSIIGVDIGVCVLAAISTIGGIINFLLPGRAVRARRSFFHSKRKELQAKLETSKNAYRALKRQSGKEQRWMADVNHKIARFIVDLAVATGSAIAIENLLGIRDRIKASKRVNRMLHSWNFRQLISFIEYKAEKAGVRVVPVEARNTSNTCSSCGLSLRANRKKQALLKCRRCGFEINADLNASRNIASKGSLSFGYKPLDKVAVARPIVGQAHNLANFLKGSPLL

SEQ ID NO: 8685 - protein, 420 aa, Chloracidobacterium sp.
MPEHRFPEASLTITLKPCLVSREETVKAYKYKLKPSAKVVAIFEAWLAALCELYNAALQERRDAYSINGISISKKDQSAQLPDIKKERDDLARIHSQVIQEALKRLDLAFQHFFRRVKESRIPGFPRFRSRSRYDSFTYPQSGFKLDQKRKKLHLSKIGSVELHLSRPIEGEIKTCTIKREADGWYVVFAVEENEPKPVVMMPDKTVGIDVGIKTFATLSNGEQIENPRFLRNRERELKKAQRRVSRRIKRSNRRKKAVCLLAKKHQRVARQRRDFHFKEANKLAKKYRVIKFENLNIKGMVKNHHLAKSISDAGWRQFISITAHKAEEAGGEVEEVKAAGTTTRCSRCGQDQKMPLDIRIYRCGSCGQIMDRDHNAAINIKERKGRAVLSSRRRDAVVEEARTYRATDPESPTIARPRV

SEQ ID NO: 8686 - protein, 402 aa, Oscillochloris sp.
MTRTIQTTYRYRLNPTFAQETLLNQFAGARRFVWNWALDRKKSHYQQTGKTLGFAALSEELTRLKQQPETAWLREMDSQSLQQALRDLDSAYQHFFRRVKRGEKHKGFPRFKSRKTDTPRFRIPQRVELHAESVAVPKIGMIRAVIHRPLEGVTKGATFKREPDGHWYVCIVAEQQIAPRTDRPVHTHVGVDVGLKSLAVYSTGETIPNPRWYRTQSRKLRRAQQALSRKVKGSHNRGKARVVVARLHQKIRNQRSDFLHKLSTDLVRHFDLVSIEDMSVRGLAKTKLAKSVLDAGWGMFRAMLEYKADRNDSHVVAIGRFFASSKMCGACGWIHELSLSMREWDCLNPACGVHHDRDLNAARNIDYEGKRLFDLRVAAGHAETQNACGDPVSPIVMVGTSR

SEQ ID NO: 8687 - protein, 425 aa, Aphanothece sp.
VLNLNYAYRIYPDASQEKELLEWLEICRGVYNYALAERKEWINSRKCQVNACSLHSEYIIPAHQPFPDYYKQKKALTIAKKQYPELKRVQSQVLQEVMGRLDKAFNFFWKRSFGFPRFKKYGQFRSINFPQFTENPITGYQLKLPKIGDVLINLHRPIPDGFIVKQVQIVKKASGWYAVICIQSDVKIPSAKPQGKSLGIDLGLEKFIATSLGELIARPKFFVELQSKLKWLQRKLAKKQKGSKNRLKAIQKVARLHEHIYNTRKNFHYQVAHHLCDQSNIIFAEDLNLKAMSRGMLCKHTLDAGFGVFLESLKHVAWKRDVYFEKVDANFTSQICPNCSVVTGKKELSQRVHDCSHCGFLTDRDVASAMVVEQRGLAALGLGVKLPVEEDVIGDIPKKVSRASRRSPESLIVIWGSPRYTALSS

SEQ ID NO: 8688 - protein, 276 aa, Aphanothece sp.
LDGSIKVEHQKIKVPVIGWLKTYERLPYGYKPTSVTISQKANRWFISFKIELEQQTTDKLYDVVGCDLGVKSLATLSTGLVFEGAKSYRKYEKQLARLQYLSRHKVQGSNNWKKAQKQIAKLHFKIANIRKDTLHKLTTYLSKNHSKIVIEDLNVSGMLAKRKLAKAVQDMGFYEFRRQLEYKTKLFGSELIIADRWFASSKTCSNCGHKKEILSLNERVFECEKCSFNCDRDLNASINLASLAVSSTVSACGLVSADTARMKQEDNIKPTVGRFE

SEQ ID NO: 8689 - protein, 410 aa, Thiomicrorhabdus sp.
MKQTIRKAFKFRLNPNSDQVQKMIEFAGANRFVWNKALAMNLFRLEHKQPILWYSEFAFWLKLWKSSEDYGFLKTVHSQPLQQALKQLERGFKDGFDKKQPLKRIPTFKRKGQKDSFTYPQGFKVDSDKNKVFLPKIGWVKYRNSRQVIGDLKNCTVSRRGAHWYVSIQTEYEADIKYHESSSMIGMDMGITRFATLSDGSYIEPLNSFRKLSKKLAFEQRKLSKKVKFSANWKKQKQIITRLHERIANARLDFLHKTSTNISKSHAMIVVEDLKVRNMSKSAKGSIEVHGKNVKAKSGLNKSILDQGWGMFVQMLEYKQQWSGGDVLRVNPQYTSQTCPNCKHVSRDNRKSQRAFACTECGFKANADLVGALNVLERGHRLLACGVETLVSTMKQEPVGSSDTRQLLTA

SEQ ID NO: 8690 - protein, 361 aa, unknown
  TnpB Polypeptide
MKLTLQIKLLPTQEQFTSLKNTLKEANTACNEISNTAWNKKLFNQFKLHKEVYHPIKSSFNLSAQMVVRCISKVADAYKLDKKVKREFRTLGAITYDARILSYTKDGVSLWSVDGRLKGIKFVCHNQNYLPYIKGEADLVLKKGKFYIFQTVEVPEEDVKDVEEFIGCDFGQTDICTLSDGTNYNSEQLKKVRKKYSKVRASVQSKGTKGSKKLLKRLSGRERRFVTISNHTISKQIVAKAKEENKGIAIEDLSKIRFTAKPKSKAQKTELNRWSFYQLRQFLTYKALLNGVKLAVIPPAYTSQTCSVCLHIGKRVAKKFTCENCGNTSDADENAAKNISAWGVAVNTPEKNNMFCSLHSC

SEQ ID NO: 8691 - protein, 412 aa, unknown
  TnpB Polypeptide
MRSQKIRLKPTKEQECLMWWYSKVSRNYWNLLVDIDKRNNKGEFDEILNRNGNKTYHSNFHNREVYSLNESDYRNLAKIVVAENYNENSEEWSWYYQPNQFFIYNFLSRKLVKIRRQNKGRLNFIRVGKVQPNFNIRCDISANKKRPSRIYLKDNGKLQIPTIGDVDYGSVRSDFDLSCKKQVATVSFDGKYWYLSYTEDVETQVEELPDATDGVGVDLGIKTLVTVSDGTTVPNIKTFRRVRILTKRLKRLQRKLSRKYRINKCNKHHKTKNIIKLEQQIKLIYRAIKNIRINHIRKFVSELVKKQPRYIAIEDLNVKGMMKNRHLANDVANCSFYTIKEHLIRKARERGIPVRLVDRFYPSSRLCSTCGNYKPDLKLSQRVYHCCNCGVRIDRDFNASINIANTNEYVLV

SEQ ID NO: 8692 - protein, 366 aa, unknown
  TnpB Polypeptide
MPSLYHRTDIYILFDLYTTNDLRGMSWMMISYKFRMYPNKEQTAILEDTLETCRRLWNAALADRKNTYKETGKGRTYNQQAAILTIEKKGEGQYKSFTYPQAGFKLEDNHLTLSKIGTIRIFKHREIEGRIKTCTITRDRTGCWYCSLVSEKDDVPKIAVQTAIGVDVGLKHMVAISNGEYIEYPEYYYQTEEKLADAQEKLSRKEKGSSNYREAKRKVAGIHKHIANQRADFSHKVSRKLIDMADVVVFEDLNILNLLKNHHLAKAISDHAWGMLTRNTISKAESAGKTVVLVNPRNTSQRCSNCGTGVPKDLSARVHVCPHCGLVMCRDRNAALNILADGLSVSAYRDLASTVGEPLLQATSMK

SEQ ID NO: 8693 - protein, 337 aa, Chroococcales sp.
MWGKHLSCAKLQAHIAKLRKRNSFWQLVGSQAVQDICQRIEKAYQLFFKHHSKGVRPPGFKKVKKYKSFTLKQAGYKFLGDNRVKIGSRIYQYWTSREIEGNVKTLTIKRTSLGELFMVVVVDDRSESEIKTTTGKIAGFDFGLRTFLTCFDGFNTEKIESPQFFKQLLNSVQKASGQLSRKLKGSTNRERARKHLIRKHETIANCRRDWFWKLSHELTNKFDVLCFETLNLKGIQRLWGRKVSDLAFGEFLQVLEWVAKKKGKQVVFVDRWLPSSKTCHSCNHVLESLELFIREWRCPSCQIVNGRDENASKVIQAVGASSVGLGNVRQPLAAIAV

SEQ ID NO: 8694 - protein, 438 aa, Chroococcales sp.
MYFKAKKFLGKYDLEAEYKTNKHFKALHSQAAQQVLRSVSESFESFKKLKSAFNRGEIADKPRPPKYRKSGGFALVSYPKQALKLVDTGHFSQRGTPPHESVLNLIRIPLGKQVKCWFGLDCFFVPMPSNLKFADIKELRILPRNSCFYVEFVYQQEPVKTLLDKGKVLGIDPGLNNLLTCVSNIGKSFIINGRKLKSQNQWYNKRVAKLKKNQSQGFWNDELANITEKRNRQMRDGINKATRFVINWCLNHSVGRIVFGWNQRNKDSVEMGKKNNQEFVQIPMAKLKDRIQQLCQQYGIEVVETEESYTSKSSFLDNDILPTYDEKLKEQEYKFSGKRGQRKKGKLHNLGRGGYQAKSGIRINSDAQGAANILRKVSIHLGLDLTKIGKAVLTLPQRYDVLQRLSKSYRKQCVAVCLQEDTCVGGSADLSKVSVTTA

SEQ ID NO: 8695 - protein, 399 aa, Chroococcales sp.
VFIYEYKVNPKPQQIVAINEAIRTAQFVRNKVLRFWMDNRGIGKTEMFRYNTSLRKQFKFVEDLNCHACQTAVERVLRAVNRFYDNCKKQKPGKKGYPQFKKHSRSVEYKVSGWKLSDNQKHITFTDKKGIGNLKLIGSRDLNFYSLEQIKRVRIIRRADGYYVQFSIQLDPRDTVEPITPSQKAVGIDVGIKYFLADSQGNIEHNPQFYRSGEQQLNRLNRRKSKKFKRGKPQSKTYHKALIRYARAHLKISRQREEFVKRVALRLIKSNDLVAYENLNVQGMVKNRHLAKSISDAGWSTFRHWLEYFGYKYGKVTVAVAPHNTSQICSNCGEKVQKSLSTRTHVCPHCNYVEDRDINASLNILQRGLSTVGHTGSYKLGEFDPLAGLEQSYSVKIGL

SEQ ID NO: 8696 - protein, 275 aa, unknown
  TnpB Polypeptide
MLKAYKYRIYPNNEQKIQIAKTFGCCRFVYNQTLAYRKEVYEKEKKSVSKTDCNNYCNRQLKKEYEWLKEVDKFALTNAIYNMDAAYQKFFKEHAGYPKFKSKHDNHKSYTTNFTNGNITVDFGCNRVKLPKLKGIKAKLHRNFIGQIKSATISQVPSGKYYVSILVETEHVELPHINQNTGIDLGIKELCITSAGKKYENPKIIRKYEKKLVKLQRQLAHKEKRSQNYCKTKKKIALCHEKITNTRKDYLHKMSHEIISENQVIVSEDLQIKTW

SEQ ID NO: 8697 - protein, 243 aa, unknown
  TnpB Polypeptide
MPSISVGIFAKVCFGLFCFKKDISLRQINSAIGIDVGINNLAVVSDNQFFRNGSTKQINRKFNYLRSILQTKGTKSAKRLLKKLSGRQKRFMAWRNHNISKEIVSNCKAGTIIMEDLKGIKKRRKGKRMNKILHGWSFLQLQNFINYKAEREGIKVIKINPYMTSQICSKCHKVGTRIFGFFHCVCGYSLNADLNSAQNLAQGIAFVQQASVTKPNVSDYDSKVPLREIADEFRGKFLKYPRL

SEQ ID NO: 8698 - protein, 243 aa, Geobacillus sp.
VNSKFFISVLVDTDIQPLEPNSNAVGIDLGLKGFAILSTGETIPNPRHLRKHEEKLKRWQRILSRRKPGGKNREKARLKVARLHEKICNARLDFLHKLSTRLIRENQVICLEDLRVQNMQQNHKLAKSIADASWSEFRRQLEYKAAWYGRQAVIVSPTFPSSQLCSRCRHRNPETKDLSVRQWTCPLCGDTHDRDVNAARNILREGLRILSAQADSTVGHTGIAWCRKAELPVAGVLPRIPRF

SEQ ID NO: 8699 - protein, 515 aa, Catellatospora sp.
MGPRCARVMAGCVHVCSNSVSMADLWPFGAHADRVRRAPCRLRLHPGWPSGRVEVHVSGRDGVSSDPFRGYSGLQAGEETEPLRSRTGIADPPSRRTGVHPWTKALQCPFRIAGVSRTVKRAFKYRFYPTDAQAAQLSRTFGCVRLVYNMALQARTEAWTQRQERIDYNVTSALLTAWKKTDDLAFLSEVSSVPLQQALRHLQTAYTNFWAKRAKHPTFKSKKRSRRSAEYTTSAFRWRDDTLTLAKMTEPLDVVWSRPLPDGASPSTVTVSCDAAGRWFVSLLCDDVIAQTPATGRVGIDAGLDSVLALSTGEKITNPRHESADRQRLARAQQNLARKQKGSANRAKARVTLARIHARIADRRRDHLHKLTTRLVRENQAIVIEDLAVRNMVKNHRLARAISDAAWRQLRTMLEYKAAWHGRDLVVVDRWFPSTRLCSACGALAQKMPLSVREWTCPCGAVHDRDVNAARNILAAGLAVTACGDGVRPQRESSRTGRSSVKQENLRATKGIPVL

SEQ ID NO: 8700 - protein, 390 aa, Holophagaceae sp.
VDPNDPVQAHALAIANAISCRTTKDGNVVKESGVKYVRLLSRTIRGEERVFAQLVFRGVPFQKAKHTVQRRRGGLDLGPSHVAVVTEGEAKSFDFCAGLDRKEKALRVYRRRSDRQRRANNQENYQEDGTIKPRNERKRWVESHRQKSTKVELAEVQRAMAAERESLQGAMVHVVLSMANDLSSEKVSKKAWQKLWGRSVGHKAPGRFESRTGLLAKASGGSLELVSTWKTYLSSRCLCGKRKKKPQSERKHECGCEFIPNGMHADRDEFSAFLAMHCQGDLLDEGKAREAWLSWGADCLLRSSSSDVCGSRASGESSSTTHKPREARQRRARPKEMRGQSGSLANRSGQRRKSVPINIGRRRALGTSPIGLQLPKTSQPGVKNGGPHAA

SEQ ID NO: 8701 - protein, 417 aa, Streptomyces sp.
MKVVVQVRLLPTSEQAAALAATLSACNEAATWVSRVAFDEKVKKNFPLRKLVYGEVKARWALGAQAAQHVIKKTCDAYATLKANLEAGNLGQPGSKRYRKATEKPIAFRPEGAQPYDDRMLSWQITEGRVSVWTVCGRLKGVAFAASAEQLATLALYRKGESDLVCRDGMWFLLATCEVPEAPPNTGPVDFLGVDLGVVNIATTSDGEIMAGRELSRIRNRERELRTKLKKKNTPSAKRRLKKRRRKETRRARDINHKIAKHVVAEAERTGRGIALEDLTGIRERVRLAKPQRATHSSWSFAQLGSFIAYKARRAGVPVVYVDAAYTSRTCAECGHIDRANRVSQAWFACRSCGFVDHADRNGSRNIRARAWELWRCGASSTVPAPRPRWRGGVGRKRSITASDARCASRGSIVPGG

SEQ ID NO: 8702 - protein, 632 aa, Streptomyces sp.
VEKTGDVLSAAVLAERVGWAADLVAGMVTGLLVAHWNAADVETLAAGVDAGGRALPSKAWMALRRLGWTVAPAEGMRVNDRIVRMAQEQAGRLLRSAKWRADLTAGVLATWPADPGRRTPGEWDAVRESIPDGKHLPSGVIRSRTRQIAAFQRRHSRMPSDVFELEAAPDAARMLLLSACDSQQATIVRGDDPSRALLRLQLPARPDPRSYWDWAWVACPITLPPTVPPGAVLHLPTLRIHRGRVHADLAHTHAVPTARRTGHTIALGVDWGLNTLLSAGAVRLRDNGTMTALGAGAQFRAAGVLAKQHRLRRAGEFLHAKTAHYQRLIGDTDSHCLADKHAVLAEEIRHVSARRSNLNDALAWAAARWTVDQAITAGASVIYVEDLRSLEARGMGRTLNTRLCQQVRGQIVDRVRHLAAEAGIAVVTVPARGTSRHCPRCLVPLRHRTAPDRPTTRGWKWAACPNPDCGWQGDRDTGAWQRIAARGITHQTKTVTDRASGTMVIRSVVDTLEATAVVEPATTQTRPDRSKTGPTRRRATRPAPRRRGAPSPTGPSGPAGKRPEGHAPPGRTRLPRAAHRHQDVTTTSKPTTRRHRPRGAALGAGFHLHAHATPPRWAEPTPNPTVRIGSLS

SEQ ID NO: 8703 - protein, 486 aa, unknown
  TnpB Polypeptide
MREQFKGVISSSFYDRLYTHVFTCYQNKFKAIQRKLKFEVSTFDGFEFYKRDSKNHKKGELKRVLLKKKQTPLSNCLTYLARYGNENIIEYIKCNIDKCDDKKREFYHNILRCCEKFGFERLYNLALSKRNKIVKRYSEHPIEFKSLSFGGRSRKKYIVGFNKRFGSKINSFISLSGFDRKSLDIPVKYHKGFHGNMKDYRKDNPNYEYVITFDEKTHQVKVNLCKDGERYIPEPNGKTIGIDVNCKHNLFSLSNETTYDYDRKLVNDYCKLLCEIDNLKSKDKTYLVGKRKQCKLDKLKEKVIKFEQQTIATMCKDIKAHGFGHIVMEDLNNSFGKCYVTDKDNENINYNRKVKFLGLSSLKGEVEHIASKYGIAVSTVHPSYTSKMCPVCGCIDDGNRPTQEEFQCIECGHKDNADLNAAKNIRNRVLVTVLRESLLKQLDNGAYEPRPFNRSKVKDVLLSFRRSLPKVGSECIEGRVTTFEYI

SEQ ID NO: 8704 - protein, 268 aa, Thermococcus sp.
MVCSRQPYCRGKLEGEEWVSVPRTPKGSLSAGIDLGVNNLMAVYVENGESFLVNGRPLKSIAFYWRRKIADYQSKLNKSGAKASRKLKRMHVKAKLQAKHYINTAVRGTVRKLYELGVNRIVVGYPKGIARNSDKGKKQNFLLSHVWRFNTVIKRLREVAEEYGIVVELVDEAFTSKVCPVCGKPHEGARFVRGLFKCPATGLVFNADLVGAFNILKKVVKTITPNLGGLYAQRRGNGGKTLPEGFEEPVLTGSLMRTPQTSPSLARG

SEQ ID NO: 8705 - protein, 419 aa, Thermococcus sp.
MGTSSGNSLKRTKNETIVRAYSIPIRIDEVILEFIEKYHEIAKTALQEILNTKKFTKVERKRLRDTLLENWNYAAHYVDSAINQTLGLVKSYKRKLKKGKKAREPKLKKKFVYVKSTLFGLKGSMLKITIIPREYYLEINLANYPYILLFLKEVWGGKLKLGGLFLFPNKLVLTFVKTVEYFEPRDWMSIDINLTNVTVLAGLTVYRFDTRELYHVHRVYELKRRKIQKISAWNKRLSKKLLEKYSKRERNRTKNFLHKLANKIVEIARERRMGITLEDLNSIKERVLNGSKKMNRKLSKWNARELQRLIEYKAKWLGVPVVYVNPRNSSRICPVCGGQLIPREGRLMKCSNCGLIEDRDFVAVLNLRMWGSGVTPKGLEASRASTPDERPMKTNPYGIMAVEKQRMGMKLHKITLTPP

SEQ ID NO: 8706 - protein, 324 aa, Thermococcus sp.
MKRSVTIKLHPSKEQAKILHQLADSGAKAWNRVNYLRRQQYFKDQIVDFNRTEKTVYGEFKREIGSATVQQIARKNAEAWRSFFSLLRKKRNGELPSWLKPKPPNYLKEGWQRKPLIVLRNDQYKIEGNKLILKGLGKFKRLEVQFKGRIHLKGKQGRLEITYDPVRRKWYAHVSFTVEEKLEDEKWVRVPRTPKGSLSAGIDLGVNNLMAVYVENGESFLVNGRPPKSIDFYWRKKIADYQSKLNKSGAKTSRKLRRMHEKAKLQAKHYINTAVRGTVRKLYELELIESSLVIQRAWLGILTRVKGRTSSSLTFGGLITLLNA

SEQ ID NO: 8707 - protein, 395 aa, Thermococcus sp.
MSFETIKLTAKFKLREIPEGLECLFSTYREIVNFLITYAFENNTTSFYRLKKETYKSLRKEYPELPSHYLYTACQMATAIFKSFRKRKKKGKARGRPVFKKEVIMLDDHLFKLDLENKTVKLSTPSGRVQLEFYPAKYHEKFKNWGVGQAWLVRTSKGVFLNVVFSKEVEVKEPKAFVGVDLNENNVTLSFPNGEFVQIITHEREIRTGYFMKRRKIQKKFKAGKRRRELLEKYGRREKNRLNDLYHKLANKIIELAEKYGGIALEDLIEIRDSIRYSAGMNGRLHRWSFRKLQSIIKYKAKLKGVRVVFVNPAYTSSLCPICGEKLSPNGHRILKCLNCGFEADRDVVGSWNIRLRALKMWGVTVPPESPPMKLGGGKPTLTVNAIKRKESAGR

SEQ ID NO: 8708 - protein, 329 aa, Thermococcus sp.
LKEDGRRKPLIVLRNDQYRIEGNKLILKGLGKFKKLEVQFKGRIHLKGKQGRLEITYDDVKRKWYAHISLTVKEKLEGREWVKLPRKPKGNLSAGIDLGVNNLMAVYVENGKSFLVNGRPLKSIDFYWQKRIADYQSRLNKSGAKASRKLKRMHGKAKLQAKHYINTAVRQTVRKLYDLGVSRIVVGYPRGIARNSDRGKKQNFIISHVWRFNHVIKRLTEVAEEYGIEVVVVDEAFTSRTCPACGRPHEGARFVRGLFKCPATGLVFNADLVGAFNILKKVVKTITLSLQGLTAGRGNWPEARPEGLKARFELGLNEAPRTSPSMARD

SEQ ID NO: 8709 - protein, 435 aa, Thermococcus sp.
MKRTVTIKLQPSKEAERILFKLADTGAKAWNRVNYLRRQQYFQEQIVDFNKTEKTVYEEFKRKIGSATVQQIARKNAEAWRSFFSLLRKKRNGELPNWLKPKPPNYLKEDGRRKPLIVLRNDQYKIEGNKLILKGLGKFRRLEIQFKGRIHLKGKQGRLEITYDEVKRKWYAHVSLTVGEKLEGGEWISIPRTPKGSLSAGIDLGVNNLMAVYVENGESFLVNGRPLKSIDFYWRKKIADYQSKLNKSGAKTSRRLKRMHGKAKLQAKHYINTAVRGTVKKLYELGVSKIVVGYPKGIARNSDKGSKQNFILSHVWRFNYVIKRLTEVAEEYGIKVVLVGEAFTSKTCPVCGEPHEGARFVRGLFKCPATGLIFNADLVGAFNILKKVVKTITPSLPGLSAGRGNGGKTLPEGLKTRFSAGLNEAPQTSPSVARG

SEQ ID NO: 8710 - protein, 393 aa, Thermococcus sp.
MPSETIKLTAKFKLKGTPDGLDDLFSTYREIVNFLITHAFENNITSFYRLKKETYKGLRKEYPELPSHYLYTGCQMATAIFKSFRKRKKKGKARGRPVFKKEVIMLDDHLFKLDLENKTVKLSTPSGRIQLEFYPARYHEKFKDWKVGQAWLVRTSKGVFLNVVFSKEVEVKEPKAFVGMDLNENNITLSLPNGEFLQIITHEREIRTGYFVKRRKIQRKIRSGKRRKKLLEKYGEREKNRLNDLYHKLANKIVEVAEKYGGIALEDLTEIRESIRYSAEMNGRLHRWSFRKLQSIIEYKAKLRGVKVVFVNPAHTSSLCPVCGGKLSPNGHRVLKCSNCGFEADRDVIGSWNIRLRALKMWGVSVPPESPTMKTGVGKVSRNDVYELYTSYG

SEQ ID NO: 8711 - protein, 436 aa, Thermococcus sp.
MKRAVTLKLQPSKEQGKTLSELAGLGAKAWNRVNYLRRQQYFQGQIMDFNKTEKTVYEEFKREIGSATVQQIARKNAEAWRSFFSLLRKKRNGELPNWLKPKPPNYLKEDGGRKPLIVLRNDQYRIEGNKLILKGLGKFKKLEVQFKGRIHFKGKQGRLEITYDEVRRKWYAHIGYTAEEKLEGNSWVKVPREPKGNLSAGIDLGVNNLMAVYVENGESFLVNGRPLKSIDFYWRKRIADYQSKLNKSGAKTSRKLRRMHEKAKLQARHYINTAVRQTVRRLYNLGVSRIVVGYPKGIARNSDRGKKQNFILSHVWRFNTVIKRLKEVSEEYGIRVVVVNEAFTSKTCPVCGKPHEGARFVRGLFKCPATGLVFNADLVGAFNILKKAVKTITPSLPGLTAGRGNWPETRPEGFEKPVLTGSLMRTPRTSPSVARG

SEQ ID NO: 8712 - protein, 325 aa, Thermococcus sp.
LKLALLTEKFKRAVELAIRLQLKGIRKSEGVKEVSRLVLNNWWYSDSAWDYAKMLLKGAKQNGGNPLHIHLKSKFLISKPKENEKGNRNVRIEGLNVRIRSNGEWLNFKMKTGKNFLPVIFDVQKLKYGAQVVLRNGKVYLHVQVPFEVYLKHYGRTAYGKLYSGFDLNSDRVNMVILDERGIIRDVRVEHFPEVNSPGFSKRRARDLRLKALAHLLDYAFYHGVGVVFFEDLERIKRKNGKATNSRKGNRKASNFAKKELLEHGIVMALKRGFEVYLVNPAGSSKLGRELAQGLGLDVHFSSAFVIGWWGLNSLKSQKKNSPVW

SEQ ID NO: 8713 - protein, 437 aa, Thermococcus sp.
VKLTKTVVLESLPLTKKKFKAMKEVYDEYLEILEFLTDYAVENRVKSHLKLRKLFYKKLKEEHDLPTHYYYTVCQDATTRARSFLELKKKGRARTEKPVIRNVSLWLDDVLWDYKRFPQFNTLRNGRKILVIGLTTKRGRIKLPLKPHKLFFKYLDDGWKVKAGVKLRIIEKERKVLAYFVFEKEFEENRLTGSFLSVDYNADNVSFGTGEFLIQVRTELGKLTRFYSDVRKKIQESHLVGWKRKLPSKKGREFLRKFGQRKMHKRIDLQRKLAKRLVEVAKESNTTIVLEAVPKNFNQKITEKRRENEKRLRNTLHNIGMNGFQRFVFEKAVEFGVPVVFVNPFYSSQVCPRCGAFKIKPNDDALRQRVFECPVCGFSADRDFVAVLNLLGLFPFSPKAREPLREEPVVPVNLTVEANLLHHKNSLVVISQCLKQK

SEQ ID NO: 8714 - protein, 406 aa, Moorea sp.
MGPVDISHKMVENVSMTERAYRYRFYPTPEQETLLRRTLGCVRLVYNKALDARTKGWYERQERISYKETSSMLTGWKKEEDLFFLNEVSCVPLQQGLRHLQTAFTNFFAGRTKYPNFKKKRNGGSAEFTKSAFKWRNSQIYLAKCQEPLPIRWSRQLPANCNPSTVTVSLDPSNRWHISIRFNDHRDLSLPPTSHQIGFDLGITSLITTSNGDQITNPKHFKKLKKKLAKYQKDLSRKQKGSNNRCKARLKVARIHAKIKDSRRDFTHKLTTKLVKENQLIAFEDLAVKNLVKNHKLAQVISDANWAEIIRQVKYKSEWYDRKAVLIDRWFPSSKLCSVCLNRVESLPLNIREWDCPSCNAHHDRDINASINILAAGLAVSVCGATVRPEESKSRKAGALKQKPKS

SEQ ID NO: 8715 - protein, 269 aa, unknown
  TnpB Polypeptide
MLVFEFKTYGKASQFTAIDDAIRTCQFVRNKALRFWIDNPKATKYDLNKQCAVLAREFPFADELNSQARQSAAERAWASITRFYENCKNKVPGKKGFPQFQKDGRSVEYKSSGWKLAPNRKSITFTDKKEIGKLKLKGTRDLHFYQPEQIKRVRLVKRADGYYVQFCVSIDRSESVQPSGIAIGLDVGLNDFYTDSNGKTVDNPRFLRKGESRLKKAQRCVSKRVKKSSNRRKARLILGKRHLQISRLSFRPCCEISTVRNHIKRCSRL

SEQ ID NO: 8716 - protein, 413 aa, unknown
  TnpB Polypeptide
VVLMKRTEIIYIPPNPTLHYYCHLSKNLYNQATYLIKQSLKENKLLSYYDLNNMLKDSENYKELPTQSAQQILKIVSRNWKSYFKALKEYTNNPNKFKAKPKPPSFKPKDGLFMLVFTNQQCKIKDGKLKSDKTKGFITQTVVRFPKKINLIIPTRLPDNTNIREVRLIPTLEGYKIEIIYEKKPIITELNDNKIISIDLGMKNIITMTNNFGDKPIIIRDNGKGIKSTNQYFNKIVSKLKSIYNKQNIKIGRKLKKVIIKRNFKVNDWIHKASRFIVDYCVKNKVSKIIIGYNDDWKQEVSLGKKNNQTFTLIPFKMLIDKIVYKAEEYGIKVILTEESYTSKCSFFDDEEIGKKKEYAGKRFCRGLFKTLKGWVVNADVNGAYNIMRKVVDNAFKGIDLCKLPTHPVKVYI

SEQ ID NO: 8717 - protein, 411 aa, unknown
  TnpB Polypeptide
MFSHAVFMVYVNIKRTFVQMKAYKTEIYPTKEQKQLIHQTIGNTRFVYNNFININLENIKHKRPILSGMDYSKQINHDPNTPKWLKTVSSKALKHAIMTAHTTIWKHAQGKIKHVHFRKKTKHNSFYLIGTIKVQRHRIFVPTLKWLRLKEYGYIPKNIKSVTISVKNERYYISCLSHETKDERIATSDLGIGIDFGLKAQFITKDQTFPSINKSAKVRKLEKKLRQKQRSLSRRYEQNMINKVYYKNGKHKGQLKSFEWKRPLHECKNIQKQQLVVNKIHERLARIRTDYNQKCLQSILKQKPRFISIEDLNVKGLMKNKHLSKTISKAQWYQSRLFLQNQCEKLGIELRLINRFYPSNKLCSACGCKNNNLKLKDRHWTCENCHTYHDRDVNAAINIENCQDYTVLTTV

SEQ ID NO: 8718 - protein, 367 aa, unknown
  TnpB Polypeptide
LNIAYRFRIYPTEEQKILLGKTFGCCRFLYNQMLNDKIREYEKTKKMLKNTPAMYKKEYPFLKEIDSLALANVQLHLEKAYKNFFRDSKIGFPRFKSKHHSKNSYTTNVVNGNILVESKRIRLPKLKWIAMKKHREPAESLRLKSVTVSMESSEKYFASLLYEGYSCENQAAGPDYSTAKILGIDYAMQGMAVFSEKVETEEAGFFRKNEKRLAREQRKLSRCVRGSHNYELQKKKVARCHEKIRNQRRDHLHKLSRKIADGYDAAAVEDIDMKAMGQCLHFGKSVQDNGYGMFREMLDYKLAWKGKKMIKVDRFFPSSKKCCKCGRVKKELKLSERVYHCVCGNKMDRDRNAAINIREEARRMLTA

SEQ ID NO: 8719 - protein, 430 aa, Halobacteriales sp.
MVWEVTRTVRIRLDVPDDRKSDLHATNSKFQYCANRTADWAWRYPDETCVTSKNEAEAAIYDGLRKETDYLHANLVQKAIKRATDDIDNCVDSLAEGENTSKPEYDTFSIVYDKRAATYYRDRVSLATVNGRVECDYDLPDDPNGTPHGEYLLNDDYSFSTSTVHYDSEGDEFYLHAAMERELDVSSPEKAEDSRVLGVDCNVDDHIAVTSTGRFVGNAEYLNHQRREFEKRRASLQETGTRSAHLTFQQMGNRFERWSEDYLHRCSKEIVAEAKRHDCTHIVFEDLEQIRERISDGKKFQQWAFRELQEQTLYKAELVGIVVEMVEPSYTSQQCSKCGCTLEENRDGQRFACLDCSYTVNADYNAAKNVARKLALKLQRGQKSPAGGAFCQYALKSGVMTVNATEVASDSYLSAERESTDKPTTSVVGG

SEQ ID NO: 8720 - protein, 386 aa, Coleofasciculus sp.
MTKVTRTLKLKFHNLNKVKQQMFAEMTRENTRLANELLQIPYVERREITTAKIVTSLKSALANQTIRHTISATGRKVKHYKCLPPEINKQNWKLEKRGDTYSLSFPTIQGDKRVPIVIASVHWESVLEQTLAGDVEKGSVKLIYHRSRWYAYVSVTVDVPELQTLERVGVDRGQNNLAVVAPAQGFGKFHSGKEVMHRRRYFQKRRQQLQQAKKFRALKKWNNREQRWMEAVNHTISRRLVRFAQFHEADVVVEDLEGCRDTMKQSKNSRSDAGQSRHSWSFYSLEQKLEYKLALYGLKLVKVPAPYTSKSCSTCGTIGHRHKHDFNCRHGHYHNADLNAARNIAQWEGNSCSLELQQGAAVMVSSATENEPLGTARSSSCSPGNR

SEQ ID NO: 8721 - protein, 373 aa, Bacillales sp.
MFPKEVFCENMAIISLKLELLNPTKSKQGMYEKMTEINTGFSNWLLGLTSLSKITSKIFKDFSDERFPSAIVNQTIREVNSKKKHQKATLFKKFWCGFNNQNCKIELENNLYKFSFPTLKKRIAVPVVAKDYQQYWLDKLLSGKAKQGKTELYKKRGRWFVAVAISFETEKLKIVSLHPKIMGIDVGLRNIATCSLGTKNLIFKGNGVSFKRRKFASKRKKLGQLKKLSAIKRSKNKESRWMKDVNHKISRQIIHFAISNGVGVIRMEDLTGIRMAKSKKEAGRNLHHWSFYQLQKFIEYKADMKGIKVDYVKPAYTSQTCKCGHCHKDNRHYLNFKCKKCGYKNHADVNASINIAKAISGFSETKNKTKTSA

SEQ ID NO: 8722 - protein, 374 aa, Trichormus sp.
MKTLKFKLYEHKRNKHLKRMINAAGVIYNHCIALHKRYYRIWGKHLNCTKLQSHIAKLRKRNSFWQSVGSQAVQDICQRIEKAYQLFFKHNKKRVRPPGFKKVKKYKSFTLKQAGYKLLGGNRVKIGNRVYQFWKSREIEGKIKTITIKRTALGEMFMVIVVDNELEPEIKSTAGNIAGFDFGLKTFLTCSDGTKIDAPEFLKQSLNAIKKASRHHSKKVKGSNNREGARKNLVRKHEDVCNTRRDWFWKLAHTLTDKFDVLCFETLNLKGMQRLWGRKISDLSFGEFLQILEWVAKKKNKQLVFVDKWYPSSKTCSCCGHVLESLDLSTRQWCCPSCNSVNGRDENAAKNIQMVGASTIGLGDVRLAMPAIAV

SEQ ID NO: 8723 - protein, 412 aa, unknown
  TnpB Polypeptide
MLVVVKDEMLVKGVVFYLDSGLPMDARFLLEDFRLAVNNSIRAGFQARVTSRNALCKIAYRDFREQHPRMYAQHLVSAFEVAGGVLKNHRRRVRKGVTGRIPFVKRLMMKAENQAYKLDRKSGVIDLPIRAGCHVELRLVVSQYHRKYLDNMNLSLGSLTVLPDRVIVAFGKDMPKPFVPESALSLDTNERSLDGVFVEGDVAKAVKAEFPDIAIIQQRHHDRRKRLQKKKAHDRRTSRNLCGMEGAREHHRIDYRLHQVANAVLGFAEDRRSAIVLEDLTGIRPRKGRELNRRLSMWPRRKLHQIIEYKAQWKGIPVVKVDPRNSSRTCPICGKIQYSRMGAKFKCVCGWHMDRHINASINLLQTAISKGMAGGLWFNPGAFQHDAMMILYDPVTGARSESNGTSGIVGVM

SEQ ID NO: 8724 - protein, 95 aa, unknown
  TnpB Polypeptide
VHEKIANQRNDFLQKQSTMLVRENQTICIEDLNVKGMIRNHKLAKSIASVSWAKFFKMLEYKASWYGNEIQRVPTMYPSSQTCSSCGYRNPRIKI

SEQ ID NO: 8725 - protein, 515 aa, unknown
  TnpB Polypeptide
MSSVTRTISLRPFACREKKTGAGLDLHTVLEEVRADAELCAIEASKHITIENLEQVSRYNGLKPAEAGRQMGIKLSSAGRGTGRSRFERMVCEYAVSQLRSWHERRKVHTRQTDKYVSSGFKRTANSNKPDFLKPRLALSATDKQYHVIRIKASTIELDMVVAGRWVTFKFAAPQRFLEPGIKIIAPTISIDDKNRVIFNWHIEIPVERTSFSSKYVVGVDVGIANHTTAVVRNIETGQVVESSFMNRRVRSLENKIKRTKTQITALYRQNRRDEIESHRKALSNRRKELAILIGQEVAELSYQYGNALVAVEDLSFITNTMKNGRWVRGLIIKRITNMVESNGGRVMAVPAAYTSQKCHHCGTMLDMTDYHTPICVNCCVGWDRDENAAANIASKLKDRHKKACTTRKKHASKTRRRNSKDTTRPLKHPLKKMGPTPKAPQNRLKPNNSHCAHHKNTVIEKREEVYPILCAAGWSLRDRNVSVPAVGPEKVSDKKPHDYPINRYKPTGCVYTKE

SEQ ID NO: 8726 - protein, 406 aa, Okeania sp.
LERKSIHLKSQKIRVYPEKSLLGIWKQWLAASRYCFNQAIAYQRKHGLISKYDLRKVILNSDLPDWIKKSPYHLKVNAIYDANAAFKASRKSGTKQPSCGKFRSIRDRIQSIKFRVEDFKKGTWLPSVTKGLKLFASELIPSINVEYQQKQKDGTYKVCVREQSWNAETQLVYDKKRWFAVFPVEFKPETSKSQSIIALDPGVRSFLTGFDGEKFIDIGMGDITRIFRLGQHIDQIISVKTKLKGRKNKYKRQRVSQKINSLFIKVRNLIDEVHKKVAKWLTTEYRIIFLPTFESSQMVAKSGKKKRKLTSKTVRQMLSWAHYGFKQTLKFHALKRGATVIDVTEEYTSKTCTHCGHVHKNLGGSKHFKCSHCGHSMPRDWNGALGIFLKALRDTANVDGFAVTLL

SEQ ID NO: 8727 - protein, 269 aa, Crocosphaera sp.
MCLDDPSVPKISKDEIIPSWDNSMGIDAVLFEDNYLANSEGNKLPSVKSYRKNQTKLAKISQRKNTKEKGSKARRKLAKREARKHQQIARARKDHAYKMAHSLVHSDKKVFFVENLNLQGLRKRNKTKKDHQGNYLPNGQSAKSGLNKSWSDASFGQFFDIFSYIAEKAGAVVKKVNPAYTSQLLPHRDEFVFTDCSIRKYWDEIEKIWVDRDISASINLKRVGLELFPTINRRSGKIVKSQTNSTAKEVLAVLKRIPEAYALSLDERR

SEQ ID NO: 8728 - protein, 356 aa, unknown
  TnpB Polypeptide
LKRSLKFSLNKGNADKILALEKLYAEYIRTVNIFTTSLFNKQELSETYLKSLRSPLSCRYRQCAKRQAFKIFKSWCRNKKKGEKPVLRGSMILDYRFIEIQKSENSFDYWAKIATLNKGKPILIPFKSYDYANKYFNNWKLVNGGRLQKRDNGWFLLLTFEKETPKTKESGKVIGVDTGIKKLMVDSNGNQYGKEIEPLMNKIQRKQQGSKAFKRALKERDEYINKTVKELPLKEMKIIVVEDIKDIKKNTKKEKRLNKQFRSKFQRWTYSKLISRIQQLSEVDGVHCQMIAPAWTSQTCSRCGFVHKLNRNGEIFKCRNCDCTLDADWNASLNILNLGLTQQSMVAGNMKGNICL

SEQ ID NO: 8729 - protein, 409 aa, unknown
  TnpB Polypeptide
MQRAHKIRLHPTPEQDEYLRKACGTARFAFNWGLAEWIRQYNGGGKPSAYALKKQFNAIRRKEFPWSTEVSKCAVDTGFRHLDMAFKNFFRRCKKGDAKKGYPKFKTRKRSKLSFQMDGTRVKVRGHWLKLERLHEPINMAEVLRFDGEIKSVTISEDAGHWYAAINVEIEPPEHKHPRESVGIDVGIKTLAVLSDGVQYENQVLLRSRLRKLKRLNRELSRRQEGSGRWNRTKKKLVKLHRRIANKRLDYTHKMTTGIARTYRIIGVEDLNVPGMLRNRRLALSIADAGFGETQRQLRYKSEWYGGILVEVDRFFPSSRLCPMCRGIKSDLTLRDRMFICACGYTADRDVNAAQNIEREALRLMNRGRSGFTDSLNGRGQDIRPLEAIPDEASKWPKKGGLPDLLWFR

SEQ ID NO: 8730 - protein, 380 aa, unknown
  TnpB Polypeptide
VEITLSVPFGYEQSEEIRKLLEDFRDMLNFCIERALKDNITSYARLRKHIYREWKSRWGYSTHFCHSACLIATSMLKSWRKLKRKGIAKGEKPLAKKLFMRLDPQLYKFYGDKIRISVRHRKFLFINLKYGEYQKRFIEAWKEGKLKTGEITINEGKIVVPFKKDVDLSSPCDWIAIDINESNVTAVSSNPHILRIESSLRTIHTTYFNITRRIQRLKKFKPKTAERLLKKYSGREKRKAKDECHKIARKIVNFAKQHHTGIIMEDLKGIRRRISHNKNLNRRLHSWNFTRLQFCVEYKAKLNGLPVIHVEPKGTSSLCPICGGKLAPNGYRLSKCNGCGYENDRDIIACLNMLRMWGVPLPPKAAHETPAEAERIVIKS

SEQ ID NO: 8731 - protein, 498 aa, unknown
  TnpB Polypeptide
MKKLVNRNWTLPLSMSKKDKEMFIEWNTKLNLLWNTLVAIIVSYQYLKKNDEVTPIKLKNKYEELKSFGQAKKVKREELTEFLKYALNKRQWPKDTKVNFELLPLTNKTFKTMVESHKYSDKKEKKFGFKNANFLSMSPTSTSIKNENKDVLEEFPSIVREGILKKCCTAFEKKKNKFGKTVFPTPVMKLYKDRYNVSIPFKKATGYKSLGYLENSKKFICQVLKGTTVTVKNTYPVDLGTVTNYTILCDGRTNEWNISICHKYYEDFQKPNLDEVGLDLGVKEAITASNGMTFNLPNEKLAKLQKNRKKQQRKLSRAFEESDELRILELKKRIAKIDNKIVNIRNNFSHNVSKVLANHKEIYFEKLNIQAMTKSAKGTTDSPGKNVAAKRGLNKAILDKNWGRIKEMTVSKSKDRGGKVFEIDPKFTSQICNECNHKSKENRKSQAEFKCVKCGHENNADVNAAKNILKKGKKLKKSGDIKSLTEDKKKEAVKKKAA

SEQ ID NO: 8732 - protein, 368 aa, unknown
  TnpB Polypeptide
  misc_feature (62)..(62): Xaa can be any naturally occurring amino acid
  misc_feature (67)..(67): Xaa can be any naturally occurring amino acid
  misc_feature (78)..(78): Xaa can be any naturally occurring amino acid
  misc_feature (273)..(273): Xaa can be any naturally occurring amino acid
  misc_feature (275)..(275): Xaa can be any naturally occurring amino acid
MFRSYKYRLYPNREQVERLSEMLNVFCELYNAALQERRDAYTKNGISISYYDQSKQLPVIRXERDDXARFSSAAAQQXLRRLDKAFKAFFRRVKSGEIPGYPRFKTRSRFKSAPFVFGNGAGIRNNRLYIHGVGQIKVKWHRRIPDDATIKQVVVKRSGDKWYAAFQAKLPDPKPVTHLGPAVGIDLGVSSIIATSDGDIVKAPHYMRRAEKKLRKQQRRMSRRKKGSKRRDNARKQVAKTYEHIANQRRDFSHKLSHKLVNDYSFIAVEDLXIXGMSKNHNLAKSILDAGWGQLLYMLNYKVENTGSQIVAVNPRNTSQICSGCGCIVKKALSVRVHRCPECNLVLDRDVNAARNILARGSDGAVRH

SEQ ID NO: 8733 - protein, 407 aa, unknown
  TnpB Polypeptide
MIRSTKLSLKFANRGKRDLLNNFIGKYQLAVQEYIDLIWDMEKVPSLLPKTLTDKCSVLLTARAKQAAAKQAAAIVKGTKSKQSKRLFMINKLIKENKLDEAKRLQDFYNKVKISKPNVSSLNLLLDSRFVKFNEETESSFDSWITLGSCGFGKIDLPVKKTKHFNRLNAKGKLLGSVYLSSDYITLCFEVEKPINNNTKTVGIDIGCNKVISCSNGFQTVPNKHGYDLNKIIDLLKKKKPGSKQYRKVLRHKKNFINETINQLDLSDVKVLQLEKIINLKRGRKHLGKLNSWTYRDIFSKLEGKCEELNVSINRVNPAYTSKRCFLCGYVHKDNRRGEEFKCVGCGYTAHADLNAAMNISLTLPELNFGEVSTDTPFYWLVGEQESIVPANKKYILKKSSRLFVTI

SEQ ID NO: 8734 - protein, 437 aa, unknown
  TnpB Polypeptide
MITIAHRIQLMPNNKQKTYFRKAIGCCRLAYNWGLAEWKRRYKEGERGLTGRKLRNDFNAIRGEQFSFTYEVTKYATAHAFDDLQTAYTNFFEHRADYPKPHRKKDGEGSFYLGNDVIRLSDTHKGLKHLKKVAHNVGGKRQYVNISNLGYVKMSERLRFNGKVLGVKITQEGERFFASFQVQITEEEYRRTHPEASREKHGAVGIDLGLKEAMTLSDGIAVCNPRTIRKHQRKITRLSRQLSKRQHAKTKQERLQGVKRSNNYRKLSRRLGREQHHVANIRRNFTQKLTTILTTTYEAVAIEDLNVEGMMQNHKLAKSVSDVSFGELRRQIEYKAAMNGVRVEVADRFYPSSKTCSCCGHRRDDLTLKERTYVCPHCGTVIDRDLNAALNLLSLITNKVGIEYPELTPADLTALQSRFDLNGIATSKVETGMQRKL

SEQ ID NO: 8735 - protein, 104 aa, Bacillus sp.
VGLDFAMNGLYVSSEDEKANYPNFYRNMLDRLAKAQRVLSRRNKGSKRCFFQRKNFLHHESKKLATNFDVVAIEDLNMKEMSQALHFGKSVADNGGYVHFFLSL

SEQ ID NO: 8736 - protein, 299 aa, Hormoscilla sp.
MLYGFKTQLKLKFPTAIDLHKWLVALVKPECPWYYEVSKCAPQSALRQLASAWKRAFKKTSKPPRFKKKGRADSFTLDGSIKLDHFRIKVPKIGWLRTHERLPVCSQPKSVTISRTANRWFISFRLEVEPVNHPKPHPVVGVDLGIKTLAVLSTGEVFEGASSYRRFEKKLSRLQWLNRHKQVRSANWNKAQVKIARLHRKIANIRKDTLHKLTTYLAKNHSRIGIEDLNVSGMMANRKLAKAIADMGFYEFKRQLEYKCQLYGSTLIEIDRWYPSTKTCNICPHQKRLNALISKSFPV

SEQ ID NO: 8737 - protein, 267 aa, Frankia sp.
VSRTACRWFVSFTVEVEREVPTGPSRRQRAAVTVGVDLGVRHLAVLSTGETVANPKPLARSLRKLRRDGPHKLTTRLATSHETIVVEDLPVAGMVRNRRLARAVSDTGMAEVRRQLAYKTLWYGSTLVVADRWYPSSKTCSGCGGRNPNLTLPDRIFTCPSCGLVADRDANAAVNLRHLVAASTSETINARGADRKTHPGGRVAVKREPGTAMAGKSVTRTTEVASGGKYGGTRRDTEGVPVGVKSFTRHGRARHVIPVAIALPGLP

SEQ ID NO: 8738 - protein, 353 aa, Frankia sp.
LVRIDARRRRPLVSQLEDLLRLRLAKPKPDAVRAHLHLPVLRAGTRPRPQRRDQPAPPRRRQYTGDGKRPWSRPEDPRKRAGGWEAGTRHGHGRSDRGRLAERRGGIGDERYRSSRCNGARWYLVLSCDDVPAAVVEPTGAVVGLDVGVASLVTTSNGDHYGNPRFLERSAERLADAQRDLSRKKWGSKRRKKAVARVAARSRAVARQRVDLANKTALELVRDHDLIAVEKLNIKSMVKRAAPKPDPDRPGAFLPNGQAAKTGLNTSILDAGWGVFFNVPRAKAESAGRTVVEVNARRTWVTWVASANQRSTSTACSRLVSFRCHRPPSATQPPTVRDAHAELSIVARKGSLR

SEQ ID NO: 8739 - protein, 557 aa, Frankia sp.
LGGQPEPGCRQGRDRGRVGAQRSSAEVPRPAARPGRGDDRRRAPGPVCPVRRRVCRGGAVGAGPAAAGGRPGRGRRRPGGRRHRDPDVAVRPAVRSSGRGEPGRPRRRRRHRGWRVTTLQAYRFALDPNQAQLAGIRRHAGASRFAYNWGLARVKAAHAQRDAEQSYGLTGDLLTPVPWTLPALRLAWNAVKRDIAPWWDECSKEAFRAGLDQLARGLKNFTDSRQGKRKGRRVGFPRFKKRGKARDSFRYTTGAYGPADETYVKLPRIGRVKVHEPMGALTGRLADGRARLFGVTVSRTADRWFVSFTVEVDRDVPERPSRRQRAGGPVGVDLGVKHLAVLSTGQTVPNPKHYQRAERRLRRASRAHARSKPGSAGRRQRAAQLATIHVRVANQRHNGLHKLTTRLARSHDTVVVEDLHVAGMVRNRRLARAVADAGMAEVRRQLAYKTRWYGSTLVVADRWYPSSKTCSGCGWRNPSLTLSERTFTCQSCGLVLDRDHNAAINLHHLVAASTPETENARGADRKTRASGRVAGKREPGTATAGQTGGASPRGEAA

SEQ ID NO: 8740 - protein, 399 aa, Frankia sp.
LRRSYKFLLRPTAHQQIALTAMLDDHRALYNAALQERRDAYRHPSKTTVRYGGQSAQLKDIRGFDADQARWSFSSQQATLRRLNLAFAAFFRRVKAGETPGYPRFKGAGWFDTVTWPANGDGCLWDSQPENPKTMFVRLQGVGHVKVHQHRPVAGRVKTLSVRREGARWYLVLSCDDVPAEPLEPTGAVVGVDLGVASLASTSNGEHYGNPRFLERAAGRLANAQRDLARKKRGSKRRRKAATRVANQSRAVARQRVDLANKTARELVADHDLIAVEKLNVKGMVRRAKPKPDPDQPGAFLPNGQAAKSGLNRSILDAGWGVFLNALRAKAESAGRVVVEVNPRHTSQRCAECGHVAPENRPSQATFRCVECGHAAHADVNAAINILGAGLALQVAQAS

SEQ ID NO: 8741 - protein, 376 aa, Gracilibacillus sp.
MAVHHKAYQYRIFPNKQQQTFMVRSFGCSRFVFNHFLEKIKNRDEENQKTLQVNAFKNELKSMKTNYVWLKLVDSISLQASIEHLNDAMVRFFNKQNKFPQFKSRKHPVKSYTTKSVNGNIKVTKTHIKLPKVGWIRYANSRPIPDSAVIKHVVVRQNAAGKYFVSINVKEEVKKRDKTNQTIGLDMGLTHFVIDSNGNKINNERYFQSLKKKLAKAQRSLSQKQKFSNNWHKQKKKIATIHEKVVNKRKDFQHKLSSELVQQYDVIAIEDLSVSDMLKDKLYSKSIQDTSWSEFTTMLAYKCDWYGKELVKVGKHFPSTQICSSCKQKHPITKDTSIRVWTCPTCQTNHDRDINAAVNILEEGMHLSTVGATGIA

SEQ ID NO: 8742 - protein, 374 aa, unknown
  TnpB Polypeptide
MKWKKGLGRDICIHNLQIQGTPLNIRYLKDAWFTIEHLPPHVTFGGIKNQKLREKGKITREQWEECRNSILVSRGDKSKKGNLNIRIIDDNGNLKLRVNIPFRNPKYIYLGLFIPEKYRKKYGKYLTGNNPYTVILKREKGKIYAKISTVISYNNKESKRIMAIDINAGHIDFAVVDKENKRILSIGRVNTDNKDIYVVAEKIQNIANHYDADIVVGKLNSHKFKAKNCHKANRKINHIPHSKLRIALKKKCAEKGRVVIKKSEAYTSKIGAKISQKTGIDVHKASAIAFALKVLNYDDFRTLKESHIDEGDGSLNMGQIQGCGITSPIQSNIGLDGNDGFMPRGYAQIPGMGGLSILERIKADLRCVQCIKIP

SEQ ID NO: 8743 - protein, 185 aa, Halomonas sp.
LAEVSLVPLQQCLRHQQRAFKHFFAKRARYPSFKSKKHRQSATFARSAFADCDGQITLAKCSEPLNIRWSRDLPSAPSSVTIFQDRAGRYFISCLCKVEPEALPITPKMVGIDLGLKDLFVISDGQWVNNPRHTARYARKLARAQRQLSRKQKGSNNRAKARLKVARCHAKIAETRRDYLRKLTC

SEQ ID NO: 8744 - protein, 385 aa, unknown
  TnpB Polypeptide
MFRTIKLKLPYDPPLLETGRQFREACQAVLDYGFAERTFNKNKLNRGTYRDVREAIPTLPSALVQTARDTASETLKQTKLRKKIHRKSLTIRYDRRTFKFCPDSLTLSLTTVQGRLVFPVRDSPLIEKYKGEYTNAQVVFDERHRKAYVMIQIEVNREVEVKEGIEDIKVVGIDRGIKNLAVLSNNMFFNSGHLKDVKGRYRYNRKRLQHAGTRSAHRKLKELSGRERRFVLDTNHVISKKIVNLPYNVFVLEALRSSKMKHKGIGRRFNHKLGSWSPYQLQQFMEYKAEEMGKSVKYVDPKYTSQKCSRCGYINKGSRNGSVFHCLNCSFELHADLNASRNIGVLGKSEYFRLLSTSQSLRSGETMPTGMAEGSNKPHPSGWGS

SEQ ID NO: 8745 - protein, 383 aa, unknown
  TnpB Polypeptide
LQKQCLEQNIPFLKYTELAGRLILWKMEDDKAWLREAPSQALQQGLMDLDRAIKDFKAKRKGFPKFQARGDGDSFRIPQVKPSDWDEANGRVRIPKAGFVRFRKSRPIQGRIKQMTVSVDCGRWYVSVVTEMDCAKDGPSRPGEVGIDLGIAQTVTLSDGTVFQLDVESIKKHEHRIAVLQKQLCHNKEARQKLAKLDKAAPFDKREPSRRRRHLKEQIQKHYRCIRNIRQDFMKKTAHTIAQKFGWVAMENLNLKNMTKSAKGTVEEPGKNVSAKSGLNRSLVRVAPYAMRMAILWALYKAGGTLVLVDPRFTSQTCPICGYTSAKNRPTQAHFGCQHCGHTENADVVGARNVLKKSRTGSVRPCSELGNKTAAGTVLFFAV

SEQ ID NO: 8746 - protein, 455 aa, unknown
  TnpB Polypeptide
MVLQVVKKTYKLNICPLTKTKTEKLADLENRYRAILNTINTGVEYWDTMPGSDGLPFTKFNLHKLLYKGVSKDSDLQSQLIIDAIADAWGNRKDPCARLNHPTIPFNRPRSGNLGKTKKGNPVLTIAIKDSGGGRMALPIAMDGAWERLRSELNDSWDFTCFELQHLRTKQKDRWCIIINLRKEFEVSDLANSKTVLGIDTGSGTPAAITIVDKKGRTVHQQYFGRDIAHRQRQVWWKRAKLQSYASKGSRKAKGKLKKLKGYETNMVKTGCYQVAHRIVDLAVEHSSVLALEDLKGLNRPRKRKRQKKDGKGMEPWPRKVEKKINKKVHHIPYDILHTAIRSVGYQRRVGDVKVNPMYTSQTCFHCLVIDGSYRKGRIFVCEKCGLVVNADRNASGVIALAPLQERPQTRHLGPVSRRDGRVNGHVWDHDGGRKTGRGLVRTPEPKLGNLFPSG

SEQ ID NO: 8747 - protein, 341 aa, unknown
  TnpB Polypeptide
MALTNLAYRGFEVWVPDLPKEVQYQLYSFRNFKGSLVFGAVPKRWFARAWVPLKTLRIYQDGSKKGDPNAPIVLDFKSGVIRLRQVCRNKPRYVVDVPIPKWVVDRIKEGGDVKFATIGLKDDEPYLALTAEREVEPYQPSGYILAVDVNSWRYGIAWGLVRGGRLVTWRAEGPNTFLINTLYHQAVDRERVVGKLRRVGYGGSLKVSRIREQAKSRWSRIYRITRDKAYFLAIKLVRKAVKYKALLVIDDVTEESRKELLEEKLPPDVIKLLMSNLRRFVHQLEALAQWYGVPYRFRRLYSTVCPICGHSLTQVEGRVMVCGNCGFRAPRDMVPMYWALR

SEQ ID NO: 8748 - protein, 361 aa, unknown
  TnpB Polypeptide
MEITKTIKCKLIGLTKRKLELLNQEYGNFQHYLKTGKDRGVYSATKQQGKRTYQKIDPKKEYPLVIRKDLMDIRKTNNKLAKYWARIPVYGVRGGVKVALVHQPFNFEEWEICGSKLVRKNGEFYLHVTVKKKVELKKEYSSIIAIDVGAKWVGVSVALHRSKPKFYGKRVREVRGKYFYLRRKLSKEKKLLEIKKIGNKEKRIVNDELHKIAKNIVDEAERYNAIIAIGNLNGIRKNNKGRKVNRKINSMAFYRLKEYIKYKALERGIAVIEVPEFNTSKQCSKCGSMNTKRPSQGLFICKDCGYQINADVNGAKNILKRAQGYMLWAGAVVTQPEGERSFVLHTPQPPLMGLHGGSPRL

SEQ ID NO: 8749 - protein, 218 aa, Tepidanaerobacter sp.
MIKTYKVMLLPNNKQTTKLFECAGVARWAYNWALEQQQTKVKKVEKKLKRLQRKLSKKYELNKTHTQGGEYRYRKTKNIKKLELLVLKTYRRLKNIRRNYIHQITTSLARTKPEYVVMEDLNTCGMLKNRKLSKAIQEQVFHEFKRQMEYKCAWNKIQFILADRYYPSSKTCSRCYSIKDKLSLAERTFICDDCGYEIDRDLNASINLQRYGKSIVQH

SEQ ID NO: 8750 - protein, 282 aa, Thermoplasma sp.
VFQNHKIMDLEVRTRLDDNRNLREVRIIPLGSGYNVGIVYSKEISDISDLNPKRILGIDMGVRNIVTIGNNMSEEGIAVKGGVLRSINQYFNKELSKLKSVSDRQNDGKGNTRRIKNLYAVRNGKIKDIMHKLSRAIIRYALSMNVDTIVIGHSQGWKHTPDMGKKNNQNFVQIPFNILIEQIRYKGQEAGINVIVLDESYTSVCSFIDNESIEKHETYMGKRIKRGIFRSHKGILIHADLNALYNTIKKAISEAFADGIEGIGLYPRSLSIREMITSKGLR

SEQ ID NO: 8751 - protein, 237 aa, Thermoplasma sp.
LPEKKPVTAENSVGIDLGIEKFAILSDGIAVENPRFIKRVEKRIKKLQKQISRKKKGSKNYEKQKIRIQKKYRKLRNLRDDFHDKVSTAIAKRYDTIFIEDLNVRGMQRNHHLARSITDVSFYSFKEKLKWKADRYGKNLIEIGRFDPSSKLCSRCGNIKKDLKLSDRVYSCDACGLTIDRDYNASLDIRKIGLVKVGLVPPEFTPVEIATSGLDGIYPYRQMSVGESGRSEASAEE

SEQ ID NO: 8752 - protein, 350 aa, Thermoplasma sp.
MILTFKIKHGRDFSAELKKAKQIAEFAVKTHTLSSKDVKQFGLKSIIANQILRKYSRNKQIKKVKSVKLTVPNQGIKVDKEKREIYIPSLKLTLTYMFRNDFEKINQIEIDECYAYVSVNIPEKKMIEPKKWIGIDRNATGHIAVVADPQTGKIWKLGKKAEHIHNKYKAIRKKLQKKKKYKLLKKIKDRESRIVRDLNHKVSKKIVEIAQGENAGIKLEKLNGIRSNKKHTKPFKYGLNSWSFYQLEFFIQYKAKMNGIPLTYVDPRYTSKECSRCGYIGIREDKSFECPRCGHVDHADANASFNIAVRPPLMEGTGRLHADSDACKGSTDTPEEATPGTTGTLEPPKL

SEQ ID NO: 8753 - protein, 398 aa, Thermoplasma sp.
MSHPWRSRGEKRTIMFGYTPSDTILKYLKDMRDLINRAILNAYSIARSNDDSLPSPITLRRSLKDYYDNNVAYAKHHINPVCRTAIAMLRSYKKNNGRLKVVKAKRLAMRIDSELAKIEDNRLRITIRPNVYEYVDIVDRNKKYSEYSKYPISEVLLTDNRVYITFITGSDDKPVIANNIIGFDLNFKSVDYTVIKDNRIAYVDSIDTYDIAKTQRDYERKRRKIQKHIRNPAKRIRKLKEAKHRQRNIVRDKLQKLTTNIVKNNEDKTFVFEDLTNIKKKGKKHKDHKRDGQSSKRFRTDINRWPYRLFQMFVEYKSKNETLYVDPEGTSSECPVCGGILEHPIWKMSKCDNCGATFDRDRLSSLSIAVRGLHLCGTPFSVSGSASWDSMKDNYLYR

SEQ ID NO: 8754 - protein, 380 aa, Erysipelotrichaceae sp.
MIRKAYKYRIYPNKAQREYFAKVFGCVRFFYNKSLSDMNELYKSKGIYKNITPASYKEDYPFLKEVDSLALCNAQINRNMAFKSFFKKQNAFPNYKSKRHDQSYTTNNQGSVKFSTNDRYISIPKCSRIRIKKHRNFSGLIKSATISKTTDDKYYISLLVETEIKPLERNDNSIGLDLGVKDIVITSNGLKYKNHKYLAKSEKKLAREQRKLSHMVKGSSNRNKQRIKIARIYKHINNQRNDYLHKLSKHIIDENQIICVEDLKVMNMTKDNDYNKSLLDSSMSRLLTMLTYKASWYRRTIVKIPSDYPSSQLCSSCGYKNSITKNLSVRTWTCPHCQSKHDRDINASINILRKGIEILSKDGTHPDRQYEVTLTYSQVS

SEQ ID NO: 8755 - protein, 256 aa, unknown
  TnpB Polypeptide
MLSSARCVLRTIKLCISAATSTSDTAYRSVLCDDGLTEPAKPTLITRVTGCDLGLSHYLIQSNGKKIANPRHLVRASRNLRRKQKALSRKIKGSANRAKARLQVAKCHEHVANARADFQHKLSRTLVDENQAVIVETLKAANMMKNHKLARHIADASWSGFVMKLEYKAEQSGKHLVKIDQWFASSKTCHCCGYKMTEMPLNKRIWPCPACGVEHDRDINAAINIQHKGITDLQAAGLVVSAHGGQRKSVISTVAA

SEQ ID NO: 8756 - protein, 385 aa, Clostridium sp.
MIATKIKLKPTSEQEILFWKSAGVARWSYNYFLAESEKYYNQHNKTLKEGEVRKYINNVLKKTTHTWLSEVGSNVMKQGVKDANLARERYFKGLSRKPKFKSRRKSKISFYVNYESLRAINGGFKGEKIGSIKTYQPLPKLKKGEKYSNPRISFDGRSWFLSVGYNKNFEAIELTDKSLGIDVGIKELAVCSDGEFKKNINKSKEVKRLKHKLKREQRKASRKIEANIKSYDKNRKPIYKTPLRDMKNIQKQNKVIRNLYKKLADIRTNHLHQCTTAIVKTKPSRIVMESLNIKNMMKNRHLSNAIAEQCLYEFKRQIEYKCKKYGIEFVEADKWYPSSKTCSCCGKIKKDLKLKDRIFKCSCGFKLDRDLNASINLANYSIQSA

SEQ ID NO: 8757 - protein, 576 aa, Scytonema sp.
VAESTKTYTDQVDFWHWGELFTISNLIDSARHHCLSMILAGKSQLDCHKELQRLFNINKRYSNSIYTEVQGIVTNANKNRANHIKFLSGQIKSIKSDIRKRSKQIKDFAKQEKKLTNKNKSAKKGFKSDKSKSQTKIKKACSIYARQRQTTQLQDAKFGLHQKKRRLYLLQSQLAHLKSTSPNYALPDNDSFVLVGSKDESSGNQLAQFNYIENPDSFVLSIRTPYALEERLGGDYIRIDGLNFKHGFHDLVESISERCYKVKTKDGTEKWAIGCSAVTIRFYWKDNCWYVAATTDVNLREITSEYLSGYVGVDLNADSIGWAVCDRQGNLLEYGDYKLDLHVLSSNQREAILRDAATFIALKALEYNFPVASEKLDFSEKKKLLKEKGKKYARMLSSFAYTQWNEALDNACSKYGIYHKKVNPAFSSTIGMLKFMSMYGMNSASSAAFVIARRGRRFSERLPKQHHLLPSKSAYTDKKVKHVWSHWSQLSKSLKLIPRHQYFHARPNRTRKVNSFCQLTCSVSPPRLDEKLIQLTLFDIGVIPMGNDTVTVAVSRSRKTRRCTKNSFTQISLDLN

SEQ ID NO: 8758 - protein, 333 aa, Erysipelotrichaceae sp.
MKAYDMCISLKDLYYEFPFLKEVDSCSLRCAIFNLEDSYKRFFSKKTRYPKFKNKYTKQSYRTNCIRSTYKGRTYSNIVLDLVNNTIKLPKLGLVKIRGYRNLEIINGNIINATVERDTTNKYYVSVVIEKKEFVTQKVTPKNIVGIDLGVKDLVVTSDDEKFNNPKELAKREKRLKRLQRKLSRQERNSNNYFKTKEKIARLHSKIKNSRKHNMINVVNKIIKEHDIIVSEKLNVRGMSQNHKLAKNILDASFNRICELLKWKCHQFGKYYYQVDTYFPSSKMCARCGAKTEKTKDLSVRRWTCEKCGYENNRDLTASINIMFEGLRLHYES

SEQ ID NO: 8759 - protein, 258 aa, unknown
  TnpB Polypeptide
LIKDFNQVRIKPLNKGYKVEIIYEVKDTETSKGRREKVSSIDLGIDNLVTLVSEDFAYLFSGEFIKSYNKLFNKTLAKLNSIKDLQKIKGTTKRIKKLYYDRELYIEDVFHKISRKIVDLLINSEVTKLIVGYNKGWKQGVNMGKRNNQKFTQIPFARLISYLEYKCELAGIEIVTHEESYTSKCDSLAFEAIGKHENYLGKRKKRGLYQSSTGKLINADVNGALNIMRKVVGDSCGSIQRIIDRGLLFNPVRIKSVF

SEQ ID NO: 8760 - protein, 283 aa, unknown
  TnpB Polypeptide
MQACLDCDNAFKRFFKKLSKFPKFKKKGVRDSFYVNYETFKRIAEGFKGERLGNVRTAEPLPKADKYSNPHIVYDGKYWYITFGIDIPEKVNENNSGRTLGIDLGIKTFATVSDGTIIPNINKSKKPKSVYRKIKYFQRKLNRCKKGSKNRIKVIKKLQLLHRKLRCIRQNHIHQATTMLVKTKPAKIVIECLNVLGMLKNRKLSRAISEAGFYEFARQLEYKCKLHGIEFLKADRFFPSSKLCSKCGCKKDKLKLSERTYHCEHCGNVMDRDLNAAINLSYL

SEQ ID NO: 8761 - protein, 433 aa, unknown
  TnpB Polypeptide
MIVKRIIKFHIKTSHPDFDYIKLQLIESKEIYNFANFILRQIYFKNSKNHKYSLNFIEEYPTLKELFLKYINENKQFTSLFYKIICEFAKIKKYTINLKIVQNIVDKLKFDWTSYWKLLRMRKNYTYNKKINIPSYKKHYNLVEYNNQVISKKKLKLGFIGTATMTEGFKISKKHKDLKYKSFRVYEKNNKFICEAIYEKEIQQIKKSNRVASIDMGLENLFTIAFNYNKKGISIKGTKLKFINQYFNKLKSELQSRLPKKQYVSKFINQLLHKRNEQLRNYIGYYINKLIKMLNEENVSKLVVGYNKGWKQNVNLGNKNNQNFVSIPFKKILDILKYKLEDNSIECIEQEESYTSKASYLDNDDIPVYKENDNTNYIFSGKRIKRGVYKSKQGKIINADLNGALNILKKSGATLIEELEYLRFENIFTSKLV

SEQ ID NO: 8762 - protein, 295 aa, unknown
  TnpB Polypeptide
MDARPDSGESLIGGSACRARYVKLVKAAVIARVEHQQPLPAHFQKWQDHIGASEARIELCWKKYEKRNRELAHLASNLLLLLALLYDCRLICGENLTTLKTIGRGRGVRGRFRNWRNNSQVRGELWRVLKYTCYLLGIRLRDVEARGTTHMCPRCHHPAKTSLSPDPSHRKKADDWAPWLCCGNPECGWNGARDYAASLNMARLGMAYLVTYHQTKRYHPYRMSESFDSLKPASYTGAGAALLLRPQGITPRPFEGKRVYYAGWSYSIALRTSHPKSFLAILSSSRFRKCLLDSA

SEQ ID NO: 8763 - protein, 332 aa, Actinomadura sp.
VRMAYRCRAYPDPDQAAMLGRTFGCVRLVWNKTLAERSSVYRTEGKRISYKETDAALTEWKKTEDLAFLSEVSSVPLQQALRHQHTAFTNFFAGRAKYPRFKSRTGRQSAYFTRSAFRMKNGGLWLAKTAGPLAFVWSFDDVDVAGLDPTMVVVCREPDGRWYVTFNVDACDPAPAPPVGYAIGVDLGVKDFAVVSDGTRIPNPKHLEKKQRNLARYQRRMARKQPGSANHRKAKTKVARTHRKVRDARQDFLHRTSTDLVRDADTIVIEDLAVKNMMRSHRLARAIADCGWGEFRRMLEYKAGRAGRTLIVTDRWFPSSRRARAAGTGWRS

SEQ ID NO: 8764 - protein, 379 aa, unknown
  TnpB Polypeptide
MIRAFRYRVYLSKAQKRLFSEQAETCRLLYNHLLALNNESYKKDKTSLVHRFSGLLPKLKKIEPRLKEVHSQVSQDVCRRLNLAFENFFRRVKLGEDPGFPRYKGSHRTVSLGFTNQNFRVMEDNRVFFNKIGLVKTKFHRIIPIGSVVKQATLKKTPSDKFFVSIICDTPDSKKLPKTGKTLAFDLGLSSYLTTHEGLKIKNPKHLAKKLTELKKTQSKLDKEKKWSPKKDKLKKKFQKLHEKVKNQRTDHLHKLSRKIVNENDIIILEDLNIKNMLERENEKLTKKQNLGMHRNIGDAAWSTFSNMLSYKAENAGRTVIKVDPRNTSKMCSRCFRLVFKELRNRVHECPFCSLVLDRDLNAALNIHRLGTQSEALVT

SEQ ID NO: 8765 - protein, 367 aa, Desulfotomaculum sp.
  misc_feature (119)..(119): Xaa can be any naturally occurring amino acid
  misc_feature (172)..(172): Xaa can be any naturally occurring amino acid
  misc_feature (198)..(198): Xaa can be any naturally occurring amino acid
  misc_feature (265)..(265): Xaa can be any naturally occurring amino acid
VFGDKGKKVKGEYREISPEVIRLARKIFKHILSKHRKPTMGRINMALDQKVAVIKTRNNNGAKKFDYWVRLSTLNKGKPVYIPVQSNEYFESVPGQLKNFCQFNLTDIGEITVSFIKDXSKPDSYIPLTPKIALDLGLKNIFTTNKGDIFGRKFYETLSKYDKIITNLARNXQKQGLKVRSPRYDRLVAKLRAYLKNXICRIINRIIKLYSPKEIVVEKLNFQNPNLSRRLNRLLSRFGKAVITAKLDAAAEEYGIKATYVNPAXTSQACNSCGYVDKANCSSQAEFTCRYCGYKSHADVNGARNILVRSSDEIGSVYKSKKLVLRILVERFTGRLERDTCRCSTAKDLILRNPYFKDYWDKFKEVS

SEQ ID NO: 8766 - protein, 476 aa, unknown
  TnpB Polypeptide
LKVLSAIQKKHRQELLAELKSAGDSMKEMQEDYQVTWDFCRKTMEHLRLSYGQPSIFAFSRAEDVWSAVSKVLYSDGDSLHFRKRGQLPEMRAKQSNRGILIFLKNDHLCFRCNGMDLPIRCNENDLWLIDELDAIETYLRDPDTWDAYAVDQMQKGQKIVSTYRPCYASIVCKVIRGKLRIYIHLTVEGRSLPKRTKDGCVKHPCSDGVVGCDIGTQTIAYTSGHDVGLENLAERGQSIRHTERQQRLILRAMDRSRRATNPGNYNPDGTIRKGKKIWIKSNRYRKLQKRHQELCRIAAENRKFAIHEQVHKMRSLGNVFVTEAKNAKKLQRRAKPEDPLDKNGKPKRKKRFGKSIQNRCPGYFQMKVKQMFESTGGIYIEVPTDYRASQYDHTTDDYIKKKLSQRMFCLQDGTKVQRDWYSSFLLYCIDLTTKTIDRKKCKMEFESLLRKEQVMIEEIIRSGRQVMNSGIRIAQ

SEQ ID NO: 8767 - protein, 399 aa, unknown
  TnpB Polypeptide
MSRYRLLPTPAQEAVLRDHCGHARYVWNLAVEQHSHWRPGRRSAPGYLEHCRQLTQARAEHPWLAEGSATIQQQALRDFSQAMKAFIDPANPARRPSWRKAVRDEGFRIVGRRRQHWDVRRLSKKSGEVWIPKAGWVRFRWSRPVPQDVKSYRVTMDRAGRWHIAFASIPASIPAPGTGEVVGIDRGIAVSAAMSTGELLHAPGLAVSEKGRLRRLRRKLARARRGSNRYKRVRLAAARLRTREMDRRKDWAEKTSTNIARRFDLIRVEDLQIRNMTRSAKGTLENPGRNVRQKAGLNREILRSGWGLLVRRLEEKAPGRVEKVKPHYTSQKCSACGHMDPKSRESQARFVCMSCGFACNADENAARNIAAGHAVTARGGVGVARPGNREPQLLLQSAQ

SEQ ID NO: 8768 - protein, 462 aa, unknown
  TnpB Polypeptide
MIQLISDSEIVSISQWKEITKAYKFEMEPTKRHEVKLNQTIGTCRHLYNDLLDERKKGWENGEWSVQYNDQQNYLPTLRNANNESGKFLREIYAQVLQNVAKRVDLAYQNYFRRVKNNNESGKKEKPGHPRFKGYGRYDSFMFPQYGNGCHILDGKNGNKENSDEGSIIRLSKIGDIKFIKHRIIGNGYPFKIKTVTIKKEVDKWFVIFTVETIVEIDIFVGKYAQKKEVNTIEELDKVCVGIDMGLSNLIMLSTRQKMEPPKYLRESERKLAKEQRKLSRKKKYEKIVEINKKISAGVKIDKEIEKKKIKVNSKNREKQILKVKKVHRKIANQRRNFSHNVSRLLVNTFDVIVFEELSIQNMIKNHKLAKSISDASWYQIQMFTKYKAEWAGKIVDFVDPKRTSKECSNCGNLEEMKLSDRIFLCSKCGLEIDRDINASINIRNRSIVYQDLKRKIKLSIH

SEQ ID NO: 8769 - protein, 223 aa, Cyanobacteria sp.
MNLSRAFVNFLEGRAQFPRLKAKHGKQSIQYPQHVKFEDNCLHFPKIGWVKAKIHRVFDGDLKGDLKTVTVSQTKRGHYYASLLFDDGKPEPQPSNEGKAVGIELGLLDFAVTSDGSKFSNPKHLSKHQHHLKRKQQKLSRKQKESNTPKKAKRLVARAHEKISNARQDFLHKLSRKLVNENQVLISENLNVKGMLRNHKLAKAISGTEATSQWRLCKNAQRT

SEQ ID NO: 8770 - protein, 420 aa, Uncultured sp.
LPRRAFRIFVELEGMYRNIVELLVLYAVNNGITKFTRLKAEKYRELRSLYPQLPSHYIYTACQDAAERAHSFLRLKKMGRARKAYPEVRSVSIWLDDHLWRAEELTLISIATHRGRVNVSIELNKHLLRYVNRGWRLATEAKVKLDHRERRLVFYLTFKKEVSEYRPKNYITVDVNEDAEAVLIDGIVYLLETDLSEVTLGYYYRRKRVQEKYDRVYGPGSRPARRIFRRLGNNERALKREIRWKLATLIVREAAKRQAAIVLERLGKGPANHMIEHIKNPQLRHRVFQAAFKGMQKAIEEKAREYGVPVIYVDPRNTSKVCPIHRAEIVYGKDRHGTCSRGGETWHRDVAACYNLLLRALGGDGGCAPSRVRATIPVDGGPVPLGPTAAHEPTPIARGAWARWKSLGATSDRKLMRVST

SEQ ID NO: 8771 - protein, 428 aa, Halobellus sp.
MPQKMDNKTLVKTLDFQLDIQSDNEGLLYDATLEARRVYNETIRLAKEDVDWDAISPRLEDDADLVKNTTQRIVVKALDAMDNYYEYDDFGKPSHTKNGPYPLRANFTEGYTLSLTSDGDVAFRISAKPYNHIKGILEGSDAHLDLLKSALTGDEWKVTTSETLWRDGDPELHVNIRNTEQTVRDKQDSRTVIGIDVNEDNVALTAFSENGVEDTLVIDFPEIKFERHRYFTMRKRVQNAGKNSIHDTLEGREERFVRDRLHKVSRHIVEWSRQFETPCIVFEDLKEMRDSIDYGTRMNRRLHHLPFRALQFYTSYKASFEGIPTAWIDPAYTSQRCPMCGHTERGNRNKKRFKCRSCGHQDHSDRGASVNIAVKGIEKHQDWNVPALNSLPQVRKVRRQASGAVDAPTVTHPTVRGNLADGRMGVSD

SEQ ID NO: 8772 - protein, 384 aa, Halobellus sp.
LDTYHDALQDAFDAGASTMSAVNDIVTPYDLPYQAKDALKSYVPKLRDTYNAEELDDEHPVRLVNRAAKFDYSEEREYGFVWQVPQSGRGTNFWIPLRINPEQESLWFDLLDEGATAGELRLQQCRTSWELHVTVEYSVEEPTESDDPTYIGFDVGESALITGCALKCDVPRKPMLVNGSRARRLRKEMFTTLRRLQSRDVAEWRVDGRFHYYQNALTDIVEKASRQAVEYAESFENPVIVLEDLSYIREHLDYSKWMNRRLHNWAFARLQGRIEDKATEEGIPVAYVNAAYTSQTCHACGRLGQRSQQAEFVCPYDDCHISEFQADINAAANIAGRVDPWGESVRWEPGRDDSPQDGSACDSATVHRETSPRTGQMTLSAYSD

SEQ ID NO: 8773 - protein, 372 aa, unknown
  TnpB Polypeptide
MWVYKAYKFRIYPNKEQEVLITKTFGCSRFVFNYFLAKWNDTYKETGKGLTYNSCSSQLTQLKKELAWLKEVDSVALQSALKNLADAFSHFFKKQNDAPRFKSKKNKVQSYTTKQTNGNIVIMGNKIRLPKLGFVRFEKSREVEGHILSATVRRNPSGKYFVSILVETEVQPLEKTDSSVGIDVGLKDFAILSDGTVYSNPKFFRRLEEKLVKEQRILSRRKKGGSNWNKQRIKVARIHEKITNARNDYLHKISTEIIKNHDVIGIEDLQVSNMLKNHKLAKSISEVSWYQFRTMLEYKANWYGKQVVTVSKNFPSSQLCSSCGHQNKDVKNLNLREWECPNCHTRHDRDINASLNLRKEALRLTVGTTGIA

SEQ ID NO: 8774 - protein, 553 aa, unknown
  TnpB Polypeptide
VSGLRRIAAPFVAAVPAGARVRTRLRVSPGDAAVLRAVGSHLGSLAGRDLAARCAEGRLDARGRAASRAARKRALTAQSSSRWAGAITRTSEDQYRLAEQNLRAERASLQARVARIGDRLAVPAGGRSGKMRGYATAAERHAKDIRRRALQGRLARVERRLAAGAVPVTRGGRGLLRNRANLAAAGLSEAQWRARWQAARLFLTADGEAAKTWGNETIRFHPGQGWLEIKLPAPMAGLANRPHGRYRLSCPVAFSYRGDEVAAQAASGAIRYDISCDAASGRWYLDGSWKTARGPARPLAELRRHPVVAVDVNAGHLAVAVVAADGNITGVPVTVPLELAGLPAATRDGRLRAAISGLIATARRHEAQAIVIEDLNFTEARAEGRERHGNRPSRGSRGRRFRRAVSDIPAGRFRDRLVQMAANAGLPVIVVDPAYTSRWGAQHWRAPLQHHHPKATGHHAAALVTGRRGLGHRARRRATGNQPAPEEAARPALARTRNPRQPGPHPGSPPPHEAPGSRKAPRPGSLTGPRQATRRPKTVRDRRIARTISCYLD

SEQ ID NO: 8775 - protein, 185 aa, unknown
  TnpB Polypeptide
MEIDFAGRLRWYGKQGRLEIYYDETENAWYASIPVEVGVEKTKTGMKSKYIIYGERKAIRVELPKCNKVASIDLGINNLVSVILNDGTWFLYKGVRTKEDYFYLEKKIEQVQSLADNTRNIGEYEAYDELLKEKKRLFKKLMRRLLHLYRNFAFHLMKKLHELGVSTIYLGYPFNIAQEKETNLQ

SEQ ID NO: 8776 - protein, 365 aa, unknown
  TnpB Polypeptide
MQKGIKFRIYPNKEQQNLINQTFGCCRLIYNKGLAMRNEAYDSGNKIGYAQTSAMLTELKKCEDFAFLKVVDSIALQQSLRDLDRGFVNFFQKRAAHPTFKSKHNRHQSYRTVNQGNHIRIAGKYIKLPKLGYIKIRQSMEVGKINNVTIQCTPTGKYFAVLNVEFEPQPSPNNAGSIGIDVGIKDFYSDSNGKVVSNPKYLEKSMRKLIREQRILSRKQKGSNNRNKQRVKVALVHEKITNQRNDFLQKQSTLLIRENQTICIEDLKVKNMMRNHKLAQHIGSASWRKFFDMLKYKSAWYGNDLIKVPTMYPSSQTCSCCGYKNSLVKNLAVRVWECPDCHTIHNRDTNASINILNKGLQMQSA

SEQ ID NO: 8777 - protein, 367 aa, unknown
  TnpB Polypeptide
MLKAYKYRIYPNNEQKVQIEKTFGCCRFVYNQTLAYRKERYEKEKKSVSKTDCNNYCNRELKKEYEWLKEVDKFALTNAIYNMDSSYQKFFREHAGYPKFKSKHDNHKSYTTNFTNGNITVDFDGNKVKLPKLKGVKVKLHRKFSGQIKSATISQVPSGKYYVSVLVETEHVELPHTTQNTGIDLGIKDLCITSGGKKYEKPKIIRKNEKKLKKLQRQLAHKEKKSQNYYKTKKKIALCHEKITNTRKDYLHKISHEIISENQVIVSENLQIKNMVKNHHLAKSISDVSWYELTRQLEYKAKWNGREYVKIDTFYASSQLCSVCGYQNTETKNLTVREWICPVCGTNHDRDINAAKNILEEGLRQIA

SEQ ID NO: 8778 - protein, 514 aa, unknown
  TnpB Polypeptide
MAKSTTPSFIVTRRIITDKRGYDKLNKIERITERMYNAGVRHCIKQLNELKKDVWYQYCLEQFFACKDEKESKQWSKEIFICAAAYQLTEYDLHTYFGRGKASGYEGGIGINIVQKTATALYSAVKKAIFGKKVHFRKFEETFSFEDKKATTGIIYKPETDTVTICGTIFKLKPVRENDIWLQNAMGYKVKYCRVIREPFGVHYHFFLQLVMEGIPPQKHTIGAGTMAIDPGVSTMTSYNGSKLSFKELAPDVNRYQEEVIKEQNRFSKLTRINNPECYDDRGVHIKGMRIKFSKSMKRSKMRLRTAYRKQRIYVEQSNNNLVNEWLEASGAVVKIETMNYKGLQKKSSKTERQDKESVVTDRTGRKRSIRKFKRRKRFGGSILKHAPSGFLSTIKRKVTATCGIVIDVSASKLKASQYDHASDSYEKVSLSDREKMIDGHIVQRDCYSSFIIFHATDENKPDREGCLKGFKKFLICQDELIKEMIHDNFSNPNFGTKLINTKKQQLQEESAAA

SEQ ID NO: 8779 - protein, 387 aa, Allochromatium sp.
MRRAHKIKLDPNQEQATYFVKACGVARHAYNWALAKWKEQYEAGIKPNEAALRKQYNAIKPVEFPWALEVTKNAPQQAIKNAGAAFSNFFRKVKAGKKGKDCGYPKFKKKGIHDAFRADNGPPKKGVSAVQVDGKRVKLPIIGWVKMREERRFPGCIQSTTVSRQADGWYISILVETDERLHQESTGVVGVDFGLKVLATLSTGESIPGPKPHRRLDGRLRRLNRSLARKRKGSANWKKAKTKLSRLHKRLADIREDALHKLSHHLTTQFDIIGIEDLNVKGMAANSHLARSVSDAGLRSLRTKIEYKAAMTGATVVVVDRWFPSSKTCSQCGQHHPEIVLGVETLRCDCGLIIDRDLNAAINLANYAASSAVSACGEGGSGVALAT

SEQ ID NO: 8780 - protein, 367 aa, unknown
  TnpB Polypeptide
MPSAASAQRQGQVIAKQFKAFTKATSEYYKHPEKFRGKPKLPGYKRKYRTFYVGRNGYQIQNHQLIITGGEAIGFSPMRILCCEHQAFNAKANEAVIGDLRIVPMGNTFIVELTYRARREEKDLSKSVSLDSSEALFCDLGIDNFATFVSTKPGVRPFLIKGKVLKSLNQNYNKQVAELRSKGHRAHICTKGVKRYWRLHDLLHKASRLVINHCLAYDVGHIVIGVNQEWKQEVNLGKRNNQNFVMLPHRKFVEMIRYKAEDYGIRVTVREESYTSKASALDFDEMPTFDKKESGAKPVFSGRRIKRGLYRSAKGQLINADINAAANIGRKELGDEWLKQLLELDGGVLVDTPVVVRNLHASENFRQ

SEQ ID NO: 8781 - protein, 422 aa, unknown
  TnpB Polypeptide
MDSITLMLKRQAYQFRIEPNGEQQRKLRQFAGMARFVFNKALALQTETREAGGKHLNYAAMSRQLTTWRNSDETPWLKDAPVHPLQQSLKDLDRAYQNFFAKRADFPRFKKRGKHDSFRYPDAKQFKVDQANSRIFLPKLGWMRYRNSREVLGTLKNLTVSLRAGQWYVSIQTEREVEIPRHPSALAVGIDLGVVRFATLWDGQRETVLEPLNSFAAHQHRLAKAQRQMARKTKFSRNRLKAKAKVQRIQLQIANARNDYLHKATHTLSQNHALVCVEDLRVGNMTRSASGTAEQPGRNVRQKSGLNRSILDQGWGEFRRQLDYKATWCGGWLEAVPPQYTSQHCTACGYTHAENRQRQAEFLCQACGFEENADVVGAMNIRERGLKQLEGQDHAQIACEVNGAIRPSAAGTHRSVHAATAA

SEQ ID NO: 8782 - protein, 401 aa, unknown
  TnpB Polypeptide
LFVQILQGYKFQLRPSAEQEAQMHRFAGCCRYVWNKALALEKERYAQGEKYLGYYELTALLTKWRHTEETSFLAETNCDCLQQSLRNLDNAYKNFFAKRADLPKFKKKIRHATFRYVKCFKFDESNSRIYLPKLGWMHYRASRKIKGIPKNVTVSKNAGKWYVSIQTERIVAEPVHPSQSAVGIDLGVVNFATLSDGTVIKPVNSYKQHRRKISRLKRKLARCRKFSSNWHKLDNKIGKLYEKMSNIRRDFLHKTSTTISKNHAVVVLEDLKVQQMLRSAGYALRSAILDQGWAEFRRMLTYKLAWRGGKLIVVPPPYTSQTCNYCGCIDRANRKTQAHFQCTTCGHELNADLNAALNILAAGHAAAACPGNREAAAARLRLRVGDALAPAMKQEPALLAA

SEQ ID NO: 8783 - protein, 412 aa, unknown
  TnpB Polypeptide
MNVQRTITLLLPDDPDLRQILEDYTAVQQRLSPVCYNNGKPLPAIRLQEAIYHNVKGIVSAQMTCSAIRSVAGAYRSAVRNGKPAQKPFQFLNKTALFLIGCRGRDAEIFPSNQLRIWTKQGKKSFCFTVPAYFQERFEKAVEFDSLLVIERRGRLIGRLVLTLEVPDPQGDQPCGIDRGELNALSAVDAEGKAFFRSGKNYRQKNKTCYKQRKRLQKRLALRKAERQDTKSVRRLLKRLGSKSSNRTKDFVRTTAKRLIMSLPEGSVLVLEDLNSLPQPLRTKKDKDGVVIQKGNRSSKSLRRRLSRWQYGQLQKALMALAELLGIPVVFVNAAYTSKTCHRCHKRGVRKRHRFCCPSCGLCCHADVNAAINIRSRYDTFCRVYARWAASQSAPKPWSGDLFPLTRASCLL

SEQ ID NO: 8784 - protein, 450 aa, unknown
  TnpB Polypeptide
MKITKTAKLKITSHTKIFDDTIKLYAQALSFYINVCEKEYEHLKQFQHSKEKLNTIESITHLTTKNQNIKYNFDKDFYKFPSYLRRTAIMEALGVCDSHFSRVENWKQKRKNKLSKDKKFFEKTPTLNYEPNSFPTLYKDNMWKKLNDGKAKIKAFKDNTWVWIEIDYSVKNLKSGQDYRFTNFKEFNPMLVKKGKKYFLHIPYQTTITLNSTPLKEQCIIGVDLGLTNSAVVSCIANDGTVLDRLFINQSREKDRLNTKINKLSKVKRISGILNEKPKYWRSINYLQKFIVQNTVDQIIAFAVKNNADVIVLEYLGKMRLPKNTFGAKRLRAKLHYWAKVKIQHKVEEKAHTLGIRYSKVLARGTSMYAYDGSGLMQRSPRKDMCTFTNGKTYHSDLSASYNIGARYFLRAILKPLSEMSRLQAEAKVPLLADRTSHTLSSLIRLREVC

SEQ ID NO: 8785 - protein, 420 aa, Gloeocapsopsis sp.
MSLMLTRRVTFRLYPTRSQQDILHYWCKLHCSLYNAAVYNRKTQYQKFGHSVSYFEQQNCLPAFKEVWTEYKPLGSHALQATLKRVDFAFTRFFKGLGGYPKFKASRHYSGWTYPDKQSWKAHTTGVNGSLELANLGSIAMRGKARTWGTPTTCTVLCRNGKWYASITVQCEPTRETGSGAVGIDLGCKDVITLSTGEKIAKPDFIKEGQQKVKAASQRLRRKRAPNRNKKIKASRRWRKARQQVSKLQRKVACQRENWLHQTTSSIVSSNSLVAGEQLNVKGMTRKGKKRKKQKAGLNRSILEVGFGTIGDLLTYKQSEAGGFYVESPTKILKPTQRCAKCWELTPKTLTDRVHVCSNPACQHTEDRDINAAQVNLIWTRGKELASSVVESSSSTSCGSMKQLGALRRQKLAVQRSNGE

SEQ ID NO: 8786 - protein, 416 aa, Bacterium sp.
MRAVQAFRFELDPNAAQRIALAKHVGAARFAYNWGLARCLEALENGERLPSAMELHKAWNRWKRENAPWWVEVSKCAPQEAFRDLERAWRNHWEGRAGRPRFKKKKWDADNAFRLTGSIRVTPRHVQLPRIGKVRVKERTDRLTDLLQAKRARILSATISREADRWFVSLTCEVEIPDPDPLPPDAPVVGVDMDLEDFAVLADGNGVERIGFGEVRERIRRLQRKLRREQRRLSRRQRALHPDPRDPHRRLPSRRWLKQLRKVQRLHRRIRNVLNDFLHQTSTRLAKAKRVYVVEDLNLRGMMRRRRRGPRLSRSLAEQAWGTFLRMLKYKSEWYGSKVMVADRFFPSSRTCSACGAVNRSLRLSDRMFRCPQCGLEMDRDENAALNLRKYGLAVGAVGVRCLGTALQPYREFPGK

SEQ ID NO: 8787 - protein, 415 aa, Bacterium sp.
MTTLAIQFRFSPNPEIDRLLDACGTMVMEAVSWALDNNKTATHTIVKELYPSFRERFPGLHSAWVQKSARTAAAIVHAFRRRKRRGREEKDRPEMRKAWVYVDKSVFRWEWDGIHLTIRISVRPHDENPIVLRFRPHGKYRRLVEAWARGECGFGEPTLSRTMLIIPLKFPDVPAYEPRSVMGIDSNERSLDGFEIGGASWTLDTSWGAAKCADHDRRIRRGTKGKQNPKAKKKIIRKHSHRRKNRVRELWHGVACVLIWMALNANNALVLEKLQGLKARIAASMPKRLRQRLLNHWSIRTFHAILKHKARVYGVPLIEIDPRGTSSTCPVCGGSLRGRVELTCPSCGLSGNRHILAAWNIARRGQAKLPIGGKGRAEEGIALFHRLQSPRWGQGVVGAPGRPLPAQAGSGQLPS

SEQ ID NO: 8788 - protein, 508 aa, unknown
  TnpB Polypeptide
MECVRRAVAVEVESPPPELYAVEESYRRIVEEVAVYVAERGRLEKERYNELYRRFRELYPLPSQLIQQAINQGVEIGKSFLEAKRNGRIHKPRPEFRRVSIRFAKDSWSYKKAVGSVTPVRLALSLPGGRREVWIKPHRRFWLYWWKTLRGETELASTLMLKRRRGRWYAIFVFDAAPKREPPAEVVAFDVNENSVAVARVSLLSTVDAVARWNRRYVDPAVYSIRTDFGRLAKRYEAVRDKKLEELKRKYPFVGRDDEEKIQNVTDTREFRKFVRRLRERRRKEGRVRQIAREATKSPAVIITEELSKNPQEEMIGLEKKKVKKRELRHRIKQTPFRKLIRAVEDKAREVGSVVVYVSPYRNSKVCPIHFAFLRDNGSWHALHCPHGHVVDRDVAAVLNMLWRATPTGWVKGVWWDVKEARKRLKKGIVPKEAVRKTNPIIPRPVAYAVWTSLMALKASPQWPAVLARAAPMTPAQGADEDGTRAPPHGAPARGEEVSSTPPQSASS

SEQ ID NO: 8789 - protein, 354 aa, unknown
  TnpB Polypeptide
MQKWHVNGLEGLHSHTAKAVNDQFYEAVNSWHGNDRKGNPPYNAQKRWNVVRWKSPSIKLRDDGVLRLSNGRGEDPVLIDWPVDQEPVFVEIGWSGEGYEARATYEVDGEDRTTGDRTAGIDLGEKHLAAVATTKDCFLMNGGELRALRQYQNQTKARLQAKIDRKERGSNRWTKLVRTKNRQLDHIANKIHDLLHKLSRKLVEMLLERGVSTAVVGDLKGIRDRIRGDRRMNQRFQQWAYRKFFRLFEYKARAAGMAVKQVDEEYTSQTCPGCGDRHEPAGRHFTCDCGLRAHRDVVGAINIRRKYVGADAAQPVSTRLPGAMASPSGVRFEPHLQCSSPPAEQKTSEREQPA

SEQ ID NO: 8790 - protein, 528 aa, Allochromatium sp.
MLIKDSSQQSETPPGSDCLTLTPICAALLGLAPSSTPALVAPSNATISPEKLSGCGASTPTRTSSRTSAAASTSSAKVCVPYWNDSCAETSSGLWLPTVTDSPVSASTSSPFSSNTTAEKSWFSINQWINPEKPNSPPIYSPSSISSRVECTVGDVIKAKRIRLYPTPEQKTLFRQWLGTSRFVYNETVKHLGLPKEERERHWMGAAKQILASLPDWAGPIPYQIKKIAVEDAYKAFSNGIRRWNQTGEPFDLRFRSRKNPKQSCFIPSSALKDAGVYPRIAGSLKRAEDFPDNPRDSRLVFEQGRWFVIVPYRVPIIPTENQGRVVALDPGIRTFLTGFAEDQAFKLGDGDFARIARLCHHLDRLLSRIAKAKYRQKARLKKAANRLRWTIRDLVDELHFQAIRFLLDRFDLILLPTFETKEMSAKSKRKIRAKSVRSLLGYAFFRFGQRLEAAAKRLGKVVIRVNEAYTSKTASWTGEIKQIGGAKTITSAGVTVDRDINGARGIFLRVLVDTPSLRNECACVGAC

SEQ ID NO: 8791 - protein, 424 aa, Halorhodospira sp.
MIQRKATYRLYPTAEQLAALEHQRWVHCLLWNEALAERRWAWSERQESLGFSAQCKRLTEWRSQSKLLSGINAQSEQVTLKRLDLAFQHFFRRVKQGETPGFPRFKPLHRFKGWGYKTHGDGWRLLTNEQMQHGTLRLSGVGAVAVRGRPRTPGTPKTCEIIKRGDRWYASITLNCEPVRECGERMGGLDWGLETFATVATAQGAETIDNPRHLAGTLDAIRGVQREISRKEEAAKKASGRSRGFPISNRLRKAYDELRRLHRKVANQRHDFLHQVSARLIKEFSALGLEALSIRNMTAKGGQHKRGLNRGILDAAGGAFHQLLKLKAEEAGAWAVEAPTRQIKPSQTCHACGQQEKKPLGQRWHSCPCGASCSRDENAARVLLAWLERSLSGREPADAWREVRPGHPLDESALPSKRETHAIA

SEQ ID NO: 8792 - protein, 209 aa, Halorhodospira sp.
VLGLDMGLTHLAIDSSGTKEPNPRFLKKASANLRRKQKAVSRCKKGSKRRAKARLKLAKAHQRLANARADFQHKLSRQLIDENQAVIVETLKVKNMLKNKKLSKHIADASWSGVIEKLEYKAKAQGKHLIKIDQWLASSKTCSCCGHKLEELSLKVREWQCPACSVRHDRDIDAALNIKAQGILKLKAAGLSVSANGGKRKTSHALAAA

SEQ ID NO: 8793 - protein, 359 aa, Paenibacillus sp.
MALLKAYKYRIYPNSEQQLYFAKTFGSVRFICNRMLADKIDHYKETGKMLGNTPAPYKKEFDWLKEVDSLALANAQLNVEKAYKNFFRDPKVGFPTYKSKKTNKHSYTTNNQKGTISVQDGFLRIPKLKSKISIKLHRPFTGLIKSCTLSKTPSGKYYASVLVETDIQPMPKLDTRIGVDLGLKAFAITSDGKVTANPKYLLKSEKRLAKLQKDLSRKKKGSNNRHKARLKVARLHEKISNQRQDFLHKVSSKMISENQVIVMEDLRVKKMIQNHKLAKAISEVSWSMFRSMLEYKAGWYGRDIIIAPRNYASSQLCSCCGYKHVEVKNLALREWTCPECKIHHDRDVNAAQNLLKLAM

SEQ ID NO: 8794 - protein, 414 aa, unknown
  TnpB Polypeptide
VKLVVPVQLYLDATQEAALRGTLALCNEAANLVSAQAFGRRVTGKQALQRLTYRDLKEMGLSAQPAIHVARKVSGAYATLKANIRAGNLGRSGSKRRVKAESKPIRFRPDAAQPFDDRCLSWQLDQRTVSIWTTAGRLRGIRFACSEEALKTLTAHRQGESDLVYRDGNWYLIATCDIPEPETREPIGFLGVDLGIVNIATTSDGQVMAGRAVNRYRKRQIRLRRKLQAKGTKSAKRLLKNRARKEARFARDVNHCIAKKIVTEAERTCRGIALEDLGGIRDRARLRKPQRVTFHSWSFAQLGSFIAYKATAAGVALVHVDPAYTSQMCSDCGHTSKKNRVTQAMFICRGCGVVAHADRNASRNIAARGQVAWNAGRESRAPAPARKGRGLDAAASITASDALAASSALQDRVS

SEQ ID NO: 8795 - protein, 393 aa, unknown
  TnpB Polypeptide
VNTTPPSYGEGYVNLGSVDELYALVENNPFADGEIVLRLVIQGAWYRLIFGFDNKRFTEGKVARPVIKVQDGEPVFIFTVVTDNPAVQFSGDYTIGVDVGITDYATVVVRDTKTGRIVHQTTLSQRVHSLWNSVRASQRQVRALREKAATLLRDRQARMEALDEAQLHREAASRKKRELAILAAQEIAYLSHFWGNAVVAVEDLGWIVKTMQNGRWNRGALVRWLTHYVTQNGGWVVSVNPAHTSQLCHKCGAKVKHPTHKLSVCPEHGVMDRDVNAAANIAAKAAPRVVKARATRAKNRKLRPQAPLKTPVARSSLKYPGRDRTKNSPTPKRKKHRRAEREVILPVCPARAQAYGLEARVLADQGACDALGTSEAAINWENTICKCKLYNPG

SEQ ID NO: 8796 - protein, 241 aa, Cyanobacteria sp.
MLNQCKAWVNSRKCSINACSIRGEYIIAADAKRPTDASQGKSLATAKKESSHFRIPQSHLLQQTLKRLETAFVGMWEQGFGLPRFKKVGQLRSFLIPQLNRKVIVGNRIKLPKMGQVKVRRSRSIPDGFKIKQARVIRKAEGYFVILSLQSDVEVPSIPLSGYPIGIDLGLESFIATSENQFIARPKFLDRSEGKLKSLQRKLKHKRKGSRRWNQIKQQIARLHFHVSSKRKDWHFKLAHH

SEQ ID NO: 8797 - protein, 381 aa, unknown
  TnpB Polypeptide
MLRAVKVRLYPNKAQEQELNKVLGCYRFVYNYMLDKKKTAYKTDKTSLSENELSKFFYGTLRKDEQYAWLKEQNTKVMNQAIKQMDDAYQRFFKQKNGYPKFKSKKDKQSALFPRDALSKLNTFETKHITLIKSLKNLKFRCSELYHSRLRKYKDNIRSATLSKTKSGNFFLSILVDIPEAECVKFNKTNKQVGLDLGVKDFVITSDGDVFENKHFFKREEAKIARLQRSLSRKVKGSNNRDKQRVRLAKAYEQLSNKKDNYIHYVVNEILKSYDVVFMEDLNVQGMLRNHNLAKAIQEVGFYRFKLVLQRKAIANGKQVVLIDRFYPSSKTCSCCGYKKSDLKLSDRFWTCPECGEHHDRDINAAKNILREGQRKLGAGV

SEQ ID NO: 8798 - protein, 381 aa, unknown
  TnpB Polypeptide
MLRAIKVRLYPNKEQEQELNKVLGAYRFVYNHMLAKRKNAYESDKTFLKVTELSKWFHGVLLKDDQYAWLREQNTQVMGQAIRQMDVSYQNFFKHDKDLPVFKAKKDKQSALFPRNAISKCNTFETKHITLIKSLKNLRFRCSDLYHRRLREYKDSIRSATLSKTKSGNFFLSILIDAHESEYVKFKKMNKQVGIDLGVKDFVITSDGVVFENKHFFKKEGRKIAKLQRQLDRKKKGSNNRDKQRIRLARAYERLTNKKENYIHFVVNEILKSYDMVFMEDLNVQGMIRNHNIAKAIREVGFARFKSVLQSKALANDKHVVLIDRFYPSSKTCSCCGYKKKDLKLSDRVWTCPECGEHHDRDINASKNILLEGQRMLREAQ

SEQ ID NO: 8799 - protein, 518 aa, unknown
  TnpB Polypeptide
MQAKESSKKSGCQRDENVSLKTARSLKRGRRAHCSCLSPATSECQDNALSPKKKSSKTLVQVSTTSGSAFSQFYDETCKAISLHLLSPTEIDSAVSDLSCLNSSSRGEEVKSWFSINQRIALNENSREIYSQYFKTSRAECTDLVSTQLKTRKIRIYPTKVQRTILRRWLGVQRLVYNHSIQHYNDKEFEVRHWMKLYAIVFYELDVDYVKEVPYAIRLNAVKDAYTSWRTNCKKAKNSRKPFSLRFKSRKDKVQSCHIPKSAISTLGIYHTKSGRMKFSETDWFANSEISDCRLIYDHGRWFISIPRKVTTQCVSETQGGAVAIDPGIRNFGTYFSTDGRFGWVGQRAFERVLKLNIRIDKMRSIIATTEDKLHKFRLKRVVDRLYHKIRDLVDELHWKFMNFLTKEFSVVIFPPFNVSDMVKTQNRNIRKVVVRSMMALRFHEFKERLKNKCKERHVLFIEQNEAWTSKTNSFNGEVMTNLGGRESFNYQGLRINRDVNGSRNILLRAMRDNSANG

SEQ ID NO: 8800 - protein, 418 aa, unknown
  TnpB Polypeptide
LFDISFIPEIHKYKIQMRKINRTYKFRLYPTKAQTELLAKHFGCARFVYNYFLNQRQEQYRLTGKSDNYNAQAKTLTELKKQEETAWLKEVNAQSLQFALKCLDVSYTNFFKKRAKFPNFKSKRTRSSFTIPQATHLTNDRLFIPKFREGIKCRVHREVKGKIGKVTISKTPSGKYFASVCTEEEYAPTIEKSGKAVGLDLGLKDFLTTSDGEKFKNNRYTKKYERKLATAQKHLSRKKKGSRGHESQRLKVARLYEKISNSRADYLHKCAIGLVRRYDIICIEDLNVKGMVRNHKLSKSISDASWYSFVAILTYKAEWNGKEVVKIDRFYPSSQTCSVCGNRHGQTRDLSVREWECPSCHTHHDRDVNAAINILRVGLKQYTSAGTADYTGGGEVRAVLSESHSSAKPEAHKSKTCE

SEQ ID NO: 8801 - protein, 459 aa, unknown
  TnpB Polypeptide
MRKINRTYKFRLYPTEAQTELLAKHFGCARFVYNYFLNQRQEQYRLTGKSDNFYTECKTLTELKKQEETAWLNEVNAQSLQFALRCLETAYTNFFKKRAKFPNFKSKYSKNSFTAPQYATISDNKLFIRKFKEGIKCRVHREIKGKIGKVTITKTTSGKYFVSVHTEEEYVTPLEKTKKSVGLDLGLKDLLTTSEGERFTNNHYTKKYERKLATAQRHLSRKKKGSRGHESQRLKVARIYEKISNSREDYLHKCSISLVRRYDTFCVEDLNITGMVKNHKLAKSISDSGWGGFVYMLTCKAEWNDKKVVKVDRFYPSSQTCSVCGHINKQTKDLSVREWECPACHTHHDRDVNAAINILREGLKQYTSAGTADYTGGEGVRAVLSESHSSVKPEADNHSGCLQSTSNNYNNNHKWKELTCTKQRSPTTLRTKTSQAECREYVRPISSMLRTSLRLKHAL

SEQ ID NO: 8802 - protein, 471 aa, unknown
  TnpB Polypeptide
MEVLLSLWLAEVKVRSERTLAWLMKRANTFAVRPLSADGEQVLRDLLDASAALWNEINYQRLMRYDDEDGFESEGVWDADTGRLEGKYKGVVGASTAQTVRRANTEAWRSFFETKKKFHDESNSSVTEHPEPPGFRGNQDDGRQLKGVVRKDAYTTEWGDRSRLEIVVGEQLRDRHNSPKSRLRLEIVGNPNWPDYDEQSRLELWYDETDNTFRASQPVTVTEARATPLAAETAALDIGANNLVACTTTTGEQYLYDGRELFHRFRETTREIARLQSKLEDGQYSSERIRRLYRKRTRRRDHAQEALCRDLLDRLYEDGVDTVYIGGLTDVLETHWSVETNAKTHNFWSFKGFTERLVCTAEEYGISVEVRSEAWTSQECPRCGSTDRTTRHQDTLTCPCGFDGHADLTASETFLKRQTEQAVRPMARPVWFEWDDHNWSESPRSPERASSKEQRTDPSTVSNGNVASGES

SEQ ID NO: 8803 - protein, 526 aa, unknown
  TnpB Polypeptide
MPLLGFGTYRIDDLDECERSVSDALAGELAISQPSMSNLLRRAERQLLSSTLSSFEAEPPASRSESFRPVGSAKRVGRGGSRHIPTQMTGLSLSDSRIIKNHWNNTWNMEVRRAAPVKLVVPDEYCDDLHETADQFLYCANEASDYCWDNTDYEDCVTSNVTARDALYDRLREETDLTANLVQEAIRRAVHAVDSGVDRWKKGKRTNKPEFTSWSVVYDKRSATFYRNKISLSTVNGRIECDFELPADSPTPYEEYVLSDNYEFRTSTLQYDQATDEFYFHVKTRKIDDEGEAVEVEDSDDTGHQTVLGIDLGVNSLAVSSTGTFWSGDEYDHWIHEFEKRRAEMQQRGTQAAHNALLRLGKRERAWRKQYIHTVANELVDEAVTHDCDVIVFEELTDIRERLPHADWHHIWAFRRLVEYVEYKAPERGVAVEQVEPDHTSQRCSHTDCGFTHEDNRDGEQFRCLKCGYEINADYNGAKNVGLRYMRRRQHRLRSSPTSGSADAPVDVRVNGGMLNGDGYRPTADS

SEQ ID NO: 8804 - protein, 317 aa, unknown
  TnpB Polypeptide
LDGLARFPKEKKTHKYYSLVYPQSGWKIQVREIRTSGNKRLVLRLSSLGAFALIVHRDFPLEKVKSVAVKLTRSERVFISFIVEDYEFPKLPNTGEAVGIDVGIEKLLVTSDGEYVPNLRPYEKALKKVKRFHRALSRKKFLSHNWFKAKMKLARAYEHLADLRRDLYMKLGKYFVEHYDAVVMEDIHVKQLIGKSGRRMRMRLHDVAIHELRSIVKYQLEKYGKEFILVDPRNSSKTCAKCGYVKDLALSDRVFECPRCGWRADRDYNSSLNHLRRAGWESPVAPVELRPLPITMGKVGQGGGKPLKDGVAHNSLW

SEQ ID NO: 8805 - protein, 387 aa, unknown
  TnpB Polypeptide
MLLVERHLIDGTPEIVRLCTLSKELYNKCNFLMRRAWFGSTMLPNINMLIAAVKNEDCFRNLHNTKTAKQTIRKCLTDWTNFKKALNAWKKDPSKFVRCPKPPYYKDKLAQVIFYNETIKGGQSKKTQKLMTITPSNNCFGIKSIRDYKQVVITPKTFGFVVDVQYERESKKEKVSKDKVACIDLGVNNLATITSGQLGHPILVNGRILKSVNRLYNKRPNKRTSRKRYFQIENYFHHASKFIVDTCVKHGIGRLIIGKNDGWKQEVKMRKPQKQNFQYIPFDRFIEKVKYKASLVGISVEFTEEAYTSKASFLDHDQLPVWDAKPPVLSGTRRKGMYHTFRPIHADVNGSLNIGRKVIGDKVYETFPDRSIAAMPARINPLKAFCV

SEQ ID NO: 8806 - protein, 424 aa, unknown
  TnpB Polypeptide
MSIKTYKYRLYANKSTTDKLAWVFDRCRELYNSALQERRDAYEIMVKRHPNYYDEEQRKHLAREHAISVYEQKRALVEIKEIRPEYQEIASHVLQDVLFRLQGAFDDFFRRLKNGEKAGYPRFQGRTRYDSFCYPDGAGWNLDAQKRPADKKGMVRVNLRLTKIGTVKLHLHRDLTGTIKTLTIKREGEHFYACFSCEIGTPEALPVSSQGVGIDLGVTHFAALSNGDFIENPRHYRRAEKKLKQAQVAVARKKRGSHRRNRAVQPVAKAHRKIRNQRQDFLHKQSRKLVNRYQVIVFEDLQAANLIKRPKPKHDEATGQYLPNGAAAKAGLNKSMSDAGWGQFIEYCTYKAVWAGRTVIQVNPKYTSQICSGCGRVRKKELDERWHSCECGSQLDRDTNSAKVILDLGRKQLLGGTRPTRETA

SEQ ID NO: 8807 - protein, 678 aa, Actinomadura sp.
MAASSAAPVAVSRRFRGRNKAPAWRRPDEVSVLVLPLAVTDPGDLVRVETLFAAMWSVKRAVQRDARARVDAYWAAKHERDGDGGKAARARLGLSREGLERCGYRHLERSGHLKHHVSKALVMHMADQVWAGVDRHMFPDATGRRFGRPKAGTWWDFTRIPGRARSHTKVNKWETFRLVGTLQGHLDAYTRGVSLMQPRRMPVPALPDGSTVATGKILACGEPQMRKATWWDHDGPFAVVFAGGPTGTRGDLVLPVRLPQGPGRRARLEHFLADPGQWHKVDLVRRRKASAPGGWVYEAHLMILGPGDASPAVRVMRDRAARLGRVGGVDGNVSNLSIVSLPATVDPADGQPTSTRIELSDQERARLEKQARKSKGRARALERSRRATNARQYGLSKKQAERAARRAEHGLEPKQVTVLGGARAARADGVPKQAYRRDELSGGYHRVRSRIAEAAASAAEHKRHRARALARNIIAVHGPVLTIEDCDLRTWYRLWGRRLAQTTPGMLISALATECGSAGGRLLRASTWTTALSQHCLCGARVTKTLRDRQHRCAACGLTGDRDLTSAALAAFVTLTDPDDPTTAYLDTTASRHARIVYGQGLEEALRESTTPSPKPHLGPSRVAAPPASRTRSYRGGASARRIADQRTRTTPDETRHQRDHAGKLGHRTGRNPPNPPG

SEQ ID NO: 8808 - protein, 420 aa, unknown
  TnpB Polypeptide
MKGENIMDITKKVRLYPNKVMLAVLDNLCDYRRYCWNQALDVWMFLVQQRQKHLPADLRYKVKQAIKDKSISFTDDEKALLIQYPAPTNYTVCKMLVASKKDWQYQLSSRVLQQAVADLAKAWKYYFNNKDNTSVHAGKPSFRLKKNPKQGFKTDRSRIQNGKLVLDKPHKYNGDWYGIPFKGYSLPDGPIKYCSITKINNKYYASLVVEAPIEPLVQTGKNTAIDANVNHFDYTDGQYSINPKRLNALYERIAFYQKRLARKRKVNGQKASDSKSYTVMRAKLQALYEKATAIQYDLLHKFTTYLYRTYDIIVIEDLNVKSMQMSKKAKNLHRSLFGKFRFQMEYKAKKFNKKLIIADRYYPSTQRCSRCEHVKKGDDKITLQGNAKHGTAHNEYICYNCGYKADRDANAVNNLLALIK

SEQ ID NO: 8809 - protein, 410 aa, Mastigocladus sp.
  misc_feature (6)..(9): Xaa can be any naturally occurring amino acid
  misc_feature (69)..(72): Xaa can be any naturally occurring amino acid
  misc_feature (364)..(374): Xaa can be any naturally occurring amino acid
VIRSKXXXXKEKRFQQWLNHNISQSIIQDALKINAAVAIEDLTGIREKTNQKPRNKAERRRSNSWSFYXXXXTSADYDARIFSFREKDWTVSLTLMNGREHIKIDAGNYQRGKLKGKKPTSAQLCKHRDGNYYIHIQIKDEAPEPIKSNNVIGVDFGRRDIAVTSNGDKWDGKQINDVRDKFSRVRSSLQKKATKGTRSTRRRVRQILQRLSGKERRFQQWLNHNISKSIIQDALKNNAAVAIEDLTGIRERTNQKPRNKTERRRSNCWSFYQLRSFLEYKGIQFGVEIIAVPPAWTSQTCHQCLHIGLRSGKRFKCTNEACSWSGDADYNGSKNISAIGAVFVNQPRGSNYLCCNLSTDSSGXXXXXXXXXXXVYPVLPHHKLSQSHELLLNVARLTPDFCVQRGYCKC

SEQ ID NO: 8810 - protein, 381 aa, unknown
  TnpB Polypeptide
MKLTLKIKLLPTAEQADLLLETIRETNTVCNAISEVAWSKRIFNNFKLHHEVYHTYKATFKLSSQMLIRSIAKVADAYKLDKKTKRTFRPLGSIAYDSRIMTYKPDNIVSLWCIGGRQKIKFVCHNPAYLPYIKGEADLVYKKGKFYLFQTVDVPEQDVDDIEEFIGVDFGLTDLVVTSDGVKHSADWINQYREKRQKVRSSIQAKADTSKRSTRRNCRRLSKRLSGKERTTATILNHTISKSLVQSAKEQGKGIAIEDLTNIRFTSKRRNKKFRTKLGRWNFGQLRSFLEYKSLLNGVQLVVVEPRYTSQTCSSCFHIGKRTNKVFKCVNNKCEVDVLDADYNASLNIASLGRAYVNHAGKSTMYCSLHSYSGLKPIPSL

SEQ ID NO: 8811 - protein, 391 aa, unknown
  TnpB Polypeptide
VLKAFKYRLTPTEEQATLINKHIGSARFVYNLALEVKQSAYAGNRVHLNCFDLIKQLPDLKKECTWLKEINSQSLQQPIRNLDNAFTRFFKGHGNFPKFKKKANGGSFNIPQNVLLEAGKLSIPKFKNGIDIVLHRPIKGEIRQATISRTPTGKYFVSILCETGEANKKAKPVKEKTTVGIDLGIKDFIVASDGQTFDNPKFLRKAQSRLKFVQRKFSKHKGKRTKHRLAVLHEKVANQRKDFLHKVSSELVKNHNSIAIETLQVANMLKNHKLAMSIQDAGWGMFVDFLKYKAEWYGVNILEIGTFEPSSKLHNKCGYINKELTLADREWLCPKCSEVVLRDVNAAINIKNFALKNHLSVERRFKNRGELPTLVGVLIPEAHPIAFGVGG

SEQ ID NO: 8812 - protein, 381 aa, Burkholderia sp.
MVLLMHIKRAYRFRFYPTPEQVAILARTFGCARFVYNHMLRMRVDAWQQGQVRVGYHETSAALTALKKSPGHEWLQDVSSVPLQQALRHLQTAFSNFFAKRAKHPKVRRKDGAQSAEYTMSAFRWNGTSLRLAKMVAPLSIRWSRTIPKGAKVTTVTVSKDMAGRYHVSMLCDDVVSAKSESTAKVGIDFGLTDFVFLSTGEKVSAPNVLRQNEVKLAKLQRQLARKQMGSANRRQAKLKVARMYAKVADSRRDFLHKLSARLINENQVIAIESLAVRDMLRNRRLAKSISDAGWSEFVRQLTYKAKWYGRTLIGIDRWYPSSKRCSDCGHTVASMPLKVRVWTCPGCETAHDRDINAARNILAAGLAVSAHGEGVKPMSH

SEQ ID NO: 8813 - protein, 400 aa, Prochloron sp.
LRKYKKQVKEELQKEPTQPNKKQPPNALQKIRIYPNKELHRIWKQWLAAYRWIYNWTIAKISKDGLSSAYDLQNQARAAARPNWVKELPGHQLQEAVADAVDAVKQAKANQGTAKFKSCRAYSQVIKFKAGNFKNGTWYCRLTKGLSFNSFQPLPKECIYGTQLVYQRGKWFACFPEYRPITNTDCSRVIALDPGNRTFLTGYDGETILEIGKKDIGRVNRLCSHLDQLMRKIAFSKVKRQRFKMRQAANRIRERIQNLVKDLHNKAASFLVRHYKLIFLPTFETSKMVLRSARKINSKTARNMLTWSHYKFAHNLEQMANRNGVIVVRCNESYTSKTCPNCGHIHDRLGGSKVFRCPECGFTADRDANGARNIMLRALQATAFTVYGDAVLISDFSSDG

SEQ ID NO: 8814 - protein, 496 aa, unknown
  TnpB Polypeptide
MALDSLGDSASKLWNVARWTADRIWDETGEIPDEGTLKAYMKNQACWKDLNAQSSQKVIEELSDAFQSWFDLRQTDDEANPPGYRKHGDTRPKSTVTFKADGFKHDPENNRVRLSKGSNLKESWSDFILCEYQTRPDVDLSEVKRVQNVRAVWNGDEWKLHFVCKVELETTESAGDEMAGIDLGITNIATIAFPNEYVLYPGNSLKQDKHYFTRAEYDTEGENGPSEKSMGTSKTHRTGNTLLPRPHRYHHYWSVSNVVLARLAVSWPEEDVREADWGAMGNKKLHSWAFDRIYQYLAYKGEICGVEVLKENEWDTSKTCSACGDDTKSNRVERGLYVCSSCELVGNADCNGAENMRQKITPSPHGEDRSNGCGTAIGTPVRPRERDVQNERTGCVVDRQISQLAVREAPAFTPERDVTDATRLRAAPARSPGRSGTRRSISSSRAGRRRPGSSWPRSSPVPRRPPVVSPGPPRRSSRRRTRSLVAQQFRRGPSGG

SEQ ID NO: 8815 - protein, 298 aa, unknown
  TnpB Polypeptide
VLQKVVQRLYDNLSTLKGRKDNGYRVGELRWKAPQEYRSIKYSQTGFKLNNTSGRPVLSLFPRSATFRWSTTARSRTTPRSRRSSSSRNRPASGSPSSESKPRTTRHRSPRIPEKCIGIDVGILKYAHDSDGTAVEGPDLTDERERLEREQRKLSRKEHGSANYRTQQRIVARRHADLKRKRRDFLHKLSNYYTREYDLVAVEDLDAKGLMELPSNSRNRAGAAWGERSFGCSNTSATAKARTSWPSIRLERPKSVPTVALRPTSRCGYANTRVPHADSSRTATSTPPTTSFLADSPK

SEQ ID NO: 8816 - protein, 367 aa, Thermococcus sp.
ILFQLADAGAKVWNEVNYLRRQQFFSHEKVDFNKTEKTVYEKYKREIGSATVQQICRKNAEAWRSFFSLIKKRRELPKWLKPKPPNYQKEDGKRKLLIILRNDQYEIEGNKLILKGLGKFKQLEIQFKGRIHWKGKQGRLEIVYDDVKRKWYAHISFTIEEKLERDSWVKLPKTPKDNLTAGIDLGVNNLMAVYVENGESFLVNGRPLKSIAFYWQKRISEYQSQLNKSGAKKSRRLKRMHEKAKLQAKHYINTAVRQTVRKLYKLGVSRIVVGYPKEIARNSNKGKKQNFILSHIWRFNYVIKRLKEVSEEYGIRVILVGEAFTSKTCPFCGKPHEGARFVRGLFKCPAEGLVMNADLVGAFNILK

SEQ ID NO: 8817 - protein, 459 aa, Micromonospora sp.
VYRTARVALRVTPGQRRRCFGLLRSAGDVWACVLEINAWRRRRHDAPLVGYQALCRELSGSGPGTFGELDSTGARSVLRRFSDAWFAAAKARRDGDLSVRFPRRRRALMPVRWYHGTFTLDGLRVRIPTAQGASPLWVRLAREVPYPVEQVRSVTLLCEGGRLFLDITAEVPVAVYPPGVGPDPGRVAGVDLGIIHPYAVASRDGEGLLVSGRAIRAEHRMHLADTKTRRRAVAHRAPKPGQKGSRRWRKHRRRTRLVEGRHKRRVRQAQHEAARTVVSWAVEQRNGVLRVGNPRGVLDIDAGRRHNLRLRQWQIGRLLQILEDKATLAGITVDPVNERGTSSTCPTCLRRVPKPRGRTLSCPHCQFSGHRDLIAAAIIATRTPGGGPTPAAVVLPKVVTHRRAGRHLPGAGQSRRDPRRPHRVSRGSVGPRRPAPPPGGESLALTARIHNAHRKPGER

SEQ ID NO: 8818 - protein, 389 aa, unknown
  TnpB Polypeptide
LKKAYKTEVKPTQKQIEKINQSIGICRWLYSSYLAKNKELYEQYKQGLIPKEKAFMSANDFDKYINNEVKILDNFKWINDCGSKARKKVIQNAEIAYKRFFKGQSKFPRFKKKNKSDVKIYFPKNNKGDWKVERHRIMIPTLKNVRLKEYGYIPVGAKVINGTVSKKADRYYVSVVIEIDTLIIQNTNQGIGIDLGLKDFAICSDGNTYKNINKTQRVRKLEKKLKREQKRLSRKYEILKKKGGTATKSNINKKIVKVQKIHHRLDNIRTDYINKTISKIINQKPKFITIEDLAVSNMMKNKHLSKAVAQQKFYEFRSKLTTKSNALGIELRIVDRFYPSSKLCHCCGSIKKDLKLKDRVYKCDCGYIEDRDYNASLNLRDCLTYKIAQ

SEQ ID NO: 8819 - protein, 548 aa, unknown
  TnpB Polypeptide
MSYPYTLSLSKEKIEDLNLDISLTSSDIQLVKKVKVTDVNDVFCCLLLSNIAKKLYNSSLYLFKQQYKQNQTTLTYETLDKLMKNEKASLHPNFAKLYKDLTAKVSQQVLKLFSQNVKSFFSLKQSDKLTEEERKKVNLPRYYSKNGLIPVYYTNQALSKKAFDKEGIIHFSGTDLKIKLDENLLQEIKSFNQINQVRIVPSTRNDKNQQLSDLLNKRDLFTIEIVYTVPTSEKRSSEANKSLQLLYRTSILHKINKKTNKIATIEKEELVEVHYTEDFLKSVAGIDQNLDQLAVGIVLDKQKTLAFNYDIKYLKSVNQYWNKRKAKLQEEISKQEKLSEELKYAKLDFYQTFLTEYTTSRLIKDTKILIKKLKNKIKRITTKRNRKIDNYTHQLSRKLINHLSELGVKNIIYGKNVNFKKEINLGKVTNQNFVNIPFNQIIERLRYKALLAGINFMTVEESYTSKTSFLDEEKLHSYKANKPKKDYTFLGDRFARSLFRTRGGYVIHADINASFNIIRKVTGDVIYNFVNKISIRGSCPKRVKINLS

SEQ ID NO: 8820 - protein, 414 aa, unknown
  TnpB Polypeptide
MTKVLRVECIELPYHQALSTLCHQVKNLYNRANYLVKQSLSKKSKLLVYYDLNTLLKEEACYKTLPAHTAQHTLKLLCRNWKGYFRALKEWKKNPALFFAMPQHPNYKAKDGEVVAIFTNQQARIINGWLVLPKKVGFYYKTRLTARTTLKEVRIVPRRVGYTLELVYEKVLPKPRKRFTRKGAIDLGSINFVAFVDNLGNQPIVIKDHGKGIRSIIQYYLKQQTQLRLQYVQQQKQQLKTRNKLSYGPAYYHLREKWRKKLKDAIHKLTRYLVDLWVERNLHEVIIGYNEKWKQNVHFWKKITQMFVAIPFMKIIHQLQYKAAEHGIKVELIPEKYTSKCSFLDNEFPRSREKYAGRRITRGLFKSAQGHLINADVNAAYNILIKSDPKALPKRRANGVGGYVMYPRRVSVDP

SEQ ID NO: 8821 - protein, 394 aa, unknown
  TnpB Polypeptide
MLKATKVRIYPTDEQIIQLSKDFGSTRWLWNQSLFLMSKTYQETGKGVSAYDMKKRIPELKKEFEWLKETYSQCLQQSILNLSQAFINFFEGRTKYPTFKSKFDKQSVQYPANVKLPGEDAIKFPGNLGVVKAKIHRDLPIGKIKTVTVSKTPDERYYASLLIDDGLAKPNITSEGKAIGIDLGLIDFVVTSEGSKFRNPKHLKKHSKNLKRKQQKLSRKTKGSKARTKARRMVAKVHGKIARIREDFLHKLSRKLVNENQVVVVENLAVKNMVKNHTLAQAISDASWGKFCTMLKYKAEFDGKTYLEVDRFFPSSHLCSNTLLPIQKMDLCVRSFDCPHCQQRHDRDVNAAINIRNEGLRLLALGISATANRGSVNPKGSGRKKSMNSPGCSR

SEQ ID NO: 8822 - protein, 436 aa, Streptomyces sp.
VGNSAVKRAFRFRFYPDDAQATELSRTFGCVRKVYNLALSARADARARRERVNYAQTSAMLTAWKRTEELAYLGEVSCVPLQQALRHLQSAFAAYWGKRSHHPRFKSKRKSRAGAEYTRSAFRFRNGELTLAKMADPLRVIWSRPLPDGAEPTTVTVSRDPAGRWFVSILFEDTPAPLPPATQAVGIDAGLTTLVTLSTGEKITNPKHERKDRARLARAQRALSRKEKGGKNRAKARTRVAKIHAQITDRRRDHLHKLTTRLVRENQTLVIEDLAVRNMLKNPRLARSIGDAAWGELRQMLEYKTAWYGRELIAVDRWFPSSKLCSSCGAVNEKMDLSIREWICARCGTTHDRDENAAINLLAAGLAVSACGAGVSPRPGPSRTGQRAVKQEVPPARVGSPLLREGGEAKQPTVGVSNAALPSAMPAVTLRTSSQQ

SEQ ID NO: 8823 - protein, 236 aa, unknown
  TnpB Polypeptide
VFQEKVELPQTSDVICAVDLGINHDAVCSIISRDGTVKARRFINFAKDKDYLNRLRKQIREAQSRGNRHPNKLWRLHNNRNRQLSIQIARAITVFAVEHRCDCIVFEHLDLKGVKSNQKITLWRKREVQRITESLAHKNGLRLARVCAWNTSRLAYDGSGEVKRNKDNYSLCTFSNGKQYNCDLSASYNIGARYFIKDIMNGLSSKIKSQVEAKVPELGKRTTCTLNSLINLNAVL

SEQ ID NO: 8824 - protein, 362 aa, unknown
  TnpB Polypeptide
MKLIAQVKLQPKPGQTELLRRTLEVANAAANYVCDVAWETKTFRQYDLHHACYYNVRERYELSAQMTVRLLAKVADAYKLDRKRQRVFHPHGSIAYDNRILAWKLDAQTVRIWTIAGRQTISFVAGERQLALLPYMQGEADLIYRRGEFYLHQVCEVDEPPASAVDEFLGVDLGIVNIATDSDGMVHSSRTVNNVRYRHRRLRAKLQSKGTKSARRRLKKLAGKERRFAANTNHTISKRIVTAAKDTARGIALEDLSGIRERVTVRRAQRATLHSWSFFQLRSFVEYKAQLVGVPVVAVDPRNTSRTCPTCGHIDKRNRPSQGTFSCVACGYSGLADHIAAVNISRRAAVNPPYVSDAPSAA

SEQ ID NO: 8825 - protein, 513 aa, unknown
  TnpB Polypeptide
VVKAFNKTTPSFVTEIPIVVSVADESVLLSRLEAGRQMYNACLGEARRRIDLIRQSKDFNKARSLKRSNPERKVLFKRARERYEFSDYAIQAYGTRIRHSWVGEHIDAHTGTSVGGESTLSPKLSQKIATRAFNAAEKVLFGQARGLRFKGLNQMDSVEGKSNAAGIRWKGDRVEWSGLKLPALQTLNDPVILHGLNSKVKYVRLVRRKINGRNRFCAQLVCQGKPFIKPRNTLGKGDVGIDIGPSTIAVVSDTASHLKEFASELEFETKLVRQLQRKMERSRRATNPGNYNSNGTVKKGKKRWNSSNSYLKTRNSKANLERKLAAHRKSLHGELVNNILRTADVFKLEKLSYKAFQKLFGKSVGKRAPGMFVSHLRSKAERAGGQVVEIPTHSTKLSQICQCGRVKKKKLNERVHDCVCGVHAQRDLYSALLAKHIEPNTFVLQVSQLIEDWHSAELRLWSQCRAGVPPVETTGVAAQEFSNGYSKSNWWEDYSFLLWSLPRGRTLRYRNLD

SEQ ID NO: 8826 - protein, 374 aa, unknown
  TnpB Polypeptide
MIKTLKIRLLPTSEQEEQFRKHIGCSHYIWNWALAKQEESYKNGEKYISAFTMIKRLPSLKEENPWLKEVSSSSLQTVVRDQEKAYREFFKGTHKHPRFKKRKTATKAYPVRCNSVYFQDGKVNIEKVGKVKYQTNYNVPQGKGCKFTNPRIKLQGKKWILTVGIECENQAVELTDKTMGIDLGVKDLAIVAYGNLKLRYKNINKTKRIRNLERRKTRLQRAISRKYRTNGNWEKTKNIEKLEAQLRKVFERIANIRQNYLHQTTHELTSLLPKEVIMEDLNVSGMMKNRHLSKAIAEQNFAEFIRQMQYKCEWLGIKFTQVDRFYPSSKKCSCCGGIKKDLKLSDRTYICSNCGAVIDRDYNAALNLMRYSVA

SEQ ID NO: 8827 - protein, 402 aa, unknown
  TnpB Polypeptide
MRKSWFDNLAAKKNDPNAKWNPQPRLPELVNELGGLDCFKELHNTKTAKQTIRKCVTDWGNFRAALRAYNKDSSKFLKRPMPPYYKEKMAQVIFYNETIKAGQMNRPLDRLTATNDCFSIPWDGRDFKQVVVTPKRFGFVIEAQYDSEDKPRKREGKGQKKTRMSKDRTCSIDIGLNNLCAVTLAQKRPRGFGLLTNPILVNGRIPKSFNQWYNKQLAKQMSNGAKSPSRRILRKRYFRLENYFHHVSKLVVGLCQKHGIPRIIIGKNDGWKTGMNLGRRTNQKFCSIPHYLLLEKIRYKAQLAGMEVLFTEEAYTSKASFLDGDPLPAWEKDKNPPEFSGHRKHRGLYLASKGQGNFALNADVNGSLNIGRKAIPESSLGTIGDRSLAARPVIVNPLKVQQ

SEQ ID NO: 8828 - protein, 460 aa, Dolichospermum sp.
MIVLEYKVKGKQHQYNAIDDAIRTTQFVRNKAIRYWMDAPRELKVDKFALNKYSTEQRIEFPFTAELNSMAVQSAAERGWFAISRFYDNCKSKKSGKKGFPRFQKDCRSVEYKTSGWKLHKTKRRITFTDKKEIGELKLLGKWDIQSYELKDIKRVRLIRRADGYYAQVCIGIDVVDIQPKTGNEIGLDVGIESFYTDSNGHHEPNPKFLRKAEKSIKHSQRRIYKKHKGSSCRKKARKLYAKKHLKVSRQRIEHAKRIARCVVKSNDLVAYEDLRVSNMVKNHCLAKSISDASWYLFRQWIEYFAVKFDKIAIAVTPHYTSQKCSSCGVIVKKSLSTRTHNCSCGSYLHRDTNAAINILNLAKARGGHPQSNATGVEATTLLGASLEKPSFDDECRIPSALARGVSNFEYSNQPYIYSSLCDTEGVSGQRELTIDTNYQLTITNPSSKYPVVDKLVLNA

SEQ ID NO: 8829 - protein, 477 aa, unknown
  TnpB Polypeptide
MKSSSKKSASRSRKSAKDFYPFWDKFCQETSEKLWSTAKNDLSGSVLTSSNGLLSKKTANSWFSTDVTYLINSKGLKISLPSSRSDVADCREKESTNLLSKKIRVYPQKKLASIWFQWIGAARWCFNQAIAILKSQKIGKYDLRKTVMGLAPSWVSQTPYNPRQLAVFQAYEAHSSAKKSGGVAKFRSVREPVKSIRFQKDNWKKGTFYPTQTKGLSFKASEPIAPQMHHEPTLVLDRGRWFICYAQDVPKFEPNQSQLAIALDPGVRTFLTGFDGSEIWEIGKYDMGRIYRLACHLDKLMSRIALAKGRQFKRLRYRLRKAAQKIRIKIRNLVDELHSKAANYLCTKYKVIFLPTFETKNMVKRGKRRLSTQTARKLVTWSHYRFKQKLKHQAAKYGCVVVDVTEEYTSKTCSKCGHIHTKLGGNKHFVCPDCGHAIGRDINGAFNILLKALRDTSASGVIASFQIVPYSEISSNC

SEQ ID NO: 8830 - protein, 275 aa, Lactobacillus sp.
MEISLTIKARIYPSQSEAESLKKTMEAYRQGCNYASQYVFNNNFELGQSKLNKALYHDLRDTFDLKSQMAQSVLRTVIARYKTVATQLSQKPYKCLGYKIKRDLTWLWKPITFSRPQFELVRNRDWSFKNDNQVSLNTLDGRIICQISMSGFEKYQDWQFGSARVLKSSKHWYLHISASREIDDYDINQTRHVIGIDRGLRQIVTCYDEKGKTLFKNGKQIAKKRNHYKQLRRHLQLTNTKSSKRRIRKIGQRENRWMSDYNHCLSKTLVEKIWN

SEQ ID NO: 8831 - protein, 269 aa, Nostoc sp.
LDFAALREVRILPRNGEFYAEFVYPVVAVKTDLDKAKVLGVDPGLNNWVTCVSNTGTSFSIDGRKLKSMNQWYNKSVAKLMGGKDNGYWSNRLARLTEKRNRVMRDAVNKSAKKIVDHCIQNGIGTIAWGWNDGQKDSANMGSKTNQKYVQIPHARLKERVKQLCEKYGIQFLQTEESYTSVASFVDRDELPVYGAKPVRACVSEGEGWKPSGRRVKRGLYRAGNEWRINADCNGAANIIRKVAVIFGFKLEGISRGVLTAPLKLQIWS

SEQ ID NO: 8832 - protein, 422 aa, Mitsuokella sp.
MMLKLMSEYNYHSGIRLRIYPSYQQKRIIKKNAETARFIYNEMIACSKEIAGFGKLSIYIQGITERIHVLRERIKSTTSLKAHFLWMNDAELDANMIANAKKNYTHAWKCYRCGETKNPPAFHRRTYAIGYQTNPHYNRQRVSEATLTNGSAGFRDASHVYVPKLGRIRCKGSRKMLARIFSMQSVRIGTMTVMKDAGGDYFLSMQLASDEPFVPSLPEAVSTIGIDLNLKNFYVDSNGRRVDNPVYIQRTKRRVIRAQHVLSRKARGCRRQHIPLRNGARYQSQRRLVARLKQKIKRQRQDFLHVQAMNLIKNHEMIVAEQMDIRKLVHLRRCTKAIYEAGWRTFLDFLEYKAKRYRRTFVKVNPAYTTQRCSACGYVLPTGHRLQLSDRQWKCPSCHVLHDRDRNAACNILQRGLASLIR

SEQ ID NO: 8833 - protein, 312 aa, unknown
  TnpB Polypeptide
MRGKAKDWGMPKTLTIVYKPRLGQWFASFTVEIPSGDPKFGSQSSLEYESIAAIDLGTETALTLYNGKEFEEVTNPRFIRKAENRVKQASKKLRRKRGPNKKKKVKPSNRWKKARKQVSRLQRQVAAQRKDWQHKITTDIASRHDIVVTEKLETKKMTRKGKKRKAQKAGLNKSILDVGFSTLNKMITYKIEQKGGLVFFLPTRELKPSQRCPKCGNVHSYWAELSNRYHICECGLEMPRDKASTLVMYQTLLDKQPGFGMSLDNRGCSSSTSKIVLRKHTGSMKQLGQKKRQKPQSVDGGDLETPSVYTAG

SEQ ID NO: 8834 - protein, 534 aa, unknown
  TnpB Polypeptide
MTVSLQGGILALKHNSSLGKMLVRWNYKLLPNNQQDALMDEWLVTLRKHRNYSLRERSSGWDTNNKDADDPITYAYGAYCDIQTKIEVGACCPLTCPILKHGVLADVPLTKTTKEKVEKKTGEIKPSLLEWDSVSGIQSKRTTQLRQENAYYARIDSGVLQRNLAKLDAAYSGFWQHERGFPAYRTRANFNSFEYKPGRVIFKTTPAQDKYSRVYLPGIGWMRYFDSRSFQELTSLRTITIKREADGWYMSVLLNLPKELPEVTPLEDIKSINGLDVGINKLIASSDGSFVENPKFATSKRVQRRLRIRQRRVSRKQKGSKNRAKTGKVVAKLHKQIADQRESYQWQAANREVKKADAVAHEDLNITGMKKRCKPKIVLGRFMPNGQSAKRGLNRAISDASWGQLFQMIAWVAAKAGKPVIKYNPKHTSQECSQCHHVSIDNRDGEKFLCSQCGHIDHADTQAARTGLKRVGLKFVSTRHKNLPADCGKVMPVRHGAASNGKRQQDRNPKSKAMPKTGIIEQLSIFDLIPLETG

SEQ ID NO: 8835 - protein, 351 aa, Brevibacillus sp.
MQCLTVKIRFFPEDPKILRQLGKEYVRVVNQLTEQADRLGAFPKMTTKHVESLLPSAVCNQAIRDAKSVFRKSKKLGSRPVLKKPVYFINNQNYSISENTIAFPIVVNGYTRKTTFRAMTTNRDWEWLKVAKMGLMRIVEKAGKWYAQIALEIPTNVSNGETIMGIDLGLKVPAVAVTSTGKTRFFGKGRQNKYIRRKYEHRRRNLGKLKKLSAICKLGNKEQRWMKDQNHKISRQIVNMAIQEGIATIRLERLENIRKTARTSRKNKRNLHRWTFYQLQQFISYKANLVGICVEEVNPAYTSQTCPACGEKNKAIDRRYECLCGFNTHRDRVGAINIMHQPVTDGHSLSA

SEQ ID NO: 8836 - protein, 478 aa, unknown
  TnpB Polypeptide
MIVTRQLQVFAAQPDYERLRVICEKVGHMRTYLWQRFGGLATFRQTVGEIRQYITELHPFDRLELDGTVRAENTKDIINDIVAYREAARRKTAQDIYRRYPDEQTRRELCGLLKSDAFLKHSYVHRRMRLHFKHGKGKSRRGFVMRSDKFRIETDAAGMMSVVLHFSRKAGGDIVLTTRVKTDKTPIQNRNLFVRVEDGKLFIHYAYEKKAKRPCGTGVVAADKGFTEVFATSSGKFFGEGLGKLIIEYCELTTKTNRQRSKLWAYVHKLEENGDFEKAERIRKNNLGSLKRNSRQKRFEEKAADLIYKAVHQLVDEGEDIVVEDLTAVFQQKKELPAKVKRWLSTWVKGKIREALDSVAKLRGARVHPVNAAYTSQTDSSTGVLSGRRQGDRFYRESGENVHADTNAARAILLRFYDPEIMLYTPYTEVKAILERRTREYESEIASGGNWPSKGSSWMAPVLNRWLNTECGKKHDQV

SEQ ID NO: 8837 - protein, 275 aa, Burkholderia sp.
MAGMILVYRYRVKSLNGLLNKQSRAVNYVWHFCNDTQKHALKWNKKWPTGFDLNMLTTGSSKEFGIHSGTVNATCEQYAKSRSQRRRPSLRYRGRKSLGWVPLKGRDLKREGDAFRCAGNSFRVFNSRPLPEGKIKDGTNFAQDARADFQHKLALDLVRRFDYIAAGNVSAAKLARTRMARSVYDASRSSFRNKLRYKAIAHGATFEEVDESGSTQSCSSCGSKGSTTRPKGIAGLRVREWACSGCGVVHDRDTNAALNILRCGRASPGVGILRL

SEQ ID NO: 8838 - protein, 637 aa, Streptomyces sp.
LRTGVEERTGEVLTTAVLAARVGWAAALVSGMAGGLLAEHWNAADVDVLASGVDAGGRPLPSNAWMALRRLGWTAAPADGVRVNDRIVRMAQEQTGRTLRSVKWRADLTAAILGAWPADPGKRTPQEWDAVREAVPGGRDLPSCVIASRTRQIAAFVEKHGRLPVDVFELEAAPRSARMLLLSACDRQQATITRGDDPGRALLRLQLPTCPDPRSYRDWTWVACPITLPPTIPPGAVLHLPTLRIHQGTVRADLAYTHAVPKTRRTGHTVALGVDWGLNTLLSAGAVRRRDDGIITALGTGGMFRACGAMAKQHRLRRESEYLHAKTDHYQRLIAGEARHSLSAKHHVLAEESRHVSARRSNLNDALAWSAARWVVDQAIAARATVIYVEDLRSLEARGMGRTLNTRLSQHVRGQIVERMRHLAAETGIAVVTVPARGTSRHCPRCLVPLRHRKAPDRPTAPGWKWAVCPTPGCGWQGDRDTGAWQRIAARGLTHQTKTVTDRSTGTMAIRSVADQHEATAVVAPATTQTRRDRSKTGPTRHRTTRPAPRRRRAPSPTRPSGPAGQRPEGHAPTGRTRLPRAAHRHQGVTTISTPTTSRHRPRGAALGAGFHLHAHASPPRWAELTPDPTVRIGSLS

SEQ ID NO: 8839 - protein, 459 aa, unknown
  TnpB Polypeptide
MAKLVSSYCTKVIGENRIFKDTIRVYHDALSLLIRIVESEWDTGLGELYAKSTLKAQRTVELLVHASRTSVAKYPEFDKQFYKYPSYLRRSTIAEALGAVSSYRAAVSHWESAGRKGKEPRLQTSRSAMPTFYKDNMYEDNGDGTALLKLYHKNDWVWVKVLLRKQDTDYIREHWGEVSGSAPKLVKRNRRYALCFAFEETVAYDTKPLTDQTILAVDLGINTDAVCSVMRPDGTVLARKFIDFPSEKDRLNTQLGRARRGQRENGHRGGNRHMKKAVRINEDLSKKIAPAIVRYAVSVGADVIVMEHLDFIGQKPKHKKQRLHMWRNRDIQKIVMHQAHRNGIRVRFVNARNTSRLAFDGSGEVARNSTNMALCRFRNGKQYNCDLNASYNIGARYFIREYLKPIPETEWSLIVAKVPELERRTNCTLSTLFSLYAVLNCQSVSVSESWPHGGNESGA

SEQ ID NO: 8840 - protein, 164 aa, Bacillus sp.
SGRHNKYKKRKFRSVRKKLGKDKKVKAIRRMDDKEQRWMQDKDHKISREIINFAIANHISVIRLEQLTNIRQTARTSRKNEKNLHTWSFYRLSQFISYKAMIAGIQIEYVNPAYTSQSCPKCAKKNKAQDRKYKCPCGFKTHRDIVGAMNIRCATVIDGNSQSA

SEQ ID NO: 8841 - protein, 242 aa, Bacillus sp.
  misc_feature (79)..(79): Xaa can be any naturally occurring amino acid
  misc_feature (96)..(96): Xaa can be any naturally occurring amino acid
  misc_feature (207)..(240): Xaa can be any naturally occurring amino acid
LFATKVKKSHYKIIPILKRPVCVWNNQNYSFEPTYISIPFKVNGKSTRVKIRALLSDKNNRNLNLLKHKLGTLRITKKXNKWIAQISVTLPINKRXGTKILGVDLGLKVPAVAITDDDKVRFFGSGRHNKYKKRKFRSVRKKLGKDKKVKAIRRMDDKEQRWMQDKDHKISREIINFAIANHISVIRLEQLTNIRQTARTSRKNEKXXXXXXXXXXXXXXXXXXXXXXXXXXXXXXXXXXEW

SEQ ID NO: 8842 - protein, 567 aa, Desulfotomaculum sp.
MKKPKKKKTVNPDESIKYTVCGEWFPESFPARRSLRWGRGEEDPLATEMRLFCSCQRWVFNRLLEGRSREELKKEGQGLFGINSRFCDDALLKARAIIESQRELLALEIEETGTKLARARKKLSRAEKDLATAIKTGNPVKIEKAERIVHGRKARVKKLSDKLDELKTHQNNGTIPTVVFGGRSLWKRVCRGRATKEEWRNARQNRLYTRGDETKGGNPNIKISYCSGEFALSVTVSHLSEQTGTDSKGRPVMTRAPRVTGKLWLPEKHRLRVWELLLSGAPYNVELIRGRDGRYRVHITFTITAPDPVTSSNRGYLGMDTNPDGVALANVNYFGQPEAWPEGFTVPYPKALHKFAGEFQMTVHPNGFLYIKMPELAYSRGYRRTYLIGVLAKVVVDIAKALGKPIALEDLDFGKDRLDTDRKFNRMAANFPFKKIIEAVTRKATREGVGIKPVWPVHTSTIGYYKFMERYGVIIHHAAALTIARRAIGFRERITNELKQKIRVIKEKLNRKVDSLPGEGKGMTRKVKRLFNRLDGKISVHNELPRFKQESFYSVWHELKQLALSSR

SEQ ID NO: 8843 - protein, 354 aa, unknown
  TnpB Polypeptide
VNVLSHRIALDPTPQQRIALAKAAGCARKAWNWGLGEWRQQYAAGGKPSGPALRKQWNAVKHALYPWMKESPKDANIEPLFDLEKAFKSFFTGKAKYPRFKAKGKDRPAFGVSNDKFRTDGKRVRLPVIGWVKMREALRFEGKVLSGRVTFQGGRWFLSVAVEAAHLRAAATAGTVGLDLGVETLAVLSDGVVIENSRALRSETKRLHRAQLSIARKRRARDKALGPAKKGERRPVGKNLQKACRKAARVHARVHAVRSDAIHKATTKIASSYSTVVVEDLNVEGMTRRAKGPGRAAKAALNRAILDAGFGEFRRQLTYKLPLHGGTLLVAPRFFASSKTCSRCGAVRKHLSLK

SEQ ID NO: 8844 - protein, 326 aa, unknown
  TnpB Polypeptide
MKTYCFKLYDSKRNRKLHSQINAAGLVYNHCIALHKRYYRLFGKSLNIYRLQKHLSKLKKNSRFTYLKEIGSQAVQDITQRIDKAYKLFFRNLKHKIRTAPPSFKKIKILTIKRDALGDIYLYFVCETSENEVLARTGKSVGFDFGLKMFLNASDGKDIASPLFFKQNANAVKRANKNLSRKVKGSNNRQKAKLTLARLHKKIANQRNDFHWQVAHRLVAQYALICLESLNLKAMQKRFGRKISDLGFADFVDKLKYLSNKTGSSVIEIDMFYASSQICSACGYQNTKIKNLEIREWVCPECGSTHNRDRNASINIEREGISIFFA

SEQ ID NO: 8845 - protein, 464 aa, unknown
  TnpB Polypeptide
VDTIIKTVKQYSYVLDDDSVKELLFIANQYKNVKNYVYSRYSGINSIPLLDKDRQIRDEWTKTKFYEGWKLSARYWKLALSEAFGNIKSQWSNTKRKIKAAIKQNINLSDEDRHYIYYVLKSDKCYWKVLTNQTIDIPKIFEDKDLNYIYLNSLIKRYTRRYKGNISYSNRGTTFSIDTGLYLYKDGYINITSTKKYKRLSIKLTDNNKYDKTMVVKIVGNKIEIHCSLKIKAKKNRDEENTIGIDKGYRYLFAISNDKFYGGGLNNILSNETERLNKVNSQRNRFWALYNQYLEQGNIKKANTIKENNLGKVKYNHNKSKYDQVVKSYINYSLNQLISEEKPTEIVMEKLDFVSWDARYPKLIKRKLSRWIKGYIKERLEYKCDYNSIKYTYINPAYTSKVCNICGQFGIRNGDVFTCPKCGKVHADSNASKNILNRKYDKEISLYTPYSKVKEILEGRVRVS

SEQ ID NO: 8846 - protein, 391 aa, unknown
  TnpB Polypeptide
MRKAFKYRIYPTSEQEHILFWTLARCRELYNAALSERRDAYKMAGKSISYYEQKRDLPEIKGVLREEYQQIHSQVLQDVLLRLDRAFKAFFRRVANGEKPGYPRFQGRNRYHSFTYPQGGYALSEKHVTLSKIGSIKIKLHRPIEGTIKTCTIKYDAGQWYAVFSCEIKPPEPLPVVESEIGIDLGVTHFAALSNGTFIESPRHFRKAEKKLARLQQALARKKRGSHRRDKARKAVAQAHRKIRNQRKDFHHKQSASLIKQHQTIVFEELEIMNLTRHAKAKQDEHGTYLPNGASAKSGLTRSILDAGWASFQQMCVSKAEWAGRAVLFVNPRYTSQVCSQCGTVRKKSLDERWHRCECGCELDRDTNAAINILRLGRSQRGATCVEAPCL

SEQ ID NO: 8847 - protein, 359 aa, Scytonema sp.
MLLSIKTKLKLTSEQKTIMSKHAGIARFTYNWGLATWKSLYQDGFKPNKYLLKKFFNNEVKPRLEWIKEKGICQKITQYAFDQLSAAFDRFFKELGGYPKFKNIGQNDSFTIDASGKPIPVGGVRIKLPTIGWVKTYEGLPHTTTTKLTISRIADDWYLAFAYEVETEPTPKLVDVVGADLGVKELATLSTGVVFSNPKAYKKNIQKLKRLSKALARKTKGSNNRHKSKVKLAKHHNRVSNIRKDALHKVTNYLCKNHAVIVIEDLNVSGMMQNHKLAQSIADCGFYEFKRQLEYKCKKFGSKLILADRWYPSSKTCSNCGCKKESLSLNERVYECKQCGHVMDRDLNAAINLSRLAKA

SEQ ID NO: 8848 - protein, 298 aa, Actinobacteria sp.
  misc_feature (248)..(249): Xaa can be any naturally occurring amino acid
MPRYRLTPTPAQETVLRDHCGHARYVWNLAVEQHSRWHPGRKSAPGYLEQCRQLTQARTENPWLAEGSQTVQQQALRDFTQAMTAFFDPGNPAGRPSWRKAGRDEGFRIVGRGRQWDVRRVSRHVGQVRVPKAGWVRFRWSRAVPPDARSYRVTKDRAGRWHVAFAVIPGPVPAPGNGQVVGIDRGVAVSAALSTGQLLHCPSLTVRERTRLRRLQRRLACARRGSNRRGRVKHAIARLRARERDRRXXHDPVRERYPGEPGPERAAEGRAERGHPAVRVGAAGTPAGGEGAGPGGED

SEQ ID NO: 8849 - protein, 200 aa, Paenibacillus sp.
LHSQSVQAVCHKYLFARNSAKQAKNQGSNPKYPYKNKKYFNTKWVDEAFKIEGNAITLSLGNQNGKRQKPITILVPRIPDAAIKEIELVFDGKLMVSLSFDDGKTAAVNEGREVAGVDLGEIHSVAATTTANQSIVITGRKARSIHRLRNKKLAELQKLMSKCKKGSRQWKTYKKAKMYVLGKSERQLQDVIHKTTKQFV

SEQ ID NO: 8850 - protein, 263 aa, Paenibacillus sp.
ISRCVKTAFQASRADLDRLFACNRVSAEIWNRCLIVAKNYSLQHYGKWIGKTALQAALKHQYPLHSQSVQAVCHKYLFARNSAKQAKNQGSNPKYPYKNKKYFNTKWVDEAFKIEGNAITLSLGNQNGKRQKPITILVPRIPDAAIKEIELVFDGKLMVSLSFDDGKTAAVNEGREVAGVDLGEIHSVAATTTANQSIVITGRKARSIHRLRNKKLAELQKLMSKCKKGSRQWKTYKKAKMYVLGKSERQLQDVIHKTTKQFV

SEQ ID NO: 8851 - protein, 608 aa, Streptomyces sp.
MAELRTIARTFVADPTSGVCIRDRLKGLTSADETVLRLVGTHLGSLASRDLKARCADGLEHSTDTWARRKRELTPRSSSRWAGSITKATHDQWALARRGQMAHLQNLEAGIKTIAHRLSLPIGEKGAKRTPGGYRSKNEWFQKTRRLHVLEDRLAAVRADRETGRVRVARGGRRLLNTRHNLAAAQLTEPEWQQRWEAARWFLSADGESGKDLANNKHGRYVLAAKAAFPHRGEEWRDRTEANRAVAYRIHLDADRGRWYIDASWQRKDQPIVPLETLRSGEIIGVDMNADHVAAWRLDTHGNPLGEPRRFGYRLNGTASYRDTQLRHALTQLLHWAGDTGVRAIAVEDLDFTDSKTREKHGRKRRFRQLISGIPTGKLKARLLSMATEAGISVIAVDPAYTSMWGAQHWQKPLTTKNRATNRHQAAAVAIARRALGHSIRRRTAPPRQHQSDAGGHRTAQAPSPVRGREETRPPVTERAHDARSQTGKQRMRETSASNTVRDARSSGSRHQMPLLDTAEERFTCSSTGATRCATGPPTWTPPGRPCNSPWRPSRRPSPSASSAPSPAAPATSPCVPRRPCTSRSCATPRCCSRCSWPTSSCPRRACA

SEQ ID NO: 8852 - protein, 441 aa, unknown
  TnpB Polypeptide
MRIVSSYGVEIKKKNIPLRSTLDIFRKAVSYLIPVYAETWEELSEIRNPQKRFNEAEHLVHETKKNHARFAFDRHFPKMPSYLRRAAIQHALGAVSSYQTRLGLWEKGELRGKPKLVCENHAMPVFYRDVMYKEAEPGEDVAYLKLFDGREWKWFQVKLLHTDMEYLRKKWSGKKASAPTLEKKHHKYFLRFSYTEEVTLSKTAAKEQVICSVDLGINTDAVCSIMRADGTILGRKFINFPSDKDHLYHVLGRIRRFQREHSSRQVQSRWDYAKRLNMELSRKIAAEITRYAAEYQVDVIVFEYLEMQGKISGKKKQKLHLWRKRDIQKLCEDRAHRNGIRVSRVSARNTSRLACDGSGAVVRNSENHSLCTFRTGKQYNCDLSATYNIGARYFIRELLKPLPETERSSLEAKVPVVKRRTSCVYADLRKLYVEVNNLKTA

SEQ ID NO: 8853 - protein, 436 aa, unknown
  TnpB Polypeptide
MKLTGDFKALEASITIYRQALSVLIVIVNDGWTELGQCDYTKQKLNLIEKWVHSTKANQAQFNFDQKFPKLPSYLRRSAISKALGVVSSYRSNLANWEANPIGQAPKLQLVHYTYPAYYKRNLFKNFDPIQQTIELKVFKNGDWVYEQYGLKQSDCTYYQRYLAGKKQNVPIIQKKGRRFYATFSYEENVPLIPEESIRKICAVDLGLGTDATCSIMEQDGTVYARKFISFSEEHDRLHTQLGRIKRNQKRGSRHNKTLWRKVAGISQDIADKTVKAILDFGNAHGVDVFVLEHLDFKGKNIVKRAHFWRYKRIYKVLSHKAHQYGLRVSRVNARYTSRLAFDGSGWSKRGREITPDTPYALMQFVSGKIYNADLNASYNIGARYFIRHLLKTVTATQRLALEAKVPQVTKRSTCTLSHLINLRSEFVALAAKTQA

SEQ ID NO: 8854 - protein, 373 aa, Archaeoglobales sp.
MELTQKFKLMKPNKRKKELLNATIDRFRECVNEWLRAIEELGEYPVRGNVHAFAYKRVREKFQDLHSNVVQEAMNRAIETYRSWLRNPNKGEKPVFKADIISFKAVDVKIDRHFINIPLLNNERVWLPMYVPSKLKRFLKLKHGRLQISRGKDYYALISFEVEEPEPYEPQGWIGVDIGINHIVVVSDTKHRINKFYNNAISWKKSMDCRRDGLKRLKDRKIKKGVWRVLKRKSKEIRNRMSYINHCIAKELIEMAKQRRCGIAIEGLKGLRRKKVGKRHRKRLHKWAYRDLIQKIEYKARLNGVPVKFVNPKRTSKTCSKCGYVRSRIKGRWFKCPKCGFQLDRDLNAARNIAKLAAIPLTVKAVSFLAEGV

SEQ ID NO: 8855 - protein, 491 aa, unknown
  TnpB Polypeptide
MKHYKIPRETSAILGISIDRLRRLAENGTISTIGTPGGQKHYDVQGYLDEQTGTDITTIGYCRVSGKGQAEDLASQVAYLQKHYPEAEIIKDFGSGINFKRKGLRTLLERLLRGDKLRVVVAHRDRLARFGGEAKDTPKNFKGLVPIVFDQLPEWHVETPRQIKAGAVIDACQAIKNAKVKCKETDKFQKVSFRSRKNPRQTLYLRADSLKKNGFYVRLLGQMKMSEPLPAKPQGTGKVSERDTNAEVKDSQLIMENGRYFLCVSYVEKKKTREPSGRIVALDPGVRDFMTFFSEDRFGWLGQQCINRIQRLCQHCDNLLSRATQEQRPLRRALRKAANRIKVKIRNLIDELHKKIAHFLVTNFDIILLPTFETKQMTKRGARKLRKKSVRQMLTLSHYRFKVFLKHKAKEYGAQVIDVCEAYTSKTVSWTGELITNLGGSRVIKSSEGHRMDRDLNGARGIFIKNVARALTVRPCTANLGASKSLIPSAT

SEQ ID NO: 8856 - protein, 404 aa, unknown
  TnpB Polypeptide
MPLGVVGERNFTSYSFIYKLFFILIMRTTVTAKIRINPTKEIISTVKAYTKALQFCVNQAWKRKIKNNIKLHPFVYASLRKRGLPSQLAVSCIKQACGMVKKVKTKPIIKKASVGYNFPRSANINGDVLVLRLLKVRQEFNLNIPSCYKKYFTWDVKESLLRLDKKGKCFFLFTFSKEVTATEQNSCSQNVVLGIDLGVNNLAVTSDSRFYNSSKVKQVKRKFKYLRSKLQAKGTRSAKRLLKKLGGRETRYMAWVNHNISKSIVSNFNGNKIIMENLKGIRKTNRGKRMNYWISNWSFFQLQSFIQYKAEMNGIEVVRVKPNYTSQICHRCGQLGSRLSGCFSCSHCGLSKFNSDLNASRNLAHPMLVERQALVTEPHSRSDEVKGISQDAIATELMAKSPCL

SEQ ID NO: 8857 - protein, 377 aa, unknown
  TnpB Polypeptide
MLLGFKTQIVVNNKQRTLLAKHAGVARDAYNWGLGLTHEILNHNLSNPDSKLKFPTAIEFHKWLVAIRKVEKPWYYQVSKCAPQYALRQLREAWDRCFKKISGVPNFKKKGKHDSFTLDGSIKIVGSNKIKVPIIGVLKTYEAIPQLVAIKSVTINRQADRWFVSFKIETDIKPTSSNSIVGADLGIKSLCTLSTGEVIEGAKSDRKAQKKLARLQREVSRKVKGSSNRKKAITKLAKVHARVSNIRKDTLHKLTSSLSKNHAVVGIENLNVSGMMKNHCLAKAIADMGFYEFRRQLEYKCKLYGSQLVIVDRWFPSSKTCSNCGYKKETLSLAERTFNCDLCSLSLDRDLNASINLRNAASSVVSACGWGAADSPS

SEQ ID NO: 8858 - protein, 416 aa, Scytonema sp.
MAIKRVTFKLYPSKTQSNKMHYWRRLHKDLYNACVEHRKTSYKKFGKSIDYFAQQNCLPAFKECWEEYKELGSHALQDTVKRVDFAFKRFLKLKSGYPKFQSSRHYKGWTYPCISGWKACTNGKNGYLKITNLGNIKMRGQARDWGKPKTCTIMFKQGKWYASITVDCVPSRYQTDTGAIGLDFGTHHAIADSSGNLIENPRFVKIAQSKINKIAKASRRKRPPTRGVKPSRRWKKANKAVAKIQSKVARHRLDWQHKVSTQIVRCNSLVATEKLNLKGMTRKSKGKRKRQKSGLNRSLLDVGIGNLKDLVQYKVTEAGGFYIEVPTQKVKPSQTCPNCGHQKKKTLAQRTHHCSECNYQCDRDVAAAMVMLHYARGMERTSTGADESTSTWCGSFKQVAQVKRQKPLPQPQAGSV

SEQ ID NO: 8859 - protein, 160 aa, unknown
  TnpB Polypeptide
LHFYCFFITHKQKAKGSNNRNKARIKVARLQERIANIRKDFLHKESTKLVRENQLIAVENLKIKNMLRNHKLAKAISDVSWAEFFRMLEYKAKLYGCDLVKVDTFYPSSQTCSCCGYQNKATKNLGIRKWTCPQCNTQHDRDVNAARNILRKALEMQKSA

SEQ ID NO: 8860 - protein, 400 aa, unknown
  TnpB Polypeptide
MSRYRLLPTPAQEAVLRDHCGHARYVWNLAVEQHSHWRPGRLGAPGYLEHCRQLTAARAEYPWLAAGSHTVQQQALRDFARAMTAFFDPANPAGRPSWRKAGRDEGFRIVGRGRQWDVRRVSRKVGLVWVPKAGWVRFRWSRAVPPDVKSYRVTMDRAGRWHVAFAVIPGPVPAPGNGEAVGIDRGVAVSAALSTGEMLHCPALTTRERTRLRRLQRKLARAVRGSNRRGRVKHAIARLKARETDRRKDWVEKVSTGIARRFDVIRVEDLQIKNMTRSAKGTRGDPGRNVRQKAGLNRGILGSGWGLLVRRLEDKAPGRVEKVRPAFTSQRCSACGQVDGNSRESQARFVCTACGFACHADVNAARNIAAGHAVTARGGFRDAGPVNREPQLLASLAGRG

SEQ ID NO: 8861 - protein, 125 aa, Moorea sp.
MTLVLFLLKVARVHAQIKDARRDFPHKLTTQLVRENQLIAFEDLAVKNLVKNHKLAQVISEANWAEIIRQIKYKSQWYNREAIAIDKWFPSSKLCSVCLNRFECLPLNIREWDCPSCNAHHVRVA

SEQ ID NO: 8862 - protein, 237 aa, unknown
  TnpB Polypeptide
MKVTSSTISQKADRYYVSVLCEIEQKQEVQMNTYDGIGVDLGIKEFAICSHHKTFPNVNKTLKVKELEKRLKRQQRKLSRSYEQNKNRRRGEFCAKNRQKQLIRVQKLHARLANIRHEYVRSVINQLVKTKPTYITIEDLNVKGMMKNQHLSKAVTQQNFYYFKEWLLSKCRQYDIELRMVDRFYPSSKLCSCCGYKKVKLSLSERTFTCEACDAELDRDFNASLNLKQATEYTVLT

SEQ ID NO: 8863 - protein, 402 aa, Veillonellaceae sp.
MRTLLKSFKTELRPTEAQKDKIRRSIGICRFLYNQYVARNILLYRMYQRGLLDTHQKHFVTAMDFDKYVNHVLKKRLPWIDQCGSKARKKALVNAEHAFQRFFRGEGGFPRFKRKSREDVKLYFPKNNKGDWQIWRHKVMIPTLKQVRLKEYGYLPQDANVISGTVSCVAGRYYVSVTAEIDEKSRYNKDCETSYAPPSDGIGIDLGIKSLAVMSNGNVFRNINKSPKVRALERKLRREQRRLSRKYEMRKKKGGSAAAASANIGKKKLTVQRLHQRLTCIREDHENKVIHAIVKQKPRFITVEDLNVRGMMKNRHLAKAIAGERFNSFLQKLRRKAEITGIELRIVDRFYPSSKRCHACGHVLRDLELRERTYHCPACGYKEDRDFNAALNLRDAKEYRTA

SEQ ID NO: 8864 - protein, 488 aa, unknown
  TnpB Polypeptide
MTESYVLTLKLNTSPEQDVWLSHTFWCGQQIYNVLVRHCKKQLRKLIQDPEYRDLLVARKESGLSKADKNRINQELTDIRIGYGLSEYQLHAYVSVQQHRYKKSIDSDVAQKIASSVWRSVEKYLFDNGKCIHFRKYDEFESMEGKKNTSGMRFKDGRLHWRGQVIQPQIRTDYDRKALKSRVKYCRIQRKPVGTKYHYYLQLVLEGKPPVKHPVCHGTAGLDIGISTAAIVTKDSCKLTVLSSDAKDHSAQIRLTQRAMDRSRRITNPDNYLPDGTVRKGARKWIRSKHYRKLQFRKKSMERRHADAINTGHHRLANEIASKADTAYVEKMFFHGLARRSKSATKKADGRFRSRKRFGKSIGNHAPAAFLKILESRLASGGGELIKIDTVNFRASQYNHVTDDYVRKKLSCRGSFVGSRYVQRDLYSAFLLKNSNDTGTAADRQKCIDTFPMFLITHNACMDALLAENKKYPSSFGLRSYKYHKRNC

SEQ ID NO: 8865 - protein, 389 aa, Gammaproteobacteria sp.
MASVPDTIVRTRTFRAYLSKSGHANLAAFLGQLTWLWNVALNQRRQAYERDGSSVSRYDQFKALTKTRQSADDAWQRFPVGAQRSVLARLDKAFKAFFRRVKEGEKPGFPRYKQARGVRSFSMPSPKIHGNGEWSWVGIKGIGRIRFRGMPEGTVKLLRIVKTARRVNIQFVCETPHDAKPDTRPAIGLDLGINARVALTTGERFPGVKVDRSELKRRQRKVSRADRGSRNRRKKVRTLAREWQRVREREQGALHELTTRIVCEHGAWLAVEDLETRNMMRNPKLARRIAEQQWNRLVWMLSYKAESAGGRLVKVDPRHTSQDCSACGHRPRERIDLSVRVYRCKQCGHEQDRDVNAAHNILQRAYGPNPAGASAGARGATRAATAASV

SEQ ID NO: 8866 - protein, 421 aa, unknown
  TnpB Polypeptide
MLHVVKKRNMPAVVKDKMLVRGIAFYLDSDLPSDAKLLLEDFRLAVNNAIRAGLQARVTSRNALVKTAYRDFRKQHPRMYAQHLVSAFEVAGSALKNHRRCIRKGVTGRIPYVKRLMMKAENQAYKLDRKSGVIDLPIRAGCHVELRLVVSQYHRKYLNDMALSLGSLTVLPDRVIVAFRKDAPKPFAPESALSLDTNERSLDGVLITDDTSMTVKAEFPDIAVIQQRHHERRKRLQKKKAHDRRKSRELCRKEGTREHHRINNRLHQVANSVLKFAEERKSAIVLEDLKGMRPERSKELNRRLSIWPRRKLHQIIEYKAQWRGVPVVKVDPRNSSRTCPICGRIQDSRMGAEFKCECGWHMDRHINASINLLQTAISKGVAGGLRFNPGAFQHDVMMILYEPAMAARSEPNGTSGIAGMT

SEQ ID NO: 8867 - protein, 394 aa, Acidobacteria sp.
MKKTYKFRIFPTKAQQTSLEETLELCRWTYNQTLAHRKNSYEKEGKSVSKYDTNLLLPYWKEQNPELKSVFSQVLQNVQERVDLAFQAFFRRVRNHENPGYPRFKGRGRYDSFTYPQTGFGLKDNGTVLLSKIGEIKIKLHRQIEGKIKRLTIGRTTRGKWFATFFVEQENPVPISRKTNLVTGIDLGLESFATFSDGLKIENPRFFRLEEQILAKTQSKRDKLPKGSSERFKATKVIRRIHERIVNKRDNFAHQLSYDLVSRFSIICFEDLDIKSMLHNGTRGLSKSISDASWNLLLRLTSYKAESAGSKVVFIDPRNTSQMCSDCGMLVPKDLGTRVHKCPYCGLVMDRDRNAALNILRLGLQALIDGGSNDLPVRLGLQSVGFKAVEARSL

SEQ ID NO: 8868 - protein, 471 aa, unknown
  TnpB Polypeptide
MKIPYKLESKEQRELLLKYIKNYNSIYNQVFNFHLGNLKSGYNTQTKDVLKFFKTRNNILLDTWFQQSAFSNAKEILTRLKNEKCLDKKIVFGGKKLFLERCKNKIEKKDFKLKRLLPIYSVGQAFLNGNRKFKFINKNQVKFTISSNEQIILNLLISTKNKQYKKYIKKLIELQEQKRIPITYSLDLEYIYISFEHTTIKTPKKTRKIKNRIFAIDMNPNEIGYSIIDWKSSSEFKLIKAGSISLKELLDKERDKQVSSGSEIAKYFVNKRNYEIYEVGHILSKLANQYKCEIFTVESLSIQGSNLGKGRKLNRLVNNQWSRRKLTSIIRKQCDYFGIYYQETQPEYSSFIGNMLYRKLNLPDYCLASIEISRRAYEFYNQYITKTKKKEKNIVFLEKEKVNDLISQSLEELGISEAFSDLKDLYYKLKSRKCQCRVQIHSNMELREIFNRKALTRHRSFFVKSEKFKIF

SEQ ID NO: 8869 - protein, 410 aa, unknown
  TnpB Polypeptide
MLKAIKVRIYPNEEQASYINRQLGCCRFVYNSCLAYRKDSYEKENISISSNDALKYIVDLKVEYGWLKEVHSKVLQQSVRDMNQAYDNFFKLHRGYPKFQSKHDYNQSCRFPNDAFIGIRGNRIDLIKVLKDIHYKCSRIDEKYLNKNQDKVKSITLRKEPCGFYYLSILIDKPNKQVQQSQNTVGIDLGIKDFVITSNGEVFENQHFKKSQLDKLKRLQRQLSRKEKGSNNRNKARIRLAKLNKKINDKKLNYLHEVSNALINENQVICMEDLNVKGMVKNHKLAESISEMNFGEFRRMLEYKATWYGRVIVKVNRFYPSSKTCNHCGYIKKDLKLNDRQWTCPECGKVIDRDYNAACNIKDEGIRIYEKQIGLSSPEYTLVDYPTMDDKRSISLKSSDRLKQEKNEKS

SEQ ID NO: 8870 - protein, 372 aa, unknown
  TnpB Polypeptide
MNITLQTQLLPDPETAAKLKATVERFNEAASWLAGVAFERKIANKFVLQKLCYAELRERFGLPADTAIRCIAQVVEAYKRDKDKRPKFRKHASVPFSMGKNIGFKGPDRVSISTLKGRVVVPYVMGKYQADRFGWSKGQCDLVLRKDGKWFLLVTVDVPDGTKLPTTDFLGVDLGVIHIAVDSDGQKHTSEKIEAKRVQYATRRRTLGKATRGARRSKRRHCHKAIARSKKREARYKRDLNHQISKQLVAKAKDTGRGMGMENLKGIRGRTQFRKRQRARISGWSFFQLRSFVEYKATLAGVAFEGVDPRDSSRTCAECGYCNKANRKSQSDFECGMCGHKAHADVNSARILGFRASAAVNRRMGSEPRLAG

SEQ ID NO: 8871 - protein, 374 aa, unknown
  TnpB Polypeptide
MYKYRLYPTKKQQKMLNETLEECRWLYNETLAYRKNAWEQEQCHVSWYESKARIPFLKTERPSLKTVHSQVLQNVTERVELALQAFFRRVKSGETPGYPRFKGQGRYDSITYSQSGFSITRDDRVCLSKIGSVKMVYHRPIKGKIKTCTIQKSSTGKWYVCFSVECEPERLPQRPEQVGIDVGLKTFATLSNAEEITNPRFFRKEEKALARAQRKFSKTEKGTPELRKRRKIVARVHERVRWERENFTHQNSRQIVDRFGIICVEDLTVNRMLHNHCLAKSISDAAWSAFFSQLSCKAEEAGRQFIKVNPAYTSQTCSACGHRQKMPLSEREYHCPCCLLSMDRDLNASLNILALGLQSLGIQSLEAPAFTHGE

SEQ ID NO: 8872 - protein, 799 aa, Burkholderia sp.
MILVYRYRVKSLNGLLNKQSRAVNYVWNFCNDTQKHALKWNKKWPTGFDLNVLTTGSSKALGIHSGTINATCEQYAKSRSRNRRPYLRYRGMKSLGWVPPKGRDLKREGEAFRFAGNTFRVFNSRPLPEGKIKDGTNFAQDARGNWFLNIVIEMPDVQVRPVRSGVGIDLGLKDFATLSTGEKLPNDRFGRCAAEKLTKAQRARKHKRHIAKLHAKISNARADFQHKLALDLVRRFDYIAVGNVSAVKLARTRMAKSVYDASWSPFRNKLRYKAIAHGATFEEVDESGSTQSCSSCGSKDSTTRPKGIAGLRIREWACSDCGVEHDRDTNAALNILRCGRASPGVGILPLKEMRASKEEHSEVKRAAHAPVQRHGRNRDGRDDHLGHMRRRELRAAQPFRAEPRGNRGPHRRAHDGRRRPAGRETAERAERGEHGRVVMPRRRRPDMAPIGRAMLLVQQRIEIHLRLRADARSPACGTHRMHDARGVGLDDRPRMLAQREHQVGVLAPRAREALVEAADAFERRAPHEAVRGREFRVREPRRVAFVVGRARPQRHVDPAGRGRRRRLGQQRGRTVAQPGRIGNRVVVGECDQRAARAAPADVARTGRPLRVGRGHVADHRHVGHARAARIDDGARTAGRIVVHDDDLVGGRIEHLHAQRVEAAFEQIGPPVGRHDDRHDRRQVRVAHVHLGFSSRNGPITSASSGDVQKHSIASRGEHTIGSPRVLNDVLTSTGTPVSASNSVNSACSSGCWLSSTVCTRAVPSMWRTAGILSARSGTTSYTNSMNGARSGVPRPPLNQ

SEQ ID NO: 8873 - protein, 368 aa, unknown
  TnpB Polypeptide
MIKAHKIRLHLTSEQATYFARAAGTARFVFNWALAEWQTQYEAGSKPNAKALKKQFNAIRREQFPWSYEVTKCAIEGAFMDVAVAFKNFFEGRKAGRKTGYPKFKSKKGARQSFYLANDKFTVGDHWIIVPKLGRVNMAEKLRFSGKILSARISKRADWWFVSITVEMPDAVPENHCPSVGIDVGLNRLATLSDGRRYENQRPLRHLLKKLRRLNKELARRTRDGKNWHKTRSKLGRLHYRIACLRADLLHKLTTEVAKTSGLVAVEDLHVKGLVQNRCLSRSLSDAALGKLLDLLESKVPRAGGILVKVGRFYPSSQLCHCCGSRRADLTLDERTYVCANPDCGYVGDRDENASHNIIQEALRLVGP

SEQ ID NO: 8874 - protein, 166 aa, unknown
  TnpB Polypeptide
MKKTGKQLIEWCAENRADTIVLGCNRYWKQESHIGHVNNQKFVQIPFSYLKNVIAWLAEREGIRVVEQEESYTSKASFLDRDFIPVYGQEPEVFRFSGKRNPRGLYTSEEGIVTNADLQASANILRKAYPNAFIEGNEPEFRTIKVIRHPEYEQVRLNRTKQKATC

SEQ ID NO: 8875 - protein, 373 aa, Gallicola sp.
ILRAYKYRIYPNKQQIELINKTIGCSRFVYNYYLNKRIELYKTEQKSLSYKDCANDLKNLKLQFEWLKEVDSISLQQVLRDLDKAYQNFFRRVKNGEKELGFPKFKSKHNPKQSYRTQNVNDNINIYENRIKLPKLGLVKFKNSRNFDGKINSCTISKTPTGKYFVSVLVEEEIQKLPVNDNKIGFDLGISDYLITSDGEVINNPKTLKQYENNIIKLQRQLAKKKIGSNRYKKQSKKIAKVHEKIRNIRTDFLQKLSTQIIKENQLIISEDLNVKGMVQNHKLAKSISDVSWSAFCRMIEYKALWYDRLYHKIDRYYASSQTCNICGYKNTETKDLNVREWVCPQCNAHHDRDINAAINILNQGLRELDLAV

SEQ ID NO: 8876 - protein, 376 aa, unknown
  TnpB Polypeptide
MKTVLQIKLLPDETQHAELKKTMRVFNEACNFIAEVAFREQCASKFVLQRLVYDHVRNQFGLSAQLTIRAIAKVVEAYKRDKAKQCFFKPAGAVVYDQRILSFKGLEAASILTLQGRLIVALHMGAYQRVQFGRGHGQADLVLVDGVFYLLLVIETPTAPPMDPKGFIGIDLGIVQIASDSDGESFAGETVENTRRRYHELRKSLQARGSRSARRHLQRIRRNEARFRRNQNHVISKKLVEKAKDTGRGIKLEHLKKIRERTMVRKSDRAKHSGWSFFQLQSFIEYKAKREGVVVQYVDPRNTSRQCAACGHIDKANRKTQSRFQCVSCGHVANADQNAAINIAAKAHVNEPIVAHDDNNGGFECSRKPCPLERGN

SEQ ID NO: 8877 - protein, 518 aa, Caldilineaceae sp.
MQHPGTYQTRVSAYAGVSCKTGDAALSAYGELYGRVERTLFAEVVAGQSAVSLKRAYLKRYGISARMFNAVRVSLEGKLASVRAQQKLRLDSLDRRIARGVRQIRNAAGCGRWDQVHQKKRRWAALQSQRAALQADMEAGRVRLCFGSKRLWRKQHYLAENGYTCHQAWLKDWQEARSNEFFVVGSRDETAGCQLCVATVADDGSLTLRLRLPDCLASRHGKYLVIQGVRVAVGKAHVLAALESNAEYTHYRREHGEQAVRATTLGQSISYRFKRDAKGWRVFATTDMMEVPVVTDKRRGTIGVDLNADHLAVAETDASGNYLKAFRVPLVTYGKSRHQAEAIIGDAVARVVAYAREVGKPVVIERLDFRQKKAGLEGESRRYSRMLSSFSYGKIKACFLSRGYREGVEVCQVNPAFSSVIGRVKFMERYGLSVHQAAALVLARRLLSCSERIPRRRVAPVGAGVQVAFTVPVRTRVKHVWTYWGAVSGQLGPALAAQHRLGRRRGPPNPVQAARRVA

SEQ ID NO: 8878 - protein, 245 aa, unknown
  TnpB Polypeptide
LVEQAGRQSKFCIQRLVRICDSRLFDACCVDDVVEQRSLSRKQYESNNWEKQRCRVAEVHARMSNKKRDYKHKIAHFYTNEYDGVFVEDLNVQSMLESDGNARNKGEVGWRDFITILKHHGRKNGCHVVEVEPRGTTKECASCGVETEKPIWVRKHSCPSCGFESDRDWNAALNVKSRGLEKLGVVHSKETPVESATVLRTEGSDGPHENGVLVDAVDSFSVSASRVVESGSPCLKERTAQAVSE

SEQ ID NO: 8879 - protein, 381 aa, unknown
  TnpB Polypeptide
MLRTYNYRMYPNKTQTQALDAMLTAYRSLYNAALQERRDAWRRCRKSITFYDQCNQLKEIRNAGDELSRYSYSTAQWTLRRLDKAFKAFFRRIKSGDTPGFPRFKPARRFRSVTYTFGDGATLKGKRLRLVGIDPIKVKWFRPLPAEAKIKTAVVKREIDKWWVCFQVELPDTEPPAHAGPVVGIDLGLSALVTLSTGEKVEPPRHYRTAQAKLRRQQRRASRRKRHSQRQKKAYQLVAKTHQKIANQRKTFAHGLSRRLTETYSLIAVEDLNILGLAKSNLAKSVTDAAWSQLLMFLTYKAESAGGKVVKVDPRGTSQFCSGCGCRGPHKDLSVRVHRCPECGLVLDRDHNAALNILHRALNPSVAGGQALTYPTRESVA

SEQ ID NO: 8880 - protein, 414 aa, Limnoraphis sp.
LWYNYVSELNVKMLVFEAKLEGTNEQYQSLNEVIRTARFVRNACLRYWMDNRDIGRYELSAYCAVLAADENFPWVDKLNSMARQASAERAWSAIARFFDNCKKNKPGKKGYPRFKKEQTHGSVEYKTSGWKLSADRRYITFTDGFKAGTFKLWGTRDLHFYQLKQFKRVRVVRRADGYYTQFCIDQERVERRKPTGKTIGIDVGLNHFYTDSNGETVANPRHLRKSEKALKRLQRRFSKTKKGSKNRAKLRNQLARKHLKVSRQRKDFAVKTARCVVKFNDLVVYEDLQVRNMLKNHRLAKSISDASWSLFRQWVEYFGKVFGVVTIAVPPHYTSQNCSNCGAVVKKSLSTRTHICPDCGHTQDRDQNAARNILEKGLSTAGHVGTNASGDIDLCVGGEIPPSKSSRGKRKPKK

SEQ ID NO: 8881 - protein, 345 aa, unknown
  TnpB Polypeptide
MREKEDYKKLGKRAGSQTPQQLLRMVEATWEGYKAAKKDWRINPEKYLGKPKIPGYLPRNGRFIVVWSKIQVRIREGKVRVVERLMKEGFPAISTEKLPVTETNHAIIRLKPFFDKFMLELVYEKELPVIKVKDEQKVLGLDLGVNNLVATSDGLLIKGGIAKSINQFFNKQKAKIQAQLSKQGHWTSEKKQQLMRWRHDKLHDLFHKASNAIIQHCLENNISSLVIGRNKNWKQNIHLGRRNNQNFTSIPLHKLIQMLQYKAEEQGIEVLFVTEEYTSQTCSCCGFCLRSNRKYRGLFVCKKCKLVINADVNAARNIAKKAFPESPLGIGDSGCVAQPTKLIAL

SEQ ID NO: 8882 - protein, 301 aa, Clostridiaceae sp.
MHSCICRQPTRTSFGDSSAGFPKFKSKKNPVRSYTTNCVNGNITLQNAKLKLPKAGWIRIKQHRSIDDRYILKGATVSQEADDKYYVSLLYAAQEPEHEIRPVKTAIGLDFSMSELYADSNGAHADYPHFFRKSQEKLAREQRRLSHCEKGSGRYMKQKKKIARLHAHIARQRKDYLHKESRKITNFYDLVCIESLNMKEMSQDSRFGTSVHDNGWGMFTDFLSYKLERAGKKLVRIDKWYPSSKICSCCGKLKKELKLEDRIYSCTCGNQMNRDENAAINICREGLRISGVELETERKIS

SEQ ID NO: 8883 - protein, 380 aa, Lactobacillus sp.
  misc_feature (310)..(371): Xaa can be any naturally occurring amino acid
LDQSVVIKAQLLNIGNETARAFSITMLKYRDACNYISQYIFDHNFVLKQSKLNQALYHDLRDKFNLKSQMAQSAIKTVIARYKTVRTQLFQHPFRYDTGKKDSRGRSIWAQIYRNLTWLWQPIRFKRPQLDLQRSRDWSYKAANHQLSLNTLQGRKVVNLVCKGFDKYLDQTKWKFGSLKLLKLRNKWYVHLSATASLPEYQVSQAEHVVGIDRGLRFLTACYDEKGKTLLYSGQQILRKRRKYKRLRAQLQAKGTKSAKRRLKKIGQRENRWMSDVNHRLTKTLIDHYGSNTIYALEDLTDVRFATEKXXXXXXXXXXXXXXXXXXXXXXXXXXXXXXXXXXXXXXXXXXXXXXXXXXXXXXXXXXXXXXKGVTAICLR

SEQ ID NO: 8884 - protein, 387 aa, unknown
  TnpB Polypeptide
MFRATKVRIYPTPDQAELLEKQFGAVRFAYNKALHIRSHWYRCHGVSLNNAKHIQPLLPVAKKSRRYSWLKQADSNALQVSLQNLDRAFRNFFEKRAKYPKFKRKHGPQSSYHCSSLKITADTIKIPKIPAIRANVHREIIGRVKSITITRNAAGKYYASILADDGQEAAAKPACITTVAGYDLGLSHYLIGNDGGRVANPRHLVNAYRRLRLDSKALSRKKPGSANRRKARIRLAAQHERVANARADFQHKLSRRIIDENQAVIVETLKSANMMKNRRLARHIGDAAWSGFVAKLAYKAESAGVYLVKLDQWFASSKTCHCCGHKMPEMPLKVRKWTCPGCNAEHDRDINAAINIQHKGITELMAAGLVVKAHGGLRKSGSVPVAA

SEQ ID NO: 8885 - protein, 359 aa, Virgibacillus sp.
MMSQTITVKIKLIPTKEQASILSEMSKTYISTINDLVSDMVKEKKSTKKSSKHMDVPLPSAVKNQAIKDAKSVFKKVKKSKYEVVPVLKKPMCIWNNQNYSFDLTHISMPIVVNGKVKKTPIRALLVDKDNRSIDLLKHKLGTLRITKKSNKWIAQISVTVPTTQGTGLKVMGVDLGLKVPAVAVTDDEKVRFFGNGRQNKYKRRKFRSERKTLGKKKKLDAIRSSKDKEQRWMKEQDHKVSRAIINFAKENKISVIRLEKLANIRQTTRTSRKNEENLHTWSFYRLAQFMEYKANLAGIRVEYVNPAYTSQICPKCSEKNKVQDRKYKCKCGFEKHRDLVGAMNIRSAPVVDGNSQSA

SEQ ID NO: 8886 - protein, 441 aa, unknown
  TnpB Polypeptide
LHNRLDNIRKDVIAATEGSVFAVSVLLFHAVLTEQSREEMCDTLIRIRDSYKDKNKIQHYNNLCDTVKTMDEKKFRDSISEVTMFYHIISDEYRIPAVEKAHVKMDTRLCCLERAEDVKTSHVLAVTIPGSKGKRLEIPVQASRDALRRMAQYKVSGSMRYTITAGGFLKLTCSFEKKTQTSAEHSKVIGVDVGITDAFHTSEGQAIGSFQSAIDFYQTEVEASFGKLSVLRNRKQQLRWFLKKHKDVLPEDVIRNLRKRMDHLEKDIRQSKAPYRKKRHYHQLIEQTIRSAVDTYIKSLHGDKTILTAMELLDIKEFNKSRKVNGMLSVFSRGKLTEKLMEELSWHGFPFVQVEPAYTSQTCLVCGCLDKANRNGKVFHCTCCGHTDDADHVGSINIKARAEDKEIHAIYKKYPYSKKKRQAAIQTLQAERNTEWKKVTA

SEQ ID NO: 8887 - protein, 451 aa, unknown
  TnpB Polypeptide
VVRTYRYRLYPNKTHQAALGNVLFAACALYNHALAYRRKRWNESRRGVWYNEQAGMWRDWRNEDPADNPLRLLNMSAGQQVLRRLDSAYREFVKGKRGRPRFRRLDHFNSVAFKPGDGAALKGGRLYLQNVGSVRVNWHREVPEGELKHIIIVRKPSGWYVCLQVEMQKNIPAHSLNPLVGVDVGIAHALVLSDGTVFDNPRPLQGSLPALRRLQRSVARKKRGGSNRKRAVLKVARLQEHIANQRRDFWHKVTRGLVTTYGTVVLENLSLSFMLQNRALSQASHDTGLGMFRELLDYKAVEAGVEVIAVYPRNTSQVCSACGSIVPKVVCVRVHSCPDCGLVLDRDINAARNILRLGRSRWGVTWPVAEGPAPAGGERAPRCSPAIAGRVRHLVAGVAELRLLVDPLERGPAGNQRDEADPGQGCQGETAATVHRTHRVSGSVGIRSSGP

SEQ ID NO: 8888 - protein, 409 aa, unknown
  TnpB Polypeptide
MQIRTYVYRLRPTRAQHAALETVLTDQRRLYNAALEERIGAWRNDKVSIGFDDQTKSLTQIRGFDASYAGVPYNISKWTLKRLDDSMKAFFRRVRSGQKPGFPRFRSVARWSSFGFHQKDGLRLEGDRLLFSGGITGGIHVKMHRPLPDGVNIKSAIFTKQAGIWRVAISCEVPLSAANDDSTAIGIDAGVAHLATDSDGRHYRNVREGGDRAKRIRRAQRALARCRRASRGRGKVLARLKREQRSLRNARNTHLHDVANAIVRSASTIFVEDLKLRNMTRSARGSVAAPGANVRQKAGLNRALADAAPGRLIQMIAYKAESAGGMMIRVDPRNTSRTCSSCGKVDAAQLSVTRYRCSCGLDLQRDHNAAINIRARGIIALHEAARGLGDANVTGCGERCPMNADPLAA

SEQ ID NO: 8889 - protein, 382 aa, Paenibacillus sp.
VNAILRHKAYKFRVYPNQEQEILIAKTMGCSRFVYNHFLNLWNEEYSKSGKGLSYHACSAMLPKMKKDEATHWLKEADSIAIQSSLQHLADSFSRFFKKQNHKPQFKSKKNPLQSYTTKNVNNSIELKEKYLKLPKLGLVKFAKSQESSGRILSATIRKNASGKFFVSILCEEEIDKLSKTVSAIGIDLGITDFAIFSDGRKIDNHKFTSKMEKKLKREQRKLSRRALIAKKKGILLFEAKNYQNQKREVASLHEKVLNQRTDYLNKLSTEIIKNHDIICIEDLNTKGMLRNHKLAKSISDVSWSSFVTKLQYKADWYGREIIKVDQCFPSSQICSECGHKDGKKSLEIRDWTCSICRTHHDRDINASINILTEGLRLHALA

SEQ ID NO: 8890 - protein, 398 aa, Nostoc sp.
MINAAGVIYNHCIAVHKRYYRMWGKHLRSVKLQSHIAKLRKRNPFWQTVGSQAVQDICQRIDKAYQLFFKHNKKGVRTPGFKKVKKYKSFTLKQAGYKFLNGNRVKIGNRVYQFWKSREIEGTVKTLTIKRTPLGELFMVVVVDEGNKPEVEVKTGKIAGFDFGLKTFLTLWVREFAIDGNRQDGNSLTCSDGTKIESPQFFKQSLNAIKIASRQHSQKLKGSSNRERARKNLVRRYEDISHRRHDWFWKLAHHLTDKFDVLCFETLNLKGMQRLWVRKISDLAFGEFLQILEWVAKKKKKRVVFIDQWYPSTKTCSCCGHVLESLDLSTREWRCPSCQSVNGRDKNASQVICAVGASTVGLGDVSRAGACYRCLSLESPPLKGGEYVNESTAASQKC

SEQ ID NO: 8891 - protein, 407 aa, Nostoc sp.
MRLVERHIIKIGHQFYKEIDDLAWRSKNLYNYANYLVRQSFINEGKYLNNAAIFHLVKQHESYMALPRKISNQVLMILHRNWRSFFEAQIAYNQNPSKFRGRPKLPKYKDKTKGRNLVIYELGAISKKALKKGLIKLSQTSIEFPTSVSDVLEARIIPKCGQYVIEIVYNKEVTPEELNPDLVAGIDIGLDNLAALTSNKLGFKPVLVNGRPLKSINQQYNKVKASLQSQLKGNAKTSKRINALACKRNNQVDNYLHNASRWIINHLVTQGIGTLVIGKNDQWKQEINLGSTTNQNFVSIPHARFIEQLRYKAELVGISVLINEESYTSASSFLDSDPIPVYKKGQKHIFSGKRIKRAWYKSADGKLIHADINASLNITRKVIPAAFGLGIAGIAVCPFRVTPGKVA

SEQ ID NO: 8892 - protein, 418 aa, Nostoc sp.
MLTINYTYRIYPNTDQSALMLEWLETSRKVYNRALRELKDWINSRKCMIDRCSIEREYIIPANTPFPSYHRQQNDLPKLKESWTELKNVHSQVLQTTIRRLHDTWESFQKRGFGFPRFKKFGQFKSFVFPQFLDNPINGFEITLPKIGSIPISLSRPIPQGFSVKQVRVLSKARGTQWYVVVSIQSDVSVPDVPVHGRAIGIDLGLERFVTVSDGSFFERPKFLKSQHRQLKLLQRRAARKQKRSANWEKAQIKVARLHHHIADKRKDFHLKTAHKLCDQAETIFAEDLNTVGLNRGMLRKECVDASFGAFLDLLKWVCWKRGVFFMRVNPNGTSQTCPRCQATVTKPLSEREHICPECGYRTHRDHAAAEMVLLRGLNVVPVDNRGMETVCAGELAGVEIPSQVPKTLLGATRKPKK

SEQ ID NO: 8893 - protein, 371 aa, Actinomadura sp.
VQLRYQFRLYPTRGQQQNLARAFGCSRVVYNDALRARQDAREQGLPFPKAAELSAAMTEAKKTPERAWLAEVSAVVLQQSLRDLEAAYRNFFDGLAGKRPRMGAPRFKSRKDARQSIRFTANARWQITEGGPLALPKVGEVKVKWSRRLPSAPSTVTVIKDAAGRFFASFVVETGQAQDPPGTTAEVGIDLGLEHFAVTSDGRKITSPRFLRRAEKKLRKAPKALSRKQKGSNNRGKARLSLARAHARVGDARREFHHQLSTTLVRDNQAVYVEDLCVKGLARTRFAASVHDAGWSAFVSMLEYKTARYGRTFARVDRAFPSSQICSHCGHRDGPKPLHVREWACGRCGTGHDRDVNAARNILDEGRRITT

SEQ ID NO: 8894 - protein, 417 aa, unknown
  TnpB Polypeptide
VIQQMMLTLKGKVVASGEATAILLDAMLCATKVYNGLIWHLRDELERTGKSKATRKNLNAVLKTLPRAKGYYSLSAQATRDEVIQAYNSFFALRKAGRTQHQMPGFRRKTEYSPLRYYEGFGFTLEGDQLNLSLGTGRQDGVKSVSVALQMRQDVAYQRIINVLITYDKEFGLCAHLVVEVKARQPLGNRKVAVDLGETQAITAIFEDGASLLYSGRLIKSIRRYWNKVRARVKPPTAENKRKSRRFRQIERKESRQVQHLLHILTADFARRCWLAGVDTIAIGDLTGIRERIDYSDELNQRLHAWPFRKIVDMITYKAGLYGIQVVEVSEAYTSRACHACGEVRKSNRKHRGLYVCACGWHVHADVNGAANIFQNAYKVSPLIERSSGRVARPVVLPIRLGWHTVHETKSKVALAA

SEQ ID NO: 8895 - protein, 388 aa, unknown
  TnpB Polypeptide
MTAGYEGFLTLSIGVRVSPEPVVIELLHRYRYALNYAINKILDNNLRTLKQVHNFLYKDLVERFNLPSRIAIDCYRDALTNVNAWRNNPKRGKRPVVKKLSMLLHPELSYRIKDGYIEIIGGLRLRIIGWDRRYDEYKNREARLVYKKDMMILWISKKIPKPKKYVPIDVIGVDINEQKIVYGDEIINIEKDTAIDKAYRYIRLAEDLQRRYSSSRYLAWRRRKRILNRIRSYHEKAKNILIDWTKKISLEIVRLAKELRYGVSREDLTNLIRSLRELPKDHKRKLIIMGYSRFERWIDWQAEKHGVPYVKVDPNGTSSECPKCDYKGLEEVGYRRLRCPRCGFEADRDVIGKLNVRKRGLRKLGIIPRGGALTPLTAPQMTDVNPNR

SEQ ID NO: 8896 - protein, 411 aa, unknown
  TnpB Polypeptide
MRITKTIKIRIGDLTNHKKDVVDSLFYKNLKGLNHCIDVIDKKKIYSKTKLHKEVYQDLRKLDLPACLCHSIREKSIEIMKSFKSKKQKKEKPELKISRVRYDNQVTKLLKTTTKTYPYFVSLLYNKSQQGKSNRIKLPLLVSSEYQKKALLGLDKKEYSLCSSELVEKKGKYYFHLTYSKEIELPVPDETFAPIGIDIGINNLAVSVASSSTEFFSGKRARWKRKFFRKQRQNLQQNLALQELKRQKNREWRWITSINHNISNKIVEQAKTETKPVIVLEDLKYIRDNSMKLNKTTRTMVNSWAFRQLQNMIIYKANWEEIPVEFVDAKYSSQLCNKCHHLGNREKHTFKCSNCHYECNADYNAGRNLQHFFRAKCLGEQATINLASDIGSPEPQAEKDTSVRNLNKLNR

SEQ ID NO: 8897 - protein, 256 aa, Cyanothece sp.
LGTFRLKEAIPYNCVSQTFTISRSAGKWYISFAVSACKRPEMKHCHKKVGIDLGIKTFATLSDGNTLEAPSSIKKAKTKLGKIQWRNRNKVHSNRRSGISASKNAVKYYQKLRKKHKRITNIREDFLQKTTTLLAKTYQHILIEDLNIKGMMANHKLSNALSNLGLYRFRELLSYKQECFGFLLTIVDRWFPSSKTCSVCGNIQDMPLFERVYYCQNCGQVMDRDLNASKNIEGWIKNADGLSVNACGQEGAVSLG

SEQ ID NO: 8898 - protein, 336 aa, unknown
  TnpB Polypeptide
MQRKPTLKTYKYRIYPTDAQVVLFAKTFGCCRLVWNKMLEEKLRAYEKKERVPLINPAKYKLDFPFLKEVDRFVLIAVRNQIENAFRNHFKNPEKFKLPKFRKKKDKQSYTIYNVRKLLRVDFKRSLLFLPKIEEGVKIELHRRFDGKIKSVTIIRTNDGKYYASILVETQDTRNKVVKPKSKLCWICLGLERFATVTNDFGSYEVEHPKYLPKAKERLKRLQRSLSRKQKGSKNSEKTRLRLARQYAYISNARSDFLHKLSKAIIDENQIVMVEDINMKGVLKSRLAKSVADSGWSKFLKYLKYKSEWYGRTFTQVDRFFPSSKLCHRCGYKKKT

SEQ ID NO: 8899 - protein, 348 aa, Thermoprotei sp.
MARRRRENSSEEKVTIKGRLVIEDRFALAKLLYTGRLFRDAVEMAYRLMKKGLKHEEATRRVTKFIGNAHYAYSATKRAMAYLDQERLNFKKPQLYSVGKGCEKGNRNIRLVSVDKVLIKIPHVDGRHEWLEAKVKFHSRHIPLIEELIQRANNGMPYSVSVVFNKGKYYLHLHIPLELYAKHTTKVKVSSKAHLIAGFDINPDRICMVIVDTNGNIRDVKTKHFPEVTLVGFPKNKAKDLRLKALSELINYACYHNVKYFVFEKIRKIPKKKMKTKSASRKVSRFAYAELLQHAKVMVRKKKGKFVQVNPAFTSVDAIPLSRKLGLDIHVSSAYLLAIRCLKSINAY

SEQ ID NO: 8900 - protein, 309 aa, unknown
  TnpB Polypeptide
MEQLKAYKFRIYPSKEQETFFAKTFGCVRKVYNLMLNDRIKSYQDTKNGSSNKVKFPTPAQYKKEYPFLKEVDSLALANAQLNLDKAYKNFFQNQSVGFPKFKSKKNPVQSYTTNNQNGTVALVDSKYIKLPKLKSLVRIKLHRQPQGVIKSATISRHSSGKYYVSLLCKEEIDRLPKTGSAIGIDLGIADFAILSDGQKIDNNKFTTMMEKKLKREQRKLSRRALIAKNRNVSLFEAKNYQKQKKKVARLYEKVANQRNDFLNKLSTDIIKNHDIICIEDLNTKGMLRNHKLAKSISDVSWSSFVTKL

SEQ ID NO: 8901 - protein, 389 aa, unknown
  TnpB Polypeptide
MSLLAYKFRVYPSRKQKIRLFSSFITCKQIYNEILSLNKDAYKFGNVTLNKFDFNKYLAGKFEQVHSQTKQNVSDRVHKAFANFFRRVKDKSCKEKGFPRYKSRVNSITYPQSGFKFISSKHIKVSKIGNLPIILHRVPKGNIKTLTVKQTKSGKWFATFCCEVPETKIVHASPNSKVGIDVGLENFATLSNGEFVANPHYLVKNENRLKLLHRRVSRKVKGSANRRKSRFRLSRLYEKVANQRIDFAFKLANIISKAHSFIAVEDLNIKNMVRNHHLAKHISDASWSAFIKCLESKAVTSGSKLVKVNPRDTSKTCSKCGNIQNMPLAMREFVCASCGFACHRDLNSAYNILVRADCPELNAFGHDVRPSLRKAVVDELGTTFGTTSS

SEQ ID NO: 8902 - protein, 268 aa, Okeania sp.
MKSFKTKLKLNNQQKTILAKHAGVARHAYNWGLATCIKEYEETKKRPSAITLHKRLVAEVKSINPWYYEVSKCAPQQALRDLERAFKNFLTIPERGFPVFKKKGRKDSFYLEGSIKILQGNYIQLPRIGIVKTYEILPSVQVKNVRIASFRGASLTKKADSWHISFKYDIEPVPTEKIGETIGVDIGINTLATCSDGSKFANVKAYRKAKKRLVRHQRAVSKKVIGFLRNVTQTKNRRKAVKKLAKLHKKADATPRRRQLACGTRTKQ

SEQ ID NO: 8903 - protein, 372 aa, Ruminococcaceae sp.
  misc_feature (313)..(347): Xaa can be any naturally occurring amino acid
MLKAYKYRIYPNNEQKIQIAKTFGCCRFVYNQTLAYRKEVYEKEKKSVSKTDCNNYCNRQLKKEYEWLKEVDKFALTNAIYNMDAAYQKFFKEHAGYPKFKSKHDNHKSYTTNFTNGNITVEFGCNRVKLPKLKGVKAKLHRNFIGQIKSATISQVPSGKYYVSILVETEHVELPHINQNTGIDLGIKELCITSAGKKYENPKIIRKYEKKLVKLQRQLAHKEKRSQNYYKTKKKIALCHEKITNTRKDCLHKMSHEIISENQVIVSEDLQIKNMVKNHRLAKSISDVSWYELTRQLEYKAKWNGRKYVKIDXXXXXXXXXXXXXXXXXXXXXXXXXXXXXXXXXXXLWIPKYRDKKSISKGMDMSCLWNKS

SEQ ID NO: 8904 - protein, 481 aa, unknown
  TnpB Polypeptide
MTKKKSMRVDFVKSCITYNKLNTIAKIAISGIENICKRLDLGSIYDVINGRFAIPSKKLSGKKSSSKRVAKCDTVFVAYRFCGHPTEEQASDLNQNIGASRFMWNRMLSDYKLMWKLYGISIPMTPADYKDVSGLEWLKDRDSMALANVQINLEKARSDYFAGKRGAPKRKKKHQCKNSYTTSCIRNNIRIEDDRLRLPKINGLIKLSMHRPIKPNGTLKSVTVTHEPDGKWYFSILIEYPAEEAELSDRLQKLFSSSDINVISGIGLDMSVPFLYIDSSGNKPSYELNGKEIKFIKQYRKLEKRIAKEQRRRSHMVKDSNNYNKQSEKIARLHAKAKHRREDFLHQIAVRLARTYDVIAIEDLDIKAMKNALSLGKSVSDVGWGRFTAILEELCLKYGKILVRASRWYPSSKTCHHCGYKNDDLRLSDRVYVCPVCGNIMPRDKNAAINILEEGLRTIKENMIRPSVEGYSKPSLITTIA

SEQ ID NO: 8905 - protein, 384 aa, Glycomyces sp.
VHLRYSYRVYPTGPQRRALARTFGCVRVVYNDAVAARQAAHRQGLPYPSTAALDRALITAAKRTPERAWLGEVSTVPLQQALRDCHAAYRHFFDSLQGKRAGSRVGPPRFKRRAGTQTARYTRRGFSLKPNGRLYVAKVGALKVAWSRDLPAAPSSVTVTKTATGRYYASFVVAVDDGADLAEPIPDEDAETGIDLGLKSFAVLRGGKTIENPKFFRKLERKLKKAQRELSRKQRSSNNRAKARLKVAKIHEKIKDTRSDWVNKQVHTLVSEHQALYVEDLNVRGLGRGRAAKSVQDASFGMFLTRLESKAQRAGRTFVKVDRYFPSTRLCSACGVLTGPQGLEGLQVREWVCGCGAVHDRDANAEINIRREGRRLVAAGQADT

SEQ ID NO: 8906 - protein, 380 aa, unknown
  TnpB Polypeptide
LRKSFKYRIYPNKEQVGALDSQLREACDLYNCALEERIGAYRICRKSINYYDQANQLKPMRAEGLVGVANFSCCQDILRRLDKTFKAFFGRIKRGERAGFPRFKSNRRYRSLTFPSYGDGCRLDGRLVRIQGVGEIKAKLHRPVDGKIKTVTIKRDAGRWFVVFSVECAAAPMPASDRAIGLDVGLTAFATLSDGTEIDNPRLYRHAQRRLRVAQRRVARRTNKRSNRRRKAVALLQRHHAHIQNQRSDFQHKASRTLVNTYGVIVAEDLNIKGLASGMLAKSVNDAGWGYFLGILAYKAESAGREFIKVDPRGTSQTCTCGQRVPKTLSERWHLCPSCGLSQSRDHVSAQVILRLGLSLRSLTGPEVRASVLREAVCFS

SEQ ID NO: 8907 - protein, 397 aa, unknown
  TnpB Polypeptide
MKVILKTYKYRLLPNKEQEEILARYFGTVRFVYNHFLAERKDQYDKTGKSDNYYAQAKTLTNLKKQEEYSWIKEVNSQTLQQSLRHLETAYTNFFRGNARFPRFKAKKNGGSFNIPQFCSVADGRIFIPKFKNGIKIVEHRPFTGKVKNMTISITPSGKYFVSILSEVEYEPLQKTNAKVGIDLGIKDLVITSDGVKYSSNKFIKHYSKELATMQKHLSRKKKGSNSWDKQRIKVARIQERIHNCRMDKLHKVSTDLIRKYDVICCEDLNVKGMQKNHHLAQSIADASWGTFLEILNYKAAMNDKQVVKIGRYYPSSKTCHHCGYVKEDLTLKDREWICPKCGNVIDRDLNAAINILNEGLKNISAGTVDYTDGADVIPNIRLSAMKSEAHKSLVCG

SEQ ID NO: 8908 - protein, 403 aa, unknown
  TnpB Polypeptide
MYLVEQHIISVNDKRYKDLDRICFLSKNLYNAALYEIKQEFLRTGKWIRYTSLDRKLKDEDNFDYRAISAASSQQILMSLDKSLKSYFFAIKAWKRDNKKFTGCPKFPKYKHKTKGRNVFPYSYAQFKHRDNYIFFPKKEGLSPLKTNCKEGSVKQVRFVPKPDCYIIEVVYESKVKEQLPDNNRVMSIDLGVNNLASIVTNVSKKAILIDGRKLKSINQYYNKKKSKIQQQLKKTNGKENSRRLMSLTRKRNNKVKDYLHKASKEIINICLEDNITTLIVGHNDGWKQNTNLGKRNNQNFVSIPFETFISMLRYKSERQGLRFVEVNESHTSKCSSFDLEPVEHHDPYVGKRVKRGLFKTKDGILLNADINGSYNIMRKVKGDAAMPPYTGFGYNPVKKFIN

SEQ ID NO: 8909 - protein, 373 aa, Lysinibacillus sp.
MILAKKVRLYPSESQEQKLWQSVGTARFIYNWTLAKQEENHKNGGKFIADAVLRKELTQLKKKELSWLNEVSNNVAKQAVKDACDAYRKFFKGLANKPVFKSRKKSKKSFYNDNVKLKVKDGNLVLIEKVGWIRTNEPLPLGVKYNNPRVSYDNKYWYLSVGLEQEKIHEELTDEVIGIDLGVKELAVCSNGLIFKNINKTKEIRKTEKKLRRLQRRVSRKYEINKEGNRFVKTCNIIKIEKKIQHLHRRLKNIRDNHVHQATNSIVKTKPCKVVMEDLNVKGMMKNRHLSKAVAKQKLQEFIRQMAYKCEKYGIEFVQVGRFYPSSKTCSNCGTIKKDFKLSDRVYKCECGLEIDRDLNAAINLVNYGKLIV

SEQ ID NO: 8910 - protein, 242 aa, unknown
  TnpB Polypeptide
MLLVYRYRIKSLTGLLNSQARACNFVWNFCNDTQLQALKWNKRWPSGFDLNRLTAGSSKDLALHAGTINAVCEQYAKSRRHRNRPCLRWRGRRSLGWVPLKGRDLKREGQAFRFAGNTFRVFHSRPLPEGKIKDGTSFSCDARGHWFLNIVVEVAAPEPRPVRCGIGIDLGLKDFAALSTGDKIENPRYLRQLADKLAIAQRARKRRQATTFTPVSPMPAVTFTINARLSSFESSIILRSAT

SEQ ID NO: 8911 - protein, 421 aa, unknown
  TnpB Polypeptide
MELGPLRAGLHLSFFKQGVLLSLGDIKFKDWSLYPWGMLARKAIKQNYRPNQELEGVFDAFRDMVNHCIQVGLEKEITSRFKLSNEVYGELHNGLHTWYILSAVEKAAAILKNYRKSMRKNPHTKRPHVSKPFLSIGNQAYTIVDGRLRLPIKPKQFVYIPLNGHTLDVLSEPSLKLGSVTLLASTLSIAFSKEIAEMEPTGYIGLDRNLDNMTACSTEGKVERYDLSECTTVKSTYRAVKSRFRRNDRRLKKKVFNKYGLLERNRVVQRLHGVSKGIVAEAWSKGYGIVTEKLTGIRKLYRRGNGQGKNYRARMNSWSYYELQRQIEYKARWVGLKVIYVSAGKTSSTCAICGLKILECAGRKIYCPNCGLADRDVNAAKNILARGVRFAPIAPAGEAMVADPIRKVDAGELILGRGPKT

SEQ ID NO: 8912 - protein, 361 aa, unknown
  TnpB Polypeptide
MTNECVYIGLRENITSLKSLSLKAYHSLSGYAVPSCYKLCAISRAVGILRNYRRAIKKGQSPKVPYVRRLVLATCYGFKVEGDRLRLPIKAYDYDYIDLNQHTLEVLSGPDLTTRSVCMTERTISITFSKETAQIEPVGLIGLDRNLDNVTAASSDGKIEVIDLSKATRIKVTYKDVKSHFKRDDVRIRRKVYGKYGRKEKNKVSQILHLVSKSIASQAKEKKFGIVMEELTGIRKLYRKGNGQGANYRFKLNSWSYAELQRQIDYKARWEGLPVIYVRPQKTSSTCAICGSKVTECAERKVWCPECRTLVDRDENAAKNVLARGLRFGPIALPVEAVKGNEPMAPILGVDGGELTQRGVK

SEQ ID NO: 8913 - protein, 191 aa, Ectothiorhodospira sp.
MKLTLQIQLLPTPEHAQALEATMGAFNAAADWLAGEAFARKTANKIALQKLYYHALRARFGLSAQMAVRCIAQMCEAYKRDKTKRPRFGEFASIPYDQRLMSFKGVDRVSLLTLTGRIVVPFVMGQYQKERFTNAKGQCDLVRRKDGKWFLLVTVDLPDGTQMPTTDFIGVDLSVINLATDRDGDRGTTVL

SEQ ID NO: 8914 - protein, 507 aa, unknown
  TnpB Polypeptide
MNETRTFTLRARPHLDEKQHEVLNECGKLLSKVTRALFASLCKGISMNELKRQFIVQFGITARHFNACRIQLEGMIKSKKTSLPMQIASLDWRIQNLEKKLKKQKNPFSVHQKKRKLLHLKRKQDQLEADRKSSVKRLCFGSKKLFHKQFYLEENGYKNHQAWRATWQDARNNEFFLVGSKDETAGNVNCVATLQQDQTFTLRMRLPNALKEFGTYLYLQDVSFAYGHDYLMEALRQKQAISFRFVRDEKGWEVFASIALKEPQWISDERHGVIGVDCNTDHLAIVETDARGNPIAKHTLPLNLYGKNKKQRAAIIGDTCAELVELARQKQKPIIIEDLDFTNKKTALHSAAGARTLHLFAYSAIRETLVSRAWRNAIKVHTVNSAYTSVIGQVKFKDRYGLSTHHAAALCIARRFFGFSEQPTRCLIKFTDNKGVHVAFPLPERNRGKHVWTLWSKVAKEIQAVHEARFRATKRRSKVPPLPNHKIYTLESLGEIPKCEPLAELLG

SEQ ID NO: 8915 - protein, 422 aa, unknown
  TnpB Polypeptide
MITIKKNHSQDIDKRLQKQFSSVVRFAFSRRKKDGVTKASELEKIVKNKMKGIDALDASWIKAAVKKSLELDADKKIIFGGKVEFFKRKFGKKNSFDRSIPIDMRGSSIDRGNRKASLDIENSLLIFKPKNGTKIEIPLHLSKNERKMLSELQENCKKKAGFFNLKINASNVWLSFDETKLESFKRQFSFVKGRVLALDMNPNCIGVSICDFRNKTSIIHKEVISLFKLNECSTNKRKHELLELQKIIISLARQFHVQTVAFEILSMKSKNHGIGKNYNKLLNSWNRNIIQNSLRKHLALQGIPLVEVRAEYSSFMGAMKFSQEFDPIAASMEIGFRCHLKERGLNEYDSIKEKCSGLVPTRWKNMVQDDNWTFIDLYRSIKEKKLKDSYRFLFKPDEATAKFGWSCLRSKSCKSMVDLYMV

SEQ ID NO: 8916 - protein, 427 aa, unknown
  TnpB Polypeptide
MNYNYRYRLYPSDALEDQLAWTVDTCRQVYNHFLHRLNRSDDTSAYTEQKRLPDLKKWWNDLKNVHSKVLQKVVQRLYDNLSTLRGRKENGYRVGTLKWKAPGEYRSFTYSQSGFKLKNTSGRTRLWLSKLGEIPLTFHRDLPDDAEIKTVTVKQEPTGKWYAILGVETPDDPPEKPENPEQCVGIDVGICKYAHDTDGTAVESPDLSVERKRLERAQRDLSRKQHRSANWEKQRRVVAERHADLKRKRRDFLHKLSNYYATEYELVAVEDLDAKGLVELPGNSRNRAGAAWGTFLRMLEYKCEREGTHLVAVDPKDTTKECASCGVKTDKPLWVRKHSCPACGFEADRDANAAWNILSRGIKKRLGAGRSESTPVETALPTDTDSVSAKCVMEAGSPITRSRRLLVSSQNSESSDDTLKREPSGER

SEQ ID NO: 8917 - protein, 412 aa, Prochloron sp.
VEKSWFSTKLQVVNSPSLPPTFCPSFTSSLAGSTDSESTVTKSRKILIYLSAEQRLLVRKWFGVSRYVFNKTVELLRDGEIKANWFAVRPVIMDALSEWCNEVPYQIKSKAVKDACTAVREAKRKYKKTGQIQRVKFRSRKDLIQSCYIPKSAITAKGIYHTKLGKLAYSQKLPGQVCDSRLMSNNGNYYLCAAHKVAKSPAENQGRVVALDPGVRTFVTFFSETSIGKIGHSDFSHIQRLCQHLDNLKSKISKANGGQKRRMRKAARRMVIKIQNLISELHHKTARFLVDNFDVILLPTFETAQMSKKGSRRIRSKTVRNMLNFAHYRFKEFLKHKAKETGKIVVDVCEAYTSKTVSWTGELVNIGGSKIIKSKVDGRTMDRDINGARGIFLRALGDTPWLRNQLALVSQC

SEQ ID NO: 8918 - protein, 317 aa, Deinococcus sp.
MFGGRVYAPDRAALQDQTAIHDERLRMGHLSLTAELHRLPLTEHRLLIAGSKNYEQFENQDVLANGLLAPMSLLQRRAWVTDLVTTTRQGRQPTVTDLPAEPGSWLRAETRLVDLDGLWFVSLAFEMPRPPRSQGGCVLGIDVGLSPLAVAAGVNTVLSTAPLHLLTGAGLRALERQIAGLRPGMQHEVERRYERLISGAARQALEVFTDQIIARASAVSVEKLTLSGFESDFVERSRERAVADWLQSWLPQRLYAAGIPLRRVAPHHTSLRCHRCGLPGQRLRDRFSCRACGSLNAHENAAHNIRRRGWGGRRWAR

SEQ ID NO: 8919 - protein, 420 aa, unknown
  TnpB Polypeptide
MKPKKKRVYKDRSHLLSLTERHIISDNHPFFQECDALCYLSKNLYNSTLYSQRQSFLEGKFDNYYEINKRFTQENQSDYRSLPAKVSKHVQMLADAAFKSFFALLKKKENGEYDGKVKLPKYLKKDGRQVINYEKGALSIKDLDDTRYIKLSQTNLVIKSAVPKEQITNVRIVPNGNHYIIEVVYDVVKPEIMTSFSRVAFADPGMNNLLALTSNVFSPVLYNGRQAKAVNQLYNKEIANAMSKLPEEQTWSKRAGFITHKRNMRIHDMFHKITTDVVNYLVENDIDTFIIGHNVGQKQNINLGRKTNQNFVSLPFSKLRDMLFYKCTRVGIQYIETEEAHTSKCSFTDRESIEHHDSYIGRRIKRGLFIDGNGRGINADVNGSLNIGRKYMENMGIYTDELHDELLNHRHNPKIRTIYV

SEQ ID NO: 8920 - protein, 444 aa, unknown
  TnpB Polypeptide
MRITSSYGMKLTGDLTALETSIRVYRQALRFIIPIINDGWEVLNECEYTNQKYNLIEKWIHSTAKTQARFDFDVQFPKFPTYLRRSAIAKALGIVSSYRSNLKNWEEEPKGQEPKLSLTHYAYPAYYKGNLFRNFDPVRQTIELKVFKNGDWVYEVYQLKTSDCTYYQTHLTGKKQNVPVIQKKGRRFYATFSYEEETVLVPEESIRKVCAVDLGLGTDATCSIMDEDGTVYARKFISFSKEHDRLDTQLGRIKRNQKRGSRHNRTLWRKVAGISQDIADKTVKAILEFGNEHGVDVFVLEYLDFKGKNAVKRAHFWRYQRIYKVLTQKAHQHGLRIARVNARNTSRLAFDGSGWSQRGREITLDTPYALMRFTTGKMYNADLNASYNIGARYFIRHLLKTVTATQRLALEAKVPQLAKRSTCTLSHLINLRSELAVLTAETQA

SEQ ID NO: 8921 - protein, 422 aa, unknown
  TnpB Polypeptide
MYEIINNRKESLMETIEISRTVKSRIVFLNPNDIPKMVASQEAFRQACNFVSHYMFHNGFPMNSVALIKLLYNDLRSQFGLKSQMAQSCIRTVIARYRSVQTQLRKERVWDGYKKDYHGNDVKTFVPKDLEFLWKPIEFKRPQLDLVRNRDYSHRDDNTMSLNTIHGRVIVNAVFNGFEQYFDGSWKLGTAKVLKSGKHWYLHIAVTKEIEQPEFKPSHVVGIDRGLRQLLTIYDEKGQTTFVNGKAILQKRRHYNRLRAQLQSKNTKSAKRRLKAIGERESRWMSDVNHCLSKTLVNRYGSGTIFTLEDLTNVTFDTVSKRSKKDRYEHHSWAFYDFEKKLIYKAIDNGSQVISCDAHYTSQRCPKCGYIDSKNRDKSRHEFCCKACSYRTNDDRAAAMNIQFLGTLYNSGNIKPAFEKLD

SEQ ID NO: 8922 - protein, 502 aa, unknown
  TnpB Polypeptide
VVSVKLRLPEIVENHLEKSFHITNSAYNEALCFGLRHFEALKQNPTYQELLDAKRELLQKPEKEQKTKIFKAQKKEIDEALTKIRKAYSLTEYGLSGHLSQQRRKPGSVYEHLNSGELQVIAGQAYKTLEKVLFYQIKPHKVRFRSKFDLDVSFRNRVNSTGTRLVESDKIGIAYRLYLHKASTFIDIPIKAFNDYQQMNLLRSERIKYVQIIRKTIRRKKVYYLQIVCEGYPYTKTSKGNDTVGIDPGISTIAYATPNEVALVDLVPSTINQKEKHIKSLERRIERSRRVNNPECYNEDGTIKKGSRFKRPSKRAQRLLTRRQKAYRSLSEERKKLQGQLITHLVSQASVIKIEELNVKGLQRRAKDIRINPKTNRPFSKKRFGKSIFRAASGAFREALKTRAEQLGIEVVMISPKDVKPSQYNHISQTFEKKPLSTRIFDLSAEWTGLQRDLYSAFLIGHIENGHYEQEHLEEDFPNFYTQMKNFLQQPIQTSRLAWYLS

SEQ ID NO: 8923 - protein, 533 aa, unknown
  TnpB Polypeptide
MKLAYKIAFPENLIETYEFLQGEFNRVLSDDDLRAAILSMDNSLQPGHYWPQLRDLIGHETQRQWALDKRFPSPSWYFCAFAEQIRQMHKAQKEQTALYDALQMFDNQDNSAFYQYCVDNNIPFSKTKVKNLQRCKERPGLPHSATFVLDFAFINSQAAKMVNNTFHYTLFNDEQKLAWYQLPIILHQSSKYQPGMRISKPKFSKDKNGNYYGVVAFDFDEVVTSGENIAAIDLGKVNLYTFAYIRPDGSYSDNYHIHSKMIERLKQKLETLYEERLILIEKNERVDTLFAKAQYIPESSLQKWMLRQGKLERLSTKITNVKNAITAEMSAEIAELCQKHNCSTLFMENLSWLESQGGKWNHSAQQDAIELRCSQRGITAYKVNAKNTSKEHPITGELGKELGRNIVWSTGDMLDRDFVSCLNQVQREGKRRVSNRRVEKKQGIRVASLRDKHQATPKRTKRQGSRRRENLEKLEMLRNKNTSRTTQMVVVLPRTSEEYPATWSCVEKISIQESNNCMKRIDVYKQSYMYLCN

SEQ ID NO: 8924 - protein, 382 aa, Lactobacillus sp.
MSKEYQRLANIVSQWIFDHGFQLSWLKINHHLYKIFRQESELNSQMIQSVFRTVVARYKTVREQVRQHSYRYKNAESKWIQVPRDLTWLVKPIQFRRPQADLVRQSNYSFLDKMQKISMTTLGKRTKLSFTDKGFEKYFTDGWKLGTAKLVHNRGKWFLHIGITKEVSDFNVKDNPKIVGIDRGLRFLATAFDSEGKTLFFDGQKVLRKRKIFLEIRRQLQSKGTRSAKKKLKQLAQRENRWMTDVNHRLTKTLVTAYGSHTLFVLEDLTNVTFNTADFPKSLRNSHRSWPFFQLESFLMYKAQAIQSTVVKVSPAFTSQRCPRCGLVEKTNRHHDTHEYWCKQCQYRCNDDRLGAMNIEMLGQEWLSGVKRPKIKKLTTTG

SEQ ID NO: 8925 - protein, 382 aa, unknown
  TnpB Polypeptide
MYKAYKFRIYPTDEQKIFINKTFGCSRYVYNYYLNKIKNDGYTSSYDNIKDYTNVLKYNSPFLQEIDSIVIRKSLFNLEDAFKKLFNKTGEYPKFKSKYNRNNYNTSLITGIYKNKKYCNIELDLEKKQVKLPKLKWVKIKGYRNIKNINGAIKSATISKEPSGKYYVSILFEMNETIEKVNPKNIVGIDLGIKKLLTLSDGITYDNNKYILKYEKRIKRKQRELARKIKGSKNYYKCKKELAILYNKLANSRKCYIHKITKEITDEYDIITCEKLQTKEMIINGKKNKLSSKIQDATFSEILRQLSYKSKYKGKDFYQINTYYPSSQICSRCTNQDKEYKDLNKREYKCIKCGQEIDRDLNASINIMFQGLELYMKSLVTC

SEQ ID NO: 8926 - protein, 424 aa, unknown
  TnpB Polypeptide
MQLVEQHVIARRDPRYAVIDAACFASKNLYNAALYEIRQAFFAHGTWLRYAVLDKRMQSQEAYKALPAKVSQQVLRQLDDAWTSFFEACEAYKQDPSKFTGRPKLPKYKDKAKGRNLLVYTAQAVSKKGLKRGLIQPSMLSIEVQTKRKELDQIRIVPRKGFYVVEVVYEQAVKQANVNPAYYAGIDMGMHNLVALTANKPGFRARIVNGRPVKSVNQFYNKRKAELQKQLGHAGTTKRMERLTTKRNRRIDHYMHTATKRIIDLLVKEGVGTLVIGKNDGWKQECEMGKRNNQNFVQIPHARFIAMLTYKAELKGITVKVAEESYTSKASLLDLDPLPVRDPNTGNEKHTFSGKRIKRGLYRASDGRVLNADCNGSGNIIRKVAPNAFQQVEGVEDGKAVLASLVVHPVRFVIPPSRTQKGKS

SEQ ID NO: 8927 - protein, 457 aa, unknown
  TnpB Polypeptide
MGLSVRFPRDGRLLGRVSRCAGRRILPWSARTSVPVASPTTGSVAWNLQALRKEWNRAKADAAPWWEANSKEAYASGISDLAVALGNWSSSKKGKRKGPKVGFPRFRSRHRDQGRVRFSTGAMRFEGDRRTITVPVIGALRSKENTRKLQRPLAQGRARLLSITLSERWGRLFVAANYAVRTPPARTPTKPGVRCGIDLGLRTLATVADSEGNITEVANPAPLRATLTERRRVGRQLSRRIPGSIGHEQAKAKLARLDRRAVHIRRETWHQLTSKLVSTYSSIVVEDLDIAAMKKSMGRRAFRRSVSDAALGMFRPQLSYKSLRSGAEIVVAGRWWPSSQIHHGCGCRLIAPAKLAKVLFCAVTGEAVDRDINAALNLRDWPEQNASCGSVGATVPSGYPGPSYQTGTDPGSDVGLAGAGGVAVRPLSRERRAAVSPKPDRRPKGRRDGTPKGGSSR

SEQ ID NO: 8928 - protein, 220 aa, Scytonema sp.
LNISNIAFVGDNHAELLPFAEKVPTFQREMTALQRKMQRSQRANNPDNFEPNFKARKGRKTVVKKGKVKKNSRQWNKSKNYHKAAAKKRELERRKAAYAKTQNRRVVNEILRHGKHIKTENVSVKGWQKRYGKAISAKSPGFVQSELIRKAENVGGSVIKFSTQTTALSQTHMDGTRIKKSLSQRVHRDVTGIPEHHRDLFSAFLSRYINQLGVGVAGYP

SEQ ID NO: 8929 - protein, 404 aa, Lachnospira sp.
MVWSLVKYKLEREVRKMIKTIRVMLVPNNKQKAKLFQYANTARFAYNWALGREKENHENRGKFICEGDLRKEFTQLKKKEEYLWLKKISNNVPKQAIRDACTAYQNFFNGVSKAPRFKSKKHSIPKFYQDTKKIKFTDTHVKVEGFATSKRHNKQKLNWIRLAEHCRIPTDCKHFNPRIKYDGLNWYMTVGIEYKDKESIPSNEGIGIDLGIKDLAICSDKNKYKNINKIQKVKKLEKRKRRLQRCISRRYEKNKNGECYCKTSNIKRKEKELLKVSRKLANIRLNYLHQITTEIIKRKPSFICIEDLNVKGIMKNKHLSKAIQQQCFGEFRRQIEYKSKWNNTKVIIADRFFPSSRLCSCCNKIKKDLNLSDRIYRCECGNVIDRDYQAAINLKNYGEMKISV

SEQ ID NO: 8930 - protein, 373 aa, unknown
  TnpB Polypeptide
MACNVPRQVAATLKSLLTKVKQNNEAIKKGYTKKRFKGLDKAPKYASRTVTLNYQRDYSFKSEQQVSIGTLNGRIVVPYEGWNKHLNLIKVCPNIGAAKIVYQRSSKTYYLMVSLEIELPDIEPTSITRISGVDVGMRYLAVETDLNNKSTFYSGASSRHKANQYLKARRSLQRQDTRSAKRRLIALSGRERRFIADVNHQISKEIAKPVSLIGLENLTGIRDRTKSKSGKKASKKQRRANRNQAKWSFAELHGYIDYKANLIGSLATKVPAHYTSQSCPKCGHTSKANRPNKGLMFRCECCGNELHADLVGARNIAMRTLLVRQDWTSTGSLSVSPDVSRDETKADILQRFSELRWSVDTSSHHIGTPIDDG

SEQ ID NO: 8931 - protein, 386 aa, Thiocystis sp.
MLIANKIELRPTLEQADDLNRACGARRHCYNQLLDHFSQPGVTWSKAAAYQHSMTVLRVQFPWYSEVSSRVTRNAIDDLDTAFKGFFRRVKNGSKKPGYPRFKKKDVNDSFALREPSKFAVDGRTLRIERLKTRIALRQRLRFAGQTKQATISKRAGRFFVSILVETQDYNPHAPDRPSVGVDFGIKDLAVLSTGEAIPANPRLKKNLKQLKRRQRNLSRKAKGSRRRAKAKLKVAKLHARIGNQRQAVLHELSDMLTRTYQVITIEDLNVSGMTKNRKLARAVSDAGFGELRRQIEYKAQWRGVTVVIADRWFPSSKTCHACGQIHDLPLSQRIMSCDCGHVMDRDLNAALNLNQYGLDALKPDLKRTQEPDKTGSKGPALALTA

SEQ ID NO: 8932 - protein, 485 aa, Tolypothrix sp.
MQVRWSFKLKPKKSQKIQMSQWLLTLRKHRNFALRQREIGYSTNNQNIENPVIYAIGSWCDIETRVEYGSCCPLTCPILKHGVIPENLNLALKTTKDVVKWDSASGIQMKVTTQLRHERENFCIIDSDVLQRNIAKLDSAFINFWKHGHGFPSYLRVLNSFEYKPGRVKLSSIRSTYAVIYLPGIGNVKMHNSRDLTVIKEVRTCSVKRSGGYWFISMLVDIPGELPKVKSLDEVKSVVGVDVGVNKLAALSDGSFVENIRPATNDKTKRRLAIRQRAISRKKNGSHNKKKAYEKLARTRHKIALKRDGYNWQAATQVVKTADAIGRENLNIKGMIKRAKPKHDGKGGYKKNRCSRKSGLNKVILDCAWGDLFHKIAWLAVKSGKPVVAVNPRNSSRECPQCGHIDKNNRNGEKFICTNCQYTEHADIKASRTIALRVGLVFPKNIKKTLPTDCGEVMPVKISLPLGGEATEPCLRGYRYSVEPF

SEQ ID NO: 8933 - protein, 536 aa, Thermus sp.
MERSHFQGVQAKLIFPNKGDKQAVLDLMRRFSAARRYAYNRLVEGVPREKLWSVEGPLGTLFGLGSYYIQGALLKAEMALRSAKERGIDPEKVVFGGRKLFLDLRKKHDPKAWRKRKREWKEKRQGLLYCRGKKRAGGNPCLRLELTPPHSGSNDKPTLRLRISLGNGTYAYALVQTTHPNLGRLLQRVYARESYNVELTLKDGEVYASFTWKEEAPPPTNTRKNGVLALDVNAEPYHLALALVNPDGNLRHYFTIPLDEVDRAPNRGAKETLLWMVAHEVTDFAVANGVAIVTERLKHLRKSRRGDGSGRSFRRIQHRFAYASLLRKIHTLALKKGVEVVQVSPQDTSTIGMLKYAPQLSLSKDVAAAYVIGRRALGFEEKLPKSYQQLLQDESFREHARTFYEGLASDLEERRKGEKNPYLKRRLLREKAKAHRALVLLSPQGSPGSRKEVTNGRNSYGANPWRVLRVGLFLPLLGREVPRDLSRLKPVLVQGPPLYRDRGRGKEGGPRSFLPGRAYGTHSGTVKDSSINRYNP

SEQ ID NO: 8934 - protein, 404 aa, unknown
  TnpB Polypeptide
MNTVRIYQLKHLSLTQFQRLRDAQMEAAQVWNACMQMHKAARLEHISWPGRNALQKATKGCFALHSQSVQMVVHAFQANVESTRQLRQTHPQMRMRYPYKDKRFYPVHWPAQAVSREQGRVVLPMGKGRKSIVLPLDLPENSGACTLVWNKGFELHVCVKIEQQENAPGDKHATVDLGEIHLAAVTTNTGKAMIVTGRGIRSLKHQRTMQVRTITKKQSKCQKYSRRWKTLQRAKNKLSHRAERRIRNQRHQATRKVINFCIERKVGTLFIGNPHGVRNQNKGRHQNQRMSLWEYGKDIDYLTHKSKQAHMVCFTGSERGTSSQCPACGHKHKPRNRQWTCKQCGFKGHRDLVGSVNMHKLAFGKQVNFPRSFTYLRPSKLGEGVVGQTRPNVVQVSHANNHVL

SEQ ID NO: 8935 - protein, 204 aa, unknown
  TnpB Polypeptide
MEQTLTVVCKLQPSPEQVVKMDALLRAFADACNYANEQVKPGITSKTTIQSIVYQDIRSKFGLSVNQAVRVCARVGANRKTAKVKGEAVKKFSPTSADYDARIFDFREKDKTVSLTLLSCREHIPVVLANYQAGKLKGRKPTSAQLCKHKDGCLYIHIQLTDKAPEPQKSSSVIGVDLGRRDIAVTSVAVTVLGMVTQISTQRM

SEQ ID NO: 8936 - protein, 627 aa, unknown
  TnpB Polypeptide
MAKTQALSFPIRLPDEMQAAALRLLDESKAAINSMITDLWPQLHLFGGDRTGPAWKHVERHLVTKSGHGSRQERNEKAPVGRILRAQASRKQVFETIVPLLTEGLITPAEGKRPARKDHRQIKEQVHTLRERLQDEGSDAEAFMAMTNLLEQACNRYLQTGAFPTTYEELQPSPMLSVGHVTFAGDDGMNKGQTYRARIELASFCDLCTRQEQQRATLSLKLRTPDSLGKWTWGAWSTTIPLPPTVCAYLWQGATTQAPTLREIRSDDGNRVAVLDLILEVPARYVSSLEEEKRVAGFDWGVRSLITVSMLEKPEGDEPYRQVSRPIFLDTGGIDGRQARLRREIDRLKACRDRFAQHIKEALVAQEERGMPLPAHFAGWQQHVKDYEVRIKQCWKTYERRNRELAHLASNLLILLALLYDCRLICGENLTTLKTEGRGRGVRGRFRNWRNNTTVRGELWRVLKYKCHMLGIRARQVEPRGTTHTCPRCHQPARTFASPAPSDRAKAKDWGAWLCCESPDCLWNGARDYAASLNIAALGMAYLVTYCETGKSVGFRMTSQEVKPASYTGAGATLLLPSQGIKPGPHAGKHVYYAGWSYSIRLCTSQPTSKLSLLSTSQLRKRVLSSA

SEQ ID NO: 8937 - protein, 447 aa, Deinococcus sp.
MPVLAHKIRLFPTEEQAVSFERAAGVARFTYNWALAECNRVRAETGKNPKMADLKKKFNGLKGEQFPWIYDSPKDANQQPFTNLQKAWKRFWYGVKKEGKIPVWSRAQKKKLLAEGVKPSKMSFAPTFKRKKDGASFYVSNDKFSLFGKMVKLPVVGVVQMAECLRFEGKVMSGTVSKYGGHWFLSVQVEVQDRDYFRFRSDDGIAGIDLGVKDTAIIVNGIQTEKATGPKPLKKALRRLAIRQRRVSRKRQAQLEKMGLKGKAIPKGTKIPKSNNQLKAESAVTRIHARVKNVRSDFQHKLTNRLCSENQAIAIEDLSIAGMMQNKKLSRAIADIGMGEIRRQIQYKALRYGTQIVLVDRWYPSSKTCSGCGWKKEDLKLSDREWVCEGCGTIHDRDENAGINLRNKVFEVFPDLLPAGSPESHARADMTGGCSSQAGNFDLLRNG

SEQ ID NO: 8938 - protein, 441 aa, Deinococcus sp.
VKVTLTAKLKLRHTPEQKAALDAVTLAFRDALNFASEVAFRENKLSAGMRLQKLVYNELRERMGLPSQMACNAPRQVAATYKGLWTKLKKHNEREAKLCAEKPRRKFRPFKGFEAPARFASRTLTYNFGRDFSWKKGQQVSIQTLDGRQVMAYEGYQKHLDFIAQGCEVGAAKLYYQKSKKQYYLLVSLEVELPDPQPEDHTRVVGVDVGQRYHAVVTDTQQHSKFFSGKAVNQKKDRFARVRKSLQRKGTRSATRRLVEFSGRERRFIADRNHSLASQILKLYPHAFIGLENLKDIRTRTEGRSNPKASKKAKRAKRRRSQWSFAELQTFLAYKAPLVGSMAVKVDANYTSQACTRCGYTSRDNRPEKGLMFVCRGCGYQVHADLLGSRNVALRTLVIRQDWMATGHLSVAPDVADVEAKAARLQRYAELRWSPATSPRL

SEQ ID NO: 8939 - protein, 382 aa, Deinococcus sp.
VATVTLTLKLPFLDLNAVKAEEFERLQALNTTVANEILKMPHEVRRKLTTKDFGHVEIGSAWMNQTIRNVNAKKKAKAFRLMPLETNNQNWTLHKVGDTYSVGFGLLRGVKKRVPLAVHQSKHGEVLERILSGEAKRGTLRLTRSKRGVWYACISVSWDVPDPPQTTRFIGVDRGQNHLAVAATPEGTPKFWTFARIRQIRKHYAAKRRRLQKAGKLKTVKRLEQKEARTVRHINHIISKEVVAYARQHGCGIRLEDLSGIRTSKQPKGVKRNVAHNRDYWPYYDLEQKILYKAGLAGVRVEKVPPQYTSKTCCKCGAIGERQRHDFRCERCGYRGHSDHNAARNIGAWLGMACPLELHVAAGGVHGTPPSWVSETSRVRLA

SEQ ID NO: 8940 - protein, 394 aa, unknown
  TnpB Polypeptide
MIITNKLFTTISIKLDNFVEFEETMKIYNQICQEIIDFGWEEGSYNKTTLHNGTYKQLRLKYPKFSSAMVQTARDNAGEILKRTMKKNKDLEHKNKSRTKKIQLLEKPIKKEDSSIRYDGRSLTIRFDKNIISINTVFGRMKIPFKMATYYDKYLDWKYSNAQLIRRRNGDYYINLQMNKDIPKKSVECKVLGIDLGIKKIAVTSDNKFYKSSHLKNIKGKYQKLKRDLQSKGTKSAKRKLSFLSRKENRFVRDVNHCVSKEIVNTNNNVFVLENLKNIRFNTRTYNKKLNRMIGNWSFAQLQNFIEYKSERLGKSVVYIKPNYTSQQCSKCSHTEKDNRNGNIFLCKKCNYELDADLNASRNIARIGRTDFLQGLVNSPKVGIVENKGVEICS

SEQ ID NO: 8941 - protein, 473 aa, Micromonospora sp.
VKVTRIAYSARLNPGKYVALLEQARRLGRVRSVVWQRFGSVAGAALRDRQVRDRWLADGAAWRFGVPANAWKETLRDAMADIAANREAAKADVRRTVARRTVDPVERKRLFALLKADRWAEDAYLSRLMRRRWRRGKNHTHDQIIVRADKARTYTLTDGGNVWLAVPGLEPRKPVMVPLSTTVAPSGTLRLILRGGRVEVHYQYDAADMPSSRRPCGDRKIGVDKGYTEALTDSDGDHHGANLGALLTAASDRLTQRNRRRAKLRSIANNATQRGKHAKAARIKANNLGTAKRDRQATRRRAQIRTEIFTAAHSVVDKANLVVAEDLTKTFAGRKKLGKNMSRRLAAWTKGVTAEALENVSERRGSAFVLVNAAYTSQVCPRCGGLGHRDGDRLHCTGCGVVWQADHAAAINVLRRHGDPDITLHTPHKRVKGILRARADRHRIRLPIQDSSRANDGGERIIQPRPSLHRGER

SEQ ID NO: 8942 - protein, 244 aa, Geobacillus sp.
MQNGRVKKTKFRAMITERDQKFLANAKLGLMRIVEKSGKWYAQVSIDVPVSEKDNEKVMGVDLGLKVPAVAVTSTGKTRFFGNGRMNKYIRRNYQEQRKKLGKLKKLSAIRKLNNKEHRVMTDINHKISRQIVNLAIQEEVSVIKLERLTNIRQTARTSRKNEKHLHTWSFYQLSKFIEYKAKLAGISVVYVNPKYTSQLCPQCGAKNKAKDRQYRCQDCGYTTHRDRVGALTIMSVPVMDGVA

SEQ ID NO: 8943 - protein, 369 aa, unknown
  TnpB Polypeptide
MLTYKFRIYPTSAQARIMEETLETCRRLYNSMLADRIENGTGFYDQKKMLVELKHDDKHLKSIHSQVLQDVVLRLDKAYQRFFAGLSRYPKFRRRGRYNSFTYPQSGFELKGNRIRLSTIGRVRVTLHRKVTGAMKRVTVIRDIDQWFVALLVKEDHSVAQSGGDGKVGVDTGISNVVALSDGTMIDNPTFLSSSLGRIKSLQRRLSHKKRGSSNRERARLCLAKAWRKARRQRDDFVHKLSDQLTKENEVIVFEDLKIQNMVKNHSLASAIMDAAWAKLRRLTAYKAERRGGRVILVNPSGTSQKCSGCGEMVPKGLSERVHDCARCGLVVDRDVNAARNILERGLEQARVEAEPLLVQRRRISKFGR

SEQ ID NO: 8944 - protein, 381 aa, unknown
  TnpB Polypeptide
MKSAYKFRMYPNKQQESMLELTLETCRHLYNLALADRKNAYELERISRTYGDQAAMLVAEKKDGNFKGVFSQVLQDVLRRLDKSFKAFFRRVKAGEEPGYPRFKGEGWYKSFTYPQVGFELDGSKLTLSKIGSIRIFKHREVEGRIKTSTIKKDNLGHWYAILVSEVEDVSPIEPKSAIGVDVGLKSLIALSSGETVEYPRYYVKAERKLAVAQRNLSRKKKGSANRRKAKAKVAKISQDVQNHRDEFLHQVSRRLVDLADLIVFENLNISGMLKNHHLAKHIQDHAWGKLIQFTQSKAAKASKVVELVNAAYTSQKCSQCGIMVPKTLADRTHACPNCGLEMDRDINASLNIRTLGLRGRAYQDPIPTLNFGSKQAGSMT

SEQ ID NO: 8945 - protein, 319 aa, unknown
  TnpB Polypeptide
MRFKVRREGYAWLEAAAVEVNQVWNWCNEVSHKAARPYSGPSRWLSGFDLDKLSTGATKCFLHIGADTIQKVNAEFARRRRQFKKSKLRWRVSRGSRRSLGWVPFKAASLRRKGRALRFCGKTLRVFEADRLLGIHRWKDGCFCQDAVGDWWLCLPAPVVIEDIPAQQAEVGLDLGLHATATTSDGAVLDAGRAYRDLEQRIGMAQRRGHKRHAKRLHRKASRCRANALHRFSRKMVNTYQTIVVGDVSSPKLARTRMAKAVLDSGWGLLRTQLQYKGESAGRSVRIVSERNTSRACSACGALTGPAGVNGLRVSLGVW

SEQ ID NO: 8946 - protein, 521 aa, Escherichia sp.
  misc_feature (377)..(488): Xaa can be any naturally occurring amino acid
VKRLQAFKFQLRPGGQQEHEMRRFAGACRFVFNRALALQNENHEAGNKYIPYGKMASWLVEWKNATETQWLKDAPSQPLQQSLKDLERAYKNFFQKRAAFPRFKKRGQNDAFRYPQGVKLYQENSRIFLPKLGWMRYRNSRQVTGVVKNVTVSQSCGKWYISIQTESEVSTPVHPSASMVGLDAGVAKLATLSDGTVFEPVNSFQKNQKTLARLQRQLSRKVEFSNNWQKQKRKIQRLHSRIANIRRDYLHKVTTTVSKKHAMIVIEDLKVSNMSKSAAGTVSQPGRNVRAKSGLNRSVLDQGWYEMRRQLEYKQLWRGGQVLAVPPAYTSQRCTCCGHTAKENRLSQSQFRCQVCGYTANADVNGARNILAAGHAXXXXXXXXXXXXXXXXXXXXXXXXXXXXXXXXXXXXXXXXXXXXXXXXXXXXXXXXXXXXXXXXXXXXXXXXXXXXXXXXXXXXXXXXXXXXXXXXXXXXXXXXXXXXXXXXVLWSYSERKSPVTKSIQMPGMWIYSERRCKWRS

SEQ ID NO: 8947 - protein, 467 aa, unknown
  TnpB Polypeptide
MRGKYCCSGIVGEPTVQVMEETGEEILFEVQRTLKIPVHYATTGKKLSYLDRLTARLTYAVRLWCERISELGLKTQRDCSPYEHEIQHITGLSAGFVQQARDKALWMWKQYREAHKDWERELSRAKPGTKWYKKLLKREPSEPCTSPRSNKKKIPTRFDARTGTIEVSDLKISPLVIRISTLKKGEKITVLLNPSKWHLEMLARAAELRGFELVKRDKKYFVHLLCKFLVRAQPVHAVRGVDLGVRRAIASVKLPKHPRNFSLLRYDDKWLRLRELDDRIAHLQRLRKWNVLKKLRHKRRHVAEDYDRKLAKEFAASAENEIVVIGDPQQIRYHKYRGDGNKRGRKILQHWSYRRLADTIIEKLKERGIIGIRFNEWGTSSECHKCGGKLKAKGRRVVCTKCGMQYDREFNSCVRVVQKASTYLKHKTSAALKRSRKLAGAVDELARTIGDSGLEPWMKMETHPTGE

SEQ ID NO: 8948 - protein, 414 aa, Psychrobacter sp.
MKTLKLRIKDKHANQLNKIAGSVNYAWNYVNDLSYKHLKRTGKFFSAYDLNEYTKGSGEYLGLHSQTLQAINETHTKSRKQFKKAKLNWRTNRPDAKRKSLGWIPFKKSAIKHLHTRQTGKKALKSTIQLSLSKGQKFIIDVFDSYNLSLYQINTLEIVQDSRNRWYACITVKDFPKQISGKGSVGIDLGLKESATTSHGDKLTTKQTQKWAKKLAVAQRAKNKQRVKAIHAKIKNSRLDAIHKFTTRLAKDNALIVVGDVKSRSFTNKRTKLAKSTYDAGWFELKRQLEYKCKYAGCQLEIVNESYTTQTCSHCLKISDSSPKGRAGLGIRGQLEYKCKYAGCQLEIVNESYTTQTCSHCLKISDSSPKGRAGLGIRGWRCAECGTWHDRDINAAKNILAVGLDRLAEGIPSL

SEQ ID NO: 8949 - protein, 372 aa, Psychrobacter sp.
MKHRAYKFRFYPTDEQAVLLAQTFGCVRFVYNSILRWRSDEYYQSKAKTGYVQASAKLTQLKKQPEYSFLNDVSSVALQQSIRHQQTAFKNFFEGRAKYPTFKSKKHKQSAEFTKSAFKYKDGNIYIAKNKEPLSIRWSRDLPSVPTTITISKDRAGRYFVSCLCEFENQVLPKSDTNIGIDVGIKHLFVTDTGSKVDNPRHTAKYAKKLACAQKRLSRKKLGSANRAKARLKVARIHAKISDCRSDNLHKLSRKLINDNQVVCVESLRVKNMIKNSKLAKHISDASWGEFVRQLEYKADWAGRSISKIDQFFPSSKRCSSCGYILPFLALDTRRWVCPECSADHDRDINAAINIKTAGLAGLAFGENVSLV

SEQ ID NO: 8950 - protein, 215 aa, unknown
  TnpB Polypeptide
VTPTGKWFVSFLVEVEPDGLLPKIESESSVGVDVGLKSFITLSNGDRVDNPRFFVQEEKALAKAQRKLSKAQKGSLKRDRALKVVHRVHERIANKREDFIQKLSLSLVKSYDIIVFEDLNIKGMVKNHCLAKHIADAAWSKLIASTSYKAEWAGKRVELVNPSNTSKIYSGCGQMVLKSLSERVHQCPFCGLTLDRDHNAAINILRLGLQSVAKA

SEQ ID NO: 8951 - protein, 384 aa, unknown
  TnpB Polypeptide
MQRTYQYRLYPADQQADQLETLVCQGRLLYNEALSHRRHIYKHTGQTIRFFDQWPRFREERKARLEDFGLLNATSVQQLLRRLDKSFAAFFRRINNGGKPGFPRFKGIGRFRSLDYRYGDGCRLKGDRFYLQHVGDIRIKQHRPCPQGCLKHVIITRKAGGRWYVSFQGDDGMEPPPRKDGKAVGIDVGLYRALSLSDGTLVDASLKLKASLAKLRRANRAFARKQRFSGRWHKQRQQLARLHERIANQRKDFWHKTTDWLTKHYALIAVEELNLRFMLSNRHLSRTAYDMGLGLFNAMLAYKAERAGCAVVAVDPKYTSQQCSGCGTIEGKPLAQRWHSCFCGVELDRDVNAAVNILNKARSGPTEPNVEAVSSGVLRESRLI

SEQ ID NO: 8952 - protein, 368 aa, Clostridium sp.
VEKAFKFRLVPTKEQEIILSKTFGSCRFVYNHYLEKKIDLYKSEGKSMSYVECANDMKSLKNQHEWLKEIDAISLQQSLRDLDKAYKNFFKGSGFPKFKSKHNHNQSYRTQMVNDNIKIEGNKIKLPKIGWIEFKKHREIQGKILNVTVSRTPSNKCFVSICCTNIESEKLPQNSNAIGIDVGIKSFCAMSNEETIENPKYLQKSYENLIKAQRRLSSKTKGSKNYHKARVKLAKIHEKIANQRADFLHKESLKLIKENQIIILEDLNVKNMMKNEKLAQRIGDCSWSEFTRLLEYKAEWYGRTVHKIDTFYPSSQLCSVCGYQNAEVKDLNIREWICPKCDSKHDRDTNASKNILKQGLKELKISVA

SEQ ID NO: 8953 - protein, 413 aa, unknown
  TnpB Polypeptide
MEHSHRYRAYPSPEVAMAAEHHIDVHRQLYNHVRHDYENSPDDDKPSEYTQNKRLTQWKRKWPVFAELHSKAAQATVARFHDNLSNLCKKKENGYKVGWLKRQSPSEYRSVTYNQSGFDLDDKRGRDGYAYVEFSKIGWVKIRYHREIPDHAAIKEVTLKKEVTGEWFVSFSLKTDEEHVPEKLDVESLDASNSIGIDLGILNYIHTTEGLSVGCLDLEVEYERLRREQRKLSRKEHDSNNYEKQRVEVAKAKRRIRRKVLDFQHKLTTWLVKEYDAVFVEDLDVKPMLEQSHNARNKQDAAWRQFTTLLEYKAELYGTHVVQVEPRGTTKECACCGVETAKPIWVREHSCPSCGFETDRDANAAMNVLKRGFEELGLGWPESTPVETVTAVGAADFQHVSASHVVETGSPEA

SEQ ID NO: 8954 - protein, 315 aa, unknown
  TnpB Polypeptide
LKPKAFDLKKSFNAIKKIEFPWMYDVTKYASQQPFIHLQTAFNRFFQGSSRYPQFKKKGHHDSFYIGNDHIKLDGKMIKLPKLGWVKMREALRFSGKVISATVSRVAKRWFVSLNVELFQSPKSCDSQVGVGVDLGIKALATISNGETYEAPKPLKQFLKKLKRMQRSLSRRVKGSHNRHKLRLKIASIHAKITNIRKDSLHKLTTYLTDNFVGIVIENLNVKGMLSNHKLSRAIADLSWYAFRRQLEYKSKYKGNYLLIADRWFPSSKNCSNCGQKKDQLKLSERIYHCSACGHEQDRDLNAAINLKNLLYQSG

SEQ ID NO: 8955 - protein, 428 aa, unknown
  TnpB Polypeptide
LRRLDKNFLGFFRASQDFKNNPGKYKGQPRPPRFKQKQFDNLIFNYQAFKIKYTMDVVDQENFEIKSFILPSGQIIKSVKVLERSGVVILEKGLEIELPNQLVGKAIKQVEVIPKYRSFHAVFIYDDDLSEIYQIVEPFKTVELVELDKLDSKGEFSSKVVKLHNQVMSIDLGLNNLATCVTNGVIEPFIIDGRKLKSVNAYYNKRKASMQSKLSKRGKKWSRKLQSLTNWRNAAVNDYMHRATSYVVKTCVKHGISQVVVGDVAKSLNGINLGKRTNQNFVNLALGQFVDKLGYKLGSHGIELVVTDESYTSKASFVDGDKMPKRYNPSPAQKRTFSGKRVKRGLYKSSNGTFLNADANGAYNILRKIDSDFSFSQLAKKVGARVKEWLHPTKRVRFWLKKKKETEPICYPKLRRGDKGLILPSSQC

SEQ ID NO: 8956 - protein, 435 aa, Escherichia sp.
  misc_feature (358)..(380): Xaa can be any naturally occurring amino acid
VKRLQAFKFQLRPGGQQEREMRRFAGACRFVFNRALALQNENHEAGNKYIPYGKMASWLVEWKNATETQWLKDAPSQPLQQSLKDLERAYKNFFRKRAAFPRFKKRGQNDAFRYPQGVKLDQENSRIFLPKLGWMRYRNSRQVTGVVKNVTVSQSCGKWYISIQTENEVSTPVHPSALMVGLDAGVAKLATLSDGTVFGPVNSFQKNQKTLARLQRQLSRKVKFSNNWQKQKRKIQRLHSCIANIRRDYLHKVTTTVSKNHAMIVIEDLKVSNMSKSAAGTVSQPGRNVRAKSGLNRSILDQGWYEMRRQLEYKQLWRGGQVLAVPPAYTSQRCACCGHTAKENRLSQSKFRCQACGXXXXXXXXXXXXXXXXXXXXXXXTSVWFHPRHWKPDVRSSKRQSLAGFWLTLHLPRANKTAIRLAGKQDLLIIPRING

SEQ ID NO: 8957 - protein, 366 aa, unknown
  TnpB Polypeptide
MQKGYKARLYPTKEQQNILKQTFGACRYVYNHYLAERIRSYKEDGVSLSCYQTQKMLTSLKKDKDHLWLIGIDSMALQESLKNLDKAYKNFFDKRAGFPNFHSKHEKQSFRTRNQSNGIRIVGNTVKIPRVGFIKFKGLRDFDGRILNATISMSCSGKYYISLCVEQEDIIFSNNGRMVGIDVGIKEFYTDSNGNVVANPKTYRKHEKKLIREQRKLSRKQKGSNNHNKQRIRLAIQHEKVANIRRDFLHNQSSILANENQVVCVEDLNIKGMMKNHRLAKSISDVSWSEFFRQLEYKTKEYGGIVVKVPMFYPSSQTCSVCGYQNPLIKNLAIRAWDCPKCGAHHNRDGNAATNILNKGLEILAS

SEQ ID NO: 8958 - protein, 439 aa, unknown
  TnpB Polypeptide
MITLKIPYQTSEESTLLIQELRRQYSCVVRYAYNRAKEGKKQKEIRSLVKLLGNINLSSWFVQCAIMEGLTIHKRNKDKKVVFGGKISFRQRSKNKISDKELKEKRLFNLVLQGEGCRQGNRHFDFTKLINNKLIFKVNSKNHLELSFPILNKNYRKKLKFIQKVSELKEQPITISLSDKYIYFTYEEPKNYNVNTLLQNRYIGIDLNPNYIGVVVKSDETILHKQCFDLSDITQLIRNEANSSDSVRFKQLNNKLKHETLEISKTIESLALRFRCNFVFIEDLKSLSKANLDKGHALNRLTKNLWKRVYFVQNLEKRCKLNNIKLFKVNPMYSSVIGNVQYDYIDPINASLEIARRGYHVIILKDKAFYPSFTIKASLLNQWKEEGSEEVKDWKSCFKVVKNSKMRYRVSLEKVEKPFKVLKMKSIKSKVLIYEFQQS

SEQ ID NO: 8959 - protein, 209 aa, Moorea sp.
LKARYKYRFYPTDQQKQDLARLFGCVRVVWNDALAICKKSKKVLKSGDLQKLVITQAKKTEERKWLSEVSVVPLQQSVADLGVAFKNFFESHNGKRKGRKVRSPRFKKRSNNQSARLTRRGFSIQGDGVYLAKIGVVKPIWSRELPSDPSSVTIILDCANNYFLSFVVDIEPVQVDAKNQSIGIDLGIKTFAVMSDGGHVKSPDYSKLD

SEQ ID NO: 8960 - protein, 425 aa, Streptomyces sp.
VEATHAKRAFKYRFYPTTEQACELLRTFGCVRKVYNMALEARSRAWMDEQRRISYGETSSMLTGWKKTEGLAFLAEVSSVPLQQSLRHLQAAFSGFFSKRAKYPRFKSRNKSRAAAEYTRSAFTWRNDQLTLAKMSAPLAIRWSRPLPEGAAPSTVTVSLDAAGRWFVSILVDDPGVRALPSSNSAIGIDLGISSLATLSTGEKIPNPAFHRREGARLAAAHRGLARKEKGSRNYGKARVKAARINARIASRRRDFLHKLSTRLVQENQLVVIEDLPVRNLMSNRALAAAIANASWAELRTMLEYKCAWYGRELVVIDRFFPSSKMCFECGLIRRVLPLGVRRWVCEGCGTLHDRDHNAAENILAAGRAVSACGAGVRPQRSSSGRAVGDEAGKTMARAVGAPTTPGGGRRQTENSWNAMVFSTG

SEQ ID NO: 8961 - protein, 415 aa, unknown
  TnpB Polypeptide
MLRAYKYRIYPTDEQKVLFAKTFGCCRFVYNWALNLRIEAYKSDKRTVPYKEIQDCMVNELKAEHDWLKEVNSQSLLYSLRNLETAYTNFFRNTKAVGFPKFKSRKSRQSFLCPQHCRVDFAKETITIPKAKDIPAVLHRKFRGAVKTVTVSMTPSGKYYASVLVDTSIQELQAAEPQEKTTVGIDLGVKSLAVCSDGRTFENPKNLQRSLHRLAMLQKRLSRKQKGSANRDKARIRVARLQEHISNCRKDNLHKITHTLTHDSQVRTICMEDLNVKGMQRNHHLAQAVVDASFGMFLTMLEYKCRWYGVNLIKIDRFAPSSKTCGKCGHIYKGLKLSERSWTCLECGTHHDRDFNAACNIKDFGLKALPTERGKVKPVDCPLVDERPRVLKSNGRMKQEKRGLSVFEAHAFRRG

SEQ ID NO: 8962 - protein, 499 aa, unknown
  TnpB Polypeptide
MRSKTPSYCVEFSLQANTRQWEELNHRFFLAQRVYNCMVREARRRINAYFLDKDVKAIQKQRRKKGYMLLQEEKSVFKAKREQYGLSEYAFHGYLTVQAQKFRKYLDANTIQKLGTSAWSAASKVLFGKGKVVHFKKYEELSSLEGKTNISGITFRDGCLVWNGLTIPIKVRPNDLYAQSAFHDRIKYCRIMRRWHKNRYNYYLQIVFEGVPPRKANRKTGKLLHDPKRRTGGVDIGPSTVAAVSSAGIVFQEFADDVGRIDREIAVLLRRLDRQRRANNPQNYDSLGRIKRLKKGERRVWSYSRRYFETRNQLRTLYRKRTANLKQSHEKLANKILDVVGRDLFVENMSMSGLAAKSKKDKINPKTGRPAKKKRFGKSIQRHAPAMFISILSRKVGYYGGSVTKINPAAAKASQYNHIQNTYEKAELSERWKLLRKGHLVQRDLYSAFLLANLNKRHTVDRKACQRDYTKFKKQHDILISALRQEKQNGKSFPACMGI

SEQ ID NO: 8963 - protein, 395 aa, unknown
  TnpB Polypeptide
MKRAILLQTLATNNKNNRLKEFMDKAINEYNHLLSEKWDCDSFMEFHHKTLSISKKNTSFNVQVRCSLIRDAWKKKSDRVDGLTVKFNIPRNCKTFNTKSNFFVELGTYPRDRISVPIKQNKNYQRFQSLIRNDWLCKTFGLNKDLQIVAFLSKEKEIKQRKNIMGIDVNAKHFAISIISPEGKVLYQTYFGKHIWIKRKKIMERRAKLQFLNAKKKLKRLKCKEKNFAKTNLGQLVKEIINLAIKYDADISIENLKRFKSKGRRFNKIVMKIPFFKFKQILEQRCFDNDIRLNVVDGWNTSKWCNHCGALTKGHSSNYSLFKCECGQIVNADRKASLAIAVKSLLERNSHTLEPDISIQISKRRVDVTQLLRPNEVDDLCSVNYNYQLMENFKI

SEQ ID NO: 8964 - protein, 408 aa, unknown
  TnpB Polypeptide
MEKEVILKTRRIRIYPTKKQKEYYNKCFGTTRFIYNKIVEFVKNNSKIVHELLKKKAEKGCCHFTKKTQKYCGQTIDKTYFCKKHSNTKIDYGFALNIGSLRKKSELFTKEFIKKNSWLEDIPYDTRQLVINDFIAAYKAAITNFKNGNIDSFEMGFKSRKQLTQFFHIDKRAIKKEITIFKRKKLGKTRIRNKMKRWYQKNINDNITNNSKIIRYKPGKYYLLLTIESSPIDKISNYECVSLDPGVRTFQTFYSPDGIVGKIGDGFVEKNLLRHAEQIDKINSIISKLKNKKRTRKNLKNRQFLLRTKIKNAVMDLHWKTANFLCKNFETIIIPKFGCKKMSNKNSSIHSKITRRMLLLSHGSFLEKLKFKCQEYKRKLILVNESFTSKTCTTNPLCFSQLFFQRLK

SEQ ID NO: 8965 - protein, 480 aa, unknown
  TnpB Polypeptide
MSQKVVIERVQVRGAAPYLGMSATPDGQQVPLYSTNPDIVMRWLCDGWRCRYNQLRSRRTRWDRNAQSAVPLNGRPDMRSDRQVRLECSWLAAIPSMVLQSPNRIENTDWWSANKRRRTLKKKHRNPGMMPRFKSRHDDLYFVCWHNKGANANYRQLNRNHGEVVITGQNPGACRLDGQSCRYSIHIRVRVSQPIRDYTSVGVNWTKRTLVFVNDPLPIGRERTGAMVGLDRGCVHTLATSDNRFIDLPKERLDRIDREIRRRQKAQARRVNMSGKTVREYRRHASRTYERTGREISRLYAKAHRIIDDWQHKTTTMLVREYDLIALEDLNLQDMSRKAKAKPDPERPGAYLHNSQSAKRGLNRSLRAASLAGIVGKLEYKTQLTGRNRLILVNPAYTSQTCSECGYCDSRNRESQADFECKQCHMSMNADLNAANNILKRGLDHLIGLDEAEHAETESDVQPAYRGKNASTMTCETSTR

SEQ ID NO: 8966 - protein, 455 aa, unknown
  TnpB Polypeptide
MSVRIAYQYKLRPTKLQVTELDRWLSMLCAQYNYLLADRFNWYEQNRCAIDACSLLCHLPQLRDNPDYFSQKKTLPQLKKTHPWYSEIYSQVLQDVVKRVKVTFDRFLKGDRNGKRSGRPRFKPSSRYRTFTYPQIKDSCLDGNSINLPMFGKVKVILHRQMPDGFKIKTASVTKKADGYYITLSLEDQTVPEIKPDFKPNKITGIDLGLKDFLTTADGETVAIPQHYRQAQKRLKVIQKRVSRRTKGSNRRRKAIQQLGCQHQKVAARRKDFHFKTANYLLSKYDVVAHEDLNIKGLARTRLAKAVLDAGWSNFLLILTFKAEKAGLLVIPVSAYNTSQDCSNCGEKVPKKLHIRWHDCPNCGCSLDRDHNAAINIKNRAVGHSVLKAKSLLSDSRIVLEACTIDLYSDWCRRCHKAKPIQARSPKNSVPNYIKQSSPQIQTSPQSATPPNSSD

SEQ ID NO: 8967 - protein, 393 aa, unknown
  TnpB Polypeptide
MGNKMALSKLNTWLYLCRCLYNVALSQRISIYRQNRGKINRNAQQSQLPELKMAFPEYKDINSQTLQQVVERLHNDIECFFRRIKEGAKKVSFPRFKSQNRYNSFVLKQWGWKLNGKHLMITNVGKFKIRLSRPIKGDIKTITIRKEHNNWYVCFSCDNVPEKKLPKLDTIVGLDVGIKSFLVDSDGKVIDNPRYLENSEALLKRRHKGFDRSKRGSNRKGDARVLLSKAYEKVKNQRNDFLHKLSTQYIKNYGTLVFENLNIKGLVMNPHLSKVIGDVGWGYFHEYCAYKAEEAGRQIIRINRWEPTSKKCSNCGAINEKLKLSNREWVCMSCGVLHDRDYNAAKNIKRVGQTQQALTCENTQSVACESPCKSIGECQMAYAYQNGYKKEDI

SEQ ID NO: 8968 - protein, 378 aa, unknown
  TnpB Polypeptide
MKLTVTVKLKATQEQHAALLQTLRTCNAACNRISQVAFQSQTLRQFDLHQATYYNIREAFALPAQHVVRALAKVADAYKLGVDTLRIFQPTGTIELDCHLLRWKVQEQIAAITTLQGRLPIPFACSAAQKELLRGKRGQSDLMLRDGVFYLACSVTVEEAQPFVLTGVIGVDLGIVNLATDSEGNHYTGEPIRKVRRKYRRLRQLLAPKKTASARKHRKKLARKEARFVKDTNHGISKQLVQLALDRQKALAVETLTGIRRRGNGLRRAMRTELNNWAFLQLKQFLIYKSKRAGVTVIEVDARYSSQECSACHHTERANRRSQECFCCVCCGLKLHADYNAALNLKARGVKSLLARQSDALMFCEEADASDLGQAHEL

SEQ ID NO: 8969 - protein, 296 aa, Moraxella sp.
LQKGILTLSSYFDTPLSFELGKLKNIINLDNIQEVKVVKIANGYDIKITYKTDKPTPKPNNGRYLAVDLGLNNLMTAVSNTNNTPFIVTGKTVKSVNQFFNKIKAKLQGEKDRFIHLAKQSNKIIPQISCINKQLNKLSFKRNNQINDYLHKASHYLINHAVANEITTIVIGHNQGWKQGINIGKRNNQSFVSVPFARLVQMIQYKAKLQGIDVIVTEESYTSKCSFLDDEPIAKQVNYQGKRVKRGLFKSSNNTLINADVNGAYNILRKVIGKFDYNPIVVCSTPKMINLLKVNP

SEQ ID NO: 8970 - protein, 396 aa, Moraxella sp.
MTAIRGHIIELKPNNKQATYFKKACGVARFAYNWALAEWKRQYEQDKQYRDDCLAKNLPIDESKLNKPTQGKLRKQLNAIKRTQSPFMMEVTKCSPQLAIMQLGDAFKRFFKGESKYPRFRKKGVNDRFSLSNDQFKLKLNKDKPFIQIPNLGLVRMRENLRHQGKILSAKVFTKGGKWFVSIAVELDNNTQAKQLKTNQTLKTGNAVGIDLGITDLATLSTGEKIQAPKPLKNKLKKLQRLSKQLSRKQKGSKNREKVKTKLSRLYYKISCIRKDFLHKLSTNLVKKFDVICIESLNIKGMVKNRKLSRTINDLGFYELKRQLIYKANQWGKTIKELDRFYPSSKTCSNCGFIMAKADLTLNVRNWQCPSCHKQHDRDINASINILNNATKVLTV

SEQ ID NO: 8971 - protein, 482 aa, unknown
  TnpB Polypeptide
VKITSSYGVELRKQNIPIRQTLDIYRSAVGYLTEIYEQVWEELERIPEMKKRFNEAEHLIHTTKKNQARFSFDLHFPKMPSYLRRAAIQHALGTVSSYKTRLSLWEKSGQIGGWPKLVYENHAMPVFYRDVMYREDKEGKDAAYLKLYDGHDWKWFHVRLSHTDMEYLRKNWSGEKASAPTLEKRHRKYFLRFSYTEDVILTKTPIKEQIICSVDLGINTDAVCTIMRSDGTVLFGVNVPLAYRYAPQLMDVITEERVPAVFTSAGNPATWTARLHDAGCRVAHVVSSSKFALKSREAGVDAVVAEGFEAGGHNGREETTTMALVPQVRQAVDLPLIAAGGIATGAGMLAAFALGAEGCQLGTRFALSRESSACEAFKRRCVEVQEGGTILTLKKVIPTRLVRNGFCRTVEEAESRGADAEELSALIGRGRPKRGIFEGDLDEGELEIGQIAALIEDLPPAGEILRRLVAEYEAARGSLGPL

SEQ ID NO: 8972 - protein, 374 aa, unknown
  TnpB Polypeptide
MLKAYKFRIYPTKSQETKMEMHLDLCRWTYNKNLEIRKTAWEKESKSLSKYETNNMLPEWKENNPELKEVFSQVLQNVHERVDLAFKAFFRRVKSGEKPGYPRFRGKGRYDSFTYPQKGFKLESGKLYLSKIGDLKIKLHRQIEGRIKRLTVRRAATGKWFACFSVETEDIPNSPWKDGSIVGVDVGLTSFATLSNGEKIANPRFFREEEKELARVQRKLSKAAKGTPERNAALKVVERVHERIANKRYEFAHQVSRDLVDRFGLIAFEDLNIKNMLQNHCLAKSISDVAWSMLVTVTSYKAESAGSMVVLVDPRNTSKMCSRCGILVEKILADRVHNCPECGLSMDRDWNAAINILRLGLQSVGIKTVEARPL

SEQ ID NO: 8973 - protein, 378 aa, Bacillus sp.
MEVKGMMINKAYKFRIYPNQAQTTLINKTIGCSRFVFNHFLSLWDHAYKETGKGLTYGTCSAKLPAIKKEFVWLKEVDSIAIQSSVRNLADAYTRFFQKQNNAPRFKSKKNNVQSYTTKQTNENIAIVGKKIKLPKLGLVRFAKSREVKGRILNATVRKNPSGRYFVSLLVETEVQELSKTQSSIGMDVGLKDFAILSDGTIYKNPKFFRSLEEKLAKAQRVLSRRMKGSSRWNKQRVQVARIHEYMANARKDYLDKISTEIIKNHDVIGIEDLQVSNMLKNHKLAKAISEVSWSQFRTMLEYKAKWYGKQVIVVSKTFASSQLCSCCGYQNKDVKNLNLRKWDCPSCRTHHDRDINASINLKNEAIRLLTARTAGLA

SEQ ID NO: 8974 - protein, 200 aa, Bacillus sp.
LKYGTCSAKLPAMKKEFVWLKEVDSIAIQSSVRNLADAYTRFFQKQNNAPRFKSKKNNVQSYTTKQTNENIAVVGNKIKLPKLGLVRFAKSREVKGRILNATVRRNPSGRYFVSLLVETEVQELPKTNSYIGIDVGLKDFAILSDGTPYENPKFFRSLEERLAKAQRVLSRRMEGSSRWNKQRVKVARIHEYMANARKDY

SEQ ID NO: 8975 - protein, 444 aa, Methanolobus sp.
MQLTLSIKIQSTPEQESVLWDLSEKCRLIYNFGLKERQDAYRNKTKIGYIQQQNKLPEIKQKYPDYKIVYSKVLQGCLKCLDNDYKSFFNLIKNKDTKARPPGFKGKKYFTTMIYNQSGFSITDSNDNVLVSKSMDTRIHKPEIEYSEQDKIYIDFSHKHPSKIPLIFELPAILLEKQIFSKATDIDQVNIYQKDKEFYISITYEVPAVKHCNNNSYLAIDIGSSKQTMVDSDGKFKELKNRRPDKYWESKIQSIQSRRDHCKNRSRKWKRLNKNLVRMKRKSSNQLKDNQHKITRNIVENTDANTIIIGKLDVKQMASKKPKASKKDKSTNRGTHNSGHIGRFAQFLTYKAESLGKRVIRIDESYTSKKCCVCGTIKDMPLGYRTYECDCCGNILDRDMNSSVNILLRYFKHNALWTSYQSMIDNLRQTGLLIGIIPNRMIMK

SEQ ID NO: 8976 - protein, 147 aa, unknown
  TnpB Polypeptide
MKGEATRQNIHKQVLKVQKIHHRIDNIRTDYINKTIAEIVKAKPSYITIEDLNVKEMMKNRHLSKAVASQKFYEFRTKLEEKCREIGIELRVVDRWYPSSKLCHECGRVKKDLRLSDRIYKCSCGYTEDRDLNAALNLRDALTYKMA

SEQ ID NO: 8977 - protein, 404 aa, Actinomadura sp.
VQLRYNFRVYPTPGQRQALAKAFGCARTVFNDALRAREAARAAGLPYLSDAELSKLVITQAKRTPDRAWLAEVSAVVLQQALADLNTAYRNFFASAMGRRKGRKVAAPKFRSRKDSRQAVRFTRNARFQVTAGRRLRLPKVGDLRVRWSRALPSEPSSVTVIRDAAGRYFASFVVEATDTPLPETTGEVGIDLGLTHFAVLSDGRKIADPRILRRAERRLRKAQRVLSRKQRGSANRAKARARVAKLHARVADTRRDHAHKLSTMLIRDNQAVYVEDLNVAGLGGTRLAKSVHDAAWAQFTAMLEYKAARYGRTFAKIGRFEPTSQICSVCGVKDGPKPLNVRIWTCGACGTIHDRDVNAAKNVLAAGRADSLNACGAQVRPGSVPAPRGEAGTRSKPAPTGVR

SEQ ID NO: 8978 - protein, 344 aa, unknown
  TnpB Polypeptide
VKFFASFGIKDKNLLQQRAYKEARRRFGLSSTPTQTARDKAVELVKANEGREFHIRKVSIRVNYRAFKLVRRDTKLTPYWLYLKLDGDGAWYPVQFGERQREMIDNVLSDHSEWSLQQVELVKRDGEWYAYFTLEKPFKNYEPQTPIGIDLGEKNLATVVALVNGKPTKGTFFKGSEIKEVRHKYFNIRKKLQKKKRLDVVRRLGDKERRIVNHELHVISKKIVEYAKQFPSPVIVMKKLTGIRENFKKGKELNRRFHSLPFRKLKKMVEYKAKLEGIKVRYLNPKNTSKTCHRCGYVTHVEGRELRCPNCGMVYNRDLNASINIARALTRGTGRGCVDTLKGK

SEQ ID NO: 8979 - protein, 627 aa, unknown
  TnpB Polypeptide
MAKTQMLSFPVRLPDGMQAEALRLLDASRPAINDIIEDLWPKLDEFAGERKGVAWKQVEQHLVARSGHGSRQERCEFEQAGRILRAQATRKQVFETILPLLTDELIKPAEGKQNAQKDYRLIKEQVTALREAMEDADSSMAMTNVVEQACNYFLTTESWPATYEDLQPVPVLSVGQLTFAGDDGMEKGQTYRARIDFRQMCDLGTHQKRTTARLFLHLRAPNETGTWMWGTCCARIELPNPVVERLSQGALPQAPTLREMRGDDGSRFAVLDLILEVPAQYLRDLDQEHRVLGFDWGVRSLITVSILEKPEGEGEEKYRQIGRPVFLDSGGLDGRQARLRREIDRLKACRERYVKLVKAAVIAHVEHKNPLPAHFEQWQELIDAYEARIKLCWKKYEKRNRELAHLACNLLILLALLYDCRLICGENLTTLKTIGRGRGVRGRFRNWRNNSQVRGELWRVLKYKCYLLGVRCRDVEARGTTHTCPRCHEPAKTYRLPDPAHRKKADDWAPWLCCSNPDCLWNGARDYAASLNIARLGMAFLLTYHATSRYQAYRMSESKDSLKPTSYTGGGAALLLQPQGITPCLNSGKRVFYAGWSHSIALRTSQPTNILAILSTSQLRKRLLLRA

SEQ ID NO: 8980 - protein, 181 aa, unknown
  TnpB Polypeptide
MSELFVSSENQRADYPRYFRILEKKLKKLQKSLSRKVKFSKNWYKQKAKISKLHEYIKNCRRDFLHKLSKKLSETYNAVVVEDLNMKGMSQALNFGKSVGDNGWGMFLRMLEYKLMFLGKQFLKIDKWFPSSKTCSKCGNVKEELKLSERSYKCECCGIEIDRDYNAALNIKDIGKLMLKY

SEQ ID NO: 8981 - protein, 659 aa, unknown
  TnpB Polypeptide
VSTQPRITSSTSPGSTLTRASSPSMARAPRSAGCRWLSPPPRLPTGVRTASTRYAWAIGPPLRYAVQHDGQVLPGHGVRGQRAARVVPVHGHPHRVADEAVDQLHVQVVAEGADPDALLQQPDPQLAELGVAFGQVAEPVELRQVRGFTLVDGDGVVAAVDALERRDDHGFQCLARGLAVGQDVPVAPEQLVQEAAQNLVDHRLLGVEVVVEAAGQDAGGVGDVPHGGREEAALGEHPRGQREQLISTAHSSPKIVSGSRYRSGVSRYRLLPTPAQQIGLLTHCAHARFVWNLAVEQHANWRPGRAPAPDYREQSRQLTEARGAFEWLAAGSQTVQQQALRDFHQAMANFFRGTHRKPNWRKAGVHEGFRQVAVRAEHVQRLNRKTGRVWVPKVGWVRFRWTRAIPTGAKSYRVTCDRARRWHVAFAVVPEPIPAPRTGHIVGVDRGVTVSAALSTGELLTCPGLSEGEADRLLKLLRRLSRARRGSNRRQRVKNAIAILKAKAVDRRKDWVEKTSTGLAARYDLIRVEDLNVVGMTRSARGTVERPGRGVRAKASLNRGILAAGWGQLVARLEDKAPGRVEKINPAFTSQTCWACGHCASESRESQAVFRCVACGHQANADVNAARNIAAGRAVTARGGDRVAGPANREPQFAPPSAV

SEQ ID NO: 8982 - protein, 398 aa, Okeania sp.
LAEDSRSPVGERRMGMPTHATIKSLNVSNRPKTLKSRYKYRIYPNHIQITKLNQLFGCCRYVWNSTLAHCNQLYSNGQKKPSYVDLTKQFITQAKQELLWLKEVASSPLQQSLKDLDKAYKNFFNSCKGKRKGIKVKPPRFKSRKTKQTARFVGANYKVDQDKIYLPKVGKIKIVGKRKLPTEPSSLTIIKDAANRYFASFVVETCTENLPNTDNSIGIDLGISTFATLSNGEKILSPKPLKQNLEKLAKFQGKFARTEPGSKRREKARIRVAKLHAKIKDIRTDFLHKLSTDLVKKYDTIILEDLNVSGMVKNRKLAKAISDLGWRKFRTLTEAKCEKYSREFRVINRWEPTSQKCSCCGFKGGKKELNIREWTCLNCGTFHDRECDSFSQKPVMGG

SEQ ID NO: 8983 - protein, 529 aa, Escherichia sp.
MATGTQPDAGQILNSLINSILLIDDNLAIHYANPAAQQLLAQSSRKLFGTPLPELLSYFSLNIELMQESLEAGQGFTDNEVTLVIDGRSHILSVTAQRMPDGMILLEMAPMDNQRRLSQEQLQHAQQVAARDLVRGLAHEIKNPLGGLRGAAQLLSKALPDPSLLEYTKVIIEQADRLRNLVDRLLGPQLPGTRVTESIHKVAERVVTLVSMELPDNVRLIRDYDPSLPELAHDPDQIEQVLLNIVRNALQALGPEGKLGWMRYRNSRQVTGVVKNVTVSQSCGKWYISIQTESEVSTPVHPSASMVGLDAGVAKLATLSDGTVFEPVNSFQKNQKTLARLQRQLSRKVKFSNNWQKQKRKIQRLHSRIAYIRRDYLHKVTTTVSKNHAMIVIEDLKVSNMSKSAAGTVSQPGCNVRAKSGLNRSILDQGWYEMRRQLAYKQLWRGGQVLAVPPAYTSQRCACCGHTAKENRLSQSKFRCQVCGYTANADVNGARNILAAGHAVLACGGMVQSGRPLKQEPTEMIQATA

SEQ ID NO: 8984 - protein, 392 aa, unknown
  TnpB Polypeptide
VLAIKTVQQRYAPNQDTLRLLEQFRQMLNDCIQIGVSENISGLKALSLKAYKQLAEHDAMSYYKLCAISAAAGVLRNYRKTVRRGGKAGGPYARRLRLTTCYGFKVQDGCLLLPHLPREPIRIPLTPQIQATIAGHMVRSVTLTRDKLSLAYAKHVSEVRPRGFMGLDCNLNNVTLATTDGSVLKHNLSEVTRINSTYREVRSHIKRNDVRIRRQVASKYGRKQREKVKQILHRASKLIVNEAKRRHFGVVMENLIGMRRLYRRGNGQGRLYRSRMNSWSYAELQRQIEYKARWEGLPVIYVRPHGTSAKCSTCGSRMARIPEENRTLKCPRCGFTVDRDVNAARNILARGVRFAPIALPTEAMVQEPPVRRAGNPESRWERVNPLSHEPTS

SEQ ID NO: 8985 - protein, 415 aa, unknown
  TnpB Polypeptide
MLLTFKIQLNLNDDQQTIIDAMSNDSRLLYNHFLGKLKEQYEKDKTFISYYKQQKELKDYKCDFLTFDIKKEILRTLHNNYSSFFKLVKQNKDLNPKSPKFRSKDYFFTLSFTQDFIVKENVLKISYSNYRKLDIKLDYILPIKNLICLRNKTSESEIKQLKIYKQDKNYFASITYEKKEDILKNINKNKVLSIDLGKKNLLSVYDVENNQGVVYNSKYLSKNQKFLDKRIDELKSIRDTKKKNSRLSKQLNNKLKKIYSKKKTQTNLTLQKVTKDLSNKNKTILIGELTNLKKNIKSNFKSLNRQMQNNWNLQTFIHLLEYKCKLKGNQVVKVNEAWTSKTCCKCGNINHDLDLSDRQYICDCGNNINRDINGAINIYKQFMGDYNPPFETLVVSERFDWCHINQMNRKYKFYN

SEQ ID NO: 8986 - protein, 518 aa, Jiangella sp.
MSWRAWPRSPRARWRCPAPGRCCTLAPSGKGVGAVPVEIQTVTQAYTFALDPTPQQRRAFVSHAGAARYAYNWGLARTAGALDARAAEVAAGGEPVTSLPSHFELCKAWTVFKNDPANELGWVGQNFAGTYQAALRDAAGAWRNFFASRNGQHKGRRVGRPRFRSKRRTRLAFQVHGDGFRVRDAHHVQLPKIGAVKTHESTRKVLRRLTAGTARLVRGTVTRDAGGRWHVALTVQVQRPVRTTPSARQLAGGTVGVDLGVRDLMTLSDGTVVPNPRPLGAAARKLARAGRAHARTQPGSRRRAKAKARLGKMHARIGNLRLDASHQATTRLVHGYQRIVVEGWNAQQLARSRRDVPRRVRRDRNRRLADAALGRLRTQLRTKAAWYGSAVQIVDAHAPTGRTCSVCGAVRTTPIPPRQELFTCPAGHQLDRRVNTARLLVVASSAEETVNARGPGVSPEAAGQPGTKREARTRPDPSPGVEVGRAARTRKGLAPPPGDDGMSPKPTPTSSAEPDAAL

SEQ ID NO: 8987 - protein, 333 aa, Parageobacillus sp.
MYSVKPSNDRWKNKKQGGETAQTLTIKTQFFPDTPELLCQLSREYIHTVNALTEQAEKEGSFPKVTTKDVDAHLPSAVLNQAIRDAKSVSKKMKKEGKRPILKKPVYFVNNQNYTIGEQMIAFPIMLNGKTRKTRFRAMVTERDKNLIQRAKLGLMHIAEKAGKWYAQVSLSIPVTKKTNEKVMEVNLGLKVPAVAVTSNGKTHFCGNGRQNKYIRRKYQQRRRKLGKLKKLSAIRKMNNKEQRIMKDINHKISRQIVNMAIKEEVSVMKLEKLTNIRQTARTSCKNEKHLHTWSFYQLSRFIEYKAALAGISVVYVEPKYTSQHCPQCRTKK

SEQ ID NO: 8988 - protein, 487 aa, unknown
  TnpB Polypeptide
MSYGYRFPAEFVNKTSSEVYFTWSAAQALVYNVKVQEAHYHYRFYQVFGGDIPKADQKYSHLLTDPYTKKRYIEWLEDVPGEVLRNGAVLYIKAVSGAKSGLTKKPKTKRIKAADRSLWLTSELFTIKDLGGRWYELILVVGKYRRQVARIRFKAHRSFEMPNSVHVKTKGSRLFVSFSSPEASDENRFPETEDEIRARLRMQTPEELLARTIGCDRGIVTPLQTQTEGFGLKRIEKKRMCAKDKRIKRLQKKLSRQERDSKGSRKTSRKINDAHTYGRNVRENFAHQTSHALVSNSDADVIAFEDLKIKNMMAAPKPKYDEAGKPLPNGRAAAAGLHKAIQYEGMWGRTLTYAQYKALRHGKLVVTVPAAYSSQQCPKCGHTHSSNRPEQALFACTNPDCRFNEDHQYTADQVAAMNIASRAVKQIFDDQQKSKEQNRLLRMRKKGESIEGQGRGGTPRTMMRSDEVGAAKPAEPKPDTGNLPVST

SEQ ID NO: 8989 - protein, 425 aa, Haloferax sp.
VTATATKTLQATLAPPTAHKERRLQRTVATYRRALSESFESGATTQTAVNDVVTPYTLTSYAKDALKNYVPKLRDTYNASELKDDHPVRFTNRGWRLDHSDERRHEFCWRVPQAGRGNAFWIPLRINPAQRELWGDLLDGDVTVGEFRLQEHRTNWVLHVTVEYEVAEPTEPDEPMYIGFDIGESKLLTGCALRDGTPTQPYIYDGSRARHLRKEMFTTLRRLQERDAEWRIQERFDHYQNALTDIVEKASREAVEYAQQFENPVIVLEDLSYIREHLDYGKWMNRRLHNWAFARLTGRIEDKARDAGICVRFVNPAYTSQTCHECGHIGSRSSQAMFRCTNDECWVTEYQADINASVNIARRVNPWGERCALKPYTDDSPQDGSACDSTTGHCEQSRQSRQTTLGDFSSETSDDEASLVGSPAL

SEQ ID NO: 8990 - protein, 366 aa, Halonotius sp.
MSAVNDIVTPYDLPYQAKDALKSYVPKLRDTYNAKEMDDEHPLRLVNRAATFDYSDERDYGFVWQVPQPGRGTNFWIPLRINPEHESLWFDLLNNDAEAGELQLQRHRTSWELHVTVEYPVEELTDADDPTYIGFDVGESALITGCALKRDVPRKPMLVYGSRARHLRKEMHTTLKRLQERDAAEWRIDERFDHYQNALTDIVEKASRKAVEYAQQFDDPVIVLEDLSYIRESLDYGKWMNRRLHSWAFARLQGRIEDKATEAEIRVEYVNAAYTSQTCHACNRLGRRDEQAEFACPHDDCHVSKFQADINAAANIASRVNPWGESLPWKPAGDDTPQDGSGRDTATVHRAPSEQSSQMKLTAYSD

SEQ ID NO: 8991 - protein, 363 aa, unknown
  TnpB Polypeptide
VQNTAQRIIDKAFDALNNYYDNDDWGRPWYKHETFPLRMNYGEGYNLFLEDEMVRFRISAKPYNHVKGELCATQDQFNLLTQAIENDDWHVGTAEALSRNGREELHVTVTNETAEIGSKTAAETIVGVDVNEGCVALAALSESEIKDSIVLDYPEIKEQRHRYFTMRKRMQEAGQTAFNDVFRDKEHRFVHDQLHTVSRRVVEWIQQFDTPVIVFEDLKDMRDDIEYGTRMNRRLHSLPFAKLRDFITYKAAWNGIPSDDVDPEYTSQRCPVCGHTERANRHKKRFKCCECEHQDHADRGAGVSVAQKWLNKQDSRNVPALNTLPQVQKWELRRQASGPVDGPTVTHHTARGYQTDGVSGVSD

SEQ ID NO: 8992 - protein, 463 aa, unknown
  TnpB Polypeptide
MLLGIRLQAQPTDKQRQVLSQWMGCARGIWNAKCHEEKYYNTFARKYYPIGTYAPLDQQYSQFKDRELSPWLYDVPSQILRNSSTNWYKTYIKFIKGECGKPRCKRKDENGSVHLTRELFEFRQCDDGVVRLFIGTKKNNIGYLKIKSHRKYKTPNSLYIKKRHGEYWVSFCYDDEIDESLLFTQKQHLKYLKGSSSKFLEKHVVGIDRGVAIPVQCGADAFDFTDEQKRAKKDKIIKLKRYQRRLARQTNGSNRRYRTKVKISGCHMKVGNIRKDFCHKTSYAIVSKPEYKVIILEDLKTESMTKKAKPKPLANGKWGKNGAAAKSGLNKAILDKGWHQLEEYIKYKSYRLGKSWFKVQAHHTSQECAACRHTHPDNRKSQSRFVCDSCGHTDNADRNAAEVIKKRAIRLFLDSGTELSKRGVLLDKGCGAISKSLAAKAANASGNEASKKKRKVATSKVAA

SEQ ID NO: 8993 - protein, 221 aa, Escherichia sp.
  misc_feature (113)..(113): Xaa can be any naturally occurring amino acid
  misc_feature (124)..(124): Xaa can be any naturally occurring amino acid
  misc_feature (145)..(145): Xaa can be any naturally occurring amino acid
  misc_feature (175)..(175): Xaa can be any naturally occurring amino acid
MASWLVEWKNATETQWLKDSPSQPLQQSLKDLERAYKNFFQKRAAFPRFKKRGQNDAFRYPQGVKLDQENSRIFLPKLGWMRYRNSRQVTGVVKNVTVSQSCGKWYISIQTEXEVSTPVHPSAXMVGLDAGVAKLATLSDGTVFXPVNSFQKNQKTLARLQRQLSRKVKFSNNWXKQKRKIQRGFEGQQHVKVSSGYGQPAGAQCPGKIRFKPFDTGSGLV

SEQ ID NO: 8994 - protein, 402 aa, unknown
  TnpB Polypeptide
MWYSYSVIQVQRAITILLPSDPDLRATLNAFRQVKQEASSIAFNEGRPLRAVPLQRACYHIVKGTLNSQMTITALRLVAGAYASAKRNKHTIDKPFSFNRKAAMFLVGKRGRDADFRKDGSLSIWTVAGRKRILYKIPEAFQGIFQQAKEIDSLTIIERDGLLLGRVALTLEYPDAKGVHPIGIDLNETNALVAVDAEGNNLFISGRDVKVRNKRSYKTRKQLQQKLASRKAEGKDTHSIRRTLKRLGRKRSNRTRTFAQTTAKRLCQWARPDSVLVFEALDMPQPRKGKIRGKALRRRLSQWQHGMVRRYAEGKAQEFSLVVAEVNPAYTSQICSRCGLLGKRRRHDFRCPSCCFSLHSDLNAAINIRNRYTVSRHGGPLSIGPEALASAEGKLPALAGSS

SEQ ID NO: 8995 - protein, 390 aa, unknown
  TnpB Polypeptide
MIKTIRVMLIPNNKQKTKLCQYANTARFAYNWALSREKENYKNGGKFISDGNLRKEFTQLKKTDEYSWLNEISNNVTKQAIKDACNAYKRFFKGYSKFPKFKSRKLSIPSFYQDNVKIQFSDTHVKVEGFTTSKKKNKQKLNWIRLAEHNRIPVDCKYINPRIKYDGLNWYLTVGIEYEDSTIVPSSDGIGIDLGIKDLAICSDGNKYRNINKTQKVKKIEKQKRRLQRTISRSYEKNKKGESYCKTNNVIKKEKLLLKLNHKLTNIRQDHLHKITSEIIKQEPSFIVLEDLNVSGMVKNKRLSKAVQQQGFYEFRRQIEYKSAWNNISVIIADRFFPSSKLCSCCGIIKKDLKLSDRIYKCECGNIIDRDYQAALNLKKYGENIIKSVA

SEQ ID NO: 8996 - protein, 388 aa, Lactobacillus sp.
MLKGIKLKLYPNHTQQDQLAQMFGNDRFVWNRMLDMMNKRYQNNPDSKFLGKFQLDYLLKPFKKEYPFLKNSDSSSLQIVNEFLIQAWRNFFKDKTGKVGKPRFHSRKYLRQSYTGKSNIKVAGKRYLKVPKLGYIKSSKTDAIKGKIKRYTLSKEATGNYYLALQVELPEAKTLPKTNKQVGIDVGVADLAILSNGVKYQSFNGSYFKNKARVWQRKYSRRRHQAQVLAAQDKNRKALFPRSLDSFNNWQKAQTIKAKYQAKVANQRKDYLHKVTTELVKKYDVIVIEDLKIKNLQQNHHLAKSIANASWRMFRTMLEYKCKWYGKQLIAVDPKNTSRICSNCNYNSGEKTLDIREWTCPKCGVHHDRDINAAVNILKKAQSQVQCF

SEQ ID NO: 8997 - protein, 404 aa, Okeania sp.
MIIYEFKVKAKPQQYKAIDEAIRTSQFIQNKCLRYWMDNKGVNKYDLNKHCKVLAKEFSFASELNSMARQSAAERAWAAISRFYDNCQKKRPGKKGFPKFKKHTRSVEYKTSGWKLYQTRKAITFLDKKNIGTLKLKGTYDLNYYQLDQIKRVRILKRADGYYVQFAIKIDLKVDTEPTGKTIGLDVGIKYFLADSNGKTVENPQFYRKSEKQLNRANRQKSKKYRCGIKPQSKNYHKARIRYAKKHLRVSRQRQEYAKKIAYCVIQSNDLVAYENLNVKGMVRNRHLAKSISDVAWSTFRSWLEYFGVKYGKVTVAVPPHNTSQNCSNCGKVVKKSLSVRTHICPHCSYVEDRDINAAKNILKKGLCTVGHTGTYAWGDLPSGLVGEILPGDGESLNQESPSL

SEQ ID NO: 8998 - protein, 375 aa, unknown
  TnpB Polypeptide
MLKTIPTAIEELPGQRAMLDDTLSSMSDAMNFAVSSCYEHEETNAFRMHHFNYSALRRKFSLPAQLAVVANKYACSSVKEAIKRKAPRPKFSGKSIHYDARSSKIDLVKKTASLLTKNGRLKMKLNVPEYFRKFSDWKVKESNLVKCRDGKFRLMIAIERPTIKSNGTGKVIGVDRGINNIIATSEGWLYEGHDVFSRKQRYVLLRAGLQSKGTRSAKRHLVRMRGREKRFMRDVNHCISRALISTAGLNGVLVLENLKGIRAARHRHEQNWLFSNWAFYQLESFLAYKGEETGVAVKFVPARDTSRACSICGSLKRGQRQGSVFKCKTCGVILHADLNAAKNILHRYTSISGLQSICPLLPTGSSKPTFLTVSN

SEQ ID NO: 8999 - protein, 411 aa, Selenomonas sp.
VRKVSNLTKTIKLRIHVTPEQEALFRQMTEQYRQACNFVSQYIFDNQFDLAYQSLNKKLYSSLRGLFGLKSQLAQSSIKTTIARYKTVKQQLFQNPYRYKDENSNWQRIPKTLEWLWKPVFFRRPQADLVRNRDYSFIDDGRVLSINTLGKRIKCSFDGEHFAGYLDGSYQLGTAKLVELKGRWYLHIPITKTVEDFQKESVRHVVGIDRGLRFLAVSYDEQGKTEFVSGKKIATKRHKFQEVRRQLQSKGTKSAKRKLKAISGRENRWMSDVNHQISKTLVQKYGKDTLFVLEDLAGVSFEESNLSRTAKQNYDLRSWAFYQLEQFLTYKAHENRSEVLKVSARYTSQRCPKCGTIHKENRDHHKHLYSCQCGYQSNDDRIGAMNIQLLGTMWISGDNNPRYERITTASE

SEQ ID NO: 9000 - protein, 315 aa, unknown
  TnpB Polypeptide
MHRATKVRIYPTQEQTELLEKQFGAVRFAYNKALYIRSHWYKKHGVSLNNAKHIQPLLPIAKKSRRYSWLKAADSNALQVSLQNLDRAFQNFFEKRAKYPKFKRKHGPQSSYHCSSLKITADTIKIPKISPIRANIHREIVGKVKSITISRAPTGKYYASILADDGQEAPAKPTYITQLTGYDIGLKDYLIRDDGKKTPNPRHLVNAYRRLRRDSKALSRKQKGSANRRKARIRLAAQHDRVANARNDFQHKLSRNIIVENQAVIVETLKTANMMKNKRLARHIGDAAWSGFVAKLAYKAEASGVHLVKLDQWFA

SEQ ID NO: 9001 - protein, 451 aa, unknown
  TnpB Polypeptide
MGVGGIVSPTDWLISRVLPPEVVEVRRTNTFIVEDNSILRELADNCARLWNELNFERRQAYINYRKFEWYPKHLYRKYASLIGSATAQQIIRKNNEAWRGFLKLKKLEKEGRLPPHIKRVSMPGYWKRRGRRELRVIIRNDCYRIDDKYLYLPKGLKLRYWGKLKWHGKQGRLEIIYDEVDEVWRGFMAVEVEKPPLRGGNKPLYIDLGVVNLATIWHEGMKQPIAFSGRAILSDWWYWTRKIAREQSRLARVNKAKTSRRLRKLFRIRKRRFRHAVNAMIRMIVEYASRNGISKIVVGNLKGIRGNNHGDSKVNSMINNFWSFAWITQRLKEKAEKYGIEVKEVSEYKTSSICPRCGSDRVMRRKRLFKCLNCGLEAHRDVVGVVNIALVHNGGGFNGVVAHPLLLRWNGCRWEPRRAMNTQRMKTLEARISPLKWGECQQQGTYCSQIG

SEQ ID NO: 9002 - protein, 406 aa, Jonesiaceae sp.
VKQGFQIELAPTPEQVARLASHTGLTRVVYNRCLDEVKRTLDARKAAREAGVPDNELPDLLGWSAPALERYWRSVAHEYEWFASENMSSRVPKEACRNLASALKNFSDSRKGTRRGRRMGFPKHKVRKHGEHFRIDEARLKPVSEWAVSVPNVGKIATRENMGWLTERIADSRARVLGSKVTRQAGRWFVSFQLEVDRTDINERHTVPAGAPSVGIDVGIKSFATIASSDGRVEDICLPAAVKKTRRRVRRLNKELARRVKGSSNWGKTRDRLAAAHVDAVNARKDFHHKLTTSLTRTKTAIVIEDLNVAGMVKNRRLARAISEQGWAEFARLLTYKAGWYGSQVVVADRWFASSRLCRACGAINASLTLNDRVWVCVCGVRHDRDVNAARNLLAQVAGIDMGLVA

SEQ ID NO: 9003 - protein, 267 aa, unknown
  TnpB Polypeptide
MLSANKDLTEKKILRNRRVYKRKVEKAELNYSSYLSIDFGLNNLITTVENRNEKPIIVSGRVLKSINRQWNKQKARLNSIKDKQNLKRTNRLESITINRNSVITDYLHKTAQFLIGYCLENQIGHICLGNLKNIKQNIRMGKRNNQNFVNIPIQKLKQMITYKAQLVGIQIHEVNESYTSKCSSLDLEPIQKRKNYVGKRTKRGLFRGSNYLLNADVNGALNILRKVVGDGFIQNLSDRGCWFQPVRIRDVFQTSHEQFLLKCYTTT

SEQ ID NO: 9004 - protein, 381 aa, Rhodococcus sp.
VQLRYQYRVYPTPGQQNALARSFGCARVVFNDALRARQDAFAAGMKISDTEVQKRVVTNAKNTPEREWLAGVASVVLVQSVRDSATACKNWFASLSGKRKGRKVGPPRFKSRKDNRQAIRLTRNGFTLRPNRKLYVAKVGELKVAWSRDLPSDPSSVTIIKDSAGRYFASFVVEVDQQPLPEINTEVGIDLGLTTFAVLSNGKTITSQKFLRRAERKLCKAQQTLSRKEKGSRNRAKARWKVARAHARVADSRRNFVHQQSTAIIRDSQAVYVEDLAVSGLARTRFAKSVHDAGWAMFTRMLEEKAARYGRTFVKIDRWFPSSQTCSACGVVDGPKPLSIREWTCPCGVVHDRDLNAAKNILAAGRAERRNACGGTVSPAA

SEQ ID NO: 9005 - protein, 381 aa, Rhodococcus sp.
VQLRYQYRVYPTPRQQDMLARSFGCARVVFNDALRARQDAFTAGMKISDTEVQKQVVTEAKKAPERVWLAEVASVVLVQACQDARRAYRNWVDSMSGKRKGRKVGAPRFRSRTDNRQALRLTRNGFSIRRNRKLYVAKVGELKVAWSRDLPSVPSSVTIIKDSAGRYFASFVVEVDQAPLPEVDSEVGIDLGLTTFAVLSDGKVIDSPRFLRRAERTLRKAQQTLSRKEKGSRNRAQARLKVARAHARVADSRRTFAHQQSPAIIRDSQAVFVEDLAVSGLARTRLAKSVHDAGWGMFTRMLEEKAARYGRHFSKVDRWFPSSQLCSACGVVDGPKPLDVREWTCPCGAVHDRDLNAAINILAAGRAERRNACGGTVSPAA

SEQ ID NO: 9006 - protein, 392 aa, Escherichia sp.
MLRATKVRIYPTTEQAEYLNAQFGAVRFAYNKALHIKKHAYQRYGVNLSPRKDLKPLLSIAKKSRKYAWLKEFDSMALQQAVINLDAAFSNFFNPKLKARFPTFKRKHGRQSSYHCTGIKVLDDAIKIPKLNPPIKARIHRVITGKVTSITITRNAAGEYHASILCDDGIPAPEKPTYLEEEKITGVDMGLTDYAIKSDGNKVGNPRHLINASRNLRRKQKALSRKQKGSANRKKARIRLAALHERVANARADFQHKLSRAIVDENQAVIVETLKTANMMKNHNLARAIGDAGWHSFITKLEYKAAEKGVHLVKLDQWFASSKTCHCCGYKMPEMPLHKRIWRCPECGAEHDRDINAALNIRQKGILELKAAGLVVSVHGGQRKSVEQTVAA

SEQ ID NO: 9007 - protein, 378 aa, Glycomyces sp.
VWLMQLRYNYRAYPDGGQRSALARAFGCARVVWNDCLRARKEAHAAGEAYVSSAELSRTYLTAAKQTPERAWLAEVSAVVLQQSLRDLEAAYQAFFGSVNGKRKGPKVGPPRCKSRKDARQSIRLNTNAFAVRQGGRVYLAKIGEVKVAWSRELPAAPSSVTVIKDAAGRYFLSFVVQTGPEPPPDTDQQAGEPIGIDLGLTAFAVTSSGKRIDNPRFLRRAERRLKRLQRALSRKQQGSKNRAKARAALARQHAKVADTRRDWHHQVSTQLIRDSQAVYVEDLAVRGLARTRLAKSVHDAGWSAFVHMLEYKAARYGRAFAKVDRWLPSSQTCSACGAKDGPKPLSVREWTCTACGACHDRDINAANNILAAGQADR

SEQ ID NO: 9008 - protein, 543 aa, unknown
  TnpB Polypeptide
MSKSENEKSIATIPTQSSANIGKIDLVSDLLKPYSKLMIHFLNDIDLRFVRDNELMKFTKAKVYQTEEQYDALLVNCHKRYQKQVADGITPTRSLKEQLEDIHEYAVQTPLSARFAQTCYSQTVEIYKSWSTKLEDVVRSYLTNSSVSQKDEFFLVSCYRINKNHYWYSKELSLKWHQTKDGDLLVPTKQNKANITLPVSEDILFFMRRLIKQARKRIRFPRVKQLKTLKLDEKVATLEVSRSATHFDYFLKLSTLEKGKPIYLPLNRNPYLDECLTKGEKKPFVQLRLDGKKCVISAIVEYDKAPLRSSDSSLGLDFGMVSMFTTSDGEQHGLTSFIKLKIWDEELVVLTKELQKQGVKFTSNVRYVQLQNRIKSYFKNEICRILNKLAKKNVGVFVVEQLDFRAFGLSRRMNRLIGRTYCSIVKAKLARLEEQFGIQIVSVNPAYTSQECSRCHYVSKNNRKSQKQFICEHCHLHCNADVNAGRVIDQRRSLISEFPVYSKKGTSSVIRCQVREASEECHRRYCLNNELSTINASLAESSL

SEQ ID NO: 9009 - protein, 489 aa, unknown
  TnpB Polypeptide
MAELASEVRGISSYATYVTRNDTQLEVGLATAGTVRPAVAGRRAGVTMPDFLANGRTGKSRKEWLARYNVVTAFRSWQERIKAVNGESSKYVSQGWKRTVNASPPTYGEDYINLGAVDKQYAVIENNPFTDGEITLKMVIQGKWHLLIFPFDNVRFTEGKVTLPVVKIEDNQPVFIFSVVTDNPVVQFSGDYTIGVDVGINDYATVVVRNTATGKVTYQTTLSQRVHSLWNSVRASEKQVKQLREKADSLSLYDRQAIMAALDEAQLHRAAASRKKKELAIVAAQEIAYLAHFWDNAVVAVEDLSWITNTMQNGRWNRGELIKWLAHYVGQNGGWVVSVSSANTSQLCHVCGSEVTHPAHKVSQCAQCGVFDRDVNAAANIAARAVSKVEKARKTRANNRKLQKKTSLKTPIARASLKYPGRDRTKNCPTPKRKKKCQGVNTLSSPARAQANRLEASVLADCLTYGVTGTSQAAIKQGTITKYRLCSLN

SEQ ID NO: 9010 - protein, 412 aa, unknown
  TnpB Polypeptide
MKHTLRFRAYLSDDVASEAWRHIDILRQIRNHTVRDYYNSDYNDRPSDYDQHSKLKDWTDQWPTFAEPSQHAAQQAISQIHSDLETLQERRNEGYDVGRLQWQGAGDFRSLSYNQSSRFNVDYNTGDDRFVRLRLEKIGWFNIRADRDVPPAEDIDEVILKKETTGEWYVSLVTTVEDTPEKPPLSEIEPEDCVGVDLGITSDIHTSENLSVDTLDMSDEYDRYAREQRKLDRKEHGSANWENQRRKVAQAKRAIKRKVRDYQHKLTTWLVTEYDFVAVEDLDVKPMLENSQNAKNKQDAAWSQFIGLLEYKADLHGTQVETVKPEGTTKECAVCGVETNKPLWVREHSCPACGHTEDRDLNAAKNILYRGLKQLGAGRSESTPVQTALPTLTPHREAVSAKRVVEAGSPGA

SEQ ID NO: 9011 - protein, 417 aa, unknown
  TnpB Polypeptide
MEYSHRYHAYPTREVTEAVEQHIDLHRQAYNFARYEYTNYNDADDVGSAYKHHDRLTDWKDEFPVFTEVHSKALQRTVTRFYQNLSTLSQKKQNGQKVGMLTWKSPTEFQSMTYSQSGFELKNTSGRRATLWLSKIGNIPIRYHRDIPNKASIKEVTIKKETTGEWFVSFGLETDEEDLPEKPGVESLDTSNSVGIDLGILNYIHTSDGKTVDWLKLEDEYEQLHREQRTLSRKDHRSNNYEKQRREVAKLKRHIRRKVLDYQHKLTTWLVREYDAVFVEDLDVKGMLEQSYNARTKQTAAWRQFITLLEYKADLYGTHVVQVEARGTTKECASCGVETAKPIWVREHSCPSCGFACDRDANAAMNVLQRGFAELGLGWPEDTPVETVLPTDTHSVSAKRVVETGSPTLNEAAPAAE

SEQ ID NO: 9012 - protein, 546 aa, Streptomyces sp.
MSRKQLRAIEDAFVVPGPSGVAIRDRLKHLATEDEMVLRRVGEHLGCLASRDLKARCRDGLEHDSSTWAARKQGLTAESSSRWAGSITRAIHDQWALSRRCQLAYVNSLEAGVRTLRHRLSQPIGEKGTKRAPGGYRSKNEWFNKSRRLVILTHRLDVARAERETGAVHVVRGGRRLLDNRHNLRAAQLTEQRWRERWEASRWFLAADGESGKRFGNETIRVTPDGEVSIRLPAPLAHLANAGHGRYVLASKVQFQHRGAEWRDRTAANRAVAYRIHLDVGRGRWYLTASWTRPVVKTIPLETARADGMIGVDTNADHFAAYRLDRNGNPTGDPRRFFFDLSQTAAHRDAQIRHAISRLLHWAKRCGVKAIGIENLDFTAEKTREKHGRRKRFRQVISGMPTGKLKARLVSMAAEQGLSIVAVDPAYTSMWGDEHWRKPLTSRNRKMFRHDAASIAIGRRALGHPIRRRTAPPRTHQSDGCGLRTVQAGPGVRGREETRPPITERAHDARTRTGTSQRTRGTSASKTVRDARSSGTWVQSSFPDTD

SEQ ID NO: 9013 - protein, 370 aa, unknown
  TnpB Polypeptide
MKLTLKIKLLPSEEQAESLLNTIKDANNICNNISDIAWDVKCFNQFKLHNECYHQIKQSSNLSSQVIVRCISKVADAYKIDRKTKRIFKELGGISYDSRILTYNPNEIVSIWSGGGRLKIPFICHNRNYLSYIKGEADLVFKKNKFYLFQTIEVPDTEIEDIEEFIGVDFGQTDIAVLSDGTIYNSEQVKKVRKKYSKIRASIQSKGTKGSKKLLKRLSGKENRFVSINNHTISKQIVAKAKKEQKGIAIEDLTGIRRTAKPKSKAQKTELNRWSFSQLRSFLTYKALLNGIKLIVVPPAYTSQTCNICNHIGIRNGKHFRCENCGNVIDADYNAAKNIATWGCSINQPEKSTLFCSLHSLLGLKSANLC

SEQ ID NO: 9014 - protein, 429 aa, Streptomyces sp.
MSRFRMYPTAAQEQRMLLHCAHARYVWNLAVEQHAHWKPGRRSAPGFAEQCRQLTEARRDNAWLRAGNAEVQQQALRDFAGAKAARFAYGFGEPTWRKKFVHEGFRVIGTDRVPEFHPDGTPQLNARTGRQVMGRSVVVRRLNRRWARVKVPGCGWVRFRLTRAGLPQAKTFRVTFRNYQWHIAFAVIPEPVEAPGTGEVIGIDRGVTITAALSDGRKLNCPRLTTRERARVRKHQRRAARAPKGSDRKRDEYAKVARIKAREAARRKDWCEKTSTLLARTYHLIRFEKLNVKNMTASARGTVEQPGTRVRQKAGLNRAILAQGWGLLRRRTGEKAPGRVEDVPAPYTSLRCSACGWIEKDSRKSQAEFVCVSCGFGCNADENAAVNVAAGQGGIPRPRRTAGAGGVTAATGRSSAREPRPTRVGIPLL

SEQ ID NO: 9015 - protein, 355 aa, Cyanobacteria sp.
MINASGVIYNHCIALHKRYYRIWGKHLNCAKLQAHIAKLRKRKEFWQLVGSQAVQDICQRIEKAYQLFFKHHKKGVRPPGFKKVKKYKSFTLKQAGYKFLGGNRIKIGNKVYQYWNSKEIQGTVKTLTIKRTPLGELFIVVVVDSVDELGIKSSTGKIGGFDFGLKTFLTCSNGSKIESLQFFKTSLNHIRKASKQHSTKLKGSANRERARKHLVRRHEDVVNRRRDWFWKQAHDLTDKFDVLCFETLNLKGMQRLWGRKISDLALGEFLQILEWVAKKKGKSVIYIDRWYLSSKTCSCCGHILDELDLDTRRWRCPSCHSVNDRDENAAKNIQAVGASTVQLGDVRQSQTAITV

SEQ ID NO: 9016 - protein, 402 aa, Streptomyces sp.
VIRAYKFLLRPTARQAVALREMLADHCSLYNGALQERRDAYRHASKSTVRYGDQSAQLKDIRAFDPERQGRWSFSSQQATLRRLDKAFQAFFRRVKAGLMPGYPRFKGVGHFDTVTVPKDGDGCRWDSTPHDPQTRVRLQGVGHVRVHQHRPVQGRVRTISVKREGNRWYVVLACDEVPAEELSPTGAIVGIDMGIAHFLTTSDGEHVANPRFLQEMADELAEAQQHLAMFPKRTRQRTKRHRAAARKVAKLYGKIRRQRADFHHKTARTLVRDHDVIAHERLNTAGMTRAPKAKPHPDNDGACLPNGAAAKAGLNRSILDAGWAQFLTILANKAESAGRLVVSVDARNTSRTCPECGHVAKENRVTQAKFECTACGFAANADHVGATNVLNRAGLVLCAAA

SEQ ID NO: 9017 - protein, 410 aa, unknown
  TnpB Polypeptide
MIIRKAYKFKLKTNPEVEQLLTIFSGHSRFVWNYFWRINKLRLHNKQKIMRYHEMNYWLTLLKQSEEYGFLAEAPAHVLQQKLKDLDKAYKDGFDKKQPNKRMPKLRKKLLHNSFRYPEPKHFKLDNNRLCLPKIGWLGFFKSRQIVGDLKNITITKQGDSWFCSIQIQLKQEIEQKSIISQNSVGIDVGIAKFAALSNGEYIEPRNPLKALQNKLSKAQQVQSNKEKFSNNWRKCVKKVQIIHNKIKNVRLDFLHKETTKISKNHALVVIEELKIKNMSKSSSGNIDTPGKNVKAKSGLNKSILDQGWGIFRSQLEYKLLWNGGELRTVSPHHTSQRCNKCSYVDSRNRTSQDCFVCISCNHSENADINAAKNILAIGQIVSVCGENASAVSMKQKSLGIGDLVPTLQA

SEQ ID NO: 9018 - protein, 300 aa, Selenomonadales sp.
LANYHICKESENYKSLGTKDGFFFLPMALKFRVPPHIDSKLIKEIRIHPKFKAQFFELELVYDKEPIETDLDPNKFLGIDLGLDNLATSVTSGGSAFIVDGKNLKSYNRLFNKENARLQSEKDKHGIKFFTRRQYLNLRKRNRRVNHAMSVAARRIVDYCVENRIGNIVVGYNADWKIEINIGKQNNQNFVQIPHGKLCKKLKYLCELYEIRYVEQEESYTSKASFFDDDFLPTYDANNSQPYKFSGRRITRGQYKSATGFVLNADVNGALNILRKCSLISLAALQDRGCVNQPRRIKIF

SEQ ID NO: 9019 - protein, 239 aa, unknown
  TnpB Polypeptide
VLSREVTGEIKTVTIKRDRCGDLWLCVVEEAGHPSPHEEVTHPVGMDFGLKVFLTLSDGSERVSPPFFREGQGEIASLCRARSRRRKGSRHWRVARRRLARAHRRIAWKRRDGFFKTAHDLCDRYDFIGIEDLCLKGMQRLWGRKVSDLAFGEFVEILTYVCHKRGVVLHQVARYYPSSKRCSRCGVVNEKLTLSDRHWRCVCGVVHDRDHNASVNIRDRAWSLSRGTVRPSIAAARAT

SEQ ID NO: 9020 - protein, 387 aa, Clostridia sp.
MKILKGFKYRLCPTEEQKQLLLQHGGSARFLWNYLLTDNIEYYKRTGKFKFAHEMVVSIPKIKKEYDFLNLSFSQSLQMVARQLDRSLKDCFKNGKGFPKLKKKHRENDSFTVPQKWRLGKGFVFIPKIGEVKWIKHRPLQGEPEHITITQDGDQWYCSVTCEVEIPDKEKKDDNIVGIDVGLKSFATLSDGTIIENPKHLMKLEDRLKKEQRKLSRKKKGGKNRYKQRKKVQKIHREIRNARLDFIHKITSNMIAKYSGFVLEDLNIKGMMKNHHLAKFIADISWREFKRQLDYKSLWNGKYSIQIGRLEPTPTSRGSSCGYVQDMPLNKRVFNCSNCGISIDRDLNASKNILKIGLTTVGRTGSNACGVEALASTLKQEKECLVN

SEQ ID NO: 9021 - protein, 352 aa, unknown
  TnpB Polypeptide
MLVQHRVVTECRSYQERVKAANGESSKYVSQGWKRTVDASAPGYGEDYVNLGAVDRCYAAIENNPFLDGEIVLKMVIQGAWYRLIFDFNNARFTEGKVALPVIKVEDGQPVFIFTVVTDNPVVQFSGDYTIGVDVGINNYATVVVRSVATGRIVYETTLSQRVHSLWNSVRASQQQVRDLKAKAGTLLHDRQERMSALDEARFHREAASRKKRELAILAAQEIANLSHAFDNAVVAVEDLSWVVNTMQHGRWNRGALVRWLAHYVSQNGGWVVAVNPAHTSQRCNACGAKVSHPTHELSVCAEHGTMDRDVNAAANIAARAAPRVEKARKTRAKTGNSGHRPPLKRLSLGVR

SEQ ID NO: 9022 - protein, 434 aa, unknown
  TnpB Polypeptide
MGSYEAVKVRLDPTPRQLRLMASHAGAARFAYNAGLAHVKEALDSGEPADWSHYGLLRWWNANKDALAVNRDTGVVWWSQNSKEAYSMGLRSLAQGFSNWSKSRKGQRKGKRVGFPKFKSKNTTMRFAYSTNFTAPKASGPYGLKLPRIGRVHCMENVYKLVNGAHLIRISVSRRAGNWYASLMVERESTAKPSPKGGAVGIDLGVKNLATLSDGTVISNPRALGARLKALRKAQQALSRRVKGSARREKARERVARLHERVADVRADAIHKVTTMISRNYSTVCIEDLHVAGMVKTHHLARSVSDAALGEFRRQLEYKTARSGAVLRVVDRWYPSSKTCSDCGTVKAKLSLSERVYNCDACGLSMDRDLNAAINIRVAGSAPETLNARGEDVRRSDLVSGNADPCEARTKQVQKIAVRLGAGLGNEAIQPRIN

SEQ ID NO: 9023 - protein, 594 aa, unknown
  TnpB Polypeptide
MLCSSHLNKPPNILMFQRKLLDYGLKMEKSSLLKQKKVIEDMKSIFKIINKKGFLSYMQGFHQRNKKMTLKDKFFFYNKNIQRLNSLQTLVQGLISKEKDLTPFWTDSSMELSKKLWLPTKTDLQDSDSNSLSSCVKNSIQNSQLWMKKSNPLLKTSQKTFSQLSQFSQQDTMESVNMNYCRKIRIYPNKKQVELFNKCIGCSRYIYNKGIYKLKNEWNILKEKALNEGCLKCGKELHSTLYCKKHSNLKPKINFPLTLSKLRPMLMDSDKNLNEDEKWMEEIPYDTRQLVIKSLIGNIKSSISNLKNGNIKSFSMNYKKKKDLKQVFFVDKRAIQKLNIFKRRLKKKSKIRVRNRYKKYYNMKIKKDCIILKDFKYWYVLIPKDKDIKYKKAEYTSCSLDPGVRTFQTMYSPDGLIGKFGDEFALQLNKINQRIDLLKSLKTKKIYNSKTKQNINLRCFKLRTKIKNIVNDFQWKLSNHLTKNYNLIMLPKFETKDMSSSKKLNKKSTRMLLTLSHFKFQEKMKYLCKKYQRKLLIVNESYTSKTCTKCGNIDKKLGSSKTYNCKKCSLEIDRDINGARNIFIKNYIGQDEGL

SEQ ID NO: 9024 - protein, 368 aa, Methanosarcinales sp.
VSRRTFKYRIYPTKTQTTILLHWLNVCRYLYNELLADRKNAYDRCGIGVNYNQQAGQLKYLNLGIHSQVAQDVIRRLDKAFQNFFRRVKNGEKPGYPRFQGKNRYDSFTYPQSGFTILDGGKLKLSKIGTIRMFMHREIVGTIKTCTILRDGDRWYAAFSAELPDPEPKEIKTSVGVDVGITMLATLSDGTEIENPKTLDKYDSKLRKAHRDLSRKKKGSNNRNKQKTALAGVYRKVRNARKDCLHKASRILADTYDQIVFEDLQIKNMVKNHHLARSIHDASWSMLINFTTYKAEYAGGVVGLVNPRNTSKQCSVCGCIQPMPLSQRTYRCPDCGSVMGRDHNAAINIKNRYVPTDCEELTPVEMVA

SEQ ID NO: 9025 - protein, 427 aa, Microcystis sp.
MYKAYKFRLKPNTEQEIALAKSFGCCRWFWNYSLNLCQETYKTTGKGLTRGYIQGLLPSLKKEYEWLTDAYSQCLQVVALNLSQAYQNFFEKRSRLPRFKSKHGKQSISYPANVKFEGDYLKLPGKVGLVYCVRHREFAGTIKTVTISKNPDGKYYASILVDDGQSPLPPLIRGVPKAGGSTLNQGGDEDGGIDGKAIGIDLGLNHFAITSNGSKYDNHKHFAKHQRNLKRKQQKLSRKKKGSNNRQKARRKVAKVHYKISRCREDFLHKLSRKIVNENQVIAVENLNVKAMVRNHNLAKAISDCSWGMFCTMLKYKAEWQGKTYIEVDRFFPSSKTCHVCLNQVGSLPLDVRSWTCEHCKTIHDRDINAAINIKNEALRILVLSKAEACPELHRRVLSLGTSDTAQVGDVRPKAGRKSVLRQSPVK

SEQ ID NO: 9026 - protein, 253 aa, Microcystis sp.
MFVLEYKLRGKPSQYQAIDEAIRTVQFVRNKCLRYWEDNKGVGQKDIYRYTTELRNEYSFVKDLNSTACQQACERTWTAILRFYNNCKNQIPGKKGYPKYSKRTHSIEFKKSGWKINRDTKRITFTDGKNIGELKLIGSRDLFCFQEWQIQRVRIVKRADGYYCQLMLKLDVRDITPKLEPTKKCVGLDMGLKYLYADSDNNTVEPPKYYRKAEKRLNKLNRRKSKKFRRGQQQSNNYKKARQKYALGTFKSK

SEQ ID NO: 9027 - protein, 431 aa, Microcystis sp.
LFGCQQVLIKADKETRAIIEYLCRESNSLYNCSVYYARQIWLKTGKIVTGFALTKEMKFNPHFKAGYASSMQQTCLNVGESFKSFKKLLKKSIKGELNQKPNVPKYRKSGGLFTVTYPKKWLKLIEGKIRFPLGEQVRAWFGLTEFFLPFPVNLKWELIKEVRIVPRNTCLYAEFVYQQIHCELKEGQSLPTHLDSTKVLGIDHGLNNWLTCVSNIETSFIIDGKHLKSVNQWYNKQIATLKEGKPKGFWSRTLAHVTEKRNQQMRDAVNKAARIVINHCLIHGIGTIVFGWNQGQKNESNMGAKNNQNFVQIPTAKLKDRIVQLCEQYGIKFVETEESYTSKASFLDNDELPKYGEKPDGWQSSGKRIKRGLYRTADNWLVNADCNGGANILRKVKTMLKLDLSRVTRGILTMPIRIRFWSNSVLESASL

SEQ ID NO: 9028 - protein, 409 aa, Microcystis sp.
MIVLEMKAVLKPSQCTAIDDAIRTVQFIRNKALRLWMDAKREDKINKYSLNKYCAVLAKEFEFANELNSTARQASAERAWSAISRFYDNCKKGVKGQKGYPKFQKNNRSVEYKHSGWKLSDDRKKITFSDGKNIGTVKLKGTRDLNFYPLDQIKRVRIVRRADGYYIQFCLNLDVREYAKPLEPSKKCVGLDMGLKVFYANSDGETVEIPQYYRKAEKTLNRLNRKKSKKFRRGQPQSNNYQKARKRYAKKHLRVSRQRKGFGSKEALRVIKSNDFIAQVDLNVKGMVKNSKLAKSISDVAWSTFRQWLEYFGFKYGKATVAVAPHNTSQNCSNCGQKVPKSLSTRTHVCPDCGYVEDRDINAAINILKKGLSTVGHTGTHAWGEIPSGECWIRPARLRKLSEPRIPRF

SEQ ID NO: 9029 - protein, 174 aa, Microcystis sp.
MLPMEKAYSFRFYPTPEQESLLRRTLGCVRLVYNKALHLRTQGWYERQERVGYAETSSMLTDWKKQEELDFLNEVSCVPLQQGLRHLQTAFTNFFAGRTKYPNFKKKHQGGSAEFTKSAFKFKDKQIYLAKCTEPLPIRLFVTLYAKSTDKMPRQHTSNPKIPKVSKAIGSPFY

SEQ ID NO: 9030 - protein, 239 aa, Microcystis sp.
LGIATFSTLSTGEKIDDPKPLKKRLKRLRKAQKNLSRKQKGSNRREKARKRVAKIHAKIKDTRTDFLQKLSNKIVRENQRIVLEDLNTSGMVKNRKLSRAISDLGWRSFRDMLSAKSDKYGRDFRIITSWEPTSQRCSCCGNIGGKKALNIREWECLFCGTFHDRDVNAAINIKVAGGQSETTKNGRVGKRKTSVKGSRQPFGPRRELLSNADLTAEAHRSVVQLSLFDLPVITVRLRR

SEQ ID NO: 9031 - protein, 414 aa, Streptomyces sp.
VKLVVQVKLLPTPVQAAALEATLHACNEAATWASRLAFEKDVKNNFALRKLAYSEVKTRWQLGAQAAQHVIKKTCDAYTTLRANLKAGNLGRPGSKRYRRATEKPIVFRPQGAQPYDDRMLSWQITERQVSIWTVSGRVKDVAFTASPEQLATLALYRQGESDLLERDGMWFLNATCEVPEQALNSDPVDFLGIDLGIVNIATTSDGEIMAGRELYRVRVRERKLRTKLQKKNTPSAKRRLKKRRRKEARRAKDINHKIAKHVVAEAERTGRGIALEDLTGIRERVRLRKPQRATLHSWGFAQLGQFIAYKARKAGVPVVHVDPAYTSRTCAECGHIDKANRVSQAWFACRNCGFVDHADRNGSRNIRARAWELWRRGAQSTAPAPPRQHRRGGAGRKRSITPSDARCASPSLP

SEQ ID NO: 9032 - protein, 387 aa, Lactobacillus sp.
MVQIIKGVKLRLYPNAQQREQLWQMFGNDRFVWNQMLAMAKERYQNNPSSHFVNEYGMNYLLKRLKQEYPFLKTSDSTSFLVVNHNLAQAFKMLFRHQGGYPHFKSRHAIRQAYTGRSVCRVLAKRRVRLPKLGSIRTSKTAVLANSKIKCYTVSFTPTGRYYLSLQVAVEPPKQLNKTGKTVGIDVGITDLAVSSDGIKYETYNAKWYEKQVVTWQSKYAKRKHQATVAVRQWNHNHKTVKTELDDYKNWQRARQQKARYQTKIANQRKDYLHKLTTALVKQYDVIVIEDLKAKNLQKNHCLARAIANASWYQFRIMLAYKCAWYGKRLVVVKPNYTSQICSHCGYHSGPKPLNIREWTCPNCGTHHDRDVNAAINILHQGLNAMG

SEQ ID NO: 9033 - protein, 289 aa, Natrialba sp.
KQGGDTAFTRASSCAAHQKSPISEDDAKFKQVTVKKEPTGEWFATFGVEMDREPPEPPENPEKCVGIDVGILKYAHDTDGTTVGSLDLSDERERLEREQRKLSRKQHGSNNYEKQRRRVAECHADLRRKRRDFLHKLSNYYAREYDLVAVEDLNVKGMMESPSNSRNTASAAWRTFLSLLEYKCEREGTHFVAVNPRGTTKECASCGVSTEKPLWVREHSCPACGFEADRDANAAWNILSRGLEDVGVGHSERTPVETALPADTPVSAKRVVEAGSPTLKERTASAVSE

SEQ ID NO: 9034 - protein, 398 aa, unknown
  TnpB Polypeptide
LTNAKQHKLHETYAAFKDISSSTLQTIQASKPKTYTALHHIVYRDNRRRQIASQLVEEAQRYAWQRRKIADRIEHPTIRFDKRLFSWRRTGRGHPILSVRCNNERLGLPIQRDGAYRRLLEHMGDGWAATSVLMTRRYRFLVLLKKTPPAQRVTDNMVGVDQNSNGIGVTVMNKRTGRILKQLYLGRTISLRQIRYENRRAKLQEYRDKNGHRGKAGLKLKRLTGRQRSYVRTNTWLLAKQLTDLARAHNASIAIERLYKLRRLKGEMSRKSRRKTNRIPYGFFRHALTHKSVQLGIPFVQVSARYTSQTCPRCGHISRQNRRNWRYFRCVRCRFGANADRVASVNICRKAIQATYPVTKDQILPTGASVSRLDMQDEETSWQHPTPQSCKLLTSVTE

SEQ ID NO: 9035 - protein, 373 aa, unknown
  TnpB Polypeptide
MLLSHKTIIKLSDNYSNIIGHMCYAAYKLWNICNYEKLHNKELNLPVSFPDWYYQKAAHKNNLWYKQLPSQTAQEICKQLNSSWNSYFKLLKTGGIKNPKPPRFKHDNIAVTYMQNGIMHNSDVVRLSISKGLKDFMSKEYGINDDYLYLKNPIFKNIDTIKQIKIYPPEGNCCNVIVIYEVPDIIKLADNGKYLSIDLGLKNLMTCLNSETGETFIIGKKYLSLCRYYYKEIARIQSQWYHQQIKMDIKYPKSSKHIKKMYIKKNNVIKDYLHKITRHIVNYCKANGINTVVVGDITGIRKDNVKDDKYNQKMHFLSYDKIYQMLEYKLALEGINFIKQNGAYNILRLYLKNDAIKLSPYDIKVPKIIKVAA

SEQ ID NO: 9036 - protein, 402 aa, Thermococcus sp.
VNYLRRQQFFQEQIVDFNTTEKTVYVEFKKEIGSATVQQIARKNAEAWRSFFSLLRKKRNGELPDWLKPKPPNYLKKDGKRKPLIVLRNDQYRIEGNRLILKGLGKFKRLEIQFKGRIHLRGRQGRLEITYDEVKRKWYAHISFTVEEKLDGEEWVKLPRKPKGNLSAGIDLGVNNLMAVYVESGESFLVNGRPLKSIDFYWQKRIAECQSKLNKSGAKTSRKLRRMHKKAKLQAKHYINTAVRGTVRRLYELGVSTIIVGHPKGIARNSDKGKKQNFLLSHVWRFNYVIKRLKEVAEEYGISVVVVGEALTSQTCPVCGKPHDGARFVRGLFKCPATGLVFNADLVGAFNILRKVVKTITPSLGGLFAQRRGNGGKALPEGPKARFELGFNEAPQTSLPVG

SEQ ID NO: 9037 - protein, 439 aa, Thermococcus sp.
MRRSVTVKLQPSKEQEKILFQLAHTTAIIWNKLNYERLKQFKEFGKIDFGTTEKEAYHSFKDWIGGSTVQQICRKNAEAWRSFFSLSKKKKKGELPDWFKPRPPKFIREKNGRKLFVIPLRNDQYRIKDNVIELRRLGKFRKLEIQFKGRIHLRGKQGRLEITYDEVKRKWYAHVSFTVEEKLEGEEGVKLPRKPKGNLSAGIDLGVNNLMAVYVESGESFLVNGRPLKSIDFYWQKKIGEYQSKLNKSGAKTSRKLKRMHERAKLQAKHYINTAVRQTVRKLYDLGVSKIVVGYPKGIARNSDKGRKQNFLLSHVWRFNYVIKRLKEVAEEYGIQVLVVSEAFTSQTCPLCGQRHSNARFVRGLFKCHREGVVMNADLVGAFNILKKVVKTITPSLEGLKAFRMRGNGGKALPEGFEESSSRVILMRTPQTSPSLARG

SEQ ID NO: 9038 - protein, 491 aa, unknown
  TnpB Polypeptide
MILSYVYKLRPSGSQSAKMESWLNMLRSTYNWCLADRIETYHYSFIQGAYCSLRTKAEAYPLTCCIVKNGATGNPWTHSGKKRNAGTIQDAALVDLKAARPWYKSIDSDVLQRNIARLNTAYKNFFDGRGFPAFKNRSNFRSFEYKPGRVKFKGSEVYLPKIGWMRFFNSRSIPDGFVIRSVTIRRKTDGWFISVRLEDKSVPELIPRPTSEVKTAVGLDMGLTKLVHCSDGSDIPNPRFATNQKAKRTQLIRQRRVSRTKKGSANRKKRAESVAKLHSKIRKRRSAYQWQVANKLVKKADAIVVEDLNIPGMVRRCKPKREEQTGRFLPNGQSAKRGLNRSILDASWGELINKIQYVAAKSGKVLLKVNPRDTSRECSACGHIDKANRDRERFICTECGHFDHADKQAARNIKHKAVVEYGLNLIKVPTDCGKPKQLNLFETPSAELTVPRRRKHDTRKGKRRVPGNLGRQLELFSQDMWNVSSTESPFF

SEQ ID NO: 9039 - protein, 417 aa, Lactobacillus sp.
MESGVTIKIKLKLPNVETAASFEKTMEQFRLACNFISEYIFNHSLGELNKNKIQKAIYRDVRNNFGLKSQMAISAIRCTVDRYKTVRTQLKKHPMRYKSDDTDSQTGKRVWKCISRDLYWLWYPINFKRPQVDLQRGKDWSYLKSGQLSINTLDKRVKVDFDCHGFDQYLDGTWKLGVGKLLKSQGKWYLHISCTKEIDEFNDQNIEHVVGIDRGLHQIIAAYDEQGRSLFANGKQIAKKRNHYYQLRRHLQMKNTRNSKRRIRKIGNRENRWMDDVNHCLSKTLINHYGKNTLFVLEDLSGVSFDEDNQNSKDFNRDLHSWTFYDLETKLTYKAQLNHSKVIEIDAHYTSQRCPKCGRIRKESRDRNLHMYICDKCGYKSNDDRIAAMNIYNLGTFYVSGVEHPTYQNKLEKIKNN

SEQ ID NO: 9040 - protein, 402 aa, Escherichia sp.
VKRLQAFKFQLRPGGQQECEMRRFAGACRFVFNRALARQNENHEAGNKYIPYGKMASWLVEWKNATETQWLKDSPSQPLQQSLKDLERAYKNFFRKRAAFPRFKKRGQNDAFRYPQGVKLDQENSRIFLPKLGWMRYRNSRQVTGVVKNVTVSQSCGKWYISIQTESEVSTPVHPSASMIGLDAGVAKLATLSDGTVFGPVNSFQKNQKTLARLQRQLSRKVKFSNNWQKQKRKIQRLHSCIANIRRDYLHKVTTAVSKNHAMIVIEDLKVSNMSKSAAGTVSQPGRNVRAKSGLNRSILDQGWYEMRRQLEYKQLWSGGQVLAVPPAYTSQRCACCGHTAKENRLSQSQFRCQVCGYTANADVNGARNILAAGHAVLACGEMVQSGRSLKQEPTEMIQATA

SEQ ID NO: 9041 - protein, 596 aa, unknown
  TnpB Polypeptide
LEAARQLQNACLGEAVRRVRLIQQSRLWQRAWKGENKERRSVLIREACSKYGFTDAALQHYAVEIRRSCWIRDHLDVHVAQKLGTRAYQSARRVLFGKARRVRFKGKNQMDTVEGKSNEAGIRWREGFVIWKGLVLPAIIDLEDLVVRHALSCRVKYVRLVRRKINGRNRFYAQLICEGTPYQKPANALGEGVVGIDAGPSTIARVNSKEAVLSRFCEELAKKEAEIRRLQRKMDRSLRANNPENYNPDGTVKEGPKRWKKSKTYLEPQARLAEIWRKLSAHRRSLIGRMVNETLRMGNVFKFEKLSYRALQGVFGKSVNTRAPGKYFQELTRKAESAGGKVLKFPTRLKVKGTETYVGLSSYCICGERKKKSLSERWHICSCGVKCQRDLYSAYLACFVKQIGQSDFELDAGTAARQWPGAEPLLQAASGHIPNPRVSGSSGQPCKGTEGVAAEEGIAKAEAWDGVAPSPGGGESPGEVAVVPLRTPSFSCGEAQPDSCKVFPDDGVEPVNLLLDPGKEGDALFEEDGENGDLKGNGGEDEGRKAGSHDHRHHCSPQEKEWRPNDDAQGGKDDILELGHVVREAGEECPAGKASR

SEQ ID NO: 9042 - protein, 382 aa, Escherichia sp.
MRRFAGACRFVFNRALARQNENHEAGNKYIPYGKMASWLVEWKNATETQWLKDSPSQPLQQSLKDLERAYKNFFRKRAAFPRFKKRGQNDAFRYPQGVKLDQENSRIFLPKLGWMRYRNSRQVTGVVKNVTVSQSCGKWYISIQTESEVSTPVHPSASMVGLDAGVAKLATLSDGTVFEPVNSFQKNQKKLARLQRQLSRKVKFSNNWQKQKRKIQRLHSCIANIRRDYLHKVTTAVSKKHAMIVIEDLKVSNMSKSAAGTVSQPGRNVRAKSGLNRSILDQGWYEMRRQLAYKQLWRGGQVLAVPPAYTSQRCAYCGHTAKENRLSQSKFRCQVCGYTANADVNGARNILAAGHAVLACGEMVQSGRPLKQEPTEMIQATA

SEQ ID NO: 9043 - protein, 413 aa, unknown
  TnpB Polypeptide
MLVKSVAFPLASDLPPEAISLLQDFRLAVNKAVRASLDARVSSKYGIAKLLYRSYREEHPGMYSQHLVSSFGVAAGILKNYRRRLRQGKSCGTPFVKRLMMKAENQAYKLDRTEGMVDLPIRAGCHVKLRLVVSRYHRRYLNDGTLSLGSLTVLPNRVIITFRKEPPRPIAACSVLSLDTNERSLDGIFVDGGGKGDGSCVQVKAAFPEVAVIQERHHDRRRKLQKKKAHDRRLTRVLCGREGEREHHRIDYRLHHVANAVLEFAEDHKSAIVLEDLRGMRPTRSKELNRRLNLWPRRKLHQIIEYKAAWKGLPVIKVDPRHSSRRCPACGRIPDSRMGTRAEFACECGWHLDRHINASMNLLQTAISKGLEMAGGLRFSPGAFQNDVVMTLYEPAMAARSEPNGTSQIGVTS

SEQ ID NO: 9044 - protein, 381 aa, Mycobacteroides sp.
MQLRYRYRVYPTLGQQATLAQAFGCARVVFNDSLRARQEAHAAGVKLSDAAVQKRVITDAKHTPERQWLSEVASVVLVQACQDARRSYRNWYESISGRRKGRVGAPRFRSRKDNRQAIRLTRNGFSLREGRRLYVAKIGELNVRWSRELPSVPSSVTIIKDRAGRYFASFVVETTDEALPRVNAEVGIDLGLTTFAVLSDGKVVTSPKFLRQAERKLRKAQQALSRKEKGSKNRTKARIRVAKVHAKVSDARKDWADKQTTTIIRENQAVFVEDLCVTGLARTRMAKSVHDAGWAMFTRMLEQKAARYGRTFGKVNRFYPSSQICSACNRIDGPKPLAVREWQCKACGAVHDRDLNAAKNIHAAGRAEWLNACGVAISLPA

SEQ ID NO: 9045 - protein, 402 aa, Escherichia sp.
VKRLQAFKFQLRPGGQQEREMRRFAGACRFVFNRALARQNENHEAGNKYIPYGKMASWLVEWKNATETQWLKDAQSQPLQQSLKDLERAYKNFFRKRAAFPRFKKRGQNDVFRYPQGVKLDQENSRIFLPKLGWMRYRNSRQVTGVVKNVTVSQSCGKWYISIQTESEVSTPVHPSASMVGLDAGVAKLATLSDGTVFEPVNSFQKNQKKLARLQRQLSRKVKFSNNWQKQKRKIQRLHSCIANIRRDYLHKVTTTVSKNHAMIVIEDLKVSNMSKSAAGTVSQPGRNVRAKSGLNRSILDQGWYEMRRQLEYKQLWRGGQVLAVPPAYTSQRCACCGHTAKENRLSQSKFRCQVCGYTANADVNGARNILAAGHAVLACGEMVQSGRPLKQEPTEMIQATA

SEQ ID NO: 9046 - protein, 276 aa, Bacillus sp.
LFSFLFNHFLSLWDNAYKETGKGLTYGTCSAKLLAMKKKFVWLKEVDSIAIQSSVRNLTDAYTRFFKKQNSAPRFKSKKNNVQSYTTKQTNENIAVVGNKIKLPKLGLVRFAKSREVKGRILNATVRRNPSGRYFVSLLIETEVQELPKTHSYIGMDVGLKDFAILSDGTIYKKPKFFRFSEEKLAKAQRVLSRRTKGSSRWNKQRIKVARIHEYISNARKDYLDKISTEIIKNHDVIGIEDLQVSNMLKNHKLAKAISEVSWSQFRTMLECKSKW

SEQ ID NO: 9047 - protein, 492 aa, Scytonema sp.
MANKKTRRKKGHIESQKTIKLWVVDDVSYKDNIANYIISTHKKYAEVTNFYADILLADLSLLETRSDDLYVVLEGLTIRNKNRAEVQFPMLDDVPSDMRRACIKKAFGVVKSWYSNYKKWEIKKEKKLALGKKFTDRPPVPPRDYSQMHPVLYSGMYKDFDGTSIVLKLWTGTSWAWIKQPINLSGQSLPNGWNWGSPTLVLKDKLHLHFPIIKQIPSPGKIKEQAQNPDGITICSVDLNLDGTVAVASILSSDGTGNVEELATLFVNGNDAIQHRRKRELGRIAKAYSRTNKGFGSTKEGDCSQRFKKIKNRDNYESHRISKRLVQFAHKHGATVIVFECLTNLKPSKAKYSRRSNQKRAYWLKSKIVSRTKYKAFQMYGILTSLVSPKNTSRECAYCQSKVSRHQLQLTNSSAFLLNQVILQVNLGEVIYLNGAPHYLCLKNANHQGNADLNASRNVGLKFLRRYLKNPKIMTKSPVNGAFHKGTIPLVV

SEQ ID NO: 9048 - protein, 406 aa, unknown
  TnpB Polypeptide
MPVRGVAFYLDGALPPEAGYLLQDFRLAVNEAIRAGLQSRATSKFALAKLAYKGFRQEHPRMYSQHLVSAFEVAASALKNYRRRIRHGTTTRVPYVKRLMMKAENQAYKLDREKGLIDLPITAGCHVFLKLIVSQYHRRYLEDLSLFLGSLTLLPDRVVIAFRKQPPRSLVPNAILSLDTNERSLDGVFVESSSATPVMVSFPDVAIIQQIHHDRRRRLQKKKANDRRTSRRLCRKEGRREHDRVQYRLHHVADSILSFAEARRSAIVLEDLKGIKYKKNKDLNRRLSMWPRRKLHQLIEYKAEWIGIPVVKVDPRYSSRKCPACGRIQDSRMGTEFKCECGWRLDKHINASLNLLQTAISKGLEVAGGLRFDPGAFQHDVMMILYEPAMAARSEPNGTSCTMVMS

SEQ ID NO: 9049 - protein, 226 aa, Georgenia sp.
VAATADGEEALRVERAPRSKRSAAARTRRLARSLARKQKGSRNRRRAAARLARHHAHLRGRRRHLLHQVSARLVKTHDRLVLENLHVAGMLANHRLAAAISDAAWVELARQIGYKQTWRGGQVLLADRWFASSKTCSGCGHRKETLSLKERTYRCAACGLIIDRDLNAAANLATWATRHTAQEAGDRQADGPVTNAHRRDGSGPRTSADETSPDDVGTETQTGHPA

SEQ ID NO: 9050 - protein, 404 aa, Methanobrevibacter sp.
MELNVFMKCVNQGLKVRLYPDEDMLTKINQNIGNARFTWNKLLENYQNTYKIFKLNGYSKLKCNMATFNTMLNMLKKEHDFLYLSESSSLQQVFRDLINAFNKFFNGEGGYPRFKSKKHDKHACRIQNNHNIKINDNTIVLPKLGEVYYRTSKKYREKLKNAKINNVTIKIENGKYYAVFNIETETPDFPKTHKFVGIDLGMKTLATLDNGLKIANLDVTYEESMIKKYQKRLSNKEYQSNHYKDTQKTYWKWVDRKKNKINDYYHKITTEIVKKYDIIILEDLNIKGMFQNPHSSRKLQRIGWKKFVEMLKYKARIYGKTFRQVSRWYPSSKNCSNCGYYNKDLKLEQTQWKCPQCQKTHDRDINAGKNILKQGLIDLIDETMNLWDRGDSTVILLSWKSTSP

SEQ ID NO: 9051 - protein, 383 aa, unknown
  TnpB Polypeptide
MKAHKAYKFRIYPNKVQEVLIAKTIGCSRFAYNHFLAKWNQAYQDTGKGLTYNTCSSQLTQLKKELVWLKEVDSVALQSSLKNLADSYARFFKKQNKAPRFKSKKNNVQSYTTKQTNGNIVIVDNKIKLPKLGLVKFAKSREVCGRILSATIRRTPSSKYHVSVLAETDVQPLEKTDSSVGIDVGLKDFAILSDGTIYENPKYFRQLEIKLAKAQRVLSRRKELAIKEKRKLSEAKNYQKQKRNVARIHEKIMNKRADYLHKISTEIIKNHDIIGIEDLQVSNMLKNRKLAKAISEASWSQFRTMLEYKANWYGKQVVAVSKTFASSQLCSCCGRQNKDVKNLALRIWDCPQCHAHHDRDINASKNLKNEAVRLLTAGTAGIA

SEQ ID NO: 9052 - protein, 397 aa, Rhizobiales sp.
MRNRAHKYRIYADQQTVDFFARCCGVVRLVYNIALEQRSSFWRQFKRAEGRNISYPSQARELTAIRAEVPWIAECPIDAQQQALRDLNQAFGNFFAGRAGYPKPRRKFVNDAFRIPSSRIGPIEVLNGKWARVRLPKIGDVKFRYTRPIRGKVGNITVVREANGWHIIFSYEFEHETPANDNPSVGIDRGIVNNVALSTGEMSSMPTSDLDELHKQWQRVASRRKSRSKRQAKAKRHAARIAARAARKRLHWQHVTTTRFARRFGTAVLEDLKIRNMSASARGTAEDPGRDVAQKAGLNRSILAAAWFRFETLLTYKLDFLGGTVVKVDPRYTSVTCSECGSRDKGNRENQAKFLCLSCGHADHADVNAAVNILLAGTRPSAASERSGGSRVLERAA

SEQ ID NO: 9053 - protein, 404 aa, Streptomyces sp.
MIRAYKFLMRPTVGQTAALTEMLRDHCSLYNGALQERRGAYRHTSKTSLTYGQQSAQLKEIRSFDPERQGRWSFSSQQATLRRLDKAFAAFFRRVKSGETPGYPRFRGVNWFDTVDFPKDGDGCRWDSTPHGPVTRVRFQGVGHVKVNQHRAVVGEVKTVSVKREGRRWFVVLTAEQDQPDPLPPTGSVVGIDLGIANFLADSDGGFVENPRHGRRAAAKLEAAQQALSRFPRRKTKDRTKNHQRAVEKVAKLHGKVRRQRLDHAHKTVLGLVREHDFIAYEELTIRKMSKAPAPKPDPETPGIFLPNGAAAKAGLNRSIADAGWGVFLAILNAKAESAGREVMAVDPRNTSRRCPECGHTAKENRPTQQKFRCQACGHDAHADTVSAINVLRAGLVRRAAQPA

SEQ ID NO: 9054 - protein, 249 aa, Borrelia sp.
LPKIGFVKLALHRNIKSNEVVKNVVIEKDTDDKYYISVAVEYLDTKNNNKTKDNKKEAVGIDMSMRHFLVSSEGEKTNHPKYLLKNERKLKKYQRKLSKKQKGSVKRAKSRLRVAKLHRKISNQRKDFLHKLFYYFVANYKNIAIENLSIKGMQKGMFSKSVNDLGWHELVRQLSYKSEWYGSYLHKVDRYCPLIKLCSKCHIKNTTLELSDTRWTCRSCNTLYDRNINAALNLKAYYYKEIKTKARTA

SEQ ID NO: 9055 - protein, 324 aa, Escherichia sp.
LQQSLKDLERAYKNFFQKRAAFPRFKKRGQNDAFRYPQGVKLDQENSRIFLPKLGWMRYRNSRQVTGIVKNVTVSQSCGKWYISIQTESEVSTPVHPSASMVGLDAGVARLATLSDGTVFEPVNSFQKNQKKLARLQRQLSRKVRFSNNWQKQKRKIQQLHSRIANIRRDYLHKVTTIISKNHAMIVIEDLKVKHMSKSAAGTISQPGRNVRAKSGLNRSILDQGWYEMRRQLEYKQLWHGGQVLAVPPAYTSQRCACCGHTAKENRLSQSKFRCQVCGYTANADVNGARNILAAGHAVLACGGMVQSGRPLKQEPTEMIQATA

SEQ ID NO: 9056 - protein, 376 aa, Phormidium sp.
MKTLKFKLYQHKRNRYLKKAINAAGAIYNHCIALHKRYYQMWGKHLNCAKLQAHIAKLRKRKPFWQLVGSQAVQDICQRIEKAYQLFFKHNKKGVIPPGFKKVKKYKSFTLKQAGYKFLGGNRVRIGERVYQYWNKREIEGKVKTLTIKRTPLGELFMVVVVDTSEPTVKFETGKIAGFDFGLKTFLTLFDGAKFEKIASPEFFKCSLKAIAKASKNHSKKQKNSANRERARKHLVRQYEAVTNRRQDWFWKLAHNLTDKFDVLCFESLNLKGMQRLWGRKISDLAFREFLQILEWVAQKKGKKVIYIDQWYPSSKTCSHCQHLLDSIDLSVREWRCPSCQTINGRDENAARNIYAVGASTVGLGDVSRVLPAITV

SEQ ID NO: 9057 - protein, 407 aa, unknown
  TnpB Polypeptide
MQRLQAYKYELQPNGEQQRQMRRFAGSCRFVYNKALALQKERFERGEKKLGYAGLCKGLTEWRNGVETPWLADAPVHPLQQTLRDLERAYSNFFSRRADFPRFKKKGQSDSFRYPDPKQIKLDQANNRLFLPKLGWLRYRNSREVLGTVKNATISHSCGKWFVSIQTERELEQPMHPSASIIGVDVGIARFATLSNGTVFAPINSFKKHQTRLARYQRAMSRKVKFSSNWKKAKAKVTKLHQKIGNLRRDYLHKSTTTISQNHAVVCIEDLQVSNMSKSAAGRVEAPGRGVKAKSGLNKSILDQGWFEFRRQLEYKQAWRGGLVVVVNPRNTSRSCPCCGHVSKDNRQSQAQFLCVECGYEEHADVVGAINVLRAGHARFACEVSGAVMPPATGTHRSDSGAAHCRA

SEQ ID NO: 9058 - protein, 407 aa, unknown; identical to SEQ ID NO: 9057
  TnpB Polypeptide

SEQ ID NO: 9059 - protein, 201 aa, Okeania sp.
LTTNTGETISVPKFYRKSQSNLARKQKKVSRKEIGSNNWKKAQNRIARLHQHIARQREDFHYKTAHKLVRENDLIAVEDLNIRGLARNTKLSKSIYDVAWGAFIEKLNAVAVKRGIHVIKVSPHNTSQNCSNCGHKVPKTLSVRTHSCPKCKTVLDRDENAAINILNKALNEVGIILSACGGLGVSQPVKQETSLLKKLPL

SEQ ID NO: 9060 - protein, 457 aa, unknown
  TnpB Polypeptide
MSKSETYLTNFQKRLQTIDRHVKYFDCKVFELKIDQRHLNESDRNNLHKIFVEGKWFTNSLISKAKESGKPLHSSSYQSKDAKFKTVVHLDKDGNKIESSFDILSASSRQGIVMSLKSNIKSIWSNVKAKNIKLTKDLGLKFKSECVCIPLKQYKTDWAIVSKNRIKITRFSKPFRVHGLNQLDKYQDIEFANAKLLHKPDGFYLNITVWIPKQSESIPNINNHQTLGIDFGCRKTLNVYNLERNQALKINVVYEEPEQLKRTSKLINRRFVKKCSNRSNKGFKLRNKLRKQYQKLTNKKNDSTNKIIHWTKQFKLVCFQDDPLKAWSRKHGKKIQHSILGRIKSKLKNNSNTIVIPCDKNHPTSKMCPICSSKNKELGLKEVFKCECGYQEDRDIHAARNMILFATNKVPMECRDPMRVSVIETASKPVEIVTSIETNQIDLLRQVWSEKQETAVL

SEQ ID NO: 9061 - protein, 350 aa, Ignisphaera sp.
MFYSELRELGFRAHHVKQIYIYAKAIVRASKQSGGRKPVLRRLTARIDRYDYRLDLDGGVLTLKIHDGREVKLRLLTSTERVEKFGSWSSYEIAVKVVEDGIYVAIYFRKTVKPRRTRTVMTIDVNFDNITLAVFVPGGELLKLKRYKTPLRRMLTHRIWIERIQKRYSRSWRFIKGVRRAIRRHGERIKSIAWDYAHKIGDSIAELASRYSSIVVLENLNNLRDRVNGGSSLNKKLSLWFYRRIQFTINYETLERGFVARYVNPGKTSSTCPRCGSRLKDNGGRVLRCPRCGFTGDRDVVACINLFYRYSRCGCLGVPLNTPKPNENPSGMQRKRDEAMTSTYINLHRS

SEQ ID NO: 9062 - protein, 376 aa, Enterobacter sp.
MKRAYKYRFYPTPEQAELLAQTFGCVRFVYNSILRWRTDAYYERKEKIGYLQANARLTALKKEPEHAWLNEVSCVPLQQSLRHQQTAFANFFAGRAAYPAFKSKRYSQAAEFTASAFKYRDGKLYMAKSKYPLDIRWSRKLPSAPSTVNISRDSAGRYFVSCLCEFEPVLMPVTAKTVGIDVGLKDLFVTDSGFKTGNPRHTDKHAKRLVLQQRRLSRKKKGSKNRAKARLKVARLHAKIADCRMDNLHKLSRKLINENQVVCVESLKVKNMIRNPKLSKAIADAGWSEFVRQLQYKGEWAGRSVVAIDQYFPSTRRCSCCGFTMKKMPLDVRKWTCSECGVAHDRDINAARNIKAAGLAVLAHGEPVNPESQHAA

SEQ ID NO: 9063 - protein, 404 aa, Desulfotomaculum sp.
VALYNIRQHYFAAGKLLSYPKNCAQCKANENFKMLQAGVSQQIIRIATQSFKSFLSLNRLAKQGKYPIDKIRIPHYLKKDGYFQLVLSTNAITIKDNYLQLPLSNAFRKENQVTKTYIPFPSRINATSVREVRINPAHNARFFEVEIIYHTKPVIMSTQDKKRILGIDPGVDTLAACASTTGHTFLIDGRQLKAANQWYNKERARLQSIKDLHNIKGETKKQATLAVRRENLITDYLRKVARHIVDFCITREVGTVVVGVNKEQKQGVSIGHVNNQNFVQIPFWKLRRILKNLCEKYGILYAEVEESYTSKASFLDKDSLPVYDPQRENKPQFSGRRIKRSLYRTKEGYIVHADINGAANIIRKYRLDVDFSALDKGILLNPHRVRVLATPRKKPVVNKSKAAA

SEQ ID NO: 9064 - protein, 405 aa, unknown
  TnpB Polypeptide
LKLTKEQERLAWWYSKVSRNFWNLLVDIDKRNNKGEFDEILKENGNKTYYSKFYDREVYSLNQSDYLNLAKLVVTKNYDEDKDKWSWYYQPNQSFIYAFLSRELVKIRKQNKGQLNFRSIDKIQPNFNIRCDVSANKKRPSRIYLKENGKLQIPTLGDVRFGSVREGFDLSCKKQVANVSFDGKYWHLSYIENVETQLVDLPEYTDGVGIDLGIKTLATVSDETIVPNIKTFRRVRILNKRLKRLQRKVSRKYLINKCNKHNKTKNILKLERQIKLIYRSIKNIRINHIRKFVSELVKKQPQYIAIEDLNVKGMMRNKHLAKDIANCSFYTIKEHLIRKATEHCIAVRLVDRFYPSSKTCSNCGNYNKDLKLSQRVYHCSNCQEKIDRDFNASLNIAKTDRYILA

SEQ ID NO: 9065 - protein, 169 aa, Aphanothece sp.
VATVHSKIKRVREDFLHKLSRKIVNENQVIAVENLNVKGMVRNHNLAKAISDCGWRQFCTMLKYKSEWDGKTYIEVGRFFASSKTCNVCLNRIDSLDLDIRSWTCNKCQTHHDRDVNAAKNILFEALRILSLGTSDTANGGNVRQPNKTEVLLDAVPCEVGNPIRLTVG

SEQ ID NO: 9066 - protein, 412 aa, unknown
  TnpB Polypeptide
VLVNKAFKFRIYPTPEQEKPLSQQFGASRFVYNYFLRQRIDYYAAHKGQKKQGLNYHDTAKMLTELKRQPEYVWLKEANSQALQAALRNLDTAYHNFFENRAEFPKFKSKRSKQSFHVPQSFYLDAETGRLSIPKLAPLKIIVHRPLEGEAKSVTVSRTPAGRYFASILCEVEVKSKPKKRGRVIGLDLGLKSFAVMSDGEKIDPPQHFRKAETKLTQLQRRLSRKQKGSQGRDKARVKVARQHEKIANQRADFLHKLSRRLVDESQAIYVESLNVNGMMSNHHLAKSISDSGWSEFVRQLEYKSAWYGNHFGQIDRFFPSSKRHAACGYIYQDLTLSEREWTCPECGTLVDRDENAAQNILTFARASAAGTGGQLSDSQRRAGTALTHTPVETRVRQTGQRNRKPSASVGR

SEQ ID NO: 9067 - protein, 264 aa, Mageeibacillus sp.
MQKGVKFRIYPNKEQQTIINQTLGCCRLIYNKGLAMRNETYQNGNKIGYSQTSAMLTDLKKSDDFAFPKAVDSIALQQSLRDLDRGFVNFFQNRASHPKFKSKHNHHLIREQRKLSRKEKGSTNRNKQRVKVALLHEKITNQRNDFLQKQSTMLIRENQTICIEDLKVKNMMRNHKLAQHIGSASWSKFFDMLSYKSIWYGNDIVKVPTMYPSSQTCSCCGFKNPIVKNLAIRKWECPECHTKHDRDTNASINILNKGLKMQSA

SEQ ID NO: 9068 - protein, 443 aa, unknown
  TnpB Polypeptide
LELANTSSITSAARLVHAKKRTTVIVFQAFRYELDPNNAQRSALASHAGAARYAWNWGLARVKEALDARRAEISSGAAPCTEIPDAMTLSRSWNVWKKQPGNCSWWAANSKCTYQEAFRDLDRALRTFYSSRRRVKRRPVGFPRFKKKGRHDHFRLYGIIRVDEHTVVLPRIGRVRLKEQTSKFAGRILSATCKREADRWFVSLCVEVDRPDPLPVAGPAIGVDLGVSAFAVCSDGRVIEAPRPFAKGSRKLRRLNKNVSRTQRGSRNRAKAVLKAACHHRKIRNQRRDALHQATTSLAKTKSVIVVENLNVAGLMRNHHIARQIADLGWGEFHWQLSYKTRWYGSQLVVADRFYPSSKICSGCGHIMASLPLFRRTFICESCGLVIDRDLNAAKNLARLADRVAPGSGETGNACGEGGTGIPGDGGVKLPSTKQEPASVSSP

SEQ ID NO: 9069 - protein, 390 aa, unknown
  TnpB Polypeptide
MNKTVLPLTPVKKVCHLPELRNNPDYYSQKKTLPQLKKSHPWYAEIYSQVLQDVVKRVKVTFDRFLKGDSNGKRSGRPRFKPRSRYRTFTYPQIKDGCLQDNLINLPMFGKAQVILHRSLPDRFKVKTASVTKTTDGYYITLSLEDKTVPAILPDFNADNTGIDVGFKEFLTTSEGETVAIPQQYRQAQKRLRVIQKRVSRRKKGSNRRQKAVKQLGKQHKKVTDRRKDFPVKTAKDLLKKYDVIAVEDLNIKGLALTRLAKSVLDAGWSSFLSILANKAVNAGLLVVPVRAYNTSQDCSNCGEKVPKQLPERWHDCPDCGCCLDRDKNAAINIKNRAVGHSVLKAQLMSDGIPGVTEKPTPMVTACVGVGVCHYVKIGKLFTEYHCLCR

SEQ ID NO: 9070 - protein, 409 aa, Boseongicola sp.
VKHEAQAKPEGKRIRTITLTASISAATHCRLDTFLRQQTELWNAALEERIDCYRKTGKTITAFDQMKSLTEIRRDDEDFRQFPVAPQRSALRRLDKAFKRFFDQVKRGEKPGFPRFKGRNRGIRSFDVPDPVIRDGSLWVKGLGRFRLPSVPDARIVQARAVKSALRVSVQFVVELEGRPSTPVGRPIGIDMGIRNRAIMSSGETVPAVTIDRRPLKRVQRLVSRAKKGSASRRKKVKTLAREWERTRTRERNALHEISADIVKRHSRIAVEDLQVSNMMRHPTLARPMAEQQWGRLVHQLTFKAESAGGEVVRVRPQHTSTDCHACGHRQKMPLDVREFACGGCGLVTDRDVNAARNILRRGIALAGWEIGPSGCPGASGDVLASHAAGLPGQDVERYAGEHDGHSCI

SEQ ID NO: 9071 - protein, 307 aa, unknown
  TnpB Polypeptide
MLQKSSNCAVSQEVLKFLSTSWKSYFNKKIGKTNPPKYKRKNGENVAYFNYTAFTVKKNGKVSFAKKCLPEVELPKPLFDVVKNNLSSENKDVRRGSLCMIRVIPRVDHYVYEFIYEKKERKLKLKRSNVLGIDLGVNNLVTCVSNLNLQPFLIAGNVPKAINQFYNKQRSHYSSIKDLQGYNFETKRLRTITDKRNRKVKDFFHKTSAFIVKYCIQHNIGRIVIGYNTEWKQEVKLGKRNNQNFVQLPFLKLVEMIKYKAKLVGMLVYTTHESYTSKCSALDGESIEHHDKYIGKRLQRSVFRTVA

SEQ ID NO: 9072 - protein, 399 aa, unknown
  TnpB Polypeptide
MIRLSYKYRLKPSPGQATVLHEQLRLCRLTYNALLEHSLSERRAGRGTPTHKALTYLLPEMKAMEPELNNVFSQVLQNVAKRVRSGFESCWNRKRAGLKAHLPRFRGEDRYDSLTYPQFGFRLKDGVLCLSKIGDVRVIQHRPVEGKVKTLTVTRSRAGKWYAVFASEVEAKPIRNRLPAVGVDFGLNSLVALSDGATIEAPRSYRGAEERLRRAQRSLSRKTRGSRNREKARRRVASACERVANRRRDFAYKTARMIVDRYERVYVEDLKIANMVKDRRLGKSIGDAGWGMLRNALTYMAERSEGVTAFVSPRGTSQTCSGCGAYVGKGLSVRVHRCPGCGLTIDRDVNAALNVLKRGLEIGLERAEYTPVGEVTATQLSEAGQVASVSQEAHLFRGG

SEQ ID NO: 9073 - protein, 333 aa, Escherichia sp.
MRRFAGACRFVFNRALARQNENHEAGNKYIPYGKMASWLVEWKNATETQWLKDSPSQPLQQSLKDLERAYKNFFRKRAAFPRFKKRGQNDAFRYPQGVKLDQENSRIFLPKLGWMRYRNSRQVTGVVKNVTVSQSCGKWYISIQTESEVSTPVHPSASMIGLDAGVAKLATLSDGTVFGPVNSFQKNQKTLARLQRQLSRKVKFSNNWQKQKRKIQRLHSRIANIRRDYLHKVTTTVSKNHAMIVIEDLKVSNMSKSAAGTVSQPGRNVRAKSGLNRSILDQGWYEMRRQLEYKQLWSGGQVLAVPPAYTSQRCACCGHTAKENRLSQSQFRC

SEQ ID NO: 9074 - protein, 202 aa, unknown
  TnpB Polypeptide
MKRVVPFPADNPEPCNWIGVDLNTTGHLAVVAHPASGGVVMFGRQPELVEEGHTDPHRRYSSTSKYKRVRKLRERERNIQGNLNQKIAKEIVKMAQSLWCGIKLEDLTGAGFAGREKPGTSLMFSRCEGSFYHLQKLIEARAQSAGVRIVYVDPEFTSRCCNRCGEPGIRRGKEFFCPRCGYADHADVNAAFNIAAAPPSRP

SEQ ID NO: 9075 - protein, 471 aa, Clostridium sp.
MKIAKKKDDTLSRVEKHIIKQSHELYDYLDNYCFLSKNLYNYANYNIRQIFIITSKLAKDEEVTQEQLDYLKDINTKIDEFNELRKANFEKAKVKAHKENKEFKKKLKTIKYFDKDNKYPCYDFIEFIVKDGIDYKSLMAQVSQQTLKLLDKNWISFFESIKKWSKDKIGFSGRPKLPKYLKKNGKNILIFTNQNCKQFDEYIKMPTCLNRYKLNTSIGNNKLQQVRILPRNKYFVLEVVHSMPKPQLKEDNNKYISIDIGLDNLATMTNNCGITPIIISGRKLKSINNYYNKQLSHYREIAKRMNDLDWTNKMNRLTIKRNNMIMDLIHKASKSVIDYALSCEANTIIIGNNKDWKRESSMSKKVNQSFVGIPHQLLIEKIQYKAENVGLRVIITEESYTSGTSFLDNEEPIKENYNKSRRVHRGLFISNIGRKINSDINGSLQIMKKVFPNVTDHGIEDFGLNPIRVGI

SEQ ID NO: 9076 - protein, 230 aa, unknown
  TnpB Polypeptide
VKSYRVTLDRAGRWHVAFAAIPDPIPAPGTGEAVGIDRGVAVSAALSTGELLHVPGLTAPEKKRLLRLERKLAKAKRMSNRRARVMHAIARLRARETDRRKDWAEKTSTDIARKFDLIRVEALQIKNMTRSAKGTAMNRGRNVRGKAGLNREILRSGWGLLVRRLEEKAPGRVEKINPAFTSQRCWACGHVDLRSRESQAAFRCTGGGCQAVAGRLIRAASSSVDRCPRT

SEQ ID NO: 9077 - protein, 574 aa, Streptomyces sp.
MPPPRLAVSSGAMAVRTRLHLSGLDAQVLGDLAEYLDFLASRDLADRVRLGTWHTKADFARRKRDLAKLSSARWAGTITRNTNDQWALARRAQSDHLADLAQAIDTITARLAVPVGACSVTTRVEGYRSQAVRAGKQRRLLHLTARQGRILADRADGGHVPVVRGGKRLLRTRLHLDDAGLDLPGWHQRWAEARHRIEADGESGKRFGNETIRVDPADGQVTVKLPPVLAAKYDGHCDRHGRYRLAAPVAFAYRRVEWRGHVSAHRSVGYTIRFERGRCYLTAAFTPARPDLPPGVDDAMLMRAARCGGVLGIDHNATHFDAYRLDVHGNPVGRPDRIDVDHAGTTARRDAQIRHTCSTLIRLAQESGATALVIEDLGFDTGRDAETAPTGPGSRRGKAGRKGRALVAGMPTAKFVTRLTTMAHRAGLAVIVVDPAYTSQWGRKYWRTATSTKFSQTSGHQAAAVVIGRRGQGLGARRRAEKTVPRTTTEAARTKRQDRRPRAGTEDHRPDPRTAAPRRHQPTPTAHPGSEPAPRTTHMMCATEGPRQRSSPPNTVRDGPPREPPVQGLTTTQC

SEQ ID NO: 9078 - protein, 381 aa, Azotobacter sp.
MTKRAYKYRFYPTPEQADRLARTFGCMRFVYNSVLRWRTDAFFKEQQRVGYTQASARLTAIKKLPETAFLNEVSSVPLQQCLRHQQAAFKNFFEGRAKYPAFKSKKHRQSAEFTRSAFRYRDGKRFLAKCDEPLAIRWNRPLPCDPSTVTVSKDSAGRYFVSCLCEFEPEALPVTPKMIGIDLGLKDLFVTSEGERTGNPRHMAQYAARLALAQRRLSRKKLSSKNRLKARLKVARIHAKISDCRMDRLHKLSRRLINENQVVCVESLAVKNMIRNPKLSKAIADAGWGEFVRQLEYKGGWAGRQVVQIDRWYPSSKRCACCGHILERLPLDVRRWSCPECGSEHDRDVNAAINVKAVGLAVLALGENVSGMGQVPVSSAR

SEQ ID NO: 9079 - protein, 205 aa, unknown
  TnpB Polypeptide
VKKEMLKNDVIYFELNEWSSEYHPNVEPFISWICMSKDKNYYINFRDEQWVMVNNVGLQPVVIKGGAIKSVNQFYNKRKAEMQSQLKKETGRDWSKNLQKLTDKRYEKIKYLMHCASKKVVDYCVENEIDTLIIGLNKKWKQENENKQNFTYIPFDMLISQIQSKCKEYGIEVVMTEEAYTSGTSFLDKEQPVKENKEIITIQFL

SEQ ID NO: 9080 - protein, 432 aa, unknown
  TnpB Polypeptide
MVRVARTVIVRSIKLPKKVLRVFVELEGMYRNMVEQLTMYAVRNNIRSFTRLKALKYREMRRLYPHLPSHYVYTACQDASMRAKSFLRLKKLGLAERDYPEVKKVSIWLDGHLWKPNGYISIKIATHKGWVTVDFEPHKQYWKYVNKGWRLVSEAKFKFDRKNRQLIIYLTFVKEIKEYEPKGYLSIDVNENNVTILINGTTFLFETNTEKLVLGYYYRRKKIQEKYDKLYGKKSRVKRKAMMKLKEMKKKLDIRWKIANLIVRTAHEKQYAIVLEKLSKRVSNNMIKRIKDKQLRHRIFQASFKGVQRAIEEKAKELGVPVIYVNPKNTSKLCPIHTAPIIYNNGSRVGKCSKSGELWHRDVVACWNLLFKALRDDGSYAPSPVGHNLDGRLVPLASTATHDPIVIPKSLWARWNPLGATINLYKFIGMNI

SEQ ID NO: 9081 - protein, 386 aa, unknown
  TnpB Polypeptide
LPNKKKSEVNLSMVEKAFKFRLYPDENQKIQLAKTFGSCRFVYNNYLAKRIELYKTEQKSMNYNACSADLTTLKKEKEWLKEIDKFALQNSLKDLDRAYQNFFREIKNGNKDQGFPKFKSKHNHECSSYRTTVTNNNIRIEDNLIKLPKLGLVKFVKSREIQGRILNCTITKTCSGKYFVSVCCTDVEIVKFENNKNIVGLDLGLKEFAITSYGEIIDNPKYLSKLENKLKKTQRKLSKKKKGSKNRSKARIKLNIVHEKITNQRTDFLQKLSTRFIKENQIICLEDLSVKNMVKNHKLAKAIGDVSWSEFVRMLQYKSLWHDRIIQKVDRYFPSSQLCNVCGYKNIEVKDLSIREWNCPECNLNHNRDVNAAINIKNEGMRLLSV

SEQ ID NO: 9082 - protein, 562 aa, Thermacetogenium sp.
MRKRHKREKFSVTVCGEFFPESYPAFRSPRRSRGEEDPLETELRLFCACMRWAFCRLLEGASRDEVKRKGQELFGLNSRYVDDARLKAQAVLDSQKELLELEIEETEKKLGRARKKLGLAMKKPAKAEEKGAPPEVIEKLHLTVKGRNSRVASLEKKLAELEAHRENGTIPKVVFGGRKLWKRVCKGRASREEWRAARRNRIFSRGDETKGGNPNVKVTYREGEFRLAVTISHLSERTGEDALGRPKMSRAPRVEGRLWLPEKHRDLVRIWLAVGLPYTAELIRTLEGRYTVHLTFDLGGIPEPDFSRGCLALDTNPDGVTLCNVSASGYPEPWPEGFSIPYPSNLGKYEGEFQIIPYPNGFLYIRIPELAYASGFRRDYLAGVLAKAVVDTALSLGKPIALEDLDFGRDRLGTNKKFNRMASNFPFAKMVEAVCRRAAKEGLSFKLVPARHTSTIGYWKYAERNAVPVHCAAALSIGRRAMGFKERVTEELKQRLAQIKRGLAQQVSPDRPREGEGMTRRVKAILERLDEEIPLHNGLTLKRQEAFYSVWHDLRELALTLR

SEQ ID NO: 9083 - protein, 562 aa, Thermacetogenium sp.
MPKKHKKDKFRMTVCGEFFPEIYPAFRSSKLSRGGEAPFETEMRLFCACMRWAFNRLLEGVSRDEIKKLGQEIFGLNSRYVDDARLKAQGVLDSRKELLELEIEETENKLGRARRKLGRAMRKLAKAEEKGAALDIVEKLRLVVKGRNNRVASLEKKLAELEVHRENGTIPKVVFGGRKLWEKVCRGRAAREEWRAARKNRLYSRGDETKGGNPNIKVSFDGQDFRLAVSISHLSEQTGTDKLGRPKMSRAPRVEGRLWLPEKHRELVRIWLAMRLPYAVELVRTLDGRYLVHLTFDLGEAPEPDFSKGCLALDTNPDGVALCNVGVSGQPEPWPKGFSVPHPSNLGKYEGEFQVITYPNGFLYIRVPDLAYASGFRRSYLIGVLAKVVVDVAFFLGKPVVLENLDFGKEHLDTNKKFNRMASNFPFAKMVEAVCRRAVKEGVPFKLVPARHTSTIGRWKYMERYAVPVHCAAALSIGRRAMGFKERVTKELRHLVAQIKQNLTQKVDPYTPREGRGMTRRVGAILKHLDGKLPLHNGLTRQQQMQFYSVWHDFKELALALR

SEQ ID NO: 9084 - protein, 530 aa, unknown
  TnpB Polypeptide
MTSYLKSYHLKIVLPKNQDSLTYFKQLTLSATNQLMDKLWSEEWIKQLGRTKSKAHSIVDAKRVLLELDGQIIYLPSRVRMGIAEQVGRILRGQYKRMRCFYDCLEIIELVGWRTHTNSIIKLMNATHRNKKHIPFYKKVMLDQTIRMIKNWHKKLKVDFQMLSYCDLVKPRIKKFTFIYGPDNYRELKYEIKNQKIYYEIKLPTIQYPKEKKDWQWISGEISIPEKIQHKINKSIKLHPKKPELIIKVLKGGLHQYFLSFPWEFIGKKREDQIKNRVLSVDLGIKKFATAVVCENKYQIGKPLFLTLGGKQFRHIERLYKHIDGLNKQLSENPNLKIKNEERTRLYRKLRRIREELAQFGTNILIRYAVNSHCEKIILEDLRLIKPRRGQKKWSREMNEWLRGRITQLFELKCQEEGLKLQKVNPWRTSSDCPRCSSTNGQKVNGSNNLMQKKEGRWFYCPECGFSADRDYIATLNIYRASFIDYKEIRSLKDTSPITYTELGIPSPDCSWRRSRDEPETTQIVMVTGG

SEQ ID NO: 9085 - protein, 379 aa, unknown
  TnpB Polypeptide
MFRAIKIRIYPNKQQEQAINELLGSYRFVYNYMLALKQEAYKSNKTILGLRELSRHFFGTLRKDEKYVWLKEQNTKVVKQAIRHMLTAYDRFFKQHNGFPKFKSKKDKQSILFPIDAISKRNTFETKHITLVKSLKNIKFRCSDLYFKRLQTYKDKVRSATLSKTKSGSYFLSILVDIPQKEFIKFKKTDKQIGIDLGVKEFVITSNSEVFENKHLFKKEERKLKKLQRQLSKKKKDSNNRNKQQIRIAKVFDHITNKRGNYIQYVVNKLLANYDTIFMEDLNVKGMMRNHKLAKAIQEVGFYRFKTLLQSKASVNNKQVVLIDRFYPSSKTCSYCGYKKIDLKLSDRFWVCPECNTEHDRDINAARNILIEGQRVLRI

SEQ ID NO: 9086 - protein, 386 aa, unknown
  TnpB Polypeptide
MPKLASYFECQTHLAKNLRNSANFILRNLRTGLKKDPVDRTSNENEVIKTVRIGIEMANEKLQKDVDRLTKQLQSLPASDPARTKIQKRIENKQKNHPIMPTSDHWMLTYETLDAVMKNTKNPDYYAMPSQANQQVLRKVLKDWKSHFELLASYRQNPGKFKAQPKQPGYIRTPYTTVTFTNQVAKRSDIKGKMHITFPRCLVPLCVGKPEGSYVRTEVKPCYGGYMVYVTFQDAVKMPEAPTNPTRILGLDPGLDNFLTALTNFPAAPFIIDGHWLKSINQNFNRRRAALMSELTKGMDLDLEDLRQPGLNIRTPMNKDRLSDEEMIDYYSKLIAKLSGKVTAYYLDGIAVYIRNYNERVAITAYTYISASYLRYAFNQRVIKKQ

SEQ ID NO: 9087 - protein, 404 aa, unknown
  TnpB Polypeptide
LYLIEKHIIKKNNKFYTEIDKLSFLSKNLYNMSLYNIRQHYFNEKKFLSLKENYNLIKNIQKNDYESLPRKVSNQTLKQVDKNFKSFFNALKSYKKNPKKFKSSPKIPKYKDKINGRNILIYEKGAISKKQIKNDIIHLSKTNIYISSKIKYDDLKEVRIIKNINSYSIEIVYNKQEQKLMEINNNICSGDLGLNNLLTLSFSNGMKPMIYNGKPLKSINHYYNKKLSELKSELELKNKQKTSKQIKKLTEKRNNKINDYLHKISYNIVNQLVSKNITLFVIGKNNGWKQDINIGKKNNQNFVQIPFNKLINMLLYKLTLVGINFKTINESYTSKCSFFDLESVEKHETYKGKRIKRGLFKTMKGLFINADVNASYNIMIKAFPNIFIDGIQDLAVNPLKFNIS

SEQ ID NO: 9088 - protein, 402 aa, unknown
  TnpB Polypeptide
MVRVVKRAYKYRFYPSPEQAAELSRTFGCVRKVYNLALAARTEAWYQRAERVSYAQSSALLTAWKRSEDLAYLGEVSSVPLQQALRHLQGAFAAFWEKRAAYPRFKSRKRSRASAEYTRSAFRYRDGRLWLAKMTAPLDIRWSRPLPGGAQPSTVTVSRDSAARWFVSLLCECPMVSTPPGHAVVGIDAGITSLVTLSTGEKITNPQHERRDRARLALAQRRMARKAKGSANRAKARLKVARAHARIADRRRDFLHKLTTRLVRDNQAVVIEDLNVRGMLGNHRLARAISGAAWGDLRAMLEYKCDWYGRDLVVIDRWFPSSKTCSACGRTVARLPLGTREWACPSCGARHDRDINAAKNILAAGLAVAACGGGVRPKPVSRRGQSPTKQETQRVTAGIPRP

SEQ ID NO: 9089 - protein, 427 aa, unknown
  TnpB Polypeptide
MEWIMETVRRYNYRAYPTRGQRMALSRLFGACRYAWNWYVRQRLTDWNFNRSRPSYAELSAKFNRTKTEKALEWLTQVSAVPLAQSLRQCEKAYSAFFRYVEKHGCHVDHKGRPLGYPRFKSRHCGEQSATFTTSARFHVRHERNSRWMFLDLPKIDGEVRLRWSRDLPSTPSSVTVMRHADGTYEASFVVKAEPKAPPKPRHDACGIDMGLESLASIVYSDGTREKVAPLRALRKAERRLRKLDKELSRRQRGSSNYNKAKQTKARLYARIGAQRRDLAYQLASRVAGENQAVALETLCVKGLMRTRMGKSVADAAWSTFTDRVDALCAQWGRRAVHIDRWRPSSQVCSQCGRKDGPKPLNVREWECPNCGAFLDRDWNAALNILDAAGLAESLNARGGDVRRRLALAGRDAIAREAGTHRTARLH

SEQ ID NO: 9090 - protein, 286 aa, unknown
  TnpB Polypeptide
VSQPIRPYTSVHVDWTHRSLVFVNMPLPLPRTGDGVIGIDRGCVHTLALSDGTFRDMPKPSKAELKRLKYLQRRMACQDRTNEARGGKTAKLASKRRRKTLSEFNALQGYIVRRRNDWIEKTTTRLARENSLVAMEDLDVQAMTKRPKPRPDPAKPGQYLHNGAKAKAGLNRSILSNNWSRLMKRLKDKMDANGGRLVVIPAAYTSQTCHKCGHVAKGNRESQAVFHCVECGYRANADVNAAENILSRALAKRAGAPPRTWRSRIGGPMKRQPPQRRSEVLSESGR

SEQ ID NO: 9091 - protein, 249 aa, Fusobacterium sp.
LRGTPPKKHKVGGENEIGIDIGTSTIAIVSDNKVELKILAENIEINEKEKIRLQRKLDRQRRANNPNKYNTDGTINIENKEKWKKSKSYVKTKLKLSNLQRKIAEKREQSHNILANSILEIGTIVKVENMNFKALQRRSKKTEISEKTGKFKKKKRFGKSLSNRAPALLIEIINRKLEYIGKNIIKIDTFKVKASQLNHSTNKYEKKSLSKRWVEILGKKSQLQILKKIFCNWLSFSVKFICTKIYRKD

SEQ ID NO: 9092 - protein, 324 aa, Escherichia sp.
LQQSLKDLERAYKNFFQNRAAFPRFKKRGQNDAFRYPQGVKLDQENSRIFLPKLGWMRYRNSRQVTGVVKNVTVSQSCGKWYISIQTESEVSTPAHPSASMVGLDAGVAKLATLSDGTVFEPVNSFQKNQKTLARLQRQLSRKVKFSNNWQKQKRKIQRLHSCIANIRRDYLHKVTTTVSKNHAMIVIEDLKVSNMSKSAAGTVSQPGRNVRAKSGLNRSILDQGWYEMHRQLEYKQLWRGGQVLAVPPAYTSQRCAYCGHTAKENRLSQSKFRCQVCGYTANADVNGARNILAAGHAVLACGEMVQSGRPLKQEPTEMIQATA

SEQ ID NO: 9093 - protein, 403 aa, unknown
  TnpB Polypeptide
MYLVEQHIITSNDKRYKMLDNICFLSKNLYNAGLYVVKQEFLSTGKWIRCTDLNKKMVSENNPDFRALSGSSSQQILMRLDNNLKSYFSSIKAWKRDNKKFTGCPKFPRYKDKVKGRNIFTYSYAQIRHKGEYIYFPKKESLPPLKTRCEEGSVKQVRIVPRQGCYVIELIYESCCVKQKIDNNRIMSIDLGVNNLASVVYNVSNKAILIDGKRLKSINQYYNKKRSYLQSKLKKVNGKKNSRRLMSLTRRRNNKVKDYLHKASKEIINICLKEDITTLIVGHNDGWKQNVNLGKRNNQNFVSIPFEMFISMLRYKSERQGLRFVEVNESHTSKCSSFDLESVGHHDTYVGRRVRRGLFMTRDGILINADINGSYNIMRKVKGDAVMPLHTGFGYNPVKKFIN

SEQ ID NO: 9094 - protein, 451 aa, Bacillus sp.
MVKKKAVKVLRKQKKRENMQRFTQKQNIGRASLTAKEFRLLQRMSHSSKALRNVGLYTMKQSYLNHNKMATVKEVDTAMQADMNYWGVHSNSVQAIRRALYAEVKSFFKALETWKKNPEAFTGRPNFPNYSHSTDKRIIEIYQVPKVDDNGYWLIPMSVAFRKKFGSIKIRMPKNLRHKKISYIELVPKQKGRFFEVHYTYEMHVSQMKKTSTTTNNALSCDLGVDRLVSCVTNTGDTFLIDGKKLKAINQYFNKMIRSLQQKNVENGISKRVVTNKMAALWHKRERQINGYISQTVGLLFKKVKECSVDTVVVGYNAGWKQKSDMGKKNNQQFVQIPFHKLIAAIENKCIKEGIRFFKQEESYTSKASFLDKDPVPVWTKDDRTHYHFSGKRMTRGLYQSKAGTCIHADINGALNTLHKSKVVVLKENLKVKTPILLEVQKRKAVASRIA

SEQ ID NO: 9095 - protein, 462 aa, Xanthomonadales sp.
MPETHTLERAYRVRLRPKPEQVRMLSRLFGARRFVWNWAHRRKDEAWRTDGTKLSGVDLSREFTQLRQAPETAWLSSLPREPFNQTLRDFDTAWRNFFAGRAKRPRRKKFGTVMSARFTLDQRRPGLVDIESGSVQLDGIGRIRFRVTEPMPGRLRSVTVRRDSAGRWFATFTADGVAIPESVLVARSAIGIDLGLKETAALSTGEIIRAPKHLAAKLSRLRRYQRSYARQRDAALLRIGLDSKKAIPKGTRITPSNRMRRQKHRIGRLHAQIADARRDHQHRLTHRAVALANVVCIEDLNIKGMTRSMGRRAFRRSVTDAGLGEIRRQLTYKAQWTGRTLSVVDRFFPSSKTCSECGAINAGLKLADRRWTCVSCGTDHDRDWNAAINIEREGLRLLAVTGPEGRTRRSRGTDAQGEDSCAIDTSPSVGQPTSLNCELAYRAAPPRPTRTRRNGPARRVEG

SEQ ID NO: 9096 - protein, 420 aa, Hyperthermophilic sp.
MKRTSVVELVVDESSEERLKLLCSLSSKLWNEVNYARRRMFFEKKGVDLKATYKEFYEKYKTLIGSATAQQVLNKNDEAWRSFFELLKLKKESRLPPFITRVNPPGYKKKNNKRTLWTVLRRDQYRVEGNKIVLKGLGAIGWIELKYKGLIHLKGERGRLEIHYDQDRRKWYAHISFEVAEKAVRREWTSIPKQPKNNLVAGIDIGVNNLMAIYVENGLAKLVNGRPLKAISHYWRVRIAEYQSTLNRYGLRTSRRLRSMYSKWRRRVKAYIDSKVRQAIEWLYSVGVSVVKAGYPKYIAQENGDFNNVHVWTYGYLLRRIYEVAEEYGITAVYVDEAYTSSKCPIHGERCGSRVKRGLFKCTKLNKVFNADLVGAYNILITPSPGRDRGNGLKTQPGIEPSRRGDVIPNLPALAGTLAL

SEQ ID NO: 9097 - protein, 366 aa, Leptospirillum sp.
MRKTFKYRLYPTPRQETLLKQQMEECRCLYNHFLEHRKDSWGWYGAGLSLYDQIGTLPSLKKIRPTLSAVYSQTLQNVAVRIDLAFQAFFRRIKNGENPGYPRFKGKGQYSSLTFPQWNSGCDLTGQGLRLSKIGTVPLVLHRPVEGSIKTCTVLRSSTGKWWATLSCENVPEAVLPSNPLPVGIDVGIKTFAALSDGTAVDNPKFFKRSAKRLAQAQRKLELQAQGSPERTKVKKVVAKIHERISFRRTDFAHRESRRMVDRYGKIFVEDITVNEMNAHRCLNRSIRDAAWSQFFFFLSYKAESAGREFRKINPAGTSQTCSSCGYRQKMPLSDRIYHCPCCGMEKGRDHNASLNILRLGLESRG

SEQ ID NO: 9098 - protein, 276 aa, Okeania sp.
MRTGYQYKLRPNKEQIATIELWLELLRRQYNYRLGERFSWWSENRCPVNACPLIMPIPQLRDHPDYYSQKKDLVNTKDKFPEYKLIHYQVLQDCIKRVKLAFDRWLKVDKNGHKLGKPRLNGIGRYRSFTYPQIKQDCIEEKKINLPKIGNIKFIQHRPLPDGFQIKTVTISRKADGYYVTLSLEDKSVPALTFNVEPTLKNTLGIDMGLKEFLVTSVGESVPIPPYYRKSQKRLSRNKKGSKRWLKAVKAVAKQHKKADATPRRRQLACGTRTKQ

SEQ ID NO: 9099 - protein, 463 aa, Leptolyngbyaceae sp.
MKLTYKYRLKPLPQQQIIFQSWLELARRQYNYRLGERFDWYEATRSRVDACPLVVSIAPVEEIYRDIPLTRVLAKGSRKGEEISNFQEQGYLNWHSIQLSDLKQTKTLFPDYKQLDSQVLQDVVNRVEYAFSRFTKPDANDNRSGKPKFKGQHYYNSFTYTQLHNCDIIKDERGKNCVNLKKIGLVPFVFHRPIPDGFEVKTGTVLREADGWHISLVLEDKSVPVTVAAIQPTEENSLGIDLGVENYIALSTGEVVEHPRFFTESARKLEKLQQRLAKRVKHSKPWKLLKVQIAKLHQHIARQRLDWQFKLAHWLFDKCDVLFIEDLKLKNLTKRAKPKISNEGEWLPNGQAAKSGLNRSMLDAAHGQFVQVLKWVAYKLGKVVKEVDPWGTSQHCWSCLNQVPKTLSDRWHSCECGEECHRDENSGRLIKKIGLICSIVRADITSLKTAQRALLEGKPVLYA

SEQ ID NO: 9100 - protein, 466 aa, Saccharopolyspora sp.
VKVTRIAYSKNLNAGKYAQLEEQARRLGRVRAMVWARYGSPLRDGVKDRKIRDAWMADGTADSFGVLANAWKETVRDAVADIAAYREAGKVKVRKAVHRRYREESQRKKAYMALKRGRWQDDSFLARQMRQHVKHGVSRAANQIVVRSDQYNTWTMSGGDVWIDIPGLERRQKIAIPLNTSVAPSGTLRLILRAGYVEVHYAIDAPDLIETRPCGAGKLGVDKGYTEVLTDSGGVHHGQELGALLRAESDFIKVKNARRAKIRSVAEKARKSGNLAKADRIVRNNLGHAKRNRRRSRFESCVRSVTFTAVHAVVDKASHVVTEDLTRSFVSRRKLGKNTNRRLAAWTKGVTAEALSSVAERRGSALTLVNAAYSSQVVPCCQIIGRRCGDRLHCTRCGELWQADHAAAINILERDGDPAITIWTPFDRVKELIQERDRLRTRLPVQDSSAPARRANYPIRAAMLKE

SEQ ID NO: 9101 - protein, 404 aa, unknown
  TnpB Polypeptide
MTIMIRVPLSPTTEQASMMSATMDNYTKACNYVSRYIFDNGFPLSSKTINQAIYNTIRQRFNLGSQMAQSVIRDVIARYKTVKTQLGKRRVPCGLTKTGKLRYTRKTLEYLEKPIKFSRPQVCFQRERDYRLLADMPKTRGLISMTLSSVGAIHVRMGASKRIDYPSLLRSYKSLGAMRLECDRGKWYALIAVEEVIEDEIEPYLSVGIDRGLINLATTYDENGVTSFFKGNEVARVRKHYQHLRARLQAKGTRGAKRRLKRLSGRENRWMTDVNHCLSKTLVSDYGPGTVLVLEDLTGVSMGRGGMGSHSDQLSSWAFYQLGEFVKYKAMRAGITVIEVNPDYTSQRCPMCMTVRKESRDQKRHTYRCSSCGYQTNDDRVAAMNLCELGVEYITGDPKPRITK

SEQ ID NO: 9102 - protein, 222 aa, unknown
  TnpB Polypeptide
MTADGTILARSFINFPSDKDHLYHVLNRIKKFQRLHGSREAHNFWAYAKRVNDELSKKIAAAVVEFAVLYSADVIVFEHLDFKGKKASSKKQKIQMWRKNGIQHIAEHKAHRCGIRISHICAWGTSKLAYDGSGKVKRAPDNHSLATFASSKQYNADLNACYNIGARYFIREVTKPMSKKAWSQCKAKVPDIERRTQCTLHSLRQLHDFLNTPKEIQPEVTA

SEQ ID NO: 9103 - protein, 283 aa, unknown
  TnpB Polypeptide
LRIIIARRAVRKDIGAHEAQSIGKAVWRGLQRHMFQKAGRPRFKSFRRGLNSIEGTNNQEIMYKPERGAIVWRKHVMTYMKPDTGYMKEALASDRRVKYCRIVRRTLNGVKRWFVQLVVEGLPPVRKVYAPKCEVVGIDPGPSRIAYFHEQHAAIVEVAPHVDLQEPKIRLLQRRIDRSRRANNPDNYNPDGTVKKGSSTWNTSNRGRRMAAKLAEHHRCLAATRKRDHGELVNDLLQIGGTIKIEKTITGLFNAASDGRQTGGEWVSLWSISNARLKVPAAR

SEQ ID NO: 9104 - protein, 548 aa, unknown
  TnpB Polypeptide
MTRNNKITTSVKVLIDTSKLSHKHKQRLRQILGRDSRIISRYIGVIEDNQKELVEYREKKNGKISIKIDKGKLDQLTCTTSDRNIVNHDLKIQFPRISLNELKECRDTAVGMYLSYLELKEKGNASIPTAKSSVPRSIGYRRFKLRYHKRTLTIMDSMDTNPSMINNGKRKIQHDKLTLNLDLKKYHICKTMEGSLQAVRIIRSRRNYYAIFAIRHKVKQLTSKYYPKKSNKELAIAGIDLGINRDAVISIITAHGVSRHKFIKLERIENTKLAILKLDKRIAEIQHKAAKRSTDNEQTDGLYSLLRELRSERSELKYEISHQLSAEINKYLLSLTDQYDLWIGIGKLKGIRRGQRRGNGNKRHRKRIHRWAYGQLTWMLEYKLSKSGYKRRFLTIPEGWTSIKCWKCNTKGKRPKQEFFKCKNVSCKWMGDADFNGATNIAKRAAKYFKLTSHLKSSLFEVRELGFAKPKTPTAPKRIRGSSNLSNRNAVNSDQTAVKNHGNTSLLISFFETSKEGEDDRNTDLSNESRTLLASQEVVATPDSVCGT

SEQ ID NO: 9105 - protein, 365 aa, unknown
  TnpB Polypeptide
MCRLMFNTLLSLVLENYRAFYAESEISSPVDQSDFNRRHKLPSIASLKKVDNRYKLCDSLALLSEYKHLMRGFELFFNGSNSKLPHYKGRKDTNSYTTSCVNNNIRVIGNKVKLPKIPPVKVRGMREIPSNFTLKQARVFEDKSGRFYIYLIFSYPSDSDTTTNSIDPNENIDTSNINPSKTVGLDFKIGDVFVSSDNFLPKYSSRYYTLLDKLSFIQNNVNRKCKFSKNYWKSVIKLRRFHRNIVNIRHNFLHHISSFLASNYDLCVIENLSIIEIVHKLGRGKNAYNTSFNFFVKLLRYKTNVAIIDKWFPSSKKCSCCGKKKKHLKLSQRTYNCQYCGNSIDRDLNAAINIRNEGLRILNLI

SEQ ID NO: 9106 - protein, 399 aa, unknown
  TnpB Polypeptide
MIKGYKYRLYPDKSQTQQLNQMLGNVRFIYNWALDKRIKAYQLDKTKLSAFTLMKDVAKLKYQPEYEWLQLSVAQSLQASIVNMEKAFRRFFKQKKGFPKFKSKHKSKDTISFPQNTRADFENGKVSVNKIGWIKTKFSREFEGEIKTAIISKTSTDKYFISITVELPDKKIKQKPIREKTAVGIDTGIKTFVTLSDDTKIENPKHLKTNLQRLKILQRRVSKKVRGSNNRKKAVKKIALLHEHISNQRLDFTHKASTSIAKKYDTVVCENLNIAGMLKNHCLAQSIIDLGLGRFYTLLQYKMQEQGKNYLEIGRFEPSSKMCSCGVVNNELKLSDREWTCEVCGIHHDRDLLAAKNILKFGLTKQNLINRVGITQRASGDVGSSRIYEGRRSLKTLCL

SEQ ID NO: 9107 - protein, 511 aa, unknown
  TnpB Polypeptide
MQFIKVFMGDGDMENMEYVRRAVAVELERPPPELYAVEGPYRRIVEEVATYVAERGRLEKEKYNELYRRFRERYPLSSQLIQQAMNQGVEIGKSFLKLKRNGRIHKPRPEVRRVSIRFAKDSWSYKKAVGSVAPVRLGLSLPGGRREVWIKPHRRFWLYWWKVLLKEAELASTLILKRRRNRWYAIFVFDVKPREEPLAEVVAFDVNENWVAVARLSLLSTVDRVASWNRQYINPAVYSIRTDFGRLAKRYEAVRNAKLEELKLKYPYAGRDEEERRQNVADIREFRKFVRRLRERRRKEGRIKQVTREMTKSPAVIITEELGKNPQEEMIGLEDKRVKKRELRHRVKQTPFKKLVRAVEDKAGEGGSAVFYVSSFRNSRVCPIHFALMKNGSGWHALHCPRGHAVDRDAAAVLNMLWKTTPEGVVKGVWWDVKEARKRLKKGIVPKETVEKANPIVPQPIVHAVWASLKRLRASPQWPAVLARAAPMTPARGADEGGTRAPPRPRGTLAL

SEQ ID NO: 9108 - protein, 236 aa, unknown
  TnpB Polypeptide
MVKIKNNLIPQGRILNATISQEPNGHYYCSLCCTDIEFEQLSKTNQDIGIDLGLIDFAIFSDGTKIENPQFFEKSEKKLAKLQRELSRKTIGSNRWNKARIRVANLQKHISNQRNDFLQKLTTEIVRTYDVIAIEDLDVKSMKETDSTIRNKRVGDVSWYEFRRMLTYKTQWYGKELSIIDRYYPSSQICHCCGHRDGKKSEDIRFWICPKCNSELDRDINAAINILNEGLRIVNI

SEQ ID NO: 9109 - protein, 431 aa, unknown
  TnpB Polypeptide
VKSVSSARFVTLPLTQRKQELLCKLLNQFAESVNFCIQKCLEHNLTSRASLHHVVYEEWKSHFNLATHWFHSAGQMATQTLRSWRKLCRQGQANPNKLPIYEARTMRLELWGDENSTGICRFNGNAVQIRIRRGEYLWLPLVVTEHHELRYLRDWREGKLKAGGVTISASRDRANVFVPFKREVEPKLINGVCGIDINERSVDLTILKPNEQPRHISLDVSKLPAIRHASQLKRKSIQRKLDALPQRPVQKRRLKAKYWLRERNRTSQILHVVSKQIAEIAKRERVAVAFEGIKGIRKSMRSKRKSVNGQALRKDMRRRLNQWPFRKLQFYAGYKVARQGLPTVEVSNFHKSKDCPICGQYNRPNGHTYRCRACGFEASRHLVASWNIAKDGARHVPADCWQMQRVADELVAQVKLPAEPERFPVQFDTGI

SEQ ID NO: 9110 - protein, 418 aa, unknown
  TnpB Polypeptide
MIVTRRITFRLYPKPVQERKLFEWRRLHCYLYNSALADRKDSYQKRGESVGYFDQQNRLPEFKTVWAEFVELGSQALQATLKRVDFAFQRFFKGLGGYPRFQSIRNYSGWTYPATSGWKAHTIGDNGYLDLSNLGQIQMRGKARTWGTPTTCTIVYRHGKWYASITVKCEPIRETKPNVMGVDFGTLTAIALSDGTKVENPRFLATTQAKIRTASKQKRRKRSPNRKSRIKASRRWKKAQSTVSKLVRKAARQRLDWAHKRTAEIVSNNSLVVTEKLNIKNMTRKAKKGKRKRQKSGLNRSILDVGWGMMRGMFEYKEAEANGVYLEAPTQQLKPSQRCPECWNIKPKTLDERVHHCLVCNCTEDRDVASARVCVIWAKGLGTTLLDDDLRSSTSKARSNTGSMKQLAETKRQKLHPS

SEQ ID NO: 9111 - protein, 440 aa, Halorubrum sp.
MLEVHRTHRAKILNHSQVAEILDRHGWSASKLWNVANYHSREVWEETGEIPDHGDLKDELKTHNKYKGLHSQSSQRVLEELAEAFNSWYEKRKSDDRANPPGYRKRNYYDTDGNRVHEEHPRSTVSWKQNGIRHDTKNNRVRLSKGANHKEHPRAREYILVEYETRPGVTVENLQQVRAVYYQAKERWELHLVCTDEIETPAAPGTETAGIDLGISNFAAVAYSTEAADLYPGTRLKQDGYYFPKEIAKCDDSGGERATRLHAKWSERRTHFFHGLAKHVVQRCIEKGVGRINVGNLEGVREDENGNSKNWGRHGNLDLHGWAFDRFTNILEYKAKVEGIEVVEVDESATSKTCCMCGREEDSQRVERGLYVCEECDAAFNADVNGAENIRLNINEKSNSESPGQLFGDRRTGWLAQPAVHLYDLSSGFQPQEQVVDCKP

SEQ ID NO: 9112 - protein, 405 aa, unknown
  TnpB Polypeptide
MITKFEERSESSIMVLKGKKLRLYPNKSQIEQLKQMCGNDRFVWNVLNSMLQNRYTNNKELYNYDVPKERHKHIMLSTYDMNYLLPRLKEEYSFLRQSDSSALQVVSATLSQAYENYFQKPEHFGLPRFKKRNCYKLSYTGKSRIGIIGRRHLRLPKLGYIKTSKTSCLKNTKIKRYTIERDSTMRWYVTFQIEEDVVPFVKTGKVVGLDLGLNDMVATSDGFKSGRFIEKSLENSIKSQQRKYDKRRHRAEVTIKQSSDSLQINDFKNVEKARVTKAKLQKHLANKRNDFLQKLSTKLVRNYDVIVIEDLSSKNLMKNHKLASAIGNASWYKFRTMLEYKCNWYGKKLIVVPPQYTSQECSHCNYNSGSKPLNIREWTCSNCGTKHDRDINGAKNILKKGLDIA

SEQ ID NO: 9113 - protein, 319 aa, unknown
  TnpB Polypeptide
MTARLEDVKEAPLGDFWFRVSSLKAHQSVWLPLVGNPYVLQADQVGRGIQARKTKRGFWRFEAVDKTEWAGPGPQGHWPKLGVDVGLNVLAATSDGGLYGEHVKPKFDKLYQRVKKLRANRQRQGLRDNSPRLDHLESRLSGLIKTETGRVVNTIIRENPETVFVVEDLDLRGCQGQKRFAYRALQANLERKASTEKVNPAYTSQECPSCGYIHRGNRRSTKFACKSCGRKAHADWVGSLNVLRRSEDQHIEVGDRPRSVKRVLRERYLRSRNSSLGFGRLRAPSSSPLPLGRRLTTGAPVETGAGTALHSMLASSSRF

SEQ ID NO: 9114 - protein, 235 aa, unknown
  TnpB Polypeptide
MYVQFCVDVNRKENTKPTGKTIGLDVGLKEYYTDSNGVTVENPRFLRKSERILKRSQRRVSRKVKGSKNRGKARQVLGKRHLKISRQRKDHAVKLARCVVQSNDLIAYEDLRIKNMVQNHCLAKSINDASWYQFRVWLEYFGKVFERVTVAVNPQYTSQECSSCGEIVKKTLSTRTHACKCGCLMDRDFNAAINILSRGLGTVGHTGTFALDANNALGELTSTVVGEIQLEQVGS

SEQ ID NO: 9115 - protein, 421 aa, Lachnospiraceae sp.
MKYHFAAKVRIYPSSQQKHIIAVNDGASRFVYNRMTANDRELHSLKKAASLCPAYKGKIAYLEQVRSSKRELVNSIPFLKEKDVDSLAVDNAIKNHNRAWERFREVPGTGLPGFHKKSYAQSYQTNAHYKKGAESWEEGNVHFVRRSAGEQVPHFISLPILGAIRFRCSGKVLAMLTSHKEDTRVGTITIRRDNCGDYYASLQLSSDIPFTDPFPRTGSCVGIDMNLTNLYTDSDGNVIPNPKYGRGMKKKLAKAQRKLSRMKEAAVRDNRSLKEASNYQKQRLRAAVLQRKVSRSREDYLQVQTKRLVESQDLIVSEDLKVKNMLRNHKLAYSIADVSWGSFFILLSRKAVLYGKEYMKVPAKDTTQTCSGCGHVMKGEEKIPLGAEEWTCPVCGMHHLRDYNSARNVLQQGLAVKALQI

SEQ ID NO: 9116 - protein, 244 aa, Actinobacteria sp.
VKRAFKYRFCPTGVQAAELSRTFGCVRKVYNLALVARTEAWARQERVSYHQTSAMLTAWKKTGELAYLNEVSSVPLQQALRHLQTAFTHFFGKRARYPRFKSRKTSRRSAEYTTSAFRFRDGALTLEDDRAAGCRVVETAPRGNEAVHRDGLAGRGGPLVRLPAVRGPVRQAAPGHRSGRRCRCRTGPPADPLHRGEDRQPPARAPGPHPPRQGPAQPCPQGQGRRRQPQEGPAEGREDLCADC

SEQ ID NO: 9117 - protein, 265 aa, Actinobacteria sp.
MTEPPAVVWSRPLPEGTKPSTVTVSQDAAGRWFVSLLCEDPSVKPLPATGQAVGVDVGLDHLLTLSTGEKIANPRHERRDRTRLAKAQRNLARKARGDGANRRKARLKAAKIYARIADRRRDTLHKLTTRLVRENQTIVIEDLTVRNMVKNRKLARAISDAAWSEFRSMLEYKAQWYGREVIAVDRWFPSSRLCSACNALRDTMPLNVRTWTCDCATTHDRDVNAAHNLLAAGLAVTVCGAGVRPQRSTPDGQSATKQKPSRHEP

SEQ ID NO: 9118 - protein, 466 aa, Natronolimnobius sp.
MFTIYYVDTICVSNRPQRTNEYTADPASERYRQCLFEWLAAHAPLWNQINYRRRQQYFQEDGDVWDAEYTDLYDDYAPILGKATCQQVARKNSEAWRSHFQLLDKYYDDSNTALTDKPSPPGYWGNRDDGYELHGLVRNDLYTIDWDEKRSTLEFGVGDALEEKYGFDYNERVTLGVRGNPQWNGDDARLELVYDEAADRIRVKHPVRIRPDRLQEQRLDAFTHTLQTENTTHVAAIDVGANNTLAIVTSTGETAVYHARPEFERFRVLSGQIATLQSQLPDDRYTSRRIQRIYDERGEKRDHSRDAAVKHAAEWLLSRNVDTVYVGDLTDVLKAHWSASVSEKTHAFWSHRQLVERIELTFGDVSIGVEPVSEANSSSECPKCESNNVVRDGDEFRCHDCGLDAHSDVAGAWNLLQNEVGPMARPAALSAERDGDASLDDEGAYWEWDGHDWTPGSFGEQSSPVD

SEQ ID NO: 9119 - protein, 421 aa, unknown
  TnpB Polypeptide
MQLVEQHIIRKGDAGYDEIDRASFASKNLYNLANYTIRQHYIKEGKYINSYGLYHVLKNTEAYRALPCKVSMQVLNCLHYNWVSFFVVFKRWKANPSAFNSKPRIPKYKDKKNGRNLLVYTDQAISSVSIKNGIIKPSRLNIEVKTKHTNVDQVHIVPCGRYFAVNVIYTVEPIQAELDAGLVAGIDIGLNNLATLTSNKPGFRPVIVNGRPLKSLNQFYNKRKAELQSRLPEGRYTSDKIVRLSIKRKWRIRHYLHSVSRMIVDLLIKERIKTLVVGKNDGWKHEINLGKKTNQNFVSIPHAQFIGMLKYKCQLVGIEFIVHEESYTSKCSFLDMEPIEKHETYQGKRVSRGMFRSSTGKKINADVNGSYNIIRKVIPNAFIEGIVGLVVVPVRFSLRTKTIAKKAMIGETINAHALQAG

SEQ ID NO: 9120 - protein, 276 aa, unknown
  TnpB Polypeptide
VGFVKLPKIGEIRFSLSRGLPSPPTSVTLIQEADGKYYVSFVVETTPTPAPEPTAYAVGVDMGLKDLAITVNSNGESTVFPNIRPLKQAEKKLSRLQKQLSRKKKGSNRYTKQRLRVAKAHTKTRNTRAHYLHHVANQVVNENQVIALETLTIRGLAKTRLGKSILDASWGHLTRLIAEKATDYGRTLIRVDRFAPTTQTCSICGAPNGRKPLNIREWVCTSCRSRVDRDRNAAVNIMLAAGLAESLNEHCGDNVRRLLANAVIVDAVHPPKVTTA

SEQ ID NO: 9121 - protein, 375 aa, unknown
  TnpB Polypeptide
MKTKETIVLAPGTVGVRTLRLPLVLSGEQFSALAPVFDLYNQVWGKVVLWCNQNKSVNRVRLQKELYHPLRETYPELPSQYVSILLREGAGAVKSWNSNNPKRKWELKAVRRRKTLSLDARLFSVRGALLTVSTRVKNPRLRLLLPETPTWFTQRYPQGKLNAAKLGITRSGKAYINLIYRVPQPTQPPTSGETLGVDRGLYKIAVTSKGGEYTSNQVRAARRKYQHNRATLQQKGTRSAKRRLKAMSGREKRFMSDINHCVSKHLVHTPNIGRIVLEDLTGIRRNRCNKTTRKWLGQWAFHQLEHYITYKAHQQGIEVVLVDPAYTSQRCSACGYTAKNNRRKGTFACRQCGFIANADVNAAINIRDKSLLPTT

SEQ ID NO: 9122 - protein, 443 aa, Lachnospira sp.
VDIFSTYSVKIKHYNHIFKDTVKVYREAVDFLIDVCLENGEELSSIDSSLNKQRFIETLCHTTKNNKAIYDFDNKFYKFPSYLRRGAISEAIGKVNSYKSNLNNWKVNPVGKEPSVPRAGYIFPCMYRTDMYKAVIGDNYKARIKVRTRNTWDWIEVDLRKSDIDYINRHCKLRKKCAPTLQKRGKAWYLDFPFEEKVKLNDTHIQEQTIVAVDLGINSAATVSVMLADGAILDRRFLNLSKEQDCLKHSVNRIKKAQQNRCYRTPRLWARVKRINKDISIKTAQFIIDVAVLYNADTIVFEHLDKFGKKRDSKKQKLHMWKCKEVQAIVANKAHRLSMRVSTINAWGTSKLAFDGSGYVLRGLDADLPTYSLCKFNNGKIYNCDLSASYNIGARYFIREILKSVPVKVRFELEAKVPQITKRSTCTFSTLINLNTELQDLNA

SEQ ID NO: 9123 - protein, 556 aa, Klebsiella sp.
  misc_feature (163)..(223): Xaa can be any naturally occurring amino acid
  misc_feature (524)..(555): Xaa can be any naturally occurring amino acid
MYIWLFIQVVSIHTECKMLIQKAYKYRLNPTDAQAQRLRQMCGCARFVWNYALAETQRILEAGQKLPSAFELNKMLTGWKKLPELAFLSDAYTDNLQQKLKDLHGAWKRCFDKKLAAKAPVFKHKSHGNDSVRFVNFDKYCQLQHRRVKLPSGLGWVTFRQSXXXXXXXXXXXXXXXXXXXXXXXXXXXXXXXXXXXXXXXXXXXXXXXXXXXXXXXXXXXXXFLSDAYTDNLQQKLKDLHGAWKRCFDKKLAAKAPVFKRKNNGNDSVRFVNFDKYCQLEYRRVKLPSGLGWVTFRQSRAVVGKIKYATVSQHAGGWYISFQVEMEVEQPAHPSTSAVGLDAGISKLVTLSDGTVFEPVNSFKQNQSRLARLQRQLARKVKFSANWKKQKARISRLHSHIANIRRDYLHKVTTTVSKNHAMIVIEDLKVSNMSKSAAGTVDEPGRNVAAKSGLNRAILDQGWYEMRRQLEYKQRWRGGEVLAVNPAYTSQKCACCGHTSKENRQSQATFVCVACGYEANADVXXXXXXXXXXXXXXXXXXXXXXXXXXXXXXXXS

SEQ ID NO: 9124 - protein, 441 aa, Blautia sp.
  misc_feature (191)..(191): Xaa can be any naturally occurring amino acid
QIKQLRIYPPEKGSCKIIVVYEVPDQEELPQNGHELSIDLGLHNLMTCYDSENGNTFILGRKYLGLERYFHKEIARVQAQWYGQQSGKGVKHPTTSKHIRKLYKRKHDSVTDYLHKVTRYLAEYCREQGITCVIAGDIRNIRREKDLGHRTNQKFHSLPYNRIYIMLEYKLKRYGIRFIKQEESYTSQCSXPPEKGNCKIIVVYEVPDQEELPQNGHELSIDLGLHNLMTCYDSGNGKTFILGRKYLALERYFHKEIARVQAQWYGQQSGKGVKHPVTSKHIRKLYKRKQDSVTDYLHKVTRYLAEYCRERGITCVVAGDIRNIRREKDLGHRTNQKFHSLPYNRIYIMLEYKLKRYGIRFIKQEESYTSQCSPLSPEVGKRYAEPSKRKERGLYRDGNRTYNADAVGAYNILRKYHSVSGVKRELSVTGLKTPEIIKVAV

SEQ ID NO: 9125 - protein, 421 aa, Bifidobacterium sp.
MMLKGIKVRLDPTPSQERMLLSHAGAARFAYNFMLGMVKAAIAGRVGWFVWSKAQLRRVWNSWKPEVAPWSAGNSKEAYSYGVECLANALKNWADSKNGKRKGRKVGFPKYRTRSRHMKFAYTTGSFGLIKGDPKALKLPRIGRVHCFEDMEKRVGDGRVLRMTVSYCAGAWYASLTVEYPDPVVAKKTDGGTVGIDLGIKTLATCSDGTVIDNPKHYKRNERKLRKASKRLSRRVQGSNRWKKALLAVQKAQAKTAAQRQDAINHATTMIATTYDTIVIEDLNVAGMKRNRHLAKAISDAAFGEFRRQLAYKCLNSGATLIVADRWYPSSKTCSRCGTVKAKLSLADRVFVCDNLSCDYAREGVDRDWNAAVNLEHYVAPSAVGDAKRARRNRKTTSPQQAGNAGPVETRTKQNSLMAVS

SEQ ID NO: 9126 - protein, 464 aa, Methanoculleus sp.
MLQAYKYRMYPNREQVASLLQHIHACRFVYNSSLEQKIRAYEQEGQKLSCFDLNTRLPAFKEEHPWLKEVNSQSLQSANKNLDNAFTRFFREKKGFPRFKSKKNPVQSFQVPQHYTVDFERGQIKLPKIGEAKTTLHRTFTGKMKYATVSVTSTGKWFISILVDDGKPEPAPVPFALDTTLGIDVGLADFATLSTGEKVENPRFLKNSLQRLKVLQQRVSRKVKGSKNRKKAIQQLARCHEKVANQRNEFLHNLSNRIVSENQAIAVESLNVAGMQKNHCLARSISDASWSTFFTMLEYKCRKYGKTLLKIGRFEPSSKICSTCGYLKRDLTLSHREWVCPDCGTHHDRDINAAINIKKFALQDQNLVGVAGVERTVEPVDSLPMGRRMKQEAPPERRGVVHTRLRKKPAGAVMRKGIGTGYTRAQHTRTFHSSLTPGEVYSSSMHGRGPGRERLSQSRTTLRG

SEQ ID NO: 9127 - protein, 389 aa, unknown
  TnpB Polypeptide
LIVSYKTEINPTQEQIQKINKTIGTCRFIYNFYISYNKELYNKGEKFMTAKLFSVWLNNEFLPNNTDYLWIKEVSSKSVKKSMENAYASFNKFFKKQSKFPRFKKKNKSDVKMYFVKNNPKDCFCERHRINIPTLGWVKLKEKGYIPTTKDGYVIKSGTVSCKAGRYYVSVLINVPNTKKPQLNEFGLGIDLGIKEFAIISNGIVKKNINKTARIRKLEKQLKREQRCLSRKYEDIKKRNKIMKGEATRQNIQKQVLKVQKLHQRINNIRTDYINKCVNEIVKIKPSYITIEDLNVKGMMKNKHLSKAIASQKFYEFRIKLEEKCKELGIELRIVDRWYPSSKLCHECGYIKKDLKLFDREYICECGYHADRDYNASLNLRDTISYKIA

SEQ ID NO: 9128 - protein, 323 aa, Micromonospora sp.
VKRAFRYRFYPTAAQAVQLSRTFGCVRKVYNLALSARTEAWMLRQERVNYNATSAMLTAWKRTDGLAYLNDVSSVPLQQTLRHLQAAFTNFFAGRAGYPRFKSKKRSRRSAEYTASGFRYRDGTLTLAKMAEPLQIAWSRPLPDGAQPSTVTVSQDAAGRWFVSLLCDDVIPAAAVTAAAVGIDAGLDHLLTLSTGEKIANPRHERRDRKRLARAQRDLARQEKGSANRGKARLRVARIHGLAEKMPLAVRSWVCRCGSVHDRDVNAARNILAAGLAVSACGAGVRPQRESSRKRQSATKQETRWVTTGISRPWAEEDVKPLL

SEQ ID NO: 9129 - protein, 197 aa, Escherichia sp.
MRRFAGACRFVFNRALARQNENHEAGNKYIPYGKMASWLVEWKNATETQWLKDSPSQPLQQSLKDLERAYKNFFRKRAAFPRFKKRGQNDAFRYPQGVKLDQENSRIFLPKLGWMRYRNSRQVTGVVKNVTVSQSCGKWYISIQTESEVSTPVHPSASMVGLDAGVAKLATLSDGTVFEPVNSFQKNQKKLARLSDS

SEQ ID NO: 9130 - protein, 626 aa, unknown
  TnpB Polypeptide
MGVRFNGTKEERRLEEKEANQRVKGLQIQQEDIIFKKNAREVAVNVAREFQSKVGKQGIRVIQETTKNYSNIADSAYYWLFLATKGSVEREKKIAEFFDVLLKYPEHAVEWFIFGRSPRIENILVHLWQLKRIYVINFLIRIRRQLDKMCPFNLKYNTVLPLLTQAEFEKAIHVFQKNKNLELKYENKNSKIDTFLRKLEIIKDNYLIIAPYLTAWSNLYQKARWNSLRKLSDEIAQLINKRYRKLFSSIRGIIVFALFPYLWKTVQSIINSTHPERVADLPFKRKKKGRLPIILFMKKDYVVIRPGNSKFLTDLGKKNGKFDIGFILKGFPKITGTLLFAKKIRNYLQKGANIRTLLIKSGSAPSFKLRVFVVLEGLETIFLNTSQIKEFLKDLNIKEECFIGLDINRLGVHMLSLSTETELPYELKKLNQKYNTITKKIIPKLSKSLKTKGKQRTIHEYVKTKGELLRAHQRRTNVLKEIKNIIPHFLAAVMIKSNCRFFCIERIFIDPRGKTGALAKAIYSMPDEQEIFIKATHLASKILGYQVILQQVNPEGTNKYHNKCGGYLNRTNLNYDFAPCMKCGKIVNTHINAAKNIKDKAMEIVQSCSSPFPHTRVKEKKSFKHF

SEQ ID NO: 9131 - protein, 411 aa, Cyanobacteria sp.
VEQVLTIVCKLQPSAKQTEQIEALLKAFSDGCNYANQAAKAGVTSKTTIQSLVYQELRKKFQLSANQAVRVCARVGANRKTAKQKNKPVKAFKPTSADYDARIFSFREKDWTVSLTLINCREHIKIDAGNYHRGKLKGRKPSSAQLCKHRDGQYYIHIQLRDETPEPLKAKNVIGVDFGRRDIAVTSDGERWDGKPIQNVTDKFSKVRASLQAKVSKGTRTTRRRVRNILKRLSGREQRYQTWLNHNISKRIIEAAKSQSAVVAIENLTGIRDRTNQQPCANRAPLRYRNKTERRRSNSWAFYQLRSFLEYKGLKEGVEVVAVNPAYTSQTCHQCNHIGLRSDKRFKCGHCGWHGDADVNGAINISKLGAVFVSLSRGSNLSCSLNRDDSGLLKNQPIERRGESPRASAGG

SEQ ID NO: 9132 - protein, 402 aa, Microcoleus sp.
LYPTQKQQIQLAPALGCAPWCSNYGLNKSIEFYKKTGKKLGCSELNILLSDIKKSYRSAWLGECYSQVWQATTLNLTTAYKIIFHKLVGFPKFKMPPKKQSLQYRHNVKMVEDSVKVSRNSGIAQPKIPRFIEGKNKSVIISRKKYLRKSLVSIRVNEIECENPTTKEGRIYGIDLGLKHFAIVNEGEKKSKYDNAKHFAQHEKNLKRQQQKLRRQQTRNNFRYKYRKVVAKLYEQFRNSRQYFLHKLSYKLVSDRLAVIVENFHLWNRIRNQNVAKARSDEVWESLTNFLAYKLERKGGNLVEIDRGVSTSKVCSNCFHQMAEMPLNMREGTCPHCATDRDRERDKKAAINMKAEGIKILKAEGSVVSALGCEVIPKLGRKSKLRHSPMSTEAPTIFGTAI

SEQ ID NO: 9133 - protein, 430 aa, unknown
  TnpB Polypeptide
MRQVERHWIKEGHELYSICDDLTFKAKNLYNAGLYQIRQSIFARNKSEKEEKPPVLSWIDLVAQFRKEKQTDLLALPSKVSTNILKLVGATISSYYQLLKCYRDKSNTSVINEPRLPRYLHKTEGRYVVEFTNQTFSRKRGSDGELILCPKELNLVIPTKIEHPKCVRIVPKLKSFVIEVIYEVEVSPLKQTGIYAAIDLGVDNLASITFSDGAQPLLVKGSKVKSINQGYNRLIAKAQSKLPTNQKTSQGIHRLWRNREMKLKAELHKITSFLSLYFDEMAIEKVFIGKNVGWKQELALGKKTNQTFTQIPFTTFISQLTYKCLLRGIEVVEQEESYTSKASFVDQDNIPTYGETEQKPTFSGKRVSRGLYRTKEGFLLNADVNGSYNILVKGLLTLGKCLDRGTLSFHARSLRNYQSVSNKELLSQFM

SEQ ID NO: 9134 - protein, 307 aa, unknown
  TnpB Polypeptide
LQLAVKDLANAWKNFFDKAQPDWGTPSFKSKKAPRQGFKTDRAKIVNGKLCLDKPRSISKESWFDLVSYESLKMSEVKVVSIFKEKGSYYAALPYEEEISSKAKTHQETAVDVNVGHFNYTEGQINVLPAKLQKLYKRIKHYQRVLARKREVNGKLAIKSNNYFAVRTKLQKDYRKVANIQNDLLQKFTTKLVDNYDQIVVEDLAVKEMMMTHVASKGMQRSLFSKFRQILTYKCDWYGKELILADKRYPSTQRCAKCGYVKKGDEKITLQGNKKHGTKHNEYICYQCGYSNDRDENAVLNLLALAK

SEQ ID NO: 9135 - protein, 422 aa, unknown
  TnpB Polypeptide
MTDTTTFVTRTVLIKNTNNALYTYFDEFVHLYQFLFRKVYHNYRHNLNGQKESEYRSELMEQFNITNRMAKAIMLDVKTSINSHKALFDYKINRCKIKIAKLSAKITKLKRKLQAKRYGRFRTKNNLQKHLFKCQVKLNKLKQFLACNKQSVTFGTKKLLKSSINKFLSKRDSQISYYGDKTECRQNQQFQIIYNSKRNRFDYKLRLDNAYITDNKYIYGSFYLKDKLAKREIQNIQKLKDRPLSYKIIKRDDKLYLHIMFRYNKTVTVTDSNGVLGIDFNKGFITMSNIDKNGRLLKLYKIPYIHKAESGVCNNSLNSLVNDVVKISLDTGKVIVIEDLKSLNNKKIVNDNKRYNSMINLLKFSKFKQKLINKTCKTGSNIKFINPAYTSRIALNKYCYTMKLNVHSGASYVIARRYYGLD

SEQ ID NO: 9136 - protein, 561 aa, unknown
  TnpB Polypeptide
MKRKLNESNYVTAESVATTKRKTSEDKLLNLKKHTQSTPSSKILVQDSTGKDTALIPFWTKSSKEWSQKLWLHTRTDCAALDSSSSKEYSRNTMSNSWYTARMRRIRYQTPKNSRKTSSPLLRSLSQRIMENVLPITEKEELKKTRVRSKKETKKVIQKIPAQKAIRIKLYPTHEERMKLNQWMGCARWTYNRCIEYVNNSQKIPDFDKNGEKILLKNGQDKMVDEVGKNMKDFRRFIINNENYKEDNEWVLETPYMIRDAAASELVTAYKSNFTKLKKGAQTKFFMKFKTKKDRKDSISIPCRNWKSKSGEFSFLKHMKSSETLPEDLIYDSRLIKTKTNNYYLCIPKPLDTRNENQVPKKTLGVVALDPGVRTFQTTFDLNSVCTEWGCGDSDRLGRLCHAYDKLQSKWTNVNHKKRYKYKKAGRRIQERIRNLVNELHKKLALWLCQNYQVILIPSFNTSIMSMKLHSKTARAMMTWSHYRFQQRLIHKAREFPSRRVYIVNEAYTSITCTHCGKIHSSLGSNKVYECPHCDMVLDRDINGARNILLRFLTNHELELY

SEQ ID NO: 9137 - protein, 267 aa, Boseongicola sp.
VRKLRACCSSKGKEGAESGGVKLRCRVSARSRQRNARASADATSPAVQPDAPQLQSSIREMTEPCMKRLPGCGMISHQGCAGRLGPVCRWHVCLTCNQGEREIAPDCESAVGPEWSVDVPITLLDGTSMEPDPGLETLEDEARRERQKLSRCKRGSKRRRRRVAGLAATRRKQAARSKGRAHSFTTRVVRERSVTAIEATSVRDLTASAKGTRAKPGKLVLEMADVNRRILDVAPCQTRRMLECKAARRRGKVMRSHPRPIVMQSGR

SEQ ID NO: 9138 - protein, 442 aa, Campylobacter sp.
MSVQITKTQTKKYNSNKNLISISHKIELKPNNKAITHFRKAFGCSRLAYNWGLAKWQENYKNSIKTSAYDLKKKFNSIKKDKFPFVYEVSKYATQQPFLNLNLAFNKFFRDLKQGIISYPKFKKKNPNFGSYYIGGDQVTIKDEKYLKVPNFGLVKMREKLRFKGKINSVTIRQKADKFYASFSLQIDKEEYNRTHKLVKHNNQIIGIDLGISNFLSLSNGLAIKAPKPLNKLNKKLAKKQRQLSKKQYAKTKQEALQGVKKSNNYIKQSIKLNKLHTKISNIRNDFLHKLTSHVIREYDYIGLEDLNVKRMMKNHKLAKSLSDVSFCEFNRMLEYKANYNNKQIYRVDIFYPSSKTCSVCGNIKADLKLSDRAYKCDECGVKIDRDYNASINLHKFVNKQIGIVHPKFTPVDLTALLNDLAINQIATSKVETGIQQKSYSL

SEQ ID NO: 9139 - protein, 379 aa, unknown
  TnpB Polypeptide
MIRSFRYPLRPTQAQEAVLTHWLGMCCDIYNGALQERRDAWRKEHRSIGYNDQTKALTEIRAAVPGWCDVPCEVVRSSLRRLDRAMKAFFLRVKRGVKPGFPRFRSRRQYDSFGTQGPVRVDGNCVMLPKLGAVRFNQYRPIVGKVLDVIIRREADRWWVTFQCDVGAAPAKPEAATIDASRMIGVDVGLTSLATLSTGEQIANPRHGREAAKKLAAAQRCLARKQKGSRSRKRALVRVQRAHIHIANQRKDTAYKTAAGLVDRFDVICFEDLNINGLAGGILSKSVHDASWGRLIAAVACKAESAGKHVVLVDPRGTSQRCSGCGEVVRKTLSVRTHECPHCGLVLDRDVNAAINILALGRSALGLSATPPITSEGRT

SEQ ID NO: 9140 - protein, 370 aa, Oscillochloris sp.
VIRAHTIRLNPTPEQTNLFRQAAGTARFCYNWGLRAIKDALDQGVKVPVARALRDEFKRIRAVAYPWTFQVGKSAIEGAFVNLGHAVTNFFASRRGRRKGKRVGFPTFKSRRHGYGSFYVAKDRLTVDGHTLTVSKVGTLNMTESLRFVGKILGATIRYQAGWWWISIQVEVDHTPPTHTGPAIGVDLGIKALAVTSEGEVFENQKYLKRALRTVKRLQRSVSRKVQGSANRRKAVRKLAKAHFRVACQRKDVLHKLTTALVRQASLVGIEDLNVAGMLKNHCLAQAISDVSFAELRRQLDYKAPAFGSRVVAIGRFFASSKTCNRCGHVNPDLTLAMRAWTCPVCGTVLDRDLNAARNIRDEAVRLAGA

SEQ ID NO: 9141 - protein, 551 aa, unknown
  TnpB Polypeptide
MPKARKKKSSEFKASPVKSVFLFGKPNKGKLDVLWQMKHKYVELINFNINVLTGIPDIHVQLVKNDKKDSYVRQLQKQLRPKDINSAFCQNAFDTAFTKLSNRLDAIRLKMLNTIDSVFCQSKVLFGLCLDGADKDEMIACLNEIVKIARVKKDTTFYLDCTAQLQNMSADEFEEQMIELYDLYDMVSVQFRMPYVKSEAIPFDSRLMKIEPSTDTVMPYVITLTNPFVKGNRISIPVNTSKHSLHKIQTGRMAATVTVKPEGTKVRIGWAYAKSLKKPETTVSMGVDTGIRDSFFLSDGRSIGSMKDVIDFYHREVEPAFAQLSSLRSKKRSISYYVRHHKNLPFDVRRSLVQKMDRLEHMIRTADAPYHKKRTYHNMLNHEIKQDVKAYLSCITHDTLTVLELLDIREFEKSRRLNGDLSTFARGRLQRKLMSELNWYGYDYVEVPPDFTSQTCPICGYRNAENRSTVNSKLFRCGCCGYEDDADHVGAVNIRNRAADKELLKLCKDAKNHKEMQSRLIRLLDDRHLEWQMQQLTTPILQEAGNVVSVL

SEQ ID NO: 9142 - protein, 406 aa, unknown
  TnpB Polypeptide
MIRRSKHILKFANKNKLELIEQIYVDCKKQIEVYIDQIISTKLELKKRMSSKLLSDEFVVNSDWKQICYEQASEVIRSQYKKASNKRFNYYKKIYAKLKEQNRYQKFTSKKFSELKLKPIQQTKYFTKPKLNRVSIILTIQLFNFTSDSKNFDSFVRLTTPYVKKINKTNNYYKTINIPIKYHSQSNKFRTSGWKLKNSISLNKVNNNFYFDLFWEKEETTKKVEGKQIGLDCGYKKLLISSENKIYDLGMEKIYNKLSRKKQGSKNFKHALVERDNLINQSINKIETENLSTIVVEDLNNVKTGSKFSKKFNNKLQRWSYPKVLNKLSMICEEQGINLIKVDPSYTSQTCSKCGHKDKNNRKAEKFLCLSCGYETDSDFNASVNILHRCIYSSSTDNNKANLKVS

SEQ ID NO: 9143 - protein, 402 aa, unknown
  TnpB Polypeptide
MIRTSKHILKFANQNKLDLLEQIYFDCKKQIEVYIDQIISAKLELSKRMSSKLLSNDFTKNSDWKNLCYQQASSTIGSQYKKASNKRFNSYKKIYTKLKEQNRYQKFLSKKFSELNLKPIQQTKYFTKPKLNNVTIIIPKNLINFTSDSKSFDSFIRLTTPYKKSIHRYQTINIPIKYHFHSNKFRTSGWKLKNSISLNKVNDNLYFDLFWEKEQVTKKTKGKQIGLDCGYKKLLISSENKIYDLGMKKIYNKLSRKKQGSKNFKQALTERDNLINRSINKIEMEEIKTIVVEDLKNVKLGSKFSKKFNNKLQRWSYPKVLVKLSMICEEQGINLVRVDPAYTSQTCSKCGFKDKKNRSGERFLCLSCGMTMDADYNASINILHRGIYSSSTENNKADLKVS

SEQ ID NO: 9144 - protein, 402 aa, unknown
  TnpB Polypeptide
MIRRSKHILKFANKNKLNMLEQIYSDCKKQIEVYIDQIIKGKLELKKMMSSALLSNEFIENSDWKNLCYQYASSTIRSQYKKASTKRFNSYKKIYAKLKEQNRYNKFTTKRFKELKLKPIQQTKYFVKPKLNNVTIILTVHLFNFTSDSKNFDSFVRLTTPYKKSAGRYQTINLPIKYHSHSNKFRTSGWKLKNSISLNKLNGNFYFDLFWEKEEVSKKLEGKQIGLDCGYKKLLISSENKIYDDGLEKIYEKLSRKKQGSKNFKQTLTERDNLINRSINKIETESISTIVVEDLKNVKSKSKFSKKFNNKLQRWSYPKVLNKLSMICEEQGINLVKVDPAYTSQTCSKCGHKHKDNRKLEKFLCLSCGMTMDADFNASINILHRGIYSSSTENNKANLKVS

SEQ ID NO: 9145 - protein, 419 aa, unknown
  TnpB Polypeptide
MGLHHFIHIYKNFINKNMIRRSKHILKFANKNKLDMLEQIYSDCKKQIEVYIDQIVSDKLELKKNMTSKLLSSDFITDSRWRQLCYGQASEIIRSQYKKASNRRFKAYGRIYAKMKEQNRHNKFTSKKFSELKLNPIQQTKYFTKPKLNNVTIILPERLFNFTTDSKSFDSFIRLTTPYHTKDNYHYQTINIPIKYHSHSNKFRTSGWKLKNSISLNKVNNNFYFDLLWEKEELVRKLSGKSIGLDCGYKKLLISSDNKIYDLGMEKIYQKLSRKKQGSKNFKQALTERDNLINQSINKIETENIQIIVVEDLKNVKSKSKFSKKFNNKLQRWSYPKVLNKLSMICEENGINFIKVDPAYTSQTCSKCGHKHKDNRKLEKFLCLSCGRTVDADFNASINILHRGIYSSSTENKANSKVS

SEQ ID NO: 9146 - protein, 405 aa, unknown
  TnpB Polypeptide
MHRVHKIKLDPTQEQAIYFARACGVARFAFNWALAAWKEEYEAGGKPNEAALRKRLNAIKASEFPWMAEVTKVAPQNAIKNVGLAFQHFFRRVKQGGKPGYPRFKRKGLHDSFRADNGPQNATSHAVECVGKTIKLPRCGVVRMREELRFSGRTLAATVSKMADGWYVAILVDTNDCLSGPLNRGVVGVDLGIKEFATMSNGEVVPSLKPHRAAHQRLVRISRSLSRKQKGSANRAKAKAKLARLHQRIANIRTDALHKLTTKLATEFSTIAIEDLNVSGMLRNRCLARSIADASFAEFRRMLTYKAAMTGAEVVVVDRFFPSSKTCHSCGTIHPMKLSDRVMVCECGNVMDRDLNAAMNLKNKAVSLTVLACGEESSDAVHHGSVKLASMKQEVAGLCRDAQTL

SEQ ID NO: 9147 - protein, 255 aa, Streptacidiphilus sp.
VPNPRHARTAAERLEAAQQALARFPCVRRDKRTGNHHKAVTKVADLHRKVRRQRLDHAHKTALDLIRAHDFIAHEDLGIRNMLAAPAPQPDPDRPGTFLPNGTAAKTGLNKSINDAGWGVFLTILTSKAESGPDSDHRGPPQHLPHLPRMRAHHEGEPAHPGNLPLHQVQPHRARRHRGSHQRSTGRAGPSQRPPGPARSPRTYPGEESQPSRPATSAAWGWQGHPPVVTGLRHAAARVVYVAVAGMGNWAQTSV

SEQ ID NO: 9148 - protein, 405 aa, unknown
  TnpB Polypeptide
MLVRSLAFRLKDPLPNDAKFLMEDFRLAVNNAIRLGIHSNVTSRFALTNLAYKDFRKDHPGMYAQHLVCAFEVAGSILKNHRRKLRKKLPAQVPFVRRLFMKAENQAYKLDRINGVLDLPIRAGCHVKLRLVMSEYHRKYLDDESLSLGSLTLLPDRVVVTIRKHAPKPYAPESVLSLDTNERSLDGVLAKEDRIAAVVRAEFPEVSIIQSVHHDRRKRLQKKKSHDRRISRGLSNNEGRRERDRIEYRLHQVANAVLTFAEECRSEIVLEDLAGIRPRMGKRMNRRISMWPRRKLHQIIEYKAAWQGIPVVKVDPRYSSRKCPVCGRIQDSRRGTEFVCGCGWHIDRHINASINLLQTAASKKAAGGLRFDPGAFQHDVVMVLCGPGRAVRPEPNGTSGMRAVA

SEQ ID NO: 9149 - protein, 501 aa, Moorea sp.
MMPKKVGVTKKISTQIVPVVGMTRSVELELLQVMKKLGIVRSESYNKLGSINHWGLDWKKAVPEIKSFRTPDTLGLPAKLMDWTVNDVAKAITASQAACTEAVIKKIYKRFSGRDGQKRRKELCKQLKTLAFLKNPLLHRLVRKEFQRGHSWVKNQIVYQQVGYKCKRLSRNTYQLELAGLTRGKRNKITVRSNRKIKGQIRLIYNHLLGRFEIHFLVDYGTVEIPPNRRAIGVDKGYTEAFFDSDGQEHGKKLGKLATKKSDRICAKNRNRGKLWALHRKLEKINPAKSARILKNNLSRKTENRRYRKNQSEIRAIIGAASKSLFDGESLKVFAVREAWPTASDLTQPIRNKRQSKAMSRKLNSWMKGEMRDSLRKWANWTGSVVTEVQPSYTSQVDSVTGTLLGKRSGDSFTRFDGVVLQADHNAAKNILARGTDFEISRYMNKTEVQAVLLRRTARFLKGMGLSLADAVELGWLDSKHEQNSGFQGTPGRDTRKVQID

SEQ ID NO: 9150 - protein, 466 aa, Acidimicrobiaceae sp.
MAQRPATTFVSHTGQVLPRAVTFQFVLDPNDEQRILLVKCAGARRFTVNHHLARVKANLDVRSAERAALSESEEPSELATPSLSWSAFSFINEINAWKNGDSVDSPVNEDGTRGLAWRYELPNDVFECASVDAARALETFAASRRGQRGGVPIGFPRFQTKAKVTPTFRLRNRATAGESPASQPIRFSDPSHLRLPKFGPIKLFGPTRKVRRMIDAGRFHIYSATLTQRAGRWIVSLTGVAAELHQAERSRTTRHAIPVGVDRGIKSLAVAADANGVPFKSFKGVKPLREAQQKLKAANQALARTTPGSKGRQRARARLAKTHRKVANTRRYWAHEASRALVTKAQVHVIEDLNVAGMVKNRRLAKSVSDAAMGELFRQILYKAKWHGVEVRVADRFFPSSKTCSSCGEVKSELKLSERSYSCDVCGLIINRDLNAAINLARWQPVNGQSGEIQLAPTSASLLSST

SEQ ID NO: 9151 - protein, 427 aa, unknown
  TnpB Polypeptide
MHYNYKYRLDPPEPITETLLHHVDTCRQLYNHVLYKLNEADEIPARYEVQDMLPDLKTWWDDLTAIHSKVLQMVVKRVYDNLSTLKAQKENGRAVGMLKWKSPREYRSLTYNQSGFKLKNTSGRPVLWLSKIGEIPIYLHRDIPENATIKQVTVKREPTGEWFATFGIDVDEATPEKPANPEKCVGIDVGILKYAHDTDGTAVGSFDLSDERERLERAQRNLSRKEHGSANWAKQRKIVAERHAELKRKRRDFLHKLSNYYATEYDLVAVEDLNAKGLVELPGNSRNRAGAAWGKFLRMLEYKCEREGTYFVAVDPKDTTKKCASCGVKTDKPLWVREHSCPSCGFEADRDANAVVRLRLTGSQIARDLATAWNILQRGFSELGLGWPEDTPVETALPTDTTSVSAKRVIETGSPTLKERTAQAVSE

SEQ ID NO: 9152 - protein, 476 aa, unknown
  TnpB Polypeptide
MNEQRKQRKQKKRPTAGEPYPVTRAVTHIRLVEVNPGKLAALDALAPVYLALCQAYVTLFCTTESPNKLRDPRYQTPLSERWHRVAIMQAAGIARSWRSNRTAAYQQYQDDLERYQKQQADGQLSAHAKEPQWRAWNVPTLREPCIQANVNVVKLETSQESSFDYWLTISTLEKGQPIQVPVKLAAYHKAALTDPKTHQGKKLNTSVQLNQRDGVWWLTLSYDEEVTPQIVAGAPVVGIDVGIANFVTTSTGKQYGSFHKHLRARHKRDRAKRRRKAKLRACLKKKGVKHLPSTSSRTGQRLMRHVKHEINYAVNQCFAEPEHQGVQFAYEALSVASMRFKARAQNAYVRASHLGHIPQQILWNSQKRGVVATPVISAYSSQECSVCHYTDRTNRPDQRTFRCQVCGFAAHADYNAAVNLSRRVGDRPLRACRDRSAIKAVLMQRHEAWKQQQGMGNTSPVKRRKRGKASAAASSI

SEQ ID NO: 9153 - protein, 423 aa, Nocardiopsis sp.
VSHKQGVRFELAPTGEQAVAMGRHCGLSRVVENFCLETVQKKYAQRKAEETYGIREEELTKVPWSAPALEREWRAAHPERYPWFSQGGLSSRVPKEACRVRAAGLKNYFASRDGRRKGARVGWPRWRRRKHGSRFRYDADRARPLDARTVRLPAIGDVAVREDMSWLTGRTATGSARILGATVGEQAGRWWVSFQIEVDRDEVNKRRQVPDGAPACGIDLGLKTFAVIANSDGTTEEVRAPRPLKAAQRALKRAGRRLARSAEGSRNREKARRRVAVLHLRVADRRRDFLHKTTTRLARTKSAVAVETLHVKGMVRNRRLSRAVSDAGFAEFIRQLEYKAGWYGSTVWKADRWFPSSKTCGDCKRVNRALALADRTWACPGCGTVRDRDANAAGNLLDAMLKHSEKQLAGKLPGEEKRLVETA

SEQ ID NO: 9154 - protein, 296 aa, Ruminococcus sp.
MLLSKKTSIKVSREYANLIGHMCYAASKLWNVCNYERQHYKETGIEQHPDWYYQKKAHKEDLWYKQLPSQTAQEVCKLLDKAWKSFYALKRSGGIETPRPPRFKQESIPITYMQMGIVHERDTGRVRLSLPKALKKYMEETYQIHENFLYLENKIFRGMDQIKQLRIYPPEKGNCKIIVVYEVSGQEELPQNGHELSIDLGLHNLMTCYDSGNGKTFILGRKYLALERYFHKEIARVQAQWYGQQSGKGVKYLATSKHIRKLYKRKHDSVTDYLHKVTRYLAEYCREQGITCFIPN

SEQ ID NO: 9155 - protein, 528 aa, unknown
  TnpB Polypeptide
MLTKNKSDNNFITVECLLSFDSDEDKKKVLDLMRKFSSMVRFAYKRLLEKTEEKALRKLLPIRYGINARYSNAAILLAQQALDSCIERKQNPKKLIFGSRVLFEQLKKKHLTGAMRENLRQKWKERRYGILYATGENAAKGNLNLRLVNLKDQWYLRINLGNGEYVWPKVIRSAKRKTDKWVSFINDIEHAEKTGDWFPYTVRIKLRNGKIYAQFSREEKLPEVTITKYNGVIGIDINAYPFHLALVHVAKDGNLEKYERISLDKLLEGSSEKREYLSWQFAHQVVEIAKRERKAIVVENLEKLPKGKRGDGLPKLRQKLQKWIYKALLQKIEIVAKRNGIQVIKVNPAYTSIIGKLKYAPLYNIDKDTSGAYVIARRGLGFKERLPKNYKDLLKDAEFLSYTIARIEDKIANLKQEIREEKNEYKRNRLKSVLWKTRKELDLLLKHFWGSGESESAAQQTVNRKMERVRGRAQALQKSWQVLSVAFAFSCLESLRDFSPLKRILISGDWAGVANKASPSHLGQGTII

SEQ ID NO: 9156 - protein, 409 aa, unknown
  TnpB Polypeptide
VRVFRAYKTELDPTCKQVEQLLQHAGCARWAYNWGLHKKIEAYKATGKSPSAIDLHRELTVLKTKPAEDGGVPWMYESSKCAPQEALRNLDAAYKNFFRRCKTEAKKKGFPRFKSRRNGIGSFRLTGSIRASTASVQLPVLGELRLKEHGYLPVENVKVLSATVSEQAGRWFVSLQVEQELADPEPKVPHVVGVDVGIKHLAVTSDGEMFDNPTALKKVQKTLRIRQKAVSRKQKGSANRRKAVARVAKVHRRVANIRRDALHKMTTSIAKSASVIVVEDLNVSGMLKNHCLARSLSDASLSEIHRQLTYKAKWNGAELLKVDRFYPSSKRCSGCGNVKVTLGLDERTYHCEECGAIIDRDENASLNLKALAGSSPVSACCPGSSGLSRKTQVKLLVGQEPSREESTYG

SEQ ID NO: 9157 - protein, 395 aa, Atopobium sp.
LGVSMAYEVRIYPSASQRAQIERTFGAVRWVYNKCLETCRDAYGETGKSPTRWRLDKMLPGWKAEFPWLKEADSTALQSAVQDLSRAYDNFFRRCKTGGAPGYPRSKSKRDVRQSYRSKRVGGNVAVPDARHVKLPKLGLVKARVSRPVEGRILSATVKRVPSGKYFCVLSVADAPVAPMPEGAVPVMGVDAGVASLAALSTGEKVANPKALARSEAKLAREQRRLSRKRKGSKRRAKQRIKVARVHERIADQRKDALHKAATRIVRESQAVAVEDLGVRGMERNRHLAKAVADASMSEMIRQLGYKCAWHGRTFVKVSRWYPSSKTCSACGYVLGELPLSIRSWECPACGTRHDRDVNAAANIAAEGARMLSEGTAGLAGTSGADATGTLVEQA

SEQ ID NO: 9158 - protein, 342 aa, Geobacillus sp.
MLKHKQVYKELPAQTSQQILRLLDKNWKSFFKAIKDWSKNKEKYLGKPKLPKYKKKNGRNVVIFTNQQCKIKDGYIKFPKTDLKLKTKVIEGLQQVRIVPKGSIYVIEVVYKKEIPNMIRESNRVVGIDLGLNNFVTMVNNIGETPIVINGKGVKSINQYYNKQKAYFQSILKKQNGLNWSKRLEKLTLKRNNKIKDFMHKASRYVVDWCVKHNIDTIVIGKNDNWKQEVDLGKRLNQAFVQIPYDMFIEQLQYKCEEVGIKVVLTEESYTSGTSFLDGEAPIKENYDKNRRIKRGLFKSNKGILINADVNGAYNIMRKVFPKAFANGVEGVGLHPVKLNVA

SEQ ID NO: 9159 - protein, 703 aa, unknown
  TnpB Polypeptide
MVSASAQPDTGRLTSTTGMAISAAYEIDAHPSAESSPDFVGPVCDDVCWTGLAGLFWREQLGVCAGRCASAGTCCGPRRDGRWPEPGDERGSGDERGPCLDVRSAVRAAWREDRAVLTITAARGGAGGEASLTVLQAYRFALDPTAAQQRALASHCGAARKAFNEGLAQVKRCLDQRDAERSYGLTDDQMTEVPWSLPELRRWWNQVKNERAPWWRENSKEAYNSGLDALARGLRAWAASRSGKRRGPAIAFPKFKARHRARPSCRFSTGAIRVDDRAHVVLPRIGRVKTHEPVTALLDKVTAGQARVLAVSVSFDGRRWYCSFTVQVERDLRPPAHVSPGRRHPVVGVDLGVRDLLVAAAPDGTEVARIPAPKPLTQAQARLRALQRKAARQVGPDSRTGRRPSKRWSKTAARTRRVHARAANIRRDVLHKATTRLAQRHRVIVAEDLAVANMIRRKPGAGQGGRGLNRALADAAPAELRRQLGYKTTWYGSALLVADRWYPSSKTCSACGRRKPSLPLAERTWTCDGCGAEHDRDLNAATNLARLSEHAIRVEDRPAGSGPVARRGANRKTRAAAAATAGGCETSTPHSRRTAAGKTGTARRSPPTSARSASGSSTACPTRSPSTGGPGWTAGCRRSWSTWTAWPPRTSPRGWPATGSGSGRTTPGTHSACISSSATPASRSGSASSTTTRRRRSTGSPKR

SEQ ID NO: 9160 - protein, 831 aa, unknown
  TnpB Polypeptide
VSRYRLYPSSEQEADLRDHCAHARYAWNLAWNLHQFGTLETYGKASRRVDRDGNEYIHQKRRPVRPLPGYVEQARMLTQARAEYAWLAAGSQNVQQQALRDFSQAMRNFYAGTHGYPGRRKRYLDEGFRVTGFTLGLHVRRLNRRWGQVRVPKIGWVRFRWTRAVPKCKSYRVTLDRAGRWHVAFTAVPEPVPAPGTGEAVGIDRGVVITAALSTGEKLHCPGMSSRERARLRKAERRKARAPKGSPEQQAERARVARLWAREADRRKDWCEKVSTGLARRFDLIRFEDLRIKNMTRSAKGRAANPGSNVAAKSGLNRAILAQGWGLLVRRTQDKAPGRVETVRAAYTSLRCSACGWVDQNSRDSQAGFCCVACGFTCNADINASINIAAGHAGGTPASVREPQLLASLRDRTRLKSPPFRLGRMSTSKCRIQALRSLVNGESQLGTGRVDFAEPEEHRALRAAVAGIAAKFGPRYYAERAAARRPCAELWQALGDAGFIGVNIPEEYGGGGGGLTELALVCEEIAAAGTPLLLLLVSAAISAEMISDFGTDEQRGTWLPGLASGAVKVVFAITEPDAGSNTLRISTTAQRDGDDWVLHGTKYYISGVDEAQALLVVARTGQDERGGRLSLFIVPTDAPGLDKHLLRVDLLLPERQFTLHFDGVRIGPGALVGQEGEGFRQVFHGLNPERITGAALGVGIARYALGAAARYAADRRVWAEPIGTHQGVSHPLAKAKIETELAALMIRQAAWQHDHGQPAGESSNMAKYAAAEAAIAAVDAAIQTHGGNGLASEYGLIPYWGLARLLRIAPVNREMILNYVAQHSLGLPRSY

SEQ ID NO: 9161 - protein, 591 aa, unknown
  TnpB Polypeptide
VPTPSKNTLRNKNPKTGGVLMVNKSVKTRQKRKPKTDYEKQLKKVRDLMPIHVVEVELAVLDSQDWKMKRIGEHLRVIRNTVLGQLLKNYNQMVRTKEYKQTIKKYHSLCKLIEKTKESANIQKLRKKKEELNKKLEKLRNRHNVTFEYARKYGEYLHDSKYTLPDTVTVLTVCEMAWNSIEGLLFRNAEKVHFYKKGDLITFQGKQAERCIILKNNPDGTFYVSFNEMKFPLIVKKDDLYIQETLSNIAHYIKHGKEMDKQNIECHNMGLSLISAYRVCNNRIVRKLIRGKTRYYLQITLEGKPVPRRKKDGSLRHTYGVGRLGGDVGTQSLAVVSEDNAILKNLADRSKNTFSYEHKIYLLQHYLDRSRRATNPQNYNEDGTIKKGKKEWVYSKRYQKARTKIKELHRKAAESRKYAHNEDVNRLRAIGDEFIIEEMNIKGLQKKAKETTINQKTGKFNRRKRFGKSIGRRSPGYFIKQTKYRFEASGGIVNEVNTWTFKASQYDHILDDTNKKKLSKRWHELPDKTKIQRDLYSAFLLYCTDHNLIRPDKELCDTFFERFLESHNHCVEEIKNNRRIVMNSGIKFDVA

SEQ ID NO: 9162 - protein, 368 aa, Coprococcus sp.
MNIAYRFRIYPNREQEVLLAKTFGCCRFLYNQMLNDKIREYEASKKMLRNTPAMYKKAYPFLKEVDSLALANVQLHLEKAYKNFFRDPKIGFPKFKSKHRSRKSYTTNVVNGNIQVADHRIKLPKLKWIRMKKHRDILEKYCLKSVTISMEPSGKYYASLLYEKSDCENQAEEFDYEDAKILGIDYAMHGMAVFSEDIQRENEGYFRKSEERLAREQRKLSHCVKGSNNYYRQKKRVALCHEKIRNQRKDFLHKLSHEIAEVYDVVAVEDIDMKAMSQCMHFGKSVMDNSYGKFRELMEYKLTWRGKRLVCVDRFFPSSKKCCKCGNIKKELKLSDRVYLCTCGNRIDRDLNAAINIREEARRMLLAG

SEQ ID NO: 9163 - protein, 397 aa, Chloroflexi sp.
MSHAGVSVKVFKYRLYPSKAQVKNLLRVLDCARNLYNMALAERKYGYQLEGRTVTLADTEQLAKRYRTTFPYAHRMFSQTAQSVVKQVDLAFQAFFRRVKAGEKPGYPRFKGRNRFHCFEFKQYGNGIRLDGRRLKVFGIGRIPVRWHRPLEGTIKTVRVLQRAGKWFACFTCEVPERHPLPTTGRMIGVDMGISALFTTSEGDKVENPTYYRSGQKRLRVLQRRLARAKRGSSNRRKKLVAVQRQHEHVANQRRDFLHKLSTALVRQYDKIALENLRVRNMVRNTHLSKSILDSGWSLFRQLLTVKAESAGRELAFIDPAYTSRMCSCCGALFQAFDLSTRWVECVCGLSLDRDHNAARNILKRAGWDTPVNVNVAPLPAPHGNGKRKRRSEAARL

SEQ ID NO: 9164 - protein, 373 aa, Marinithermofilum sp.
VLIYKAYRFRIYPNRKQISLIHRSIGCTRFVFNHFLSQWNEAYEQTGKGLSYAACSRKLTKLKKELEWLKEPDATSLQNSLKHLADAFQRFFKKQNHRPRFKSKKHPVQSYTSQCNYPKKGPPTMVIQGHRIKLPKLGWVRFAKSKQVEGRILSATVRKNPSGKYFISVLCQRIFSPFVPVDKSKAVGIDLGLKHFAILSSGEVIPNPKHHWKYEKQLVRWQRILSRRRKGSQNRNKARLKVARLYEKIRNGRQDFLHKLSTRLIRENQTVCLEDLQVRNMVKNRRLARGISESAWAEFRSMLEYKARWYGRRIRLVGKTFPSSQLCSQCGFRNEKMKKLNVREWTCPACGVHHDRDLNAAKNILKEGLKPAG

SEQ ID NO: 9165 - protein, 375 aa, Escherichia sp.
  misc_feature (118)..(195): Xaa can be any naturally occurring amino acid
VKRLQAFKFQLRPGGQQECEMRRFAGACRFVFNRALARQNENHEAGNKYIPYGKMASWLVEWKNATETQWLKDSPSQPLQQSLKDLERAYKNFFRKRAAFPRFKKRGQNDAFRYPQGXXXXXXXXXXXXXXXXXXXXXXXXXXXXXXXXXXXXXXXXXXXXXXXXXXXXXXXXXXXXXXXXXXXXXXXXXXXXXXKFSNNWQKQKRKIQRLHSCIANIRRDYLHKVTTAVSKNHAMIVIEDLKVSNMSKSAAGTVSQPGRNVRAKSGLNRSILDQGWYEMRRQLAYKQLWRGGQVLAVPPAYTSQRCAYCGHTAKENRLSQSKFRCQVCGYTANADVNGARNILAAGHAVLACGEMVQSGRPLKQEPTEMIQATA

SEQ ID NO: 9166 - protein, 413 aa, Thaumarchaeota sp.
MYITVKGKVKASQAAIQELREAMIQYKQAVNTAVKLLAAGVEKGKVKKWLGQASPLMRTLTDAAVDYARQMLKTTHSKEKPTLKKPLLKLKLRPSKIITLNSENSVLAIALHLFKEKSEQCYHAYLPANKYIKPPKPTRITFFEKRGKILVALPKAITLPEPKQTNIYIGVDLNANFRHAAIAAIGVYDPEAKKLTITHVYNLADHIKYGVAKIPKLNEKISEIHRSGNNPRKYYAKITRIKKDFAHKIAAKLAKLAEQHNASYIFFEDLKTLKPSKHEPKHLRKTTSKWIRKLIIKYARYKAYQKGTRTAYVNPAETSKRCPFCRKKISKDEPHYCQYTWIHANHALAAVNILRRGVAKIYKINEDKIAVTVTPRCPRGGGVGVPRIPEAGAQCAMKAPQRGASASGMQTPR

SEQ ID NO: 9167 - protein, 514 aa, unknown
  TnpB Polypeptide
MQTKKSRYKLLQTKINEHSKHICIPNNVANKPKSDIDLNTNLMSNVKSFNTKIIKKNFQFKKDSLKNEAIKTIRYRLFPTKEQEIVFQNWFSAHIEMYNCVMNKIKSDFKSALSTNTKTKLVNLNINLDITDIKKDLSGKKSEIKEKYGINMHVLDYAISDAISMYKSKISNLKNGHIKKTRLKYLKQTKSTKIFKIEKLLCQKNTFCVSSLGTSIKSFPEINFKEETEIVGIVRYNKHKNEYEYLVRKRILHDNIKKYNFYNKLMQSYDSILSTSNQFCDLVKKINKNTDISKLKDLNKEINKQKRRLNKNIIYDNEKSYQQKQSANKNIVSIDPGIRTFLTCLSDDHIKEIGTNMGKIIKNKLIYLDKISNNENLNKKKQNKLLSKTRNKIKNCVNDYHWKTINHLTAEYKHILIGNFSTKDMGESNQRKMIKRIGSNMRFYVFKSRLQYKCYLSGTKYAEIDEYCTSKCCSACGKYKSDLYGQKIYNCLDCGLIIDRDINASKNILLKSIR

SEQ ID NO: 9168 - protein, 478 aa, unknown
  TnpB Polypeptide
MSYRTITIKLLRPTGAKKRLMDDAMDRYAQAFEALLRACRPLCRPGAAAKDLCPRSVLPVVDAFGCQPFKDALQQEVQGVLRSYLARIQKGYRAHYPLTRTDEEDLRRIFSNSGNFSCSEIYTNLQKYDTLRPVSFCRYAAGRDFSLLKSENSKRYYCKLYLLNRQNAIEAPASDDYLQDIVTGQMLRDRHGRRRYLLLPLDAGKWQKQHLQEVERGVALPKNAVLRRRGKEYDLCVRLEYRDPAPCAPVCTLGVARSGSGVCLCIHGGGQDRFQQMERPPGPQGLPVLANRICTLADRLSAQIVAADLSRWTDGAAGASMPAHEYQKLMALLGQRAVRAGLPPVVAVSPQGIGQRCPACGVLRRLPAGVGGLFLCVSCGHVQPKQQLGAANLARALERYGRTQLRVRESHGAGKVCFDCPALALHLETEEGPQARQWFVQQVMQRLEQPETPLTSRQKSILHKLAQPPPAGGWFRFE

SEQ ID NO: 9169 - protein, 593 aa, unknown
  TnpB Polypeptide
MVRCYRYCLNPSATQIAAIHRAAKAARAYWNGLVAVQRWAEREIKAGRQGSVVAEYEELLQGKALTGRAVSVARARAASDGVPVEDAISSLRSEKAAELGTIVRRKDGTRNRWLSRRRLAVEYACERIERTRKLKVSRLPAAVAYAMLQKFQAATAEYISGKRKRPRFKSFGDAISLQAQVTATTPWPLASGGHGETFVDLARIAGKVCGKVPVVFHRDLPAGAKIKQLALTTRGERMFAVLMIEALDAVLERQFPDAGSRVAGIDPGRKVALSLSTPDGNETAVIQPALAKDKWFLRRLRRGQRKADRQRRAGNPGCFDAGGRPIKGKRLSPPSQNLQATQRRIFEMQRHMADARLDFYHRSANYLLERFDAIGVGKWRGRGKAPGKGKARRAQNRKDYDHAISLFAGILRYKGGSKKQTFDVAEHGSTRDCDGCGEPTGPRGLQGLKIRKWVCSNCGAVHENRDFTAARAIARRTAEKLAAEAHSPCSQPARKGGEMQRRRSADAGQTKVVPPEGAGVPVVDEAQAARPVARKLTPSAASAAVPGQFQGGARASLGAVAPGDSNIILAWSRPATGPKARGPLAECAVDDSN

SEQ ID NO: 9170 - protein, 383 aa, unknown
  TnpB Polypeptide
VFHAYKFRLWTNANQERELVIMLETHRRLYNDALAQRQWFYDEWQISRSYEDQSGWFKDQRRKNAYFERLNFSSAQGTLRRLDKAFASFFRRVKAGEEPGYPRFKGVDRFNSILFPSHGDGIRLKGNRLRVQHVGTIRLCLHREVEGKIKTLSLKREGDKWFVVLACEAPEPQKVGNILPAVGLDVGLTHFVITSEGEKIANPRFLKDTLPELRRAQRSLSRKKKGGSSRRKARRKVRKLHARVANLRHEHRHKVSNELISRYGKIAVESLNVQGMLRNPRLAQAISDVGWSAFVATLTYKAERASGEVRQVSPNYTSQQCSACGENVPKDLHVRVHRCGCGLVLDRDHNAAINILNRAWPGTGRLSVTQPLGRVLKEAVCFS

SEQ ID NO: 9171 - protein, 419 aa, Burkholderia sp.
MLRTHKIRLVPTDAQVNHLARACGVARFAWNWALARWQAQYEAHRLNPALAKPNEGALRRELNALKRTEFPWMLEVTKCAPQEAIINLGKAYQNWFGSLSGKRRGPKVHAPQFKKKGQRDSFKCSAGTFDVDASRIRIPNLGWVRMRESLRFAGRPVSVTVSRTAHAWFAAITLETEDTPARCESQAAVGVDLGLKALATFSDGTEVQGPKALGTLLQRLRRLSRAHSRKEKGSANRRKSAQRLARLHWRISNVRQDALHKLTHRLTANYGFMAIEDLNVKGMLSNRRLARHIADAGFGEFRRQLEYKAAQRGTLVEVVDRWYPSSKRCSACGAIHEALTLADRAWGCGACGVVHDRDLNAARNLLAEGIRLAATISVPGAGMTVCGEEGSGSGRKTRTKPASMKQTVKHNAAPRPPYA

SEQ ID NO: 9172 - protein, 440 aa, Streptomyces sp.
VSTERVQEKRQFGHRARLALTPAQIRLMDDQAHAARTMWNCLHDWWSMLPKDKRSLAAADAAIRQARKEIDWLGVLPAQAAQAVLKTYFQAWRNRWDGRADAPNFKARIRTVMSVDIPQGRDLNITRVHRRWGMVNIPKIGRVRFRWTKDLPVAKHATTGNRVTGARLVKDALGWHIAFRVQALQAKPEPHPGPHVGIDAGVNLPLALSDGNHRDHGRPPRLPNGKADRDKWLNPQEKAKLLGLERRAAQRKQHRQCGEKTSRRLRHTYDQIKQLRAKATRRAVDWQHKTTTSIAMQYGTIVVEQLNIKSMVKSAKGTTEEPGRNVAQKSGLNRAISQEAWGRTVTMLTYKTARHGGALHKVPAPGTSLRCSACGITTPGSREDQATFVCKNPECRLSCNADWNAARNVLHLYRMGHALTPAAGRAVVRRPRGVKPATAR

SEQ ID NO: 9173 - protein, 305 aa, Natrialbaceae sp.
VSFKAAGFKQDAQFNRVRLSKGRNLKEHRSDFVLCEYELRPDVDLSEWDIQQVRAVHKYDEWQLHFICRKSIDPEPPGDETAGIDLGISNVAALSFGGESILFPGNALKEDEYYFGRKKAKCDDSRSNERLRLDRKRTERRTHFLHTLSKHIVSECVERGVGTIIIGDLGGIRDDDNGESRNWGKHGNLDLHGWAFDRFTSILDYKAEAEGIDLTVESERDTSKTCSACGTKDGNQRVERGLYVCEECDMVANADVNGAENIRRKVTPSPSEDRSNGWLAQPSVHLFDRNEGRFAPREQVVDCKP

SEQ ID NO: 9174 - protein, 565 aa, Natrialbaceae sp.
LPDEERERYNRLDTLTTQTANTLIEQYWTPDHLSEIYESSHQAWKYFDEQTAFGEFDIYLPSRYKRCLLQKVGETLRSHANKRDAFQTIKPLLPDHKIRRIHTRRIKDRLWDSDEYLSSGYVDLLIGQLNAYYDVHGEYPDTYFDFQDCPKYSSGVLPYSADDGPTSGQAVKYQYDESTKQLAVELKTPDTLDPDTYGDWTWTAYALEGYEAFHELVEHGSLSAPSFQPNTSKRGDDYYELSFPVEVEHADTPDDVDTVLAIDGGLRKDATAVVVDKEGEQLSTPYFIQNTEREMMRNLNRERNQLNSKLAHLRRQGRTHTDRFKHVQSEYERVNNKIRHKREQLVHDVSNQILALALVYTVDAIVHEDLRSLSPPRGEGQLSWELSSWARRAIIENIEYRANIAGIHVERVYAGNTSRSCPRCGSPGHTTKSPDHYYEVWHGGHFRCDNTRCEFQADRDYVGALNVARVFFAESATLDSGFTSSYTGGFEIELASRSAGSRPTFGNALVAYTPGQSRVTAGGGSAFIAPAVAPTGTKNNGSKSSVSSPATHRYSRFVRDAAVCC

SEQ ID NO: 9175 - protein, 211 aa, Clostridia sp.
MTCFNSDTHETFIVGRKYLTLEHFYYKEIARVQSQWYTQQSEANIKYPKSSKHIKKLYEKKNNAIKDYFHKITRHIVNYCISNDIHTVVIGDINGICKDNTKDDKFNQQLHALPYNKIYNMLEYKLALEGINFVKQTESYSSQTSPLADEVCKKNAVKSNRIYRGLYVDGTNIWNADCVGAYNILRLYLKNNATGLNPYGIKVPKVIKVAV

SEQ ID NO: 9176 - protein, 361 aa, unknown
  TnpB Polypeptide
METVRTIVCKLDPTPEQVVEIDATLRAFAAACDFAADAARRIGSTNKVKVQVDAYRAIRETFGLSANLAIRAIARACAALKVPAKMHSKFESTSIDYDQRIFSFHEWNWTFGLTLLSGRVKLATALGGRQRAALKGRKPTSAVLVKRRDGGYYLHIQLTDEAPEPIETTGTLGVDLGRRRVAVDSDGEIFEATEINRVRDHYPKVRRSVQSKGTKGAKRLLKRLSGRERKHSAHINHVITRRIVDKAKQTGRSIAIEELTGIRERTKVRKAQRYKQQSWSFHQLRSFLEYKAIDAGVPLVAVNPAYTSKTCHRCGKRGYRDALKFRCTECGFEGDADINAALNISALGAKVTSPELASLRV

SEQ ID NO: 9177 - protein, 366 aa, Proteobacteria sp.
MKLTMQLKLVPTDHQRAALLETMRAFNAAASYAAQVGCADHVFSQQAIHVRCYRELRDRFGLSSQMAVRAIGKAVETFRRDKTVCPVFRPDGAMVYDERLLGWKGPAHVSLLTLQGREIVAMVYGEYQAGFLPRLKGQVDLVYKYSTFFLYATIDIPEDAPIEPTRFLGVDLGIVNIATDSDGNAYTGERIERVRVRAATARQTYQSTHTKSAKRRLKTMAGRQARFQRWANHGLAKRLVAYAKDTKAALVLEDLTHIRSRITVRKSQRSKQHNWSFRQLREFLVYKAQPAGVPLLFVDPRNTSRMCHCCGSVDKQNRRSQANFSCLRCGHTANADINAARNLATRGGVTRPDLIASPGGQLACGW

SEQ ID NO: 9178 - protein, 408 aa, Okeania sp.
MRLVERHIIQKNHRFYPEIDRLCFLSKNLYNYANYLVRQSFIFENNYRHYYDLQKTLSTQPDYQAMPAKVSQQILMILDRNWKSFLAASEVYQQNPSKFNARPRIPGYKNKITGRNIVVYTTQAISKRQLKQGIINPSKTGIYLKTLVPTSQIKQVRLVPRLNHYVIEVIYEKCEKQYELEKNRCASIDIGLNNLATLTFNQAGIKPLLINGRPLKSINQYYNKVKSLLQSQLRENQSSKRLKKLCNKREFKINDYLHKSSRLIINTLINQKIGTLIIGHNEEWKQKINLGKRNNQNFVCVPYNKLIEILSYKAKMVGIDVIITEESYTSKASFIDNDLIPVYKEGENNHVTFSGKRVKRGLYRTTSIGLINADVNGSLNIMKKAVPNVFDHGIEGVVVHPVRITPAK

SEQ ID NO: 9179 - protein, 286 aa, unknown
  TnpB Polypeptide
MRLVERHIVKANRFEDICFKSGLLYNYVLYNIRQGIFSGNYLKEFDLSNKLCKENQFDFRNLPNHVSQQVIKQVFKNIKSWIKLKKDFEKNPSKYGNHRPHLPSYKQGKKQNMVVFTNCNCRVKGDNCIYFVKDIIKPIKTNVKKDELKQVRIIPQATCYVVEVVYERKETDLGLNKDNFLSIDLGLNNLCSCISNVETNSFIINGRVMKSVNQWYNKKKAKLMSFVGNKGTSNRIRKITLFRNCWIEDKLHKISRYIVDFCKSNNIGTIIIGLNKEWKNEINIGN

SEQ ID NO: 9180 - protein, 403 aa, Proteobacteria sp.
MKAHRTIRYRLHSGTRTKARKLYGTAEACRFTWNHFVSKLRDDWRYCGRCDPRWYSNCTLFSVWRKHQEKWLQDYSFGIVRLALKPIETAYRQFWKGEGGLPRFKAQYDHVPSFPLGSGMFKLQGNYLHVQRIGQLKLTGNNPYPHGIARSGTIKYECGKWYAYIVYEVEIAMEPESINPVGIDRNVGQVARSDGVVHYTPDLTRLEARRRRYQRMMARRQRGNRKQGVEPSHRYLKAKNLHARTQQKIVQARTDWCHQVSRKIADDYTLVYMEDLDTKAMTKSAKGTADNPGKNVQQKTGLNREIRASGWHKLEQCLGYKSSVMKVNPAYTSQTCHACGHTDKHNRKTRAYHECVACGYRDHADVNAALNILAFGNGASGRGGGGATWPVKRQMDTPGPLWT

SEQ ID NO: 9181 - protein, 410 aa, unknown
  TnpB Polypeptide
MVLVEKHIIKPKHKYYDELDNLCWLSKNLYNSTLYNVRQYYFENKKLLKYQVINKIYVDTNNEDYRALPSKVAKHTQMLVEHNFKSFFGLLKLKEKGKYNKPVKIKIPKYLNKKTGRQVVHYEKGAISFKEQGYIKLSKTNIKIKTNLTKDKVQFIRLVPKNNHIIIEIGYNVIEKEIIQNNNILAIDIGVNNIASCVTTNGEKFLINGKPLKYINHNYNKRIADIQSKLKLTHNKNKSRYKSNITNKRNNRINDYLHKITAYIVNQAVSNQIGTIVVGHNKEWKQDTNIGSINNQNFVNIPFYKFISMLDYKCKLKGIIFKTITEEYTSKCSFVDDEEIAKHTTYAGRRINRELFKTKKGIIINADVNGAYNILKKYMKENATWNERISQTLVKVCSIPSVRKINLRVS

SEQ ID NO: 9182 - protein, 407 aa, Nostoc sp.
MLLGFKTELKLNNKQRTQLSRHCGVARHAWNWGLSLTKQILDHNKINPEEKIKFPSAIDLHKWLVAMVKPEHPWYFYVSKCAPQYALRDLRTAWDRCFKKVSGVPKFKKKGKFDSFELDGTIKIRGTRKIQLPRLGALKTYEDLPQVQPKSVTISRTADRWYISFRIEVEPRDTPKTIDVVGVDLGVKSLATLSTGEVLEGAKSYRKLEAKLSRLQWLNRHKQRGSANWRKAQIKIAKLHQRIANIRKDTLHKLTTYLAKNHGVIVIEDLNVSGMMANRKLAKAIADMGFYEFRRQLEYKTQLYGSELVVVDRFYPSSKTCSNCGTKKESLLLSERVFKCENCGFECDRDLNAAINLSHCVALVPKVVASGVSKAVSHAVPACGVDNADVATVKQEDFSLLANVSKL

SEQ ID NO: 9183 - protein, 369 aa, unknown
  TnpB Polypeptide
MISYKYNIYDSKNNKYLDRILGECCFVWNHALALQRRFYRLFKKYIPLGKMQKYFAKRINRDLLHSQTTQEILERLDNSYKRFFKRLAKRPPKFKKRDMFKSFIFKQGGYTLNGNVFTINRIRKRFKFSYSRNYEGNIKQIRINRNNSGKYSIIIITDKPMSNTLVKSCDGAGVGIDFGLKTYLTLSDGIFYQSPLFFKKYQADIKRLNRKLSRSVIGSNNRRKVKDELARLHRKIKNMRDDFQWKLAHELCKSYDYIFLETLNIEGMRRLWGKKISDLSHYSFVEKLKYVASKYGILVHQIDRWYPSSKTCVCGYVNKVLSLKDRTWKCPECGSVNDRDLLASRNILRKGISELESKCNTLINEVSYA

SEQ ID NO: 9184 - protein, 200 aa, Megamonas sp.
IKKLIYAIILYSKITKKFNYLPVGAIVINGTTSYVANRFYVSVVVNIDEKSKHNKDLETSYRAISDGIGIDLAIISNGKIFKNINKSSKVKRLEKRLKREQRHLSRKYEFKKKKGGKTATTASANIEKQKLKVQKIHQRISNIRVDKFYPSSKTCHACGYIHKGLKLKDRVYICPKCGYREDRDFNASLNLRDAKKYRIA

SEQ ID NO: 9185 - protein, 398 aa, unknown
  TnpB Polypeptide
MEVRRTVPVKLDVTDSDADLLRETIQQFLDAANYVVDAAYDGEWVETRKSVLHDETYSEVRDRTALHSNHVQSARDRAVDALKSVVARWSKGRYSALPTFTTPFVEYNQRNATFGEESASLSTVDGRVTVGYVLPHESRDTPHAEYLFSDEYETTGATLHLRNGEFYLHVRTKADVDASEQPENGTVLGVDLGIENLAVTYTGTFWTGDELDHWRTEYVERRRSLQECGTRWAHENVQSVGRKETGRFEQYLHRVANELVAEAAENGCSSIAFERLTDIRDRMPRARKLHEWAFNRLFGYVSYKAEARGISVEQVNPQYTSQRCSTCGFTVEANRDHESFACQSCGYENHADYNAAKNIGLKLLRSQTGTEGGAPVGVRLNSGMLNTSGLTSAPTGLV

SEQ ID NO: 9186 - protein, 352 aa, unknown
  TnpB Polypeptide
MRLTIQCGVVRLTNFKKKILDKEYNNIQDAIQLSSNDLEELPLFENLKLYSANKQQATRYFKKYKSKEYPISLRKDLINLKKAKSFWFLKIPVYGVRGGIKIPIKPHREFPNNFKICESKLVKRNNEYIAMITIEFDTPKLRRCSSVLAVDLGERFTATAVLLQDRNVMKVRFFGKNIRGIRRHYAWLRKRLQERGLTKVVKRIGSKEGYCVSNILHNISKEIVSLADSTNSCIVLGNLKGIRKSAKGRRFNRIVSNMPFYKLTQMIKYKAEAVGIPVIEVDESYTSKTCHICGEIGKRRTQGLFKCKSCGEYNADINGAINIAKRLVSYMLVSGVFCEQALNSVVLNHKIT

SEQ ID NO: 9187 - protein, 410 aa, unknown
  TnpB Polypeptide
VEETLSTALAAPPIDSGVNRSYNKYMKLTLRIQLLPGDEQKPVLFSTMERFNEAATFAAKVGFEAGVFSQPSIHKLAYFEIRQRFGLSAQMAVRAIGKAVEAFASLRAKGQRDICPEFKPHGAVTYDERIMGFKGLDKVSLWTLTGRMILPLIYGEYQGERFDRIKGQCDLVYRDDKFFLYATVDIPEEAPIEVKDFLGVDLGVVNLATDSDGKTHSGDDVEKTRKRVGDHRKALQKRGTKSAKRRLVKVRKREKNFRRNENHRISNKIVAKAKAHGVGIALEELAGITEDMKRFRHDQRSRMKGWAFFQLRSFVSYKTQRAGIPVAFVDPAYTSRTCSACGHCAKGNRKDRNDFVCLHCGFSFPADHNAAINIKTRVSFRVPIVGPDDAGTGKPADGTYKLPGFSPSSI

SEQ ID NO: 9188 - protein, 557 aa, unknown
  TnpB Polypeptide
LIKDTDLDYSHLNTVLDYLTIGIITMYENNIKLHYVEYIERYVNIVWKKKETIVKIKEENKEEEKQKELVNEFCRQLRKIKTDILEITTEYKSDVKYHNLLKEIKKTITPNKDKYQKNNLYYDLQCNPQDYLPCMIRMMKEVEKDKVMIYNVFPMRNEISPSHIKIDTTTLVHLLFTQKQGNKTDYLLEGNLKKHENEIWEFFFRTERQCFKKPKYTFHHMIETDGVSCSILMLRNDLIGKRIPNIKVDSNTEQYIDELSDYTNIKNKKIVAIDPNKADILYCVDDDNKDANEFRYTQDSRRKECKIKKYAKIILEFKKEKVDGKTIIEYETELSKLNRKTLIIKDFKEYIKKKSEINNKLYKFYEKYIFRKLKLNGYINKKKHEQKMINNFKKIFGKPEEVIITIGDWEQKKQMKYKEATKGVGMRKLFRQNNYKVYLVDEFRTSCMCSICKEETGRCEKFQIRENPKPYKSGNILCHGLLTCKKCSGVWNRDVNSATNIYRIAKNAINELERPKYLCREKKDENIKVEKPKKDKVKIVVQKKAKKSVKVVALTKS

SEQ ID NO: 9189 - protein, 669 aa, Deltaproteobacteria sp.
VRNPDDGVSVLRLALDTRDPLQRGRLEAMFQGAYQVRRAVQRRAKNACRAYWAATHERDDKGPASVRDRLGLSKAALEHAAYAHINAAPHLRRHVTKALAMHLADGVWTAAERHLFRDASGKRHGALRIGRWYDFTRLPGRARSHTKARKWETFRLHGTLASHRAVYADGSGDFVQPRALQPIDSDAWWAYAGPLALVFSGLADGTLVLPVRLPTAPSNQPILDHHLADPSKWHKIDVVRTQDPQAPGGWRYEAHLLVLTQPYGSASTAERRARAAIETADRTVGVDVNVSNLSIASRPRHHDTGRDIRLSRVVRDEPQQQRDRGRARRERRRQRALDRSRRALNRQHYQLSRRQDKRARRRAEAGLPPVSVVPAGPRLARADGVPLTSYKADQLSTRHRRLRAAQVADAASATQARRDRAREVAAGVVAMHGYEIVIEDVRLPAWSASWGRAVATFSPGTLIAAIDREARAVGARAGGVGGVARASTATTALSQHCPCGERVAKRLADRVHACPRCGLRGDRDDVSAILASFVVLTERGVPASARVDYPAAHDALGEIRRALRSTASTYQGWQGTLSESTGLSARDGSFVAWSTPTPDSVVVARRNVGMAACSTLHETGIRRTTAERARWRTNTFPYDPRSYYGTTLSPGQALSRLRLQPSAVMTTHD

SEQ ID NO: 9190 - protein, 320 aa, unknown
  TnpB Polypeptide
MTVRVLRLRIKDRHARWLSERAREVNTVWNYCNELSHTVWLRERRFLSGFDFWPYLKGATKSGLELPVQTVQELAEQYAVKRRAARKTRLAWRKSDGARRSLGWLPFKVRTIRYAHGQVYYAGRWLGLWDSYGLAGYALRAGNISEDARGRWYLNVAVEVPDFVGPKPPPAIEESVGIDLGLATLATMSDGQKEDAKRFYRELEPALAVAQRAGKQARVKAMHAKIANRRRHHLHQLSHALVREHRAIFVGNVNAKGLAQTRMAKSVLDAGWSSLRTMLQYKCDGAGVWFEESTKRSPPRPVLRAASGRRSGRKVSQALE

SEQ ID NO: 9191 - protein, 628 aa, Escherichia sp.
  misc_feature (212)..(295): Xaa can be any naturally occurring amino acid
VKRLQAFKFQLRPGGQQECEMRRFAGACRFVFNRALARQNENHEAGNKYIPYGKMASWLVEWKNATETQWLKDSPSQPLQQSLKDLERAYKNFFRKRAAFPRFKKRGQNDAFRYPQGVKLDQENSRIFLPKLGWMRYRNSRQVTGVVKNVTVSQSCGKWYISIQTESEVSTPAHPSASMVGLDAGVAKLATLSDGTVFEPVNSFQKNQKTLXXXXXXXXXXXXXXXXXXXXXXXXXXXXXXXXXXXXXXXXXXXXXXXXXXXXXXXXXXXXXXXXXXXXXXXXXXXXXXXXXXXXWLKDSPSQPLQQSLKDLERAYKNFFRKRAAFPRFKKRGQNDAFRYPQGVKLDQENSRIFLPKLGWMRYRNSRQVTGVVKNVTVSQSCGKWYISIQTESEVSTPVHPSASMIGLDAGVAKLATLSDGTVFGPVNSFQKNQKTLARLQRQLSRKVKFSNNWQKQKRKIQRLHSRIANIRRDYLHKVTTTVSKNHAMIVIEDLKVSNMSKSAAGTVSQPGRNVRAKSGLNRSILDQGWYEMRRQLEYKQLWSGGQVLAVPPAYTSQRCACCGHTAKENRLSQSQFRCQVCGYTANADVNGARNILAAGHAVLACGEMVQSGRSLKQEPTEMIQATA

SEQ ID NO: 9192 - protein, 556 aa, unknown
  TnpB Polypeptide
MLPLIKQQSSTVSPKMPSESGLMRDVSNLSPPKVDTGDTSSPTIIPPPHPTLRKNVKTSSMLEFRLENKKMTLNVKSHSSRTSTPPSSSCLTSDQDSTQNVPDSAKYWKEFSKELSTKLWLPTEIDLAGLDTHYLSGYSNNTVPLSFVIPQKNPRIKKNSQKTSWPSLLSIQPSTMEAESINDPYTRKVRFYPSPAHKILLSKCFGTTRYLINQAIESIRDGKLKKYSHLTLRNHLMYRDKNLTDHNAWLREIPYDTRDEAMRQLAANIKSNFTKLKRKQITKFVMRFKSKRHARQVCYINKTALNIKKRTLFVQRVKEPLRFAEDISGFKPGTLTVLREHGRYYMCFPLERERTNSKTSDIIALDPGVCTFQTLYTPDGTVGKLGHEMRGILRDKYKREDKLKSILSKLKEHRKRYNLRKRCGVLRTKVRNIVVDFHRKTCSWLTNNFGHILLPNFKVKNMVNKSDRNIGKSTVRGMLSLSHYKFRQRLLEMGQSRGCKVYICNEAHTTQACGRCGILNKKVKGSRTFNCNHCKVKVDRDYNGARNILIKHLIKD

SEQ ID NO: 9193 - protein, 420 aa, unknown
  TnpB Polypeptide
MKLTKKVALYPNQTMIKILDDLCDYRRYCWNQGLELWNDLYDQRVEMVPADLRKKSQLVIKDKTITFSEEEQELLALFPSPSHRVVQNILVADKADWQYSLSSRVLQMAIKDLAHSWSAFFESKKSKKKGSKKKKRKVGKPSFRSKKNPKQGFKTDRASIKDGKLVLDKPHAYKDKWYGISFKGYDLPDGKIKHCAITKIDNSYYASIVIDCPEQPLSKTGKKTAIDANVNHFDYTDGSFKVFPKQLERLYAQIKHYQRLLARKRHENGKNATHSKQYFKVRIKLQKCYQRVTAIQNDLLHKFTTMIYQTYDTVVIEDLDVQAMQMQKKAKNLHRSLFGRFRLFMEYKAIKFDKTLILADQFYPSTQRCSHCGHVKTDDDKIGLDGNKKHGTKHNEYICYSCGFVADRDQNAVLNLLALA

SEQ ID NO: 9194 - protein, 397 aa, Kribbella sp.
MSRYRLYPTPVQAAGLLAQCGHARYVWNLALEQWSMWRHDKGPAPSSVEQARQLTEARAAFGWLSGGSQTVQQQALRDFDQARRSYYAGSHRRPKWRKAGRNEGFRIVGPQAGRVEQVSRTWARVLVPKVGWVRFRVSRALPDARSYRVTHDSVGRWHIAFAATRDPIPAPGNGEIVGVDRGVTVSAALSTGELLTCRGLSESEQRRLGNLQRRLARAQPGSNRRRRVKAAIAKLHARAADRRKDWVEKTSTDLARRFDMIRVENLRVAQMTKRPKPKPDPAKPGSYLPNRRRAKAGLNRGILASGWSLLVRRLEDKAAGRVQKINPAYTSQTCSRCGHCAPGNRENQAFRCQSCGHSDHADVNAAINIAAGRAVTARRDKPVRMSVKREPQLTTSA

SEQ ID NO: 9195 - protein, 370 aa, unknown
  TnpB Polypeptide
MLKAYKYRIYLNKKQEEQVHKTFGCCRFVYNQCLSLKIDKYKNENISLSKIDLNNYCNRELKKEYEWLKEVDKWSLTNSIYNIDSAYQKFFKEHTSYPKFKSKKNNKKSYKTNFANGNIDVSFENNKIKLPKLKWVKANVHREFVGKIKSATISQNPSGKYFVSILVETEHIPMESTGAMIGVDLGIKDLLITSDGEKFDNIHTTKKYENKLAKEQRKLFHKVKGSKNWNKQRIKVARIHEKIHNTRVDNLHKISHKLISENQVIVSEDLVVSNMVKNRNLAKAITDCGWYELTRQLSYKAEWNNRQYIKIGRFTKSSQPCNVCGYINSDTKDLTVRQWTCPKCGTVHDRDINAAINILNEGLRLLEESA

SEQ ID NO: 9196 - protein, 989 aa, Streptomyces sp.
LGGAFEGGRADERGDGDGDPLLAGPVLVLDSAWGGAALQPRAAVQPRGLVDGPGLAEGGLTLVDGVAEHAPDHASVPAGLPGAGGGAAAGEPAGQVRDGGSVVGVAAEQLHHQRRFGLDDLVSGPAFRGFAQVSVAERGAAQHVDGPRAGPVGLPPPVALHQLGFLVLGEHALELDHQLVLGSVAARAPYELHPGAGAGELLDQQGLVGELAGQAVGCITQHHINADLGDKISQPLQRGPHQRRPGVPLVLEHPLLGQLKMLSGGVCPQGRGLRADRLVFLLPGGRHPGVDRRAGHRLLLPDRGRPALGPGAAAPTPRRPRTSPPPHDGRRPPPPPPAGRSPARPALRGTPFKELGQGLGHHRGDRPVTLVGTAANPSCQRFRQLDGEHHARLGDFDSASSHGLLQIPACLTHRHPVPTRQRASGCGRGHPRPGQIRGGVDPPGVLDAIDTITTHHVTNLLPIVTTLTLRAREEFQAPVADRHLEAEVAHCVGGVLNIVRVHRRWGMANLPKIGRVRFRWTKDLPVGKQAGKENRITGARLVKDTLGWHIAFRVQTLEKAPKTHQGPEVGIDVGITVPLALSDGETYEHGQWLTSREQARLLGLEQRAAQRKKHRKPGERTSRRLHHTYDQIAGLRAKAKRRALDWQHKTTTDIARTYSVAVVEALQITSMVKSAKGTIEEPGKNVAQKSGLNRSISGQAWGRTVTMLTYKLARQGGTLAKVPAPGTSRRCSACGLTTPGSRETQALFVCKNSDCGWSGNADHNAARNVLHLYRMGHALIPAAGRAVAGAHRASSPPPKGRWESPCFSWESTSRSGGMTMTDTTRDTDDTTPPCFACGKEARFDELPPRERIAFDQYWRVAHSFNTAVPGWLVLLPRRHVTAVHDLTDAEAGALGVWQVGLSRALRGVTGCLKTYVVQFAESEGFAHVHFHIVPRMADLPAAHRGPGIFGLLDRPGSEGVTAEGADRMARALRARLHGLPHSWGPPDGP

SEQ ID NO: 9197 - protein, 540 aa, Streptomyces sp.
MALKADDQAHAARTMWNLLHAWWQMMPKEKRTLANADAAIRQACQDIDFLAVLPAQAAQAVLKTYFQAWKNCWAGRADTPNFKGRFRTVMSVDIPQGRDLNITRVHRRWGTANIPKVGRVRFRWTKDLPVGKREGAENRITGARLIRDALGWHIAFRVQTLEVRPDPHQGPDVGIDVGVTVPIALSDGETYEHGEWLTGKEKARLLHLEQRAAQRRRHRNPGERTSRRLRRTYDQIAGLRAKAKRRALDWQHQTTTVIARTYGTVVVEALTITNMVKSAKGTIEEPGKHVAQKAGLNRSISGEAWGRTVTMLTYKTAQLGGTLHKVPAPGTSRRCSACGFTMPGSRESQAVFVCKNPDCGWSGNADHNAARNVLHLYRMGHALIPAAGRAVAGAHRASSPPPQGRRESPCFSWESTSIPAGVRRQAGQLVRRRGVDPLALHARRRRAARLARPGGPAGGLVPGGRLVAAGGRRRPHRAPRRPVAPGRHGHHRAARTDRVRGRLAGGGRLDERRGAPLSPPGEERRPGLDLRTRGQTVSKV

SEQ ID NO: 9198 - protein, 416 aa, Microcoleus sp.
MLVFEAKLEGEKQQYERLDEAIRTARFIRNSCIRYWMDNQKIGRYELSAYCKVLAKEFPWANKLNSMARQASAEKAWSAIARFYDNCKKKVSKKGFPRFKKHQTHGSAEYKTCGWKLSEDRRTITFTDGFKAGSFKMWGTRDLHFYQLEQIKRVRVVRRADGYYVQFCIDQERIEQREPTNKTIGLDVGLTHFYTDSNGQTVGNPRHLRKSEKALKRLQRKLSHTEKGSKNRTKARNRLSRKHLKVSRQRKDFAVKKALCVVQSNDLVAYEDLQVRNMVKNSKLSKSISDAAWSNFRHWLEYFARVFGVVTIAVPPHYTSQNCSNCGEVVKKSLSTRTHKCHHCEFVLGRDWNAALNILKLGLRTVGHTGTLNVAACWSSSPAQEATPSASGDIDLCLGEETPSSKLSRGKRKPKE

SEQ ID NO: 9199 - protein, 169 aa, Clostridium sp.
LKKRLKRLQRQVSRKYEANREGCQFNKTNNIIKLEKAIKLVYRKLNNIRTNHIHQATNMIIKLRPYRVVMEDLNISGMLKNKHLSKAIQEQGFYEFIRQMQYKCKFNGIEFVQVDKFYPSSKTCSCCGNVKKDLKLKDRMYVCDICGLEMDRDKNASINLGSYKIFEEV

SEQ ID NO: 9200 - protein, 341 aa, Clostridium sp.
VIKKNKGYRFRLKPNKEQMVYLEKAFGCSRKMYNLYVDMLYKQLHEKNFINGKIDYKAIHLPTPAIIKKGYEYMKEIDSLAFANVQLNFRDAIKKYNSEFDGKTYSKKALKQVETLGKELTFKDLKGIPNFKSKRKNQDSFTTNNQNGTVSIVDEKYVKIPKLKEPIKFVNHRQLPENSIIKSVTLSKNCRNQYYISFTVEYYTLEKQTPSKIQNKISEQRKDWLHKKAYNLAKVYDAIIVEDINLRAVGQCLKLGKSLADNGFGTFRNFLKYKLEDMGKQLIKIDKWFPSSKMCSNCGTMKEKLQLSDRIYKCENCGCIIDRDYNAALNIKEAGSALLAW

SEQ ID NO: 9201 - protein, 232 aa, unknown
  TnpB Polypeptide
VVTSEGDHVVFHGRPCFERFHNLASEIADFQSRLPDDRHSSDRIEQLYRRRRQRDHAQDALVQYLARWLVERAVEEVYVGKLDDVREEHPSATVNEKTDLFWAHGRFRERLGDGLDDECGITVREESEAGSSSTCPSCGGDHRSGDDFQCLSCGFEGHSDLVGAANFLAEQADVGEPMARLAARGQNSPRDSFECLEWDDHRWQHRDQSTKEDPANRSTRTGNLASGGTGAA

SEQ ID NO: 9202 - protein, 312 aa, unknown
  TnpB Polypeptide
MFGRMKAAQMEAAQVCSGRPSIVLPLQLPQNSGACTLVWNNGFELHACVEIPEAEQVPGEVRGTVDLGEIHLAAVSTNTGKALVVSGRGIRSLKRQRNQRFGKVAKKQSRCQKGSRRWHKLQRAKNRLLARSERRIRDQRHKATRQVINFCVEQEVGFLFIGNPQGVREKDSGRHHNQRMSLWEYGKDIDYLTQKSTQARIMSFTGSERGTSSQCPVCGRKKKPKGRAWNCKNCAFTGHRDVVGAVNMHQIAYGEQVIFPRSITYLRPGSSRRSSRADTPLVARNAGGLLSGLVSRSTTSHREDPLGDRLPC

SEQ ID NO: 9203 - protein, 487 aa, unknown
  TnpB Polypeptide
  misc_feature (326)..(484): Xaa can be any naturally occurring amino acid
VRYMAWDATRTVRVRLDVPDDRKSDLHATNQRFQFCANRTAEWAWRYPHDDCVTSKSEAEQAIYDELREKTDHLHANLVQKAIKRATKDIDNCVDRLADGERTSRPHYGTFSIVYDKRAATFYRDKVSLATVNGRVECEYDLPDDPGGTPHGEYLLNDDYSFSTSTVHYDSSADEFYLHAAMEKTVDADSPEKAEDSRVLGVDCNVDDHIAVTSTGRFVGNADLLNHERREFEKRRADLQQTGTRSAHLTFQRIGDRFGRWSDDYLHRCSKAIVAEAHRHGCTHIAFEDLDQIRDRISDDKKFQQWAFRALQEQTEYKAEMAGIVXXXXXXXXXXXXXXXXXXXXXXXXXXXXXXXXXXXXXXXXXXXXXXXXXXXXXXXXXXXXXXXXXXXXXXXXXXXXXXXXXXXXXXXXXXXXXXXXXXXXXXXXXXXXXXXXXXXXXXXXXXXXXXXXXXXXXXXXXXXXXXXXXXXXXXXXXXXXXXXRGG

SEQ ID NO: 9204 - protein, 406 aa, unknown
  TnpB Polypeptide
MRVRATAKVEAVVPERGEALILQFLRAYRDAVQYVVDRIWSMERTPSTKQLHKIFYSELRRLGFRAHHVSEIYKRAREVAEATKRNNGSKPVLKKLTARIHPLDYRIDFSAKTLRIAVLNNEWVKLKLKWYRYLDKYLDGSWRVGEIQVSYRNGKIFTYLTFIKGSTLKEPKTVLGVDINFSNITYTVLDSNGDLVTMGVIPFKGLKRALHLKKLAEDLQRRYPRSWRFMKWARRVRAKWLRRARNILIDSSHYIAKRVVDIAKEYSALIILEDLKKLKEKTSGSKLSWGIQMWCYRRIQLYIEYKALIEGLRVIYVDPRKSSKTTPNRKLLRFINYRFVELGGVVTSRDVVASWNLALRGLQQMRGSRVTWSPDSPCNEAMKTRAKRGNPGARATYSQIFTATRK

SEQ ID NO: 9205 - protein, 391 aa, unknown
  TnpB Polypeptide
MEQVLTLVVKLDTSAEQSSRLKETALAFANACSWINENVDPKLANRNSVQAVCYRDVKEQFGLTANHVVRACAKVAANRQTAKQTGSKVKQSYKPTSFDCDQCTFSFREKDWTVSVSTTGKRLRLPLRASNYHRGKLTGRKPTSAQICQHRDGNWYAHIQLKSTPPAPIKTENVIGVDFGRREIAKTSDNQGWNGDNLQQKRDKYFRTRQSLQKKASQGTRSTRRRCRQILKRLSGREKRFQKWINHNISSAIIEQAKQTRSLVAIEDLTGIRESTNKQPRGRQEKRRSNNWAFYKLRLFLEYKAIKEGIEVITIPPAYTSKTCHKCKHIGVRSNKNFKCFNPECGWKGDADFNGAQVIKLWGCTVNQPGGSRLSCEITGGLPKAYTIASA

SEQ ID NO: 9206 - protein, 300 aa, Candidate divison MSBL1 archaeon
LRVEEQDTEISDFWVKIPVYNPEGDRGESIWCAAIIPRKDREDVEECDFGDSELVKDGEDWFVHLVIKKEIEIESIRTDRPSSFSDVIAVDMGVRWIATSVALSDRESKFYGEEVREIREHYKMFRKKIGKKKVRKGRQVIKRIGNKESRRVEDCLHKISRKIVEDAKERDAIIAIGDLGGIREQNDKGRKFNDKIHKFPFDKLKRFIEYKAEWEGIRVIEVDEGDTSKTCNKCGSKNTRRIGQGKFVCRDCGLEDNADKNRASNIAKRALGKSIRRPLSEVGALLAVPETPAEKGDAAC

SEQ ID NO: 9207 - protein, 403 aa, unknown
  TnpB Polypeptide
MPKKIRDILSSKLSISPANRHRRDDLESLISEFQRVCQQLIDIIWDLDHIPSLLPLEITSQIQDSWLSARMLQCCGKQASGIVRSVRNKLKKAEKHREWLLTQHRSVKKVTAQIEKLKVAKPEISTIQPQLSSQCFSIDRDNKTSFETWVTIHSTGGERILLPLKGSKHLDSLLEREGNILNSIRVSRRFVHLCLEMPEVPLRASGGVLGVDVGITEMFHCSDGQVELEDPHGWTLSKVMGRLTRKRYGSKGFERAQAHRDSFINWSVKRLNLDGVLQVNIENLKNVRRGKICSRKQKRWTYGSIIRGLERTCAKAGVRTVRLDPAFTSRRCNVCGWTHGENRRGKLFRCGSCGLTTDADLNASLNLVLALPKILGWQWGQHRKGNGFFWCPTGQELMVPDVH

SEQ ID NO: 9208 - protein, 463 aa, Firmicutes sp.
MNMLQQQGEISRLSLTVTNEQIKNVGYTLAETAIVTALPKATILSMERRGELIAEIQQIFEGEKQIPRKYYSKAQLQPYLDHVMIGKTIKLLPTAEQEQLLWQHAGTNRFAYNYCKRVSEKYYKYTGKTLSQQAMQKLFRKIKKRQKYAWLNDMNAQVPKQSSKDFDRARRNSFSKFGDGFHTNYKSRHNINQGFYVDAITMTVLTKSIKFQTLGTIKTTRQANRDNHYNVRIIHDGAGWYVSYSIRVKKPTNTGNSTEIIGIDTGIKILAICSNGMIFENINKTHKVKKLEERKAKYQRQMSKRYVKGAKPQSNNYYKAKNAHLKVCRKLRNIRNNHLHQATAMLAKTKPQAIVIESLKLAFMLKNKKLARATTGQKIGEFYRQLEYKCKYNGIELLKAPQDYASSKICSNCGYKYDKSDYDNKPWSLRIRKWTCHNCKITHNRDFNASVNLKNWYKIAKTA

SEQ ID NO: 9209 - protein, 402 aa, unknown
  TnpB Polypeptide
MLARYRYRICPEPGQVIQLARTFGCARVVYNDSLRLRETTHGAGGKVSDTEVQRRVVTLAKATPERAWLGDVASVALVQACQDARRAYRNWFDSLSGKRKGRKVGHPKFRSRKDHRQSARFTRNGFALHGERLYIAKVGDLRVRWSRLLPSEPSSVTVIREADGRYYASFVVEVQATPLPPSGRDVGLDLGLSSLAATSDGELIANPRYLRRRERRLAKAQRALARKQKGSANRQKARIRVAVQHRKIRETRADYLHKTALRLVRDNQAVYVEDLAVSGLARTRLAKSVHDAGWATLVRLLEEKAERYGRTVVKVGRWFPSSQICSMCGVKDGPKPLDVRQWTCGNCGSTHDRDVNAARNIRLEGRKVAAGQAETLNGCGAGVRPGPVLAAGVEAASRRGAA

SEQ ID NO: 9210 - protein, 303 aa, Escherichia sp.
VKRLQAFKFQLRPGGQQEREMRRFAGACRFVFNRALALQNENHEAGNKYIPYGKMASWLVEWKNATETQWLKDAPSQPLQQSLKDLERAYKNFFQKRAAFPRFKKRGQNDAFRYPQGVKLDQENSRIFLPKLVWMRYRNSRQVTGVVKNVTVSQSCGKWYISIQTENEVSTPVHPSALMVGLDAGVAKLATLSDGTVFGPVNSFQKNQKTLARLQRQLSRKVKFSNNWQKQKRKIQRLHSCIANIRRDYLHKVTTTVSKNHAMIVIEDLKVSNMSKSAAGTVSQPGRNVRAKSGLNRSILDQG

SEQ ID NO: 9211 - protein, 392 aa, Streptomyces sp.
MGRVKLVVRVKLLPTPEQAAVLEATLRTCNEAANWLSERAFAKGRTSRAALQVLAYAELKAKGLSAQPALHVLRKVADAYTTLRANLKAGNLGRPHSKQHARATGKPVAFRPDAAQPYDDRCLSWQLQQRTVSIWTTGGRMKDLAFTGQAEHLAVLAAHRKGESDLLRRDGAWYLIATCEVPETETNTTPDGFVGVDLGIVNIATTSEGTRYSGRRLNRHRQADRKLRTKLQKKGSKSAKRRARKHAGREARRARDVNHKISKHIVAEAQRTGRGIALEDLSGIRERARLRKPRRATLHSWSFHQLGAFIAYKAKRAGVPMVYIDPAYTSQQCSQCHHIDKKNRPSQAVFVCRSCGFVEHADLNSSHNIAARGWMMWVRGAESQAPALTLIA

SEQ ID NO: 9212 - protein, 403 aa, unknown
  TnpB Polypeptide
MLKTYRYRIYPNKEQRIFFAKTFGCVMLVYNKMLSEKIEALKNKQPIPTITPAKYKEEFPFLKEVDSLALANAQRNLEKAFKNFFKNPQHYGFPKFKKKKDKQAYTTNNVNNNIKVDFEKGMLYLPKIKDGIKIKIHRKFSGKIKSATITKTRSGNYYVSILVEVEDVKNKTKQSKNKTCGIDLGLKEFASITDDTGTYKIEHPKYLRKAEKRLKRLQKALSRKQEGSNNFEKARRKLAKQHEYVANLRNDFLHKLSKAIIDDNQVIVVEDLNIKGIQQNPYLSKSISDSGFGKFVRYLKYKADWYGKTLIIADRFYPSSKLCNVCGYKHKGLKLSDRYWSCPECGTYHDRDINASINLYKVGLGRPDFKPVEHALVDDRIQEWIPKKPSCCEAGSPTFYKMG

SEQ ID NO: 9213 - protein, 353 aa, Filamentous sp.
MQKSFKYRFYPTPEQETLLRRTMGCARLVYNRALSARTEAWYVKQERVGYDESSKMLTQWKKQDDLQFLNEVSSVPLQQGLRHLQTAFSNFFGGRAKYPNFKKKHNGGSAEFTKSAFKWKDGKVFLAKCSEPLAIVWSRELPKGAKPSTVTVKLSNGARWTVSLLVDVEIEPLPKSPNKIGIDLGITTLIALSNGEKIANPKTFKAKRAKLRKSQKSLSRQQKGSKNRDKARLKVAKVHAQISDARKDFLHKLTTQLIRENQTIVVEDLAIINMLKNPKLALAISDASWGELVRQLEYKCQWYGRNFVKIDRWFPSSKRCGHCGHIVDKLPLTVREWDCPSCGTHHDPLRGLR

SEQ ID NO: 9214 - protein, 483 aa, unknown
  TnpB Polypeptide
MPEYITTRTYYSKKLDEQTYVELTLIAKRLGILRKIIWHQFSSNPKKLNDRKIRDIWLKEKENGTNLYPKIIDQLPARLWKETLRDTIGNINAYFAAGFKEIIKRLYKKYDKAEAKKLIKLLKTDYKANNELHRMVRTLIPKGYSKADNIICLDEECYSFTEDESKIVQIMGLTPMKRLSIPMTTKNKPKGNFMIILKDGRCEFRVYHKYQVTNIEKPIKAIGVDKGYTEVFTDNTGERHGEGFGKLLTKKSDFLDEKYKNRNKLWAIMKKARESGDFNKANNIKTNNLGNKKLDKQKENMKIELKEKIYSAAKVLVQKASIIAIEDLTFKTKSKGKFKKVNRRLSSWIKGVIDEAIIKYCFIYGTKLVYVNAAYTSQGDSRYDCALMGTRIGDSFIGFDEVVLDADINAAINILARLYDSEINLYTSAEKVKEILIHRAEAVLSASVETAQLGLQDVTPINLGLHPKSGLSKKSSKKLAKVS

SEQ ID NO: 9215 - protein, 372 aa, unknown
  TnpB Polypeptide
MLKGYKYRIFPTEDQKDQLQRYFGVNRLVYNLGLETKTVAYASNKKSISKYDLINQLPELRNEFDYIKECPSQVLQHSIINLDTAYQNFFKGKGQFPKFKNKYSKQSITFPQGFEVSFKDGTLKLPKLKEVAIDYHREFKGLPKRVTLTKTVTGKYFVSILVDTQTEKPKQKSIKTESSVGIDFGIKNLAITSDGVVYENKNFFKSQQRRLRIEQRSLARKRKGSINREKQKLKVALLQEKIRNQRTDYLHKISTELVNTYDTIVLEDLAVSNMVKNHNLAKAISDMGWRQLRTMLEYKTEWQGKNLVVIGRFEPSSKVCSNCGNHKKDLKLSDRTYNCDKCGNSMDRDLNASLNIKNFGVRDNPLYANVSH

SEQ ID NO: 9216 - protein, 442 aa, Actinopolyspora sp.
MTMVLRAYQFALDPTPDQQAALSSHCGAARFVYNWALAQVKAVLDQRAAERSYDVAEDQLTPAMNWSAYSLRKAWNAAKDEVAPWWGENSKEAYATGLANLADALGNWHTSRTGKRAGKTVGFPRFKSKRHRFSCRFSTGSFGMSDSDRRHVKLPRIGLVRTHESTRKLARHVERGTARIRSATVSYRRGRWHVSFSVEITKTDPQPATQGGTVGVDLGVKSLAVLSTGETIANPKHLEAAQRQLRRLQRQAARRRGPDRRTKRTPSARWRTTQARIATLHTAVANARRDGLHKLSTRLVDEFDTVVVEDLNVSGMVRNRRLARAVSNVSMNELRRQLNYKTTWSGRHLVVADRWYPSSKTCSDCGAVKTKLRLSERTFQCDHCGHTADRDHNAARNLAGLTSSPSCGATKNEPAGNPPKTSPAGNGYRHGKTAPTGAAKAV

SEQ ID NO: 9217 - protein, 584 aa, Flavobacterium sp.
MKKSSDQGKKTIETRLSCPEFFPLFDNLLAYYASVRHRLYRDLIVKELPLNDLKSSYILKEKLTARQFNSLAKDVSARAKANEALFRINLKNLETQVQSAKRQCSDVEKRIKVSISQCKAIENYRTKICEWKINSNNSGKATRKPSMPLRIRGVFKNQLIVNLRKLKLLLHHKKRRLCKIILKLDQLKSRGARKLCFGTGKLFRAQYRLETNGFNDHGEWLEFYRLARSSSMTFVGSSDESFGNQTVQFDIEKKRLKIRLPNAGIFEHFGKILVLQNIDFPTFLHSDFENALSNLSGTSKVKRRTAHPITYRIVRRYNKINGRRSYYLQATFTVEAKELSSIEGVGVVGLDLNADHLALCETDRFGNYVDSLMLPYSLRGLNSEQSKAIIGDLAAVVLNHCQRIKKPVVIEELDFAAKKVALNLMPKVRRKFLSSFAYSAFMKAFISKSRSLGISIITINPAYTSLIGAYKYQGLNISSHEKAALAIARRAQKFSEGLEVFQGTLPSQAMMTEKTEHRESLRHVWGFYADNRKRIRKLFIEGDVRPLLPLRRAFSLVSRHGSLKRSYIVIREEREFKEPCRSLG

SEQ ID NO: 9218 - protein, 407 aa, Nostoc sp.
MQLVEKHIISQQHKFWKECDHLALQSKHLYNSANYVQRQYFFETNKYYNSIDIYHQTKNLEAYRYLPTKVSKQIVRRVSEAWKGWLAALKDWSKHPEKYLGKPKMPRYKHKECGRNVVIYPIDAISKPFLLKGIVKLSQTKIEFPSPGKNIGQVRIIPKLDHYVIEVVYTVDEPAKSTGKYIAGVDLGLNNLMAITSNHSGIRPLLINGRPLKSINQFFNKRMAASQSIEAWRQIKLLNSKRDRRIDNYLHTVSRRVIDWCQLNDIGQLVIGNNQGWKQDINIGKKNNQEFTKIPHSKLINLLTYKAQLAGIGVIVTEESYTSKASALDGDKLPVYKAKSDIKPVFSGKRVKRGLYKTNTGRIINADTNGSMNIARKVIPNVFEGIEALPFVPVVLGLWTKITNVFV

SEQ ID NO: 9219 - protein, 377 aa, unknown
  TnpB Polypeptide
MNKAIKYRLYPTTEQEAMFARTFGCCRKVYNLMLNDKIESYKETGKFVSVTPAKYKKDYPFLKEVDSLALANVQLNLQGAFRNCFSKIRKTKNGFPKFKSAKHSRKSYTTNNQKGTVDIIDGKYIKLPKVGKIKANIHKQPDTDWAIKSATISQDRDGKYYVSVLFEFEKVVINVPVSDRVLGLDYASDGLYTDSNGNTGTNHKYYRESHSKLTKAQRKLSRMQGSRKGETRSANYLKQLKKVNKIHKHIVNQRLDNLHKLSTEIANQYDVVCVENLNMRAMSNKGFGNGKATMDNGYGMFLNMLEYKLTDRGKYFVKVDKWFPSSQICSCCGTVHAKMKNLTIRTMQCSCGLVLDRDHNAAINIKKEGLRILKSVA

SEQ ID NO: 9220 - protein, 353 aa, unknown
  TnpB Polypeptide
VIIQRAYKTELKLNNQERTLLTGCAGAARFAYNWGLRQSIDAYEVTGKRPSYPELHRQLNELKQGDLAWLYDYSKTIPQEALRDLDKAFQNFFRHLKKGEKPGFPRFKSRKRGIGSFRIWGCIQVDDRRIKLPRIGWLRLHEAGYLPVGGVKILSATVSERAGHWFVSLQVEAEIADQRATGERVGVDLGIKSLAVCSTGETYTNPRLLDHATRQLARCQRELSRRQKGSRNRAKTKTKLARLHQRVANLRREAIHQATSRIVAKTKPEAERPSVIVIENLNVSGMMQNHSLARAIGDVGMGEFGRQMAYKCVWQGITLQKADRWYPSSKRCSGCGQVKESLLLSERVYRCED

SEQ ID NO: 9221 - protein, 215 aa, Paraburkholderia sp.
MGITRFATMSDGNYLAPLNSFRRHEARLRRAQRTMSRKTKFSSNWKKAKARVQRIHSRIGHARRDYLHKATTTISKNHAMVYIENLQVRNMSRSAAGSNDAPGKNVRAKSGLNKAILDQGWFEFRRQLDYKLAWNGGWLIAVPPANTSRTCPVCGYVSAENRQTQARFVCIECGFEENADLVGAINILARGHRVAACGEPVQSDRSVKQEPTEAI

SEQ ID NO: 9222 - protein, 352 aa, unknown
  TnpB Polypeptide
VFTVYRYRVKSLTGLLNQQSRAVNYVWNYCNDSQKHALRWNKPWPTWFDLDRLTIGSSKQVGLHSGTVNAVCRQYAESRAQHRRPYLRYRGRKALAWIPVKGRDLKREGQAFRFGGNTFRVFHSRPLPEGKIRDGTNFSRDRRGNWFLNVVIDADEAPMRAPHRFVGIDLGVIEFATLSTGEKIRNPCGYRTLEKSLAKAQRARKTRLARTIHARIAASRRDFLHKLAHRIVREFDYIAVGKINAAGLAKSRIAKSVLDASWSSFRSMLAYKAVKHGAQYVEADEHFSSQVCSSCGSLPRSRPNGIADLGIRQWVCSDCGHVHDRDVNSALNILARSGHRTPDEGITGLHAA

SEQ ID NO: 9223 - protein, 679 aa, unknown
  TnpB Polypeptide
MKINLTYTVNKKSIPDFYCEVLNCYGLSAKNIKNSTLFIIKNILTSYTYDKDLKTYTLKNNLHQNQLDIISTVNQTISTLNAKLKAKYEQKLNIYNKDKEKYEKDNKNKEQKEEFTLKEPKLIQFNEYSQTIDSKTYYQIINKTLLENVIKTKELNNINYQDYSEVHSHLAQSVVQQVCDEYNYYFKALKEYFLTKDKNINQGEVNGFTGMPKEPQYKAKHSKITFEISKQRFNNDGTVLLIGSKHKLYKDYAKKELINNSIVEKFNSFSLMEIINQDLKTKNIHYLSNVKDYEVVGIRVIPGKYKKKPKVEYIISFNKELKGFYPALINKSNSMYDKDFFELKDNLKLNVIKDYFNNDYKDLTNNVNDKNLNNDINIPYFMGLDLGVVNFATVSFYTANRDKNYVISGKTLKSRINNLDIKIDKKKKELCIDVIKTIQSKKDKKEVLTRQELNLLNEYYKSIYENKIISVSQERKSNISSDFIHKLSKCLIEECMSKEIKVIVVGKNKGWKNEINNGAKNNRAMYNFPHAKFIETLKYKALLKDIVVIEVEESYTSKTSFIDNEELRVYQDKRSKDLDNSEERNLTQGDKSQLSKGKKKLLGKRINQKFISKEKKVIHADVNGSFNIVRKVLLNFSYKEEIINLSYELMEISNYRKRKLFNFYKTKEINKVNQSKELT

SEQ ID NO: 9224 - protein, 401 aa, unknown
  TnpB Polypeptide
MLIYEYKLQGTSAQYQAIDEAIRVTQFIRNKCLALWMSTRGTSKNDLQCYCAVLAKEFSFAARLNSQARQAAADRAWVAISRFYDNCKQHKRGAKGYPRFQHDNRSVEYKQTGWKLEPDGKHITFTDGCGIGRLRLVGSKNQRVAEFPLKLIKRARIVRRADGYYVQFAVDAQRRIAHVPTSKQAGIDMGLKEFLTDSDGNTVANPRHLRKAEKRLKKFHRRLSRKQKQSANRKKARKQLAKAYLKVSRQREDFARKTASTLISSHDLIAYEDLRIANLVKNRKLSKSISDAAWGRFLSWLTYYGQVHNIPVIAVEPAYTTQDCSACGTRVKKSLSVRTHICTGCGLVLDRDHNAAINILAKAVDRTVGHTETGLSQERQNASGQTASPRSGKATTGKRAG

SEQ ID NO: 9225 - protein, 194 aa, unknown
  TnpB Polypeptide
IKVWRQESRQDKTLLHDVTKRIIAVAVQQRTAIVLENIEGIRCLYRKGNGQGRKYRGMMNGWSFREAQRQIEYKARWIGLPAVRLSRRKTRGSSMTCPRCRERLQSDKRLNRKLWCQKCRLVMDRDRVAAINLARRGRVRFARSRPPIIEAQGGAVEAVKGNPTPTVIPGVDAPKPTSHTASWSNHPIVTLSSS

SEQ ID NO: 9226 - protein, 406 aa, Planktothrix sp.
VFVYEFKVYPKPQQITAINEAIRTSQFVRNKVLRYWMDNRGIGQPEMFRYNTLLRKKFKFVEELNSHACQAAVERTLKAVNRFYDNCKNQVKGKKGYPKFKKNTRSVEYKVSGWKLSENRKYITFTDQKGIGILKLVGSRDLNFYQIEQIKRVRIVRRADEYYVQFTIQADPRERVKPLTPSQKAVGIDLGIKYFLADSQGNMEANPQFYRKGEKSLNRLNRKKSKKFKKGRPQSKNYQKARNRYARKHLKVSRQREEFVKRVALRLIQSNDLVAYEDLNVQGLVRNRHLAKSISDAGWYLFRRWLEYFGYKYGKVTVAVPPYNTSQKCSYCGQKVQKSLSTRTHICSHCGFIEDRDINAAINILKLALCTVGHTGSKAWGDLPSSLVGAILVGYGESMNQESSHL

SEQ ID NO: 9227 - protein, 362 aa, Clostridium sp.
MIKAYKYRIYPNEEQRTYLAKTFGCTRFIYNKMLSDRIKAYEENENLDIKKIKYPTPAQYKAEFLWLKEVDSLALANEQLNLDKAYKNFFRDKSVGFPKFKSKKNNHYSYTTNNQKGTVYIENNKIKIPKLKTKIKIKQHRQFNGLIKSCTISQVPSGKYYISILVDTENIKLPKVDKKIGVDVGLKEFAICSDGYKEPNPKHLRKSERRLIKSQKYLSRKQKGSNNRNKARLKVAKLHERIANQRKDFLHKLSIKLIRENQSIVIEDLKVKNMQQNHKLAKVISEASWSEFRKMLEYKADWYGRELIIAPSNYASSQLCSECGYKNSEVKNLALREWICPNCGVHHDRDINASVNLLKLVM

SEQ ID NO: 9228 - protein, 399 aa, unknown
  TnpB Polypeptide
MKKAYSFRIYPNKNQEVKLNRTLNTCRHLYNDALAERRKQAELNRLKRELEVFPWGKPEWISYEYQANELASSKTDFQKEVHSQVLQNTLKRLDRSFKNFYNGFGYPRFKGRNRYNTFTYPQSGFELKDNDLKLSKIGTVRIFQHREMEGKIKTCTIKKDVDQWYAVFTVEIEKKIEKVPVETKIGIDVGLRSLLTLSNGKQIEPPKYFRKSEIKLAWEQVQLSTKKLGSKNRNKQRIKVAKVHRKIRNQRKDFAHKTGRWLVNTYDHIVFEDLQIQNMLANHHLAKSISDAGWYQLISLTKSKAEHAGKIVELVNPKNTSQVCICGYQVPKDLCVRIHSCPNCGLVIGRDHVSAILIGNKSKIDTVPTDCGESRVAPLENADTYCEAIRGYAINWRDS

SEQ ID NO: 9229 - protein, 493 aa, unknown
  TnpB Polypeptide
MRTYETRLHLDDDTSLRVYAERFNRAIHAMHAQRSSGQASAKPSFMRAFDLTARQYNAVKNRLDAMTASAKELRPLRLADLQERLAAVARKIERESARESVRLEMLHHLKRRLDRLHNTIVRLESDETLRICFGSRKLFNAQHHLEKNGFSSHEEWQTAWRDARSSEFFVLGSKDETAGCQGCVMMHLGDDRFRLRLRTVGAMRSYATFDLRFVYGTEHLLGALECGQALSYRFKRDAKGWRVFVSTAVIPPERTTVRPAGCIGVDQNDGFVTVSQTDRFGNLVASQNLPLNTKHLGTKATTTCIAQVVKQIVADAVRTAKPISIERLNFAKKKAQLSYASASRNVMLSAFTYRQFAILLAARATDAGVELITMNPAYSSKIGRQKYARRYGLSVHMAAAFVLARRAQGFRDRYLSSDEKRRRSTREDAAVPVLVAKERRLRGRAKVEPGGPSPHGDPVRAERSEILRAAAGGIPVREGDSSPSSAMRVRRAS

SEQ ID NO: 9230 - protein, 502 aa, Escherichia sp.
  misc_feature (95)..(96): Xaa can be any naturally occurring amino acid
  misc_feature (180)..(180): Xaa can be any naturally occurring amino acid
  misc_feature (199)..(199): Xaa can be any naturally occurring amino acid
  misc_feature (221)..(221): Xaa can be any naturally occurring amino acid
  misc_feature (226)..(226): Xaa can be any naturally occurring amino acid
  misc_feature (350)..(350): Xaa can be any naturally occurring amino acid
VERLQAFKFQLRPGGQQEREMRRFAGACRFVFNRALARQNENHEAGNKYIPYGKMASWLVEWKNATETQWLKDSPSQPLQQSLKDLERAYKNFFXXRAAFPRFKKRGQNDAFRYPQGVKLDQENSRIFLPKLGWMRYRNSRQVTGVVKNVTVSQSCGKWYISIQTESEVSTPVHPSASMXGLDAGVAKLATLSDGTVFXPVNSFQKNQKTLARLQRQLSRXVKFSXNWQKQKRKIQRLHSRIANIRRDYLHKVTTTVSKNHAMIVIEDLKVSNMSKSAAGTVSQPGRNVRAKSGLNRSILDQGWYEMRRQLEYKQLWRGGQVLAVPPAYTSQRCACCGHTAKENRLSQSXHKVTTTVSKNHAMIVIEDLKVSNMSKSAAGTVSQPGRNVRAKSGLNRSILDQGWYEMRRQLEYKQLWRGGQVLAVPPAYTSQRCACCGHTAKENRLSQSKFRCQVCGYTANADVNGARNILAAGHAVLACGEMVQSGRSLKQEPTEMIQATA

SEQ ID NO: 9231 - protein, 245 aa, unknown
  TnpB Polypeptide
MVKAVIHKLPKDDWKLKSVTVSQDSVGNYFASVLFEYEQEDIPSVSKSSTNAIGLDYKSDGLYMDSNGNKAGVHKYYRESHKKLAKEQRRLSRKAGSKKNEIKSSNYFKQMRKVNRIYRKIANQRLDSLHKKSTEIANQYDIVCVEDLDMKAIGNKGFGNGKATFDNGYGMFLNMLEYKLKERGKYFVKVDKWYPSSQICHCCGSVKKLDLKDRVYTCDCGYTGDRDHNAAINILTEGLRILQSL

SEQ ID NO: 9232 - protein, 671 aa, Planomonospora sp.
MTGQISLTSTASCTGLRAVAEHTGEAVGERELARRVGHLTVLIQAMAAHLVAAHWTSADLDLLASGKSLDGRALPSKGWMALRRLGWAAAAPDGVAVCDRLRRCAEEEAARTLRLALHRRRILAALVATWPEQPGKRSQVEWTALRAVLPDGVSPVEIRNRTRQIRAWAEAHGVALPGDLVEVEDPPQVAAQALLAAADRQLTTLERTGEQSAVLRVQLPLVAAPASRRDWAWHALPFTLPPIIAAEAVLCAPTLRSAAHRVRLDLPHRSPITHPSPAGHTTGLGLDWGVNTLLTGALARLTDTSAGPRVLSDGRRLRYDASAVSAKLHRLRQVREHVAARRDHYEALLAGLAAPQPLWAELQSKHAVLVTEHARICARLRQLNRALAWSAARWAVDQARALGASVIYLEDLATLEARGKRSGNARLAGQVRGLVAEAIAHLAAREGIAVVAVPARGTSKYCPRCGSGTQPLKHVAAPDRMRESGWKWAACTSCGLSCDRDHAAAERIAARGLLSQTRVRTDRHTGRRTVTIAVEGNVARARRRTPRPTPPRAVVGRPAVRADRAKTGPTPKRPAAASPGVSRRVPDRRAVPAPPSGGQCPAGQAPQNHPHPGARSGPAHGFPNPQHDRTGFHRVRASPVLALGDFGAGADRPRHARNVRFIQTHSGNQRR

SEQ ID NO: 9233 - protein, 402 aa, Escherichia sp.
MKRLQAFKFQLRPGGQQEREMRRFAGACRFVFNRALALQNENHEAGNKYIPYPRMASWLVEWKNATETQWLKDAPSQPLQQSLKDLERAYKNFFQKRAAFPRFKKRGQNDAFRYPQGVKLDQENSRIFLPKLGWMRYRNSRQVTGVVKNVTVSQSCGKWYISIQTESEVSTPVHPSASMVGLDAGVAKLATLSDGTIFEPVNSFQKNQKTLARLQRQLSRRVKFSNNWQKQKRKIQRLYSRIANIRRDYLHKVTTTVSKNHAMIVIEDLKVSNMSKSAAGTVSQPGRNVRAKSGLNRSILDQGWYEMRRQLEYKQLWRGGQVLAVPPAYTSQRCTCCGHTAKENRLLQSQFRCQVCGYTANADVNGARNILAAGHAVLACGEMVQSGRSLKQEPTEMIQATA

SEQ ID NO: 9234 - protein, 370 aa, unknown
  TnpB Polypeptide
MAHILLADYRAGFVRLKVKAGGRWAWTNLPVQAPPYLDAMLQQSERERERIAAARAEQKRRMAAEGRKERTAAERQELRPTPGVWVAQSPTLIRRGKDWWLHLPFARRVPIAGKAEDRRAAEPDLRVGTVDLNADSAAAAAWEGPRCRGIRTVWHARENTKREKALQKIARRQRRSGRPVKGERSNAGLWRYIAGLDAAVAWRVAAAIVAWAVVCGLQVLVFEQLRPYRPERGLSWSRRANRKRSYWLRGKVLQHVRHLAACQGILVVERNPAWTSQACPHCSHLGERFSPGGCGYPRRLLCGHCGWTGDANVVAALNLKRKWDRTFRYPTQEEAAEARRTRKGGAAASREGSPATVGANVGSRTDAPAA

SEQ ID NO: 9235 - protein, 402 aa, Escherichia sp.
VKRLQAFKFQLRPGGQQEREMRRFAGACRFVFNRALARQNENHEAGNKYIPYGKMASWLVEWKNATETQWLKDSPSQPLQQSLKDLERAYKNFFRKRAAFPRFKKRGQNDAFRYPQGVKLDQENSRIFLPKLGWMRYRNSRQVTGVVKNVTVSQSCGKWYISIQTESEVSTPVHPSASMVGLDAGVAKLATLSDGTVFEPVNSFQKNQKTLARLQRQLSRKVKFSNNWQKQKRKIQRLHSCIANIRRDYLHKVTTTVSKNHAMIVIEDLKVSNMSKSAAGTVSQPGRNVRAKSGLNRSILDQGWYEMRRQLEYKQLWSGGQVLAVPPAYTSQRCACCGHTAKENRLSQSKFRCQVCGYTANADVNGARNILAAGHAVLACGEMVQSGRPLKQEPTEMIQATA

SEQ ID NO: 9236 - protein, 413 aa, unknown
  TnpB Polypeptide
MLVNRVYQITVKRDDRLDRIMFDSARIYNQALYFLRQNYFGAIKNGTAFKTISYTQLYHLVKVCDCYKVATEVHIKQAAIRQAFDMWKAFIAASKSFKTDPSRFTGRPKPPKYIKTAYFKAEVDKQFLNKRNLSAYQFRLPKTDYTVSLPPNIKRDDVRCVRIVPFFDKIKIEICYLKDTTALKLDFNSAISADIGVNNLMSITSNNQCFSSMIVNGRPIKSINQFFNKIRAKIVSCLEICNSCKTSKRLQRLSRKRDLKIKDYMHKASRFVVNQCVANNIGTIVIGHNVGWKQDVNIGAKNNQNFVSIPFNTLINMIKYKAEDVGIKVIITEESYTSKTDHLICEAMKHVDNRPNKRIRRGLFKSDYNRRLINADINGAIGILRKAKVVTDRDIVSLRDRGDLSSPRVFTFK

SEQ ID NO: 9237 - protein, 393 aa, unknown
  TnpB Polypeptide
MYKAYKYRINPTELQKELIAKHIGSARLMYNLALETKNMVYAMSRISLSPFDLMKQMPELKKEYPWLKEINSQTLQQSIHNMDSAFKHFFKGGGFPKFKSKHRGNQSFRIPQNVVLDVENSELIIPKFKKKGISIVLHRELKGIIRSATISKTSTGKYFVSILVDTQTEVPEKPPITTSTTVGIDLGVKDFAVTSNGEVFANPKYLNQMKSRLAYTQSKYSKHKGKRRRHRLAMLHEKVANQRKDFLHKTSNQLISDNQTIALETLAVRNMMQNHCLAKAIADVSCSTFVSMMEYKAEWRGKNILRIGRFAPSSKTCSDCGHIHKGLTLADREWTCDGCGVTHDRDVNAAVNIKSFALKDILSGTDRKNHVELPTLVGVMTHEAHAIGYAVYG

SEQ ID NO: 9238 - protein, 431 aa, Sulfolobus sp.
VSKNLRLNDFQPQEEYVYLTYSLKNNKKVKSKILLENYKHLLQKALDWLWERTKIERKEVKKGKKIFAKVKVTLPKKKEVYKVLRDELEKVNNLASHYVDKAINDAYSILDSWRRRAEKGQASLRKPRLKKVYVRVKSTLRKVEGESVRVTVRLYEYVTFSWSHKWFSRRVEGLELGEPIIKEDRVHLPFRYRLPWFSPLDFLAIDSNLYTLDAYDGEKFVTFSLKELYSLKFGMELKRSKIQSFASKHGRKGKVLLRRYSHRERNRVLDYVHKFVNKLLETYPLTMFAVEKLNKQSMFQDADDKLSKRISRTVWRTIHRVVKYKAPLYGSFVKEVSPHLTSKSCPRCGWVSRKVGRTFHCERCGFTLDRQLNAFLNIYLKMCGFPYIRDIPRVWVGVIPLKGRRGMNGAMPRDSVEAQGLRIGYKFMKIQ

SEQ ID NO: 9239 - protein, 386 aa, Sulfolobus sp.
MARRGNKAIRATVSMKIALSEPLLVLMNNYVKALRFTLFWLKENVPNPNEDGVISKVHEELYTRLREEYNLPSKVAEDCYRDALSVYKGWYNNPKKGRFPRVYKPTVWLTPKASYNVDFEAMTVRIASVGELPILGYPRNLKDYMSWKMKEARLVIRNDKAFLKVVFEKKKEKVEPKESIAIDINMSEIVVGKDDEHYVRIPTRLHEVHHWKSLAENLQKKYPRRWRENKRILYRVRSFNLKARRIMEDFARKVGKWVIEIAEDFGANVIKLENLRNLIKNVDKLPKEFRDKLYLMQYRRLQYWISWQARKHGMIVKFVNPRYSSVSCPKCGRKMREVSHRWFRCSCGYENDRDVIAIVNLNRRGSLTPSSAHQMRDVAPNRWWER

SEQ ID NO: 9240 - protein, 510 aa, unknown
  TnpB Polypeptide
MFISLQFKLELRREDKQKLIKLMRKQSSAIRVAYNMLKELEKEKTKNPHAQIYQRLRQLFSDLPTKYIDSAIYKAKQYPTDKSVVFGGKRLFEKLCKNHLTGKAREGLKKQWKELRQGTLISIGSKSDKGNRLTRFEDLNGPLHLRIATGNREFIYAKVLRELSNNKDKWLTFMAMLLESWQTKNYFPYTVELKLREGEVYGSVSFELPTPKVRYTKENGVLSIDTNASPIHLAIAEVSKTGELVSYQTIKLHHLLGLSQNSKDHQEWILAHQIVDLAIQKGKAIAVENLKKLRKGMRGDGKATLRKILHQWNAKKFMQKLKRVALLKGVEVIEVNPAYTSVIGMLKYAPQLSIDKDIAGAYVIGRRALGFKEDMPENYEKLLKDKAYMEFALKRYEEREKELRELLEKETNEYKRNALESELKNVQSSKKLLTNLIQSLQSEPSGCEGAYGRNPAWQVLKVALLFPILGKVLPRDLSPLKPVLVEGVWDRVRSRLVPLSAGGTVPTTDF

SEQ ID NO: 9241 - protein, 216 aa, Coleofasciculus sp.
VHPAFNRLFYRPALGCSESHFTAISRLFSNPKPFRKLECKLKLLQKRVSRKRLGSNNRKKAQAKVSRLHERIANIRKNYHWELAHNLCDWAGMIFAEDLNLKALAKGMLGKHCLDAGWGQFLQVLEQCCFKRGVFFRKTDAKKTSQTCPNCLTETGKKLLSERVHSCSHCGYTTDRDVAAAQIVCIRGLAAVGHTVKMLSEGKFIGIPTMKESPSL

SEQ ID NO: 9242 - protein, 595 aa, Streptomyces sp.
MGGLREVAASFVVPGPSGVAVRDRLKHLTAEDEKVLRLVGDHLGALASRDLNARCTAGLEHDSDRWAERKRTLTEESSSRWAGSITKATHDQWALARRGQLAHIQSLEAGARTIAHRLSLPVGEKGGKSAPGGYHTRREWFAKTRRLQLLEDRLQAARADREAGVVHVVRGGKRLLNTRHHLDAARLTEEQWRTRWQAGRRFFQADGESGKRFGNETIRVTPDGEVSLRLPAPLAHLANAPHGRYVLAAKVVFAHRGEQWRDRVTANRAVAYRVHEDVLRGRWYLTASWTIPPVKTVPLATARAGGLVGVDTNADHLAAWRLDPHGNPVGQPLRFGYDLTGTAAHRDAQVRHALIRLLHWAQRHGLAIAVEDLDFSSEKTREKHGRRKRFRNLISGMPVSRLRARLVSMAAELGIPVVAVDPAYTSRWGAQHWQKPLTTKNRTTTRHDAAAVAIGRRALGHPIRLGVPPRPLRHWGRTAPPPAHRSDEQGHRTVQARPGTPGREALPISGLRPRAAPAFPDHGHDPCAPDAERKWGTRTPNTVRGVRLSMSPGNRTHSRSVFRNGAGHAPTRSVRTVVGPPWAGPASPADATVAG

SEQ ID NO: 9243 - protein, 444 aa, unknown
  TnpB Polypeptide
MQGKGKEGRVVFEAVKVALDPSPTQERLLLSHAGAARFVYNAGLAHVKEALDAGEKPEWSFYALRKWWNANKDALAVGDDGVIWWTENSKESYSSGLEALAKGLSNWSKSRKGARKGRRVGFPKFKAKDRATPRFAYTTGGFGLIDGDPKALRLPRIGRVHCMENVAARVNGARVLRVTVSRRAGRWYASLTVERDDKPVTKPPRGGAVGVDLGMKTLATLSDGTVIENPRYLRKSERRLKRAQKALSRKTRGSNRRAKARAKVARIHAHVANQRQDAIHKATTMIAQTYLHISVEDLNVVGMVKNHRLAKAVSDASFGEFRRQLEYKTARTGATLHVINRWYPSSKTCSKCGRVKAKLSLNERTYRCDGCGLVMDRDLNAAININVAGSAPETQNAHRETRRRSNQHGCATRVPLKCEPSGGGNRVRLGADERKHVLQATSSS

SEQ ID NO: 9244 - protein, 510 aa, unknown
  TnpB Polypeptide
VSFDLPQKTGLTEADVLASFPALPDLMDPPEVVSQAAVFRIYPNLDQISAFRQWIGAGRWLWNRFVDINRHLYDIEKRFAFHGELSSLLPGLKKVEGQEWLAVPPAIYLVDISRRYDASLRRFLADRKKVRAGKLSKKKAAGIPRFKSKRDREGSIYLSPSCIKMIRRDANPEAARGWVELPNMDDTVVWEKTVKSGKRKGDVDRIEKPLRQAIRIRGGRWPEGKIRSATIREDAPGIWIMSVQYDAPPPKRSRRGEVIELPEPEVVARGYDLGLSSAAVGSDGSCVDAARPLRKKKKRLRKAQRRSARRRQVRLDKSKKEKIKVARSRRERRAYDDEARMHYQVRNARNNFAHQFSHRATAKSVITCAESLNVSGMVRNPRLALSVSDAGMGNILRQLAYKAEWRGRHFIQIDQWAPSTKTCSACDHKLEEMSLSTRKWECPSCGVHHDRDGNAAINILRWGLTEALRRGTPKVTSVESGALAGRIPRKGKGLRRNSARGNGNVELSPE

SEQ ID NO: 9245 - protein, 403 aa, unknown
  TnpB Polypeptide
MNCSIVFRKICYNIVTKNFEGGGLMKQLKAYKFRIYPSDEQKIFFSKTFGCVRLVYNLMLNDRIKAYEESKGNSDKKLKYPTPAKYKKEYEFLKEVDSLALANAQMNLDKAYKNFFRDKSIGFPKFKSKKNPVQSYTTNNQNGTVNIFENWLKVPKLKELVKIKVHRKIEGIIKSATISRNGSGKYFISLLCETDIQELPKTNSSVGIDLGIKDMAILSTGEKIENLKFRKQLEDKLKREQRKLSKRLLIAKKENRKLSEAKNYQKQRIKIAKIHEKIMNMRTDFLNKLSTDIIKNHDIICIEDLNTKGLLHNHKLAKSMSDVSWASFVNKLEYKAKWYGKEIIKIDKFYPSSQICSVCGYKDGKKTLDVREWTCSVCHTHHDRDINAAKNILTEGLRIKQAV

SEQ ID NO: 9246 - protein, 388 aa, unknown
  TnpB Polypeptide
MQEVILNQWLAQERFLWNHFVAQEKPKKDLNQKFLSSYDLDCQLPFLKKEYQWIIVPSQPLQQISRFLELDLQAYKKNPKVHGFPKFKKKYFQEYKSIYFPQFSENWIADKTIQIPCLGRGKDKQIRLKKHRDMSGKLKTVSITKDVDRWYACCSCEIPDVCPLEFQLENAVGIDMGLKEFVVLSDASVIDNPHLLKKSQKKLSKAQHDSDRKKLGSKNRIKAKQQVARIHRKIRNKRKDFQHKETCSIAKAYDFVFTENLAVQNMMANHHLAKAIGDVSWSQFLLLLEYKLLQKGGQLLKIGKSDPSSQLCSRCNSRHPMPLSERTYTCPVCSLEMDRDLNAAINILQLGIRKYFGKDAVGTTDSINTCGDTQVVSMKQEATAFKRW

SEQ ID NO: 9247 - protein, 409 aa, Streptomyces sp.
VIDVQLRYRFRLYPNGPQRGALTRAFGCARVVYNDALRARETARSAGLPFPKTGDLSKLLITEAKKTDERAWLGEVSAVVLQQSLRDLDTAYRNFFDGLKGRRPRMGAPRFKSKRDNRQAVRFTANARWRITAGGDLSLPKIGDVRVKWSRALPSTPSTVTVVKDAAGRYFASFVVETDPDEALPETDAVVGIDLGLTHFAVLSDGTKIDSPRFLRRAEKKLKREQRRLSRKAKGSSNRTKARLKVARAHARVADARRDFHHQLSTRIIRENQAIAVENLAVRGLARTRLARSVHDAGWSAFVTMLEYKAARYGRAFHRIGRFEPTSQVCSACGVKDGPKPLCVRVWTCGACGAVLDRDINAAVNVAKAAGLAVSACGARVRPGHVPAQRGEAGTHRDGHPTVAGIPLL

SEQ ID NO: 9248 - protein, 426 aa, unknown
  TnpB Polypeptide
MAKRVVTRTYTASIRNQSQVQDDLDSLGFSASKLWNVGRWTISRIWDEIDYIPEHDELTAYLKSHERYDDLHSQSSQRVLQELAEAFNGWYGKRRNGDMNANPPGYRKHGDEHPRSTITFKQKGFKLDTEYNRVRLSKGSNLKEYWSDFILCEYQTRPDVDLSTVENVQQVRAVWTGVKWELHFVCKVEIEVSEESDDKTVGVDLGINNFATLAYEDGHSELYPLNCLKQDDYYFSKRISQCDDSTSEQATRLSQKKSARRTHYFHTLSKHIVQRCVDEGVGTIVVGDLSGIRKDEENDEAKNWGKHGNLSLHSWAFDRFTDLLEYKAEMEGITVEQVSERETSKSCSCCGRERDANRVERGLYVCDECDLVANADVNGAENIRQKVSPSLVTDGDDRSNGWLAQPSTFLFDKETGAFAPQEQVTS

SEQ ID NO: 9249 - protein, 476 aa, unknown
  TnpB Polypeptide
MNMIIFAVEFHHFGFEGEAHLSEKDAQIVEHNFCEHSAAIFGYKDQMHMHPENTMSSAPNVVVISHRPNYNSSMQRLQAFKYELRPDAAQQRRMRRFAGSCRFVFNKALALQKANYEAGGPFIGYVRMAKHLTAWRHDPQTPWLSEAPCHPLQHALRDLEKAYQNFFARRTDFPRFKRKGVGDRLRYPDPKQIKLDQANSRVFLPKPGWLSYRNSRQVLGEVRNLTVLGQAGRWFVSIQTQRQVVDPVHSSQTAIGIDLGVTRFATLSDGSFIAPLNSFKKHRQRLANAQRAMARKRKFSNNWRKEKTKVQRIYVRIGNARRDFLHKTSTTISQNHAIVCLEDLRVLDMSRSAAGSADTPGRNVRAKSGLNRGILDQGWGEFRRQLEYNQAWRGGQVLAVPPRNTSRSCPICTHVSAHNRLNQTRFSCVNCGFEQNADVVGALNVLAAEHAVLACGGTVRMGRPVKQEPAEVSQAA

SEQ ID NO: 9250 - protein, 455 aa, unknown
  TnpB Polypeptide
VRVTRTLQADVPDSLAAICKAMGFVRADIWRRFGALGTTGKNANAIRKQISAAALYDGLHVDGTIRAETTKDIVNDVLLYKAAAMVKVRQSVAARTKDAAERKRLFTALKSDQWLSDNFLHRQVRKHFRHGKSSVANQFVVRSDKHTSAVVNGKLVVTLKVAQKYGGHIALVTTSNGKNVDLTGSNLRIVVKDGFTEIHYATDKADGRVCGDQVVGIDKGYTEAFTDSDGVAHGLVFGAVLTQYSDAASATGKGRNKLHALAKKHRGTGRVAKADRIQQCNLGRLKIDARKERAQKHLRTIAFQAAHAVVDKAAVVVSEDLTSPIASKVQWKKFNRKMSAWAKGVLAESLDSVCTQRKASHVLVCGAYTSQMDSTNGLLQGKRVGDKFYRANGDVLQADHNAALNVLARLDDPDIGRFTPYREVRRILVSRSPAQLSVNRLELGAQARQPSADKS

SEQ ID NO: 9251 - protein, 390 aa, Bacillus sp.
MLVKKAYKFRLYPNQKQIELINKTIGCSRFVYNFFVGKQKDKDAYWYIVNEMVQNGQLTENNWKGEFFNKNQSIKAVRELKKHYPFLKEVDSIALQKSVEIVNDSYTRYYKKQNGEPRFKSKKNPVQSYTTKCVNGNISVLDKHVKLPKLGLVRFAKSREVEGRIMNATIRRNPSGKYFISILVETEIEHFKKTGSAVGIDVGLKDFATLSDGTVYANPTFFRTLEEKLAKEQRILSRRQIGSSNWNKQKVKVARLHETIANARKDMLDKISTAIVKNHDIIGIEDLSITNMLKNHNLAKAISEVSWSQFRTMLEYKANWYGKQVVTVAKNFPSSQLCSTCGHKNKDVKNLALREWECPTCKTHHQRDINASLNLRNEALRLTAGTAGIA

SEQ ID NO: 9252 - protein, 385 aa, unknown
  TnpB Polypeptide
MLQAVKTYQYKLRNLSASHTQRLNSWIGACRFVYNLALETKQHAYKAYEVNLSRFDLDKQLVALKEVDWIKDIPSQSTQDVLQRLDKAYQSFFKGGGFPKWAKKGKYNSITFKSIHRNKCGAGRFVLPKLGEVKTFYSREIPKEAKLKRATIIKKLDGFYISIMFSVPVQASQSNPNSDNQAVGIDWGVAHFATTSDGEHIANPKVLEQFQRQLRIEQRSLARKKKGGNNFKKQARRLSKLQAKIARIRNDFQHKVSSDLLKRYSFVGVENLKVRNMSRSAKGNAENPGKNVKAKSGLNRVILDAAPSMFLDKLEYKAAWQGKTFVKVNPKHSSQTCSSCGHIDKNNRKSQAIFVCTSCGHQDNADVNAAKNILARALGKNPLCA

SEQ ID NO: 9253 - protein, 262 aa, unknown
  TnpB Polypeptide
LGRRARVGPVRGDRGFVGIDRGLSTYLVAARADGTEVGRVVPPRPLVRSLPKLSKACKAASRRQPHSQNRRRANARIALIHAKIVDQRRDFLHRTSSALVKTHDRLCLEDLAVKNLMGNSRLARHIGDAAWGGFHQMVVYKSTWYGTELVSAPRSFPSTKTCSGCGWRWAEMKLADRVFLCQRCGLVVDRDLNAAVNLALWANAEHASASRAPDPEALGRVVNACGGTGAGHHLGGGETSPATVRQKRTKKQEPARSGPRSR

SEQ ID NO: 9254 - protein, 424 aa, Chloroflexi sp.
VSGSYQKGGVSAPGLSHGGETPPVHRRHRLTDAVSRPIMRTMRTFEYRLYPNREQQHLLMQGLIESRHLYNEMLETVKVQYADKGTFPTKYDLTKLFKGRGGEHVPATTVQMLADRLSKALKRFLARKELGEKVGFPRFKTPNRWHSLQLRQYGKDAYLHEDRKHLIVPAKVGRSLKIKLHRPLEGTPRTIHLVLRADGHWYALIVCETTSQTEHLPGNCSHPDIGIDVGLKSFLTDSEGTTVANPRFFRTSQQTLRRKQRALSRRKKGSHRRRKAARNTAKTHLKIARQRRDFHFKTAKQYTESYQHLAVEDLALPNMVKNHHLAKSILDASWGAFLAILEEKAERAGHQVIRVNPRFTSQQCSTCGEIVQKSLSVRTHMCPFCGYVADRDVNAAKNILFRARAWPSGMAPAGEPVELRSPRL

SEQ ID NO: 9255 - protein, 374 aa, Aeromonas sp.
MTKRAYKYRFYPTPEQATLLAQTFGCTRFVYNHILRWRTDVFYQEQEKIGYTQASAKLTALKKEPEFAWLNDVSSVPLQQALRHQQSAFKNFFEGRAKYPTFKSKHHKQSATLTDAAFKYRDGQLFMAKSKAPLAIRWSRPLPCEPSTVTLSKDAAGRYFVSCLCDFEPERLPVTAKMIGIDLGIKDLFVTSNGHKAGNPRHAAKYAARLALAQRRLSKKKLGSANRAKAKAKVARIHAKIADCRLDTLHKLSRTLINENQVVCVESLAVKNMIRNPSLSKAIADAGWGELVRQLEYKGEWAGRSVVAIGQFFPSSKRCSGCGFTLSQLPLSVRDWECPECGAHHDRDVNAAINIKAAGLAVLAHGATVNPKVA

SEQ ID NO: 9256 - protein, 301 aa, Desulfotomaculum sp.
MYNPREHRNYKFRIYPTKTQAETLTNWLTLCRLCYNAALVDRKNHYLRNKASLTRTKQQTTLKLDKDKHPQLKEVHSQVLQEVLFRVEKAYQAFFRRVKAGENPGYPRYKGMGQYNSLTYTQFGDGRGAYFKEEKLALSKIGLLKIKLHREIPGKVKTCIIKRETTGKWYAVLSVEGYPVLYSPNWKKTGLDVGIEKLATLSDGEQIPNPKPIQKSEKKVKRAQRDLCRKKKGSKNREKARQRLAQIHERIRHQRQDYLHKIANYLVWKRYNNKGKRIETRDLGYQRGFPVTCKEMNKFMF

SEQ ID NO: 9257 - protein, 403 aa, Synechococcales sp.
MLTRRITFRMYPSKAQEAKLFDWRRLHCYLYNSAVADRRDSYKKRCVSVNYLDQQNRLPAFKETWGEYKELGSQALQNTLKRVDLAYQGFFKRLRGYPKFKSIRHYSGWTYPAKAGWKAETDGKNGHLNISNLGRVQITGQARTWGTPTTCTIVCRNGKWYASITVDCEPQRGTGEGAIGLDFGCNHAVATSDGTLIENPRFLGKSLAKVRSQSKQLRRKKKRSRRWKKVSKKVSKLQRKIANQRQDWTHKVAAEIVRSNSLVATEKLSLNNMTRKATTKGKQQKAGLDRSILDVGIGALISAIKYKLTEVNGVFVEVPTQQVKPSQTCPQCGNQVKKTLAERVHSCIKCGYVADRDVAAAKVMLNWATGLGTNLDRCGLDSSTNRATGRQLAKTKRQKLLAL

SEQ ID NO: 9258 - protein, 392 aa, Synechococcales sp.
MIVLEFKAYGKAPQFSAIDEAIRTVQFIRNKCIRYWMDNKEVGQATLQRLCAVLAREFPFAKELNSMARQASAERAWSAITRFYENCRNQVLGKKGYPQFQKDNRSVEYKTTGWALSEDRKSIKFTDHKGIGTLKLKGTRDLHFYPLDQIKRVRLVRRADGYYVQFCIKANRDEEVEPSGKAIGLDVGLNDFYTDSNAQTVDNPRFLCKGEARIKQAQRRVSKCVKGSKNRGKARQVLAKRHLKISRQREDHAVKLARSVIRSNDLVAYEDLRIKNMVKNHCLAKSINDASWFQFRVWLEYFGKVFKKVTVAVPPQGTSQECSSCGTVVKKSLSTRTHVCRCGCSLGRDHNAARNILSRGLSTTGHVGTFGLDPSNAWGETSSTEVEAAKSG

SEQ ID NO: 9259 - protein, 472 aa, Nocardiopsis sp.
VLRSSGRRWIGSAPAPEPVRPGVSWSWHAGAQHTGVACRSWPARFRVQHHTRPGPFLPPPDPGFFLVFLRVRRPFSCGCSRAASVRLPPLPGRAPARRAGPPVRVCAGGPQRRAGTDQAGQGRQQAARLCEAPDRRGPRVPKSAELSQALITGAKKTTERAWLGEVSAVPLQQVLRDLDRAWKAHEDSKTGTRKGAKVGAPRFKPRRDPVQSARFTNNARWKITNAGKPALPGVGHVKAAWSRSLPSPPSSVTVVKDAAGRYFASFVVETDDEPLPDTTPEVGIDLGLSHFAVLSNGTEAASPRFLRRAGKKLRKAQRALSRTQKGSHNKEKARLKVARAHVRVADARKNFHHQLSTRITRENQTVHVEDLSVKALGRTKLAQSVHDAGWSQSVSMLECKAARYGRTFTKVDRFLPSSQTCSECGAVDGPQPLHVRTWTCPVCQTIHDRDLNAARIVPAAGGPTGKTPAEGP

SEQ ID NO: 9260 - protein, 653 aa, unknown
  TnpB Polypeptide
MESDVNPPTDFFKGIKISLQSVLKHPDINLPKITNAVIKCNKIVIQVLMFMKLYLLDHYDKHNTLPIINDELINSCMKILCNEKATGRPPKTEIKELKDKLAAFYNTDFQPLIQNENLDYTHMNTILDYLTIDILTMYENNIKFHYVEYVERYVNVVWKKKFIISKIMKLNITKKEKDTKINNLCNQLRKIKNDLLNVETTQYKSHISYHTWINLQRQRIIPVKTFKKNLYYDLMCSPMDYFPCMIKMMKQVEKEEQTISNVFPMRSEIIPKHIRLDTTTLVHLLMTKKQGIKCEYLTKGNLKRNEDKIWEFFFRIERNMFHKKYYDFHHMIETDGISCTLLLLRKDLIGKRLPMMKKGLSTETYIDELTDYTQLQNKKIVAIDPGKCDLIYCVDADNKEANKFRYSQDQRRKETKKKKYSKIQLELKKEKIQGKTIIEWETELSKFNRKSLNITKFKEYIQKKSEINGLLFGFYETCIFRKLRLQSYRNTKKSEQKMLNNFKRIFGDEKDVVVCFGDYEQKQHMKYKEATKGKGMRTLFRKAGFQTYLVDEFRTSCKCSKCEGGSCVKTMVRKNPRPYRTGNVIVHGLICCKNGCGYWNRDVNGATNIYKIAYNAINNKGRPNYLSRSKNSSTGLDEPVKPKFTRLEIGKPC

SEQ ID NO: 9261 - protein, 443 aa, Meiothermus sp.
VDTLVLRFHGGYGEQQDYRTVHCRPENEGLMTHRKVFRFRMEPTQEQGEALLRMAGARRWAWNWGLARRKEVYERTKKTLPIAQLSSELTALKKRPETAWLKDVDSQLLQQALKDLDRGYQAFFGKRARFPRFKSKKRDEPRFRIPQRVKVEDSKVYVPKIGWVKIRQSQPIDCTLKGATFKRDTDGHWYVALTAEFEMPDVPLPPANPEKVVGIDLGLKDFATLSDGTRSEAAPAARQCRYSIAQPKFYRKAERKLKRAAKALFRKQKGSRNREKARKRLNQVHTQIKNQRQDFLHKLTTELVQKYDGLCIEDLSLKGMARTKLSKSVLDAALGEFRRQLEYKAVWHRKHLWWLTATSPSSRLCSVCGAIHQALTLADRVWRCDCGAVHDRDLNAAHNIRAEGIRSIPVAVGHTETQNACGELVRPHQQSWHDSVKQESHGL

SEQ ID NO: 9262 - protein, 424 aa, Halobacteriales sp.
MDDDVPRRSVPIKLDVPEQRRGDLHQTKDQFLHCANRTSEWAWRYDDYCITSKSKAEDALYEDLREDTDLTANLVQKGIRRAIEAVDSGVEKLKQGENTSQPHFDSWSVVYDKRSATFNDDHATVSTPNGRVTAEYVFPPEDEREDTPFGRYYESDEWDASSATLQYDEQEDTFYLHVTLKNPDYTVDGTERQEAELPDDHDKNGVVLGVDLNVTGAFAVTSTGAFIGSADYLTHKRDEYEQRRGSLQQTGTRSAHLAIESIGSKFSDWSLDWLHNRANDLVEEAQIADVDGIIFEDLDHIRENIANGSKFQQWAYKKFVELVEYRVESTVLFVDFVNPAYTSQRCSQCGFTHEDNREDKQFVCQDCGYEINADYNGAKNIANRYCGYIHRGQKSRGGWASSQLALKSGTLNVNGEYTPAELLG

SEQ ID NO: 9263 - protein, 279 aa, Streptomyces sp.
MDDQAHAARALWNVLHDWWTMLPKDKRSLAAADTAIRQARGEIDWLAFLPAQAAQAVLKMYFQAWKNCWDGRAAAPNFKARIRTVMSVDIPQGRDLNITRVHRRWGMANIPKIGRVRFRWTKDLPAGKRADKENRITGARLVKDALGWHIAFRVQTLEAEPRPHQGAEVAIDAGVNLPLALSDGDHQHGRLSRLPDGTADRDKWLNPREKAKLLGLEQRAAQRKQHRRRGEKASHRLRHTYDQIKQLRAKATRRAVDWQHKTTTNIAKRYGTVVVEQLN

SEQ ID NO: 9264 - protein, 385 aa, Streptomyces sp.
LARCCGITVPSTTGRCRNAAMPGGTSRRPPSGTGCSPRSSRRSGRSTRSVRAAGRSVRSRPPYAVSTGRSPFFRRVKSGETPGYPRFRGVSWFDTVDFPKDGDGCRWNSTPHDPVTRVRFQGVGHVRVNQHRPVAGHIKTVSVKREGRKWSVVLTAEQDQPEPLPATSSVVGIDLGIANFLADSNGDFVPSPRHGRMAAEKLEAAQQARSRFPRRRAKDRTANHQRAVEKVAQLHGKVRRQRLDHAHKTALGLVRAHDVIAHEDLKIRNMSRAPAPKPDPDQAGLFLPNGAAAKAGLNRSIADAGWGVFLTILYAKAESAGREVIAVDPRNTSRSCPECGHIAKENRPAQEKFHCVSCGHTAHADTVGAINVLRAGLVRRDANPA

SEQ ID NO: 9265 - protein, 384 aa, Streptomyces sp.
VRARRVQRLRARPRGPRKAGDVFPKAGELSKKLITQAKQTVERSWLGEVSSVVLQQSLRDAETACKNFFASLKGTRKGPGLGPPRFKSRKDNRQAIRFTANARWKITDSGRLDLPKIGAVKVKWSRTLPAAPTSVTVIKDAAGRFFASFVIDTGPAADAAAMPDTGQVIGVDLGLAHFAVLSTGEKIGSPRFLRRAEKKLKKAQRGLSRRQKGSRNREKARLKVARAHAKVTDARHEFHHQLSTRLISENQGIAVEDLSVTGLARTRPAKSVHDAGWSQFVAMLEYKAARYGRTLVKIGRFEPTSQSCSTCGVVDGPKALSVREWTCAACGTTHDRDHNASLNIKTAAGLAASACGAPVRPEPVLAQREEAGSHGFPTTGNRAA

SEQ ID NO: 9266 - protein, 422 aa, Streptomyces sp.
MLLHCAHARYVWNLAVEQHAHWRPGRRSAPGLAEQCRQLTEARRENAWLGTGNVDVQQQALRDFAAAKNARFTSAFGEPTWRRKHVHEGFRGVGTDRVPEFEPDGSPKLNARGKQVMGRSVVVQRLNRRWARVKVPGCGWVRFRLTRAELPAAKTFRVTFRNGQWHVAFAAIPEPVAAPTTSEVIGIDRGVTITAALSDGRKLNCPQLTVKERAQIRKYQRRAARAPKGSDVKTAEYAKAARLKAREADRRKDWCEKTSTMLAGSYGLVRFEKLNIKNMTRSARGTVEQPGSNVRQKAGLNRAVLAQGWGLLRRRTEQKAPGRVEDVPAAFTSLRCSACGWIEKKSRKSQADFVCVSCGFTCNADENASMNVAAGQGGIPRPRRTAGAGGVTAAISRSSAREPQPAWVGIPLFQEGEDVKSP

SEQ ID NO: 9267 - protein, 600 aa, Streptomyces sp.
MHDRWWWIRSMQPREGCPVVRKQGRKRELRELAASFTVAAPSGARIRDRLKDLTAADVKVLTLVGEHLGRHQRGDLAARVRMGNVPAKQTWRAARKKRLTALSSSRWAGAMTRASEDQYQLSMRCLRDERAGLRRRIRKIEQRLAVACGQRQGRVRGYADRAERWQKQRHLSKLQARLAVVEQRIEQGRPSITVGGRRLTRTRHHPAEAGLTEVGWRKRWDAARLFLTADGESGAPHGNYTITVDPADGSVALVLPEPLRYLANAPRGRYRLSCTLTFHHRRPEWLDRVSANRAVRYDIVHDPARDRWYLYASWSIPTTNPPTPEEIRALGAKLLAVDLNADHLAAIVLDEHGNPVGEPNTVPLELTGPATTRDGRLRAAITRLIALAREHGCAAIVVENLGFADARTTGRETMGRGRRGKTFRRTVAGIPTARFRERLCSMAHHQGLAVIAVDPAYTSIWGEKYWKNPLQRQTKTAVTRHHGASVTIGRRGLGHRIRRRPGVTAPDQRIGRRRATGQTASIPRLRGTTGPPRTAGTPHRGGKTRPCRGDQLVLFPDLEDRSRGHRAPTGLVCEELASTGQLHRNGISSTPDCWRPRRDS

SEQ ID NO: 9268 - protein, 353 aa, Streptomyces sp.
VCSARGGSPSLDRNGLQKLLYGDVKATFGLSAQPTVRVIKKVVDAYSTLATQARAGLLGNTTSRRYRKAMGSPVAFRPEAAQPFDDRCLSWQTDTRTVSIWTVDGRMRGVRYTGAADQLKLLAEYRKGESDLVQRGGKWFLFATCEVPEPEASEPVDFIGVDRGIVNLAPTSDGMNYQGRGLARYRSWCARKRAELQKRQTRSATRRLSRRAKKEHRHATHVNHKISKEIVSNAQRTGRGIAVEELGGIGERVRLRRNQRGTLSSWPFHQLGQHLAYKARQAGVAFLEVDAAYTSQRCPGCGHTAKANRPTRDRFCCRRCGLAGPADVVAGVNVRDRTRSAWVFVTMPVPAPA

SEQ ID NO: 9269 - protein, 554 aa, Streptomyces sp.
MADLRPIAAPFVALGPSGAAIRARLKDLMPEDEKVLRLVGAHLGSLASKDLKARCADGLEHSTESWAARKRDLTAESSSRWAGSITKATHDQWALARRGQAAHVQSLEAGITTIRHRLSLPVGEKGTKQAPGGYRSAHEWFHKTRRLHVLEDRLDQVRADWEAGRVRVVRGGKRLLSTRHNLDKAQLTETEWRERWEAERWFLQADGESGKRFGNETIRITPEGAVSIKLPAPLADLANAKHGRYVLAAPVRFPHRGQERADRVEADRAVAYRILPHSRLRSSGGTPIDTGRRRWYVDASWQIPPTRTIPLKAALADGVIGVDTNADHLAAWRLDTHGNPIGQPRRFFYDLSGNAQHRDAQVRHALTRLLNWAKSCSVKAIAVEDLDFQAEKTREKHGRKRRFRQLISGMPTGRLRARLASMADATGIAVIAVDPAYTSKWGAQHWQKPMASPTRRTTRHDAASIAIGRRAQGHPIRRRTTPPRAHQSDVHGHRTVQADRRAPGREGPRPRIPGPRTRSVPPDAASTRATRTSKTVRGVRSDQVWVQDSLLLTD

SEQ ID NO: 9270 - protein, 438 aa, unknown
  TnpB Polypeptide
MYRVSRILVSRRKQPQLYTYLAEYSQLAKNLHNAALFRMRQNFTAYGKTDLTDNEAAVMAEIRLLQEHYGSDIRQVLSYVQLERLMRVTENPDFFSGLPMQTAQNILKQTVQDFKSWLSALKAYRKDPGGFTGKPNMPGYRKGDYDTFTVTNQDAVLYAGENGTVLKLPKTNIRIPVSHLSPELKLREIKVRPFYDSFEVLITLETDDIPEVSGQALCAVDLGVNNTAAIVTNTGRSVIYKGGAVKAANQWFNKERARLVSEVTMGGKPYRPTRKLDSLSRRRTLFMRDYMHKISHNIIQFCIENKVGSVIIGENKGWKQNSNIGHRNNQAFVSVPFDMLKNQLIYKAEAAGICVIMQDETYTSQADFLAGDNCSEQTFSGRRIRRGLYRSATGRTVNADLNAAANIMCKAIPEAFDGVTDFSFLQKTKCIRFKDLYH

SEQ ID NO: 9271 - protein, 203 aa, unknown
  TnpB Polypeptide
LYIITDFVDTKFLSTTGKSVGADFGMKDAYLTLSTGEKKQHPQPLKSNLNKLRTLNKSLSRKQKGSNGWWRCVRQIVRLYRRISNQRKDFHWQLATELCKKFDTIVIETLNLAGMKRLWGRKVSDLAFYQFVEILKYKCIKHGRKLLQVGQWTATTKPCSDCGFHNENLTLNDRQWRCPDCGSHHDRDVNAAINILRAGIPVT

SEQ ID NO: 9272 - protein, 407 aa, unknown
  TnpB Polypeptide
MIRSVKLSTKFINKDKENNYHSVFTEYLNIVKQFIDILWDKKNIPSLLPKEITNNITDTWLTQRAIQSAGKLASSIVRGTRQKQKQRLYMLRQLQKEGTQTKKIINLQRKIEKVNMSKPNINDIHPELDSRFIEINVDNPTSFDIWITLSSIGNKLKIPIPLKRTRVFNKWNELGKLKPTVRLYKNKIEVIFDIPDGQYRTDGRILGLDIGIKNTYTTSDNQVSLPDNHGHTLESIINKLSRKKKGSKGFERAQQHRKNYINWSINQLNLSKVKQINIEDIKYLRYKSKTNRALSHWTYTDIFDKLGRYCEEQNVSVLTVNPRYTSQRCSVCGWTQKKNRKGKTFCCVKCGNTCDSDLNASCNLSFVLPEISREDCSNYSNVSGFYWNKNGLSSELIVSNVQKVENI

SEQ ID NO: 9273 - protein, 401 aa, unknown
  TnpB Polypeptide
MMLIQKALKYRLRTGTDIEQRLRMIAGCCRFVWNKALALQKERFAAGEKKLGYAGLCKELTTWKQQPETRFLCEAPIHVLQQSLKDLDHAYANFFAHRAELPVFKKRGQHDSFRNPDAFTVDANNSRVKLPKLGWLRYRNSRKVEGKPKNITVSQHGDHWYVSIQVEQTIPDPQHQSASSLGIDRGISALAAFSDGSLVQPLNSFARAKRKLSRLQRRLSRKVKFSENWKKQKQRITRLHAKIANMRKDYLHKLTTKISKNHAVVVIEDLQVKNMSASAKGTSESPGRYVKQKAGLNRSILDQGWTELARQLEYKLNWRGGNLIKVSPQYTSQTCNECGYVARENRDGIAFRCRSCGNEAHADINAAKNILAAGLAVIACGGYPVAGSMKQEPTGGDYAFA

SEQ ID NO: 9274 - protein, 153 aa, Clostridioides sp.
  misc_feature (142)..(142): Xaa can be any naturally occurring amino acid
VEKAYKFRMYPNKKQQELIDKTFGCCRFVYNKYLAKRIDVYKNDKETFTYKQCSSDLTNLKKELKWLKEPDKFSLQNALKDLENAYEKFFKEKAGFPKFKSKKTNRFSYKTNFTNGNIMYCGQHIKLPKLGMVKIRDKQVPXPNRRNFNDYSS

SEQ ID NO: 9275 - protein, 434 aa, Bacterium sp.
MPKPKSFMGVQQVLLHPDKQTEAILRYLCEQSGKLYNNGVYYSRQLFFKTGKMMTGKFDLNFEPTVAKTAVAQSLPSNPAQQTLMSVTEAWKSFKELRAMHKRGELHFKPKAPGYLKGSKLFKVAYPNSGGQKPKLIDGQLVFSLGLTVKRWFGIANFSLPMPSNIDISVVKEFTILPKNGSFYLELSYEKQKRDHDLDINQALSIDLGTADNLAACVDTLGNSLLIDANAMKAMNQLWNKKVATRQEGKPEAYWDGWLDRVTRKRNHQMRDGVNKAAKLIIDHCLKHGIGTLVIGWNEGFKSNANMGRLNNQKFVQMPLGKLKERLKQLCEINGIRFQETEEAYTSKASFLDGDSLPKFGEKPDGWKASGKRVKRGLYQSKDGSVINADLNGAANILRKVSSNLGLDLSRLGRRCLTTVARIKLWETPAAELL

SEQ ID NO: 9276 - protein, 370 aa, Tenuibacillus sp.
MEFTLTAKVKINPTTEQAKLLQDTVHAYRKGCNFVSNIIFESKLLSPAKLHKRTYRELRSIFGLRSQMAQSVMKTVISKYKTNQSNGHQWSLVGFKKPQYDLVWNRDYSLAKGLLSVNTLQGRIKVPFNIEAMEQYFDGTWTFGTSKLVHKHGKWFLHIPITKDVPEIDEHDVNQVVGIDFGLNFVATTYDSKDETTFFKGCHIKHKRARYKHLRQQLQQKQTPSARRRLKAIGQRENRWMQDVNHCISKALVDQYGKHTLFVVEDLTGVRQVTEKVRLKDRYQTVSWSFYDLRQKLEYKAIIKQAKVMAVDPKYTSQTCPKCGHTDKVNRNKMKHVFCCVACHYTSNDDRIGAMNLQRKGIEYLAEVTS

SEQ ID NO: 9277 - protein, 403 aa, Okeania sp.
MRLAYQYKLRPTKEQSDKIDKILEMLRWQYNYMLAQRFNWWEQNRCSINACPLICHLPELKNRPTYYNQKQSLVQLKIDRPWYKEIHSQVLQEVPKRVELAFDRWIKGDSKGKRLGKPRFKGKNQYKTFTYAQFKQYHFVNNKVNLSKIGDVKVIVHRPIPDGFTIKTVSITQKASGYFVTLSVEDKSVPTIKPDIKRGNIVGIDVGLIDFFVTSDDESVPAPKYLRKAEYKLKSAQRKVSRRKKGSKGRLKAIKQLAKKHNKVADTRKDFHHKTANQLLSKYDIIAVEKLNIKGMIKSRLAKSVHDAGWGNFKTILTSKAERAGQLVAEVKPHGTSTECSRCGHKVKKLLGQRQHNCSKCNLSIGRDLNAAINIKNRAEVLVKDLILAAEFEEDRGAQLSLF

SEQ ID NO: 9278 - protein, 312 aa, Okeania sp.
LYGCQQHLINESPEVIAFLEYICSEANKLTNCGIYYCRQMLFKAGIFLTRGELDKELKSNIHFKAMRSACAQQILHGVIESFNSYKELLKLYKQEKLHFRPKPPSYRKKGGMAVVSYPARWVKLIDGDLKFTLGNQVKAWFGIDHFLLPMPSNLEFNSIKEYRILPRNGFFYIEFVYQQKEAKKVEAKGNVLGIDPGLNNWITGVSNTGKSFIIDGKKVKSQNQWYNKKIAKIKTGKPQGYWDEELAELTEKRNRQMRDNINKAARFMINWCLANDVSNIVFGWNQFNKDGINIGKKNNQELVKLTSLLLES

SEQ ID NO: 9279 - protein, 384 aa, Okeania sp.
LYGCQQHLINESPEVIAFLEYICSEANKLTNCGIYYCRQMLFKAGIFLTRGELDKELKSNIHFKAMRSACAQQILHGVIESFNSYKELLKLYKQEKLHFRPKPPSYRKKGGMAVVSYPARWVKLIDGDLKFTLGNQVKAWFGIDHFLLPMPSNLEFNSIKEYRILPRNGFFYIEFVYQQKEAKKVEAKGNVLGIDPGLNNWITGVSNTGKSFIIDGKKVKSQNQWYNKKIAKIKTGKPQGYWDEELAELTEKRNRQMRDNINKAARFMINWCLANDVSNIVFGWNQFNKDGINIGKKNNQELVKLTSLLLESSKTCSESVNLPLPSFNQTLLGCLLSLVTKASMSPSPSTSPKLTAELKSFSKSSCSDSVKLPLPSFNKTWFIR

SEQ ID NO: 9280 - protein, 488 aa, Caldivirga sp.
VLGLVPPGGGSISLDEPVGRSPTLTTNPGTPSSSKLKGSGKLRNENIRTVRLRLLPNGAQERKLRRIADATAKLWNGLNYARLMQFRASGRVDFKGTGHEFYHRYNVVLGVNAGVVIQLNNQAWMSYFELNRLYKQGKLPKFMGKPSPPGFWRDKVLGKRKLVILVRNDRYYIEPINGGEGYLVLKDWGLKIKYAGRIKWSGKQGTLVIKHEDNRWFAYVPIEVGAKPAKSNPKGYVKGIYEKIQIEKPKGSNKAFIDIGLNNLFAVVFNHTDTAILIKGSSIKAEYYWWKRETKTYQSIRDWLRNHSFESWRKYHMFYLHAEYKRHERLRHYYRTAVRFLAKTLWRMGIDEVFIGYPYLVSQDDGNEYNTNVWWFAKIIKWLGEVLQEYGIRLNVVNEYGTSRQCSICNANHENGRVKRGLYVCPVMGIEINADLNAARNIAKKAGYETPIPRKILSYIVTTNGVKPLTPKEGVTIETPKINPTSPR

SEQ ID NO: 9281 - protein, 239 aa, unknown
  TnpB Polypeptide
MSKLKLHRPVKPGGTLKSVTITQEPDGKRYYSILMEYPKPQAATQPVIQNGIGLDYSMPNLYVDSNGASPVFPKPYRTMEPKLSRERKKLSRKRPGSKRYEKQRMKVTKLYAKSKHQRKDVLHKLSCTLTDTYDLIAIEDLDMSAMKQALRFGKAVSDNGWGMFVSMLTYKAERKGKLLVKVDRWFPSSKTCIACGHIHKELKLSDRTYLCPVCGHAMDRDKQAARNILNEAKRMTGAA

SEQ ID NO: 9282 - protein, 365 aa, unknown
  TnpB Polypeptide
MSFICCGQRNWVEIGYLKPDPHISNQILKKYGNQKTIKRVRNVNLVVPGQSIKVDRDARTIRVVPLKLTLNYQFPEFEKINQIEIDAEYAYVSCTVMEEPEMMPRQFIGVDRNTTGHVAVVANPDTGKIEKPGKKALHTHRKYSAIRKRLQKQGKFRKLKVIKDRESRIVKVLNHKISRKVVDMAKDQDAALVFEDLDGIRKTRKQQRSFKYALHSWSFYQLQQFVEYKARLLGVPVLYIDPAYTSQDCSQCDGRGQRRGKEFKCPVCGHVDHADVNAAFNIALRQKGMVDRVQKEMYTMGALIPHDAMLEECLSNVRTLRALAVGVCQVGAALVMNIRTPPTAPIPAPHLLQSLLMIRLLHRDL

SEQ ID NO: 9283 - protein, 231 aa, unknown
  TnpB Polypeptide
MENSTIKTVTISRTPSGKFYISILVEYENQILPIIPKKFLGLDFAIHGLYVASDEEDADYPKFLRKAEKKLAKAQRKLSKCKKDSKNREKQRKRVAVLHEHIANQRRDFLHKKAKFLADRYDAIGIENISVKAMAKRKKGKHFSFGKSVSDNGWNKFVNILKYKLAWQGKQLIKVDKWYPSSQICHNCGFQNEETKDLSVREWECPKCGSIHNWDKNVAINIREEVRRMIA

SEQ ID NO: 9284 - protein, 461 aa, unknown
  TnpB Polypeptide
MKNEINQITLKIKYSTNNDSKNRILEYIKNYNSVLRFTYNRLHENENLKTKEITVLQKKMNNVFVDSHFKNSAIFDSKSLLKNDKVIFGGKKIFIQRCQNKITKEEFQLKKLRPLYSVGESPQKGNRKFSIITENHIIFKPNKNEHFLLEINPSRNYQNYLIQLLQLAEEKKVSIDFKLDLNYIYVSFDLNKLKNERKITSKIKDRYFAIDMNPNYVGYTIIDWIDGQNYNIVDKGCFSLKDLNDYDNSLNGKGFSNESKERKYITNKRNYEIADIAHKLERITNHYQCENFVMEDLSIPSKDNGKGKRFNRLCNQQWCRNKFCNIIKKLCKLDKIKILEVIPNYSSFIGNLVYRDEKLFDPVLSSIEISRRGYEFNHQYILKDKDKKKNIVQGNFDEDKVKYTQSLEELGINETFSSFKELYDKVKKAIKEEYRFPLEKCSVTVFSKNSIRNYQTLYKFA

SEQ ID NO: 9285 - protein, 400 aa, unknown
  TnpB Polypeptide
VLKSLKVRLYPSQEQEILMYKTAGCCRFVYNHFLALAKENKDFNYNEYSKKLTALKQDENYSFLKEVPSHPLQQSLLHLKSAFIRFFNKQSQYPVFKKKFVNDKFTYPEGVKLNHSFTKIFLPKIRYMKFKCSKKYLKLLKTHEFRSSTVMVEAGKWYVSILVEDNTVPQTPVSINKTVGIDLGIKKYAVLSSGHYVSAPNILKKLKEIDRLKSYLSKKTKGSNASKKLQTKIQIKQKRLNDLKTDFLNKLVDWAIKNHDCIILEDLNIRKMIKNEGDWKKTFNRLMTMIPMYEFRKKLEYKAKLAGKYCVAVNPANTSRTCSECGNLDKKSRKSQSEFECTSCGFSANADLNAAINIHNVGLKALIAAGHAVKSAQTSPEGLVKANLSAVSPSSFGFSA

SEQ ID NO: 9286 - protein, 403 aa, unknown
  TnpB Polypeptide
MSTLNLAHTIRLYPTRGQETFFKKACGCARVAYNYGLAEYQKQREEGKKPKINEIKKKFNQEKKTLFPWMSETNKDANQQPFTNLQSAFGRFFKHQNKYPVFKKKGVKDSFYISNDKFKANEEKFWIPKLGWIKGAEYLRFPGKIMSAVIRRKANYWFVVISVETNKAFTTCENQAVVGVDLGIKTLATLSDGKIIESVNPLRRRLNKLKLLQRWASRKIKGSSNRRKANQKVAKVHYEIACLRKDILDKLTTYLCENYRVICIENLNVSGMIKNHKLALSISDLGFGEFRRQLEYKSVLHGNTLIIADRWFPSSKTCSGCGHIKETLLLSERKFICENCGQVIDRDLNAAINLRNYGLKQIGMVSPELTPMDSEALVYSSSIGINETTDDEVGISECSVMST

SEQ ID NO: 9287 - protein, 403 aa, unknown
  TnpB Polypeptide
MSTLNLAHTIRLYPTRGQETFFKKACGCARVAYNYGISEYQRLRKEGQKPKILEIKKKFNQEKKTLFPWMSETNKDANQQPFTNLQSAFGRFFKHQNKYPVFKKKGVKDSFYISNDKFKANEEKFWVPKLGWIKGAESLRFTGKIMSAVIKRKANYWFVVISIETEINSSICENQTVVGVDLGIKALATLSDGKVIKSVSPLRRRLNRLKLLQKWSSRKVKGSFNRRRANQRVAKVHYEVACLRKDILDNLTTYLCKNYKVICVEDLNVSGMLKNHCLALSISDLGFGEFRRQLEYKTILYGSTLIIADRWFPSSKTCSGCGHIKETLLLSEREFICENCGQVIDRDLNAAINLRNYGLNKIGAVSPELTPMDLEALVYSSSIGINETTEKEVGISECSVMST

SEQ ID NO: 9288 - protein, 321 aa, Escherichia sp.
  misc_feature (194)..(256): Xaa can be any naturally occurring amino acid
MASWLVEWKNATETQWLKDSPSQPLQQSLKDLERAYKNFFQNRAAFPRFKKRGQNDAFRYPQGVKLDQENSRIFLPKLGWMRYRNSRQVTGVVKNVTVSQSCGKWYISIQTENEVSTPVHPSALMVGLDAGVAKLATLSDGTVFGPVNSFQKNQKTLARLQRQLSRKVKFSNNWQKQKRKIQRLHSRIANIRRXXXXXXXXXXXXXXXXXXXXXXXXXXXXXXXXXXXXXXXXXXXXXXXXXXXXXXXXXXXXXXXGHTAKENRLSQSKFRCQACGYTANADVNGARNILAAGHAVLACGEMVQSGRPLKQEPTEMIQATA

SEQ ID NO: 9289 - protein, 539 aa, Streptomyces sp.
MPKVAEPFVVPNPSGVAVRTRLKQLTAADVEVLRRVGAHLGALASRDLKARCRIGLGHDTEAWAVRKRALTPDSSARWASAITKATHDQWALARRCALAHLQSLEAGARTLRHRLALPVGSKGSKRAPGGYRSRREWHAKARRLRVLEDRLQRARADWTAGRVHVVRGGKRLARTRHHLPDAGLTETAWRERWEAERWFLQADGESGKRFGNETVRISPDGEVSIRLPAPLAHLANAAHCRYVLTGRVRFAHRGQEWADRVAAHRAVAYRIHHDVQRGRWYVTASWQKPATPTVPLAAALAEGVVGVDMNADHLAAWHLDTHGNPTGNPHRFFYDLTGPADHRDAQVRHALSRLLRWARTCGVKGIAVEDLDFAAEKTREKHGGRKRFRQLVSGMPTGRLRARLTSMADATGITVIAVDPAYTSKWGAQHWQKPLTTSTRKTTRHDAASIAIGRRAQGFPVRRRTAPPRTHRSDGCGHRTVQADRKALGREGPRPRIPGPWTRSVPPDTERTRATRTPNTVRGARSAQAWVQDPLLHTE

SEQ ID NO: 9290 - protein, 401 aa, unknown
  TnpB Polypeptide
VPKVRRAYRYRFSPTASQERELLQTFGCVRLVYNKALAVRAGAWHTERRRVTYGQTSALLTEWKSADDLAFLNDVSSVPLQQCLRHLQSAFTNFWGGRAKHPRFKSRKRGKASAEYTRSAFRWRDGKLWLAKMDRPLAVRWSRPLPEGTEPSTVTVSRDSAGRWHLSLLVETEVGHLAPTTAAVGIDAGITSLVALSTGEKVANPRHGQRDQVRLARAQRGLARKQKGSNNRARARLRVARVHARIADSRRDFLHKLTTRLVRENQTIVIEDLNVSGMVRNRKLARAISDASWAELRFMLEYKATWYGRQLIATDRWYPSSKICSDCGFLLDALHLGSREWTCPGCVAVHDRDVNAAINILAAGLAVAACGGDVRPSRQEPVRQSPAKQEIPPVRVGVSCH

SEQ ID NO: 9291 - protein, 439 aa, Microbispora sp.
VAAGPLPCRGRDNHLCADRSVPDRAETRRRHDFLYEVSSVPLQQALRHQHTAFVNFFAGRAKYPRFKSRHGRQCATYTRSAFRWRNGRLYLAKMDEPIAFVWSWPGVDPAALDPTTVTISRDPDGRWYASFAVETGTGPEPLPATGDHAGIDLGVTDFAVLSTGEKIPNPRHLERKARNLARYQRRMARKQRGSSNRAKAKAKVARAHTKVRNARADFLHRTSTRLVRDHDLIVIEDLNIKGMVRNWHLARVISDCGWGEFRRQLEYKTQRYGRRLVVIDRWYPSSKTCSACGRLLAELSLSTRHWTCPGCGTRHDRDINAAKNILAAGRAVSACGADVSHSGSSRVRSAVKQEAQPVRVGIPRTSGLRVPVVAVLRVDAVPGKGTDGVEEDTVPVEDMVEGGRLRRWPRDRRVRRLGERQRAGGHQSGRRGHAYTSPP

SEQ ID NO: 9292 - protein, 383 aa, Actinomadura sp.
VKLVVQVKLLPDAATEAALRETLKLCNQAAGHASRRAFATGVKDRTALQRLVYGELKAMGLSAQPAIHCIRKAAGAYATLAQNLKAGNYGPVGSWRRTQVENTPVRFRKDAAQPFDDRSLSWRIDARTVSIWTVRGRRKGIGFACSPEQAKMLAAHRRGESDLVWRGGCFYLYATCDVPQAPEYVPDGFCGVDLGIVNIATTSGGTVHSGRRINQVRHRNRRLRARLQGKGTKSAKRLLRKLSGREARFVADTNHRISKQVVTEAQRTAQGIALEDLGGIRARVRLRKPQRVALHSWSFAQLGAFIAYKAMRAGVPVVFVDPRHTSQGCSACGHIHKQNRPAQATFACTSCGFAEHADVNAARNIAARGAAGWAVSHAADDAA

SEQ ID NO: 9293 - protein, 470 aa, Micromonospora sp.
VKRYEAPAGWTVQAYKFCLDPADEQSLRRHAGAARFAFNHMLGRLSAVKAQRLAEASYGVAEADLTPWQGWSLPDLRRTWNHLKHPVAPWWRECSKEAFNTGLDALARALANWAASRSGKRKGRKMGWPRFKGRAAARSVRFTTGAIRVDADRRHVVLPRLGRIRTHESARKLARRVEAGTAKILSATVTETAGRWFCSFQVAVKRTIERPAHARRLGRVIGVDVGIKHLAVLSTGEMVDNPAPFTAALKRFGKAQRRASRRIGPYDPATHRKRTPSNRWKRAQTQAARLHATVAAVRADAWHQLTTRLAQQYDTIVMEDLHVAGLKRNRRLARALSDAAPATLRRQLRYKTGWYGSVLHVADRWYPSSKTCSRCQTVKPKLSLCERTFHCDACGLSLDRDVNAARNLAALVRHVDLELPGDVKTGRGACVRPVSPAPAGRAVGVEASRPPAANAVRQRTAADHELSNAQ

SEQ ID NO: 9294 - protein, 377 aa, unknown
  TnpB Polypeptide
MITHRSRLYPTEEQEKRLLKTLEICRQTYNYFLSKIRESNKVPSRLELQSELPKLKKEMPELNKVYSRVLQMVLYQLYSNLKALSRLKKKGKKVGKLRYKGRWFKTFVYNQSGFKIIRTGKRLDRLHLSKIGDIPIRIHREIEGKIKQVIIKRYSSGKWFALVCVEKEKEQKPKTGKVIGIDVGIRFFLTDSEGRQVENPRLYEKTLERIRIEQRRLSKKKKGSNNYEKQRKKLAKKYEKLVNQRDDFLHKLSRFYVDNYDIICVENLNIRNMVQNSNLAQKILDASWGKFVAMLSYKAERAGRRVIKANPKGTSKGLTYNNPLRDYISACRILMRGWDGPDSLLERRPLLRTISYKEVVSGHVFSMKQEAPCVSGE

SEQ ID NO: 9295 - protein, 283 aa, Thermococcus sp.
MKIGGSRIKIIVKPREEYLELDYSNEWFYERIEGWKVGELIIRENDVLLTFSREVEFSGEVKVGVDSNLMSLDIYHPEKGWIKVDLSELHRIAETYDRIIDRLKSIQRKSPKRIGRLLKKYYARRRNRIEDFLNKLAVQLSREFPNVVFIFENLNKFNMFNVNGREFNRKLSRATWGKIVQKLSYRAPVEFVNPVHTSSTCPKCGSRLESRNGLVECSNCGFKADRQFVGAFNVLMRGLGVALSGAEGDDLLPNEPRGELSLLRPKSVVRVDLSGRTFAHAPP

SEQ ID NO: 9296 - protein, 434 aa, Kitasatospora sp.
MARFRMYPTSEQASVMLKHCEHARYVWNLAVEQHSHWYRGRKAAPSFAEQCRQLTEARRDNEWLREGNQTVQQQALQDFSKAKNAKFTAGFGEPTWRRKFRHEGFRVIGTDRVPEFGPDGSAKLNPKTGKQVLGRSVIVQKLNKRWAQVKVHGCGWVRFRNTRTGLPDAKTFRVTYKNGQWHIAFAVIPDPIDQPGTGEVIGVDRGVTITAALSDGRKLNCPQLTIREQAQLRKHQRRAARAPKGSEQKTAEYARVAELKAREADRRKDWCEKTSTDLARSYDLIRFEKLHIKSMTAKAKPKPDPGQPGTFLKNGRAGKAGLNRAILAQGWGLLRQRTEQKAPGRVEDVPAPYTSLQCSACKWIDKNSRKSQAEFVCSNCGFTCNADINAATNVAVGQAVRPRHTRAGTGGVTPYQRSSAREPQHPTGVGIPRL

SEQ ID NO: 9297 - protein, 188 aa, Clostridium sp.
VIKHDKSIKYKAISNTRANKVKKLSKKLKRLQRQCSRKYIMNKKGESYQKTKNIVKLEKKIKKLHSKIKNIRLNHIHQTTSKMVKAKPYRIVMENLKVSNMMKNKHLSKAIAEQGFNIFLNQIKYKCEKYGIKFVQVPTFYPSSKTCSHCGTIKKDLKLSDRTYKCSCGFICDRDKNASYNLANYDLV

SEQ ID NO: 9298 - protein, 385 aa, unknown
  TnpB Polypeptide
LHHYKIERLRSRYEDYYLTEIYEQVWEELERIPETKKRFNEAEHLIHTTKKNQARFDFDIRFPKMPSYLRRAAIQHALGSISSYKTRMGMWEKLGQIGGKPKLVHENHAMPVFYRDVMYRENENGKDAAYLKLYDGHDWKWFHVQLSHTDMEYLRKNWSGKKASAPTLERRYRKYFLRFSYTEDVILTKVPIREQIICSVDLGINTDAVCTIMQSDGTVLGRKFINFSSEKDRMYRVLGRISRFQRKHGSVQVKSRWAYAKRLNTELGRKIAGAVTGYAEENHADVIVFEYLEIKGKISGRKKQKLHLWKKGISRKDVNIRHIAEGCGYPGSVHGIPAGLHMMGQEQLSVIRTITVSVHFRMEKDITVIFRHPIILEQDILSVNS

SEQ ID NO: 9299 - protein, 265 aa, unknown
  TnpB Polypeptide
MSSNKFRVWLNNEYLPQHPEYSWIKEAYSKAVTQAVNNGQTAFTRFFNHESAFPNFKKKGRSDVKMYFVKNNPKDCRCERHRINIPSLGWVRIKEKGYIPTTKDGYVIKSGSVSIKADRFYVSVLVEIPDNKITDDPNEGIGIDLGLKEFAIVSNGKTYKNINRSARLKKLEKQLIRKQRSLSRKYENLKKGESTQRANLQKQKRKVQKLHHKIDNIRTDYINKTIAEIVKTKPSYITIEDLNVKGMMKNRHLSKAVASQKFYEI

SEQ ID NO: 9300 - protein, 358 aa, unknown
  TnpB Polypeptide
MLNDCIRIGLVENMTSLKSLSLKAYKQLAGYDVMSCYKLCAISRATGILRNYRKAKRRGKPVKEPYATRPQLVTCYGFKIRSGCLLVPFKPKQRIRIPLNDHTLEVLSRPGLSLRSITLTDQTLSITFAKSIALIEPAGFIGVDSNLNNITTADSNSSVTRYDASKATMIKAKYREVKSHVTRNDARVRRQMYRKYGLKQRNRVNQFLHHISRQVVADAKENRFGIVMEKLTELRRLYRKGNRQGRSYRARMNGWSYAVLQRQIEYKAHWEGIPVIYVNPYGTSAKCSICGRRMMSEENRMLRCLSCGFTVDRDVNAAKSILARGLRFGPVAPATEAMVQELSHEREATLKVDAGELM

SEQ ID NO: 9301 - protein, 208 aa, Hapalosiphonaceae sp.
VPWHVSTFPNHDEKFLTEQESNHTDVVGVDLGVKALATLSTGEVVLGAKSDKKFEAKLSRTQWLNRHKIIGSANWKKAQIQIARLHRKIANIRKDTLHKLTTLLAKNHGVIVIEDLNVSGMLANHKLAKAIADMSFFEFRRQLTYKCELYGSKLVVVDRWFPSSKTCSNCGTKKETLTLKQRVFECGHCNFKIDRDLNAAINLSKAVS

SEQ ID NO: 9302 - protein, 422 aa, Desulfurococcales sp.
LNEQSKTLKRTVILEGWTNRFGRRVLREIIEAYKTMLQEMVDYAVEHRASQSTLHKVFYHKFREKYPWLPTRVIKGCYRDAVRRAKSFRELKKRGIAKTDKPVVRKVTVVYSDSQDWRLQDGVIEVRTHRGWVRIHYRNHKQLHRYLYNGWRLSSELRFKLNGRKIIIYLTFTRNFKVVYNPSNVITVDINENNVTVAVFRDRKLCEVYRIETGLGRLLISYAERRRRITKGKSTKTRGVKKVLRKLREKERKQDMIYKTARIIEEIAIKNNAVVVVGNVHRSKRKLVEKPRKNTLRHRIHQWSVSALVKVLNNKPLRVVEVSEAYTSSVNPFTGRPIRSFTPSMTRYAVRGRKRLRVVKVQLRLAKSNNGFVLDRDVIGAINIGLKYLTSDGGCVALPSTEPHEVWVKLMNPHQGLTPLTD

SEQ ID NO: 9303 - protein, 422 aa, Desulfurococcales sp.
MKAYISLAREMPEGVYRRALKAKVEVIEDNANDLLWDLAVHKYVLQKVIDVLWGLDKLPKKSQVHQLLYPMLRSYGFRAHVVRNIYKTALALVKSARENKGSKPLIRKMSARLDYQDARVEIDNGVVKVILRNKWYTLKLMHRREYIKRFKGLKWKEVHVKYYNGELYVSIVFEVKYTPYTPRGVLALDVNLRHIVTYDGSSVRRYRTRFINALSKRARAEELQRKYPKKWRYNKRVLSRIRSLHRKARNIVIDWCRKFAKEIVLKVKKHNYAIVLENLTRLHENMSKNKDIIVWKLSMLAYRKLREAIVNKAIEYNVPIAFINPRNTSSTCPRCYTKLSYDYRLAICSKCGFIADRDVVGAVNIWLRFIHAYAGEHGSPPRAPAMKDETRQSGGTRNEGMKKVIKNIQKWLKITFRPEPLP

SEQ ID NO: 9304 - protein, 291 aa, unknown
  TnpB Polypeptide
LNFRSVDKIQPNFNIRCSTSSNKKRPSRIYLKDSGKLQIPTLGDIKFGSVKQDFDLSCKKQVANISFDGKYWYLSYTEDIEIKTDDLPDYTDGIGIDLGIKTLATVSDGTSVPNIKMFRRVRILNKRLKRLQRKVSHKYLINKCNKHNKTKNIIKLERQIKLIHRSLKNIRINHIRKFVSVLVKKQPQYIAIEDLNVKGMMKNKYLAKDIANCSFYTIREHLIRKAKERYITVRLVDRFYPSSKTCSKCGNYKKDLKLSQRVYHCDNCQETIDRDLNASLNIAKTDRYVLT

SEQ ID NO: 9305 - protein, 373 aa, unknown
  TnpB Polypeptide
MTEIRQKSYKFRLYPTEEQKVIFAKTFGCSRFIWNQMLADKIAYYKDTGKTLNNTPAQYKKNYPWLKEVDSFALCNVQLNLQKAYKNFFQSNFGFPKFKSKKKAYKQSYKTNNNHGNIELCDGKIKLPKVGWVRLKQHRKMSGLIKSATISKTTTGKYFISILCETDIHLYPKTNSSIGIDLGLEHFVILSSGEKIENPRFLISASKKLRREQKILSRRGLLAKQKGKSLSDCMNYQKQRMKVAKIHERITNRRKDFLNKLSTSIIKNHDRICMEDLRSKNLMKNHHLARAIGDASWSEFVRMLEYKADWYEKQVSKISRWFPSSQICSNCKVNSGKKPLHVREWTCKSCGVHHDRDLNASLNILNEGLKILV

SEQ ID NO: 9306 - protein, 292 aa, unknown
  TnpB Polypeptide
LNGELILCPKDFSLVIPTKVKNPKCVRIVPKLKAFVIEVVYEVEPALLKHTGNYAAIDLGIDNLASVTFSNNVNPLVVKGSKLKSINQGYNRLIAKAKSKLPMSQKTSQHIHRLWKNRELRFQSELHKITSFLSLYFDEMAIETVFVGKNLGWKQGVSLRKRNKQTFTQIPFNTFISQLTYKCLLRGIKVLEQEESYTSKASFLDEDEIPIYEKNNQNQNFIFSGKRISRGLYKSKDGSLLNADVNGSYNILVKGLLTLNKSLNRKNLSFHTRSLKNDLTSVSNVDLLLQYM

SEQ ID NO: 9307 - protein, 380 aa, unknown
  TnpB Polypeptide
MVKIRHKSYKFRLYPTEKQMVLFEKTFGCSRFIWNQMLADKIAYYKETGKSLKNTPAQYKKDYPWLKEVDSLALANVQFNLQKAYQLFFKNKTHFGFPNFKSKKTAQSYQTYNQKGTIKLNNNKIKLPKVGWVKVKVHRQVKGLIKNTTISKTATGKYFISILCEIEIEENKINNNKTKILNSSIGIDLGLEHFAILSSGEKIENPRFLVRASKKLIKEQKILSRRTLVAKQLGRSLIDCSNYQKQKLKVARLHEKISNQRRDFLHKLSTNLIKNHDKICMEDLVSKNLMKNHRLARAIGDASWSEFRRMLEYKADWYGKQIIKVNKWFPSSQICSDCGFNSGKKPLHVREWTCEQCSAHHDRDINASVNILHEGLKLLA

SEQ ID NO: 9308 - protein, 392 aa, unknown
  TnpB Polypeptide
LPGGVKTDADIKQNIRFTTLKVRLYPSPEQAELFEKTLGCCRYVWNQMLADQERFYIETGAFFIPTPAKYKTGAPFLKEVDNQALIQEHNKLTQAFRVFFKDPEHFGHPRFKRKKDDRDSFTACNHVFASGDTIYATKDGVRMTKAGIVRAKFSRRPQAWWKLKRITVEKTRTGKYFCSILYEYTEKERIPVIPSEKTTVGLKYSMRHFYVDSSGSMADPPRWLRQSQEKLAGLQQRLVRMQPGSRNYQETVQKYRLLHEHIANQRRDYIHKESSRIANDWDAVCVRADDLNELNRLTDKGNVFDSGFGMFRECLRYKLARQGKRLLAIERGFPSTRTCSHCGAVMPEEIPLKRLTWTCLHCNTVLEREVNAAVNIKAEGLSEYFKSQRGTV

SEQ ID NO: 9309 - protein, 434 aa, unknown
  TnpB Polypeptide
VSEVTRTVIVRSERLPRRTFRAFVELEGMYRNMVEQLVLYAVDNNITKFTRLKAERYREVRSLYPQLPSHYAYTACQDAAERSHSFLRLKKMGRARKPHPEVRGVSIWLDNHLWRAEGLTSVSIATHKGRVDVSIEPTKHFLRYANRGWRLSSEAKVKLDHRDRRLVLYLTFRKEVSVYRPKAYITVDVNENAEAALIDGVVYLFETDLSRVTLGYYYRRKSVQEKYDRVYGPGSRPARRIFKRLSGNERALKRDIRWKLAALIVREAARRQAAIVLERLGREPAKSMIEHIKDPQLRHRVFQAAFKGVQRAIEEKAREYGVPVIYVNPRNTSRKCPIHGAKIVYGKDRHGTCSKGGETWHRDAVACYNLLLRALGGNGGHAPSRMRATIPVDGGPVPLGPTAAHEPAGVPRALWARWRSLGATNEHKLMRVST

SEQ ID NO: 9310 - protein, 365 aa, unknown
  TnpB Polypeptide
MFAIKRALKLNKSEATLMAKHAGFRRVVYNIALSFRKSLYDDSTIKISDSKFIGTFKKYLTNTLKKLPEFSWMQEMSSRVYQNALIDLQTAFKRYRSGLAKHPVFAKRSKGQSFTVDDSNGKMLVASGNAIKIPTLGTFKLHEPLEQSYISQTFNLTKEGNRWYVSFCVDAERLPVQHTQESVGIDLGIKSFATLSNTQVFDAPKPLKQAKTKLLKLQRKASKQVKRSQNQRKTYDKIRNLHNRIACIRKDFLHKLTTFLAKTFKLIKIEDLNVKGMMSNHKLAGAIADLGFYEFRRQLEYKCLMYGSKLELVNQWFPSSKTCSNCGHKQDMPLSVRTYECGNCGMVMDRDLNAAFNILNYKPLA

SEQ ID NO: 9311 - protein, 243 aa, unknown
  TnpB Polypeptide
MDKLKQFLKLLDSVDNGDLEKNCLEINNSRAFYIANYIEEKCIRYIKGKKKLNELKSKFKNINKTSTVKKIEKKLKREQRKLSRKYESLIIRNKKEKGGNVTRQNIQKQIVKVQKLHQRLRNIRTDYINKTVFSIVKQKPSYITIEDLNVKGMMKNKHLSKAIASQKFFEFKTKLMSKCKQNDVELRIVDRFYPSSKTCSNCGKIKKDLKLSDRIYKCDCGFTIDRDLNASINLKNAKEYKIA

SEQ ID NO: 9312 - protein, 390 aa, Exiguobacterium sp.
MVKHKGYKFRIYPTKEQEVLIAKTIGCSRFVFNHFLSKWDAAHEATGKGLSYDACSKDLPMLKQEFGWLTEVDSTAVQNSVKHLANAYKKFFKKDGSHPRFKSKRNPVQSYTANIQGKSQLPEVSIVGNTLKLPKLKWVRFANSRQVEGRILNATIRRTASGKYFVSLLVEHEISEMPKTGSSVGVDVGLKNFAILSNGTVYQNDRYFRTLEKKLAREQRKLSRRQRIALNKKVRLSEAKNYQKQKRKVARIHEKIANRRTDFLHKVSTEIVKNHDVIGIETLQVKNMQQNRKLSKSISEVSWSEFHRMLKYKAGWYGKTVVKVGKTFASSQLCSSCGHRHQDVKHLALREWTCPACGVHHDRDVNAGLNLKQEAERILAFSTVGTTGLA

SEQ ID NO: 9313 - protein, 307 aa, unknown
  TnpB Polypeptide
VIKKQAFKFRLEPNKNQSSDFLIFAGSCRFVYNKGLALLNDIYHSGKKFMGYNQLASELVGWKSEESLSWLKSSPSQCLQQSLRDLDRAFRNFFSGKAQYPKFKKKGRHDSFRIPCQRVRVDQEKKMVSLPKVGWVKYRKSREIIGELKNVTISMKQDKWYISFNTENTVPDPIHPYDIKTKIVLSDESEFPIRLDRSMESAQRLNVVKKLIRLNRILTRRTKHSNNWLKTKGKIDKIKAKLARCRLDNIHKVTTAICKNHAVVEVLSLMDSVSEKNDIILSLRYEFVRQLIYKQEWLGGKVIRRES

SEQ ID NO: 9314 - protein, 374 aa, unknown
  TnpB Polypeptide
MQVQVSVPIKLKVTEIIVDTIDLYKQGLQYCIENSWNLRIKNNIQLHPFVYSKLRKIGLPSQLAISCIKQACGIVKKAKSKPFIKKASIRYNSPRSFSFKNGILSLGTICGRTKIKINIPNYALKYFNELELRESLLTKSFKGDYYFTFTFLKEIPKNLNLQERVLGIDLGINTLAVTSDKQFFNSSKVKQSKRKFKFLRSKLQAKGTKSAKRLLRRISGKERRFMTWVNHNISNEIVSSFNGNKIVMEDLKGIRKIHRGKKMNYWISNWSFFQLQTFIEYKGNMKGIEVIRVAPNYTSQICSKCGELGSRCGSSFICHCGYSLNADLNASQNLASPMLEKRQVAITQPNISTDEHEGILNPIECEVRDKYPTL

SEQ ID NO: 9315 - protein, 430 aa, unknown
  TnpB Polypeptide
MLLCTKIKLEVSDQDAVTLEFMQGKCRGLYNWWVMRLKAGEKWNFKSCKKTLAESRLHDPELDDVYGKLLAEVYYRLDAAMGAFFRRCDAGETPGFLRVRPRHAFFTLCYPAMYLQIEGNRLTLPTGGRGKHKRFPNIIAKLTDTPPQEFGEVAISRDARGNYYASFTYKKNEQTPDHEEEQSDYVAFDLGIKTLATGVNEHGRVYTVGGFKGHQWYNKQLDKIRSKRDRCKKKSRRYIHLSKVYKRVSEKKQNKQKDSLHKASHLIAHTLVERTVIVGDLSQRQMVTKQHQERNKHLNRAVYNEWGLYTFIQMLKYKSDLYGKELLFFDERYTSKDCSGCGNRQEMPLWKRTYCCTNCGLVMDRDENSAHNILTRFLAGLPPYTQLVECDVLQESRVDVGIMEVPQPCEVQQLSMFEHILESRSGDGKC

SEQ ID NO: 9316 - protein, 422 aa, Cyanobacteria sp.
VLSMTYEYKAIPTPEQVQMIEQTLTVCRKVWNFALRERKDWYASRKCQVNACSITSEYIIPADVKYPNYYEQSASLTRAKSEFPELKTVNAQVLQQVLRKLETAFLDIGRKGMGFPRFKNKYRMRSFVYPQLGKSQFLQGNKIKLPQLGWLEYVKSREIPDGFTVKQALIVRKASGYFVMLTLECDVNVPDVIPDGHPVGIDLGLDKFVATSDGEVIDRPRFLSSLHRQLKLLQRRLKHKQKGSNNRHKLNRKIARLHQHISDTRKDWHFKLAHKLCDIAGTIFVEDIDFRVWAKAMFSKHTLDAGFGQFLNILKFVCWKRGVYFDKVDKNYTSQVCPQCDTHTGKKELKDRVHFCPECGYTTHRDVAAAQIVRNRGLSGVGRILDNKENACGDGLTGTGNSLVKSLRSRKKSYEASLKSAS

SEQ ID NO: 9317 - protein, 468 aa, Saccharopolyspora sp.
VAHSVGGLCGGAAPVTTLIQAYRFALDPNPAQEEALRSHCGAQRFAYNWGLRKVKANMDQRKAEASYGIAEEDLISSLSWSAYSLRKDWNQAKNDIAPWWPENSKEAYSSGLANLAAGLKNWNDSKTGKRRGSKVAFPRFKSKHRTLSCRFTTGSFGLVDHDRRHVKLPRIGTVRTHESTRKLARRVDACSARIRSATVSFRSGRWFVSFSVEVDRDDPPPANPDSAVGVDLGIKSLAVLSTGEVIANPKHLELAQRELRRLQRQAARRLGPDKRTRQQPSKRWYKTSARITKLHAKIADARRDGMHKLTSRLVCEHGAIVLEDLNVKGMMSNRRLARHLAGVGMGEFRHQVEYKAAWSGVHTQVVNRWYPSSKTCSSCGAVKTKLHLSERVYQCERCGMVLDRDLNAALNLVALVERESSSASCVVRLNESDGNPRKPNLVGHGYRHGKTPAHVGRGQRQRGNALTQ

SEQ ID NO: 9318 - protein, 639 aa, unknown
  TnpB Polypeptide
MGRTGKPCKSRKRNSSKGDPKICIQNEYDSPDWYDLDIFKLINLPISKSNINYTSSENNIGLGNAEFNNRYVKQYVFNNKSNCEFVNTSLINTSDSDIAKLTKLFERSIQNVHTKFVNEPNKINTKTKILTTKYNKSVSNMNKVTICKKYRIYPDSTQKVKLHEWFDECRKVYDYCIKKYNENISYFDNGYMSVKVLLFEEMYGANEKPAPYAILTDEVRIFCSNLKSCHKNLKNGNISSFQMKPKMNYTGQCMFIPKMAMKKNGPYPSHLGKMLGMEHINFDEVINDCRLIYNKDHKSYTLLVPVNKEKTVIRDRKKIVALDPGGKIFMAYFSPDDFGYLGYEFRELLLKELQKVSILQRILAKGYNNYGSKIKNKQSLIRKINLIYERMRNLCDELHHKIAKFLCENYDTILIPKFETQKMLKTDPNYRKAQKNVETIYNEKGCEAGKEALRQYKKKKRLNKKDKFVLNMLSHYRFRQHLTNKASEYGCKIEVVTEEYTSQTCTNCGHKSANYDYREKKCEKCNYKIDRDLNGSRNILLKNILGYIKQEDSSTLNSKKNKIIPVSKDIKCTDSNSEEDCINEEKGYDNDEYLEYFDDDYVDGKNTKTILYKVIKYKADRPLGKKSLVAGRIAPMRNC

SEQ ID NO: 9319 - protein, 400 aa, unknown
  TnpB Polypeptide
MLVRYRYRIDPTSAQRQALARVFGCARVVYNDALAERHCAYQAGEWISDTEVQRRVITQAKRTPERAWLTEVASVALVQACQDARRAYRNWFDSLKGMRKGRRVGHPRFRTKHGRQSIRLTRNGFAFHGTRLYVAKVGQVRVRWSRELPSVPSSVTVIREPDGRYYASFVVDREPSPLPPVSGTAGIDLGLIAFATIATGDGTVETLANPRHLRAAERRLAIAQRQLSRKQKGSKNRTKARLRVAVAHRRVRDQRADHHHKLALRLIRENQAIAVEDLAVAGLARTRLAKSVHDAGWTMFVRLLEAKAAQHGRQVVKVGRWTPTSQTCSACGYRDGPKPLSIRAWACLACGTVHDRDVNAARNILVAAGLAETLTACGGHVRPGATLAVTSEAGTHRGAV

SEQ ID NO: 9320 - protein, 380 aa, unknown
  TnpB Polypeptide
MMESIYNTDMQLTVKIKLLPSAKQKDALLRTFAAFNAAANDAAKAGFENKVFSQPSIHRLCYYDIRKHHNLNAQLTVRAIGKAVECFRRDKKKCPKFKRRSAIVYDQRIMRFKGLTHVSLASVDERLVIPMVIAGYQESRLQEAIKIGQADLVYINRKFYLLVSIQVGEIPPSNVKTALGVDLGVTNIAVDSEGNTYTGDDVEAKRIWFQNRRNILQAVGTRSAKRRLVSMSKKEANYRRTKNHQISRWVVDKAKELGAKIVIEELKNIRTRTRFRKKQRPKMSGWAFNQLRQFVTYKAILAGVVLQVVDPRNTSRTCSQCGHCDKKNRKSQSEFVCLSCGHHINADLNAAINLKLKGVVNAPMETDVEGKAALLNCAGI

SEQ ID NO: 9321 - protein, 407 aa, unknown
  TnpB Polypeptide
LVEKLNSNDNKIYRSVKIRLLPTKEQEVLFWKSAGVARWSYNFFLGYNQEKYKEWLEDSTKEGFVSESDVRKYINNVLKNTTHTWLREVGSNVMKQGVKDANIALQNFFKHNKGYPKFKSKKHSKPSFYVNYEHLNRLPNGFQGERLGYVKTKESLPKIGKNQKYVNPRISFDGRFWHLSVGYEVCRVDTKLSDNRLGIDLGIKELAVISNQSGTEIKKYHNINRTHEVKRLERKLKREQRKFSRKILMNTSHYIGKSRPIYNKDLELCKNIQKQRGIIQQLYRRLLNIRTNYLHQTTTEIVKTKPSRIVLEDLNVSGMMKNRHLSKALMCQKLYEFRRQIEYKAELYGIEVVIADRFYPSSKTCHVCGNVKKDLKLSDRVYRCDCCGNIIDRDVNASINLANYNIE

SEQ ID NO: 9322 - protein, 410 aa, unknown
  TnpB Polypeptide
LVEKLNSNDSKIYRSVKIRLLPTKEQEVLFWKSVGVARWSYNFFLGYNQEKYKEWLEDNTKERFVSEGEVRKYINNVLKKTTHTWLKDVGSNVMKQGVKDANIALQRFFKHNKGYPKFKSKKHSKPSFYVNYETMKRLPNGFRGEKIGVVKTRESLPEIGKNQKYLRPRITYDGKFWFLSLGYEVKKIDVSLSDTKLGIDLGIKELAVISNQSGTKIKKYHNINKTCEVKRLEKKLKREQRKFSRKILMNTSHYIGNDRPIYSKALELCKNIQKQKGIIQRLYRRILNIRTNYLHQITTEIVKTKPSRIVLEDLNVSGMMKNRHLSNSLMCQKLYEFRRQIEYKAELYGIEVVIADRFYPSSKTCHKCGSVKKDLKLSDRVYRCDCCGNVVDRDVNASINLANYNIERIN

SEQ ID NO: 9323 - protein, 376 aa, Bacillus sp.
MRIPSFGGQKSLRGVNQMSQTITVKVKLLPTKEQEEILNEMSHTYISVINQLVSEMVDNKKSTKKTSKHVTALLPGSVKNQAIRDSKSIFSKRVKKSNYKIIPILKKPVCVWNNQNYSFDFTHIHLPLTFDGKTKRTPIRALLVDKHNRNFDLLKHKLGTLRITKKSNKWIAQIAVNISPIEKTGTRVIGVDLGLKVPAVAVTDDGKTRFFGNGRQNKFVRRKFKSKRKKLGKLKKLCAIRKLDDREQRYMKDQDHKISRAIVNFAIDHNISVIRLEQLTNIRQTARTSRKNEKNLHNWSFYRLSQFIEYKANLEGIKVEYVNPAYTSQTCPKCSEKNKAQDRKYKCKCGFEKHRDLVGAMNIRYAPVVDGNSQPA

SEQ ID NO: 9324 - protein, 370 aa, Halomonas sp.
MKTERAFKYRFYPTPEQATLLARTFGCVRFVWNAVLRYRTDAFYQRQEKIGYNDASAFLTQLKKQPDTAFLADVSSVPLQQCLRHQQMAFKHFFAKRARYPSFKSKKHRQSATFASSAFSYRDGLITLAKCSEPLTIRWSRDLPAPPSSVTVSKDAAGRYFISCLCKVDTDALPITPKMVGIDLGLKDLLVTSDGMRVNNPRHTARYARKLARAQRQLSRKQKGSNNRAKARLTVAKCHAKIADTRLDHLHKLTRQIVNENQVIAAESLQVKNMVKNRPLSKAISDVGWGELVRQLDYKAAWAGRQFVQIDRWYPSSKRCLGCGYVMASLPLNVRTWDCPGCGTQGIDRDLNAARNILQAGTALLAGAES

SEQ ID NO: 9325 - protein, 361 aa, unknown
  TnpB Polypeptide
MTLLTYKYRLKGKRAARRLVRLSRAVNFVWNYCVETQRKAQRNFRHGIASSWPSQYDLQGMTKGTSKELGVNAQSVNGVCEQFAKSRDQHKKCPRFRASTGPKRALGWIPFRRQSRQVDGNAISYLGQTYRFFGAKRRPLPSSVKGGCFVEDAQGHWYVALHVEVEDERATGVGEVGIDLGLKTLATVSTGDKIESPQSYRRLEAKLAVAQRAGNRRRAKAIHAKIANARRDHLHKASAKLARENRLIVVGNVNAAALAKTRMAKSVLDAGWSAFRDMLRYKASRHGAEYREVDERFTTQTCSRCGVIPDSSPKGMGALGIRDWECSACGATHDRDVNAAQNIFRIGRSAPPRGDESRRAA

SEQ ID NO: 9326 - protein, 395 aa, Actinophytocola sp.
MSRYRLLPAPGQEAGLLEHCRHARYVWNLAVEQHAHWRPGRTSAPGYLEQARQLTNARAEFAWLRAGSQTVQQQALRDFNQAMRNFFAGTHRRPSWRKAGMHEGFRQVAVRPEHIQKLNRRFGRVWVPKVGWVRLRWSRAVPEGVKSYRITRDRAGRWHVAFAAKPDPLPRPGNNQAVGVDRGVAVSAALSTGELLTTPSLTVGERRRLARLQRQLARCQRGSNRHRRVKAAIAKLSARQVDRRNDWVEKTSTDLARRFDVIRVEDLNIQSMTRSAKGTLKKPGTNVRAKSRLNRGILSNGWGRLVARLEHKAAGRVEKVNAAYTSQTCSTCGHRAPENRESQAEFRCRVCGFRCNADINAARIIAAGRAVTARGALKPPGGAENREPQPATSTE

SEQ ID NO: 9327 - protein, 305 aa, Clostridiaceae sp.
MNKAYKFRLYPDKSQIVLIRKTFGCVRFVYNKMLENRITIYEIYKDDQEALKQQKYSMPADYKKEYGWLREVDSLALANAQLNLNTAYKNFYRNPSFGFPKYKSKHHDKKSYTTNNQKGTIRIVDERTIRLPKLKDVRIKLHRKIPENVVIKSATISETAAGRFYISILVEYENDIKPVTPKAEKVLGLDYSSKALYVDSEMNTPDYPKFYRQAEEKLKKEQRKLSGRKKGGRNREKQRLKVARLHERTATSVTKHLPVICRKYALSIFQLSSRSTREMDLSQIHLIFMLLTGWQRCITRSMGPD

SEQ ID NO: 9328 - protein, 460 aa, Mycobacterium sp.
MARFEVPEGWTVQAFRFTLDPTVDQAFSLARHFGARRKAYNWTVAALKADIDAHKATGVETSKPSLRVLRKRWNTVKDEVCVEPETGVVWWPECSKEAYADGINGAVEAYWNWQQSRAGKRAGKRVGFPRFKKKGRDADRVSFTTGAMRIEPDRRHLTLPVIGTVRTHENTRRIQRLISKGRARVLAISVRRNGTRLDASIRVLVQRPQQKTRVARPESRVGVDVGVRRLATVADTDGNVIERVPNPRPLHEALEALRHISRARSRCTKDSRQYRKRTAEISRLHRRIKDVRTHHLHCLTTRLAKTHGRIVVEGLDAAGMLRQKGLPGARARRRGLSDAAVGTTRRHLSYKTGWYGSVLVVADRWFPSSKTCHRCGHVQDIGWAERWQCESCKAGHQRDDCAAVNLARYEETTSVVGPVGAAVKRRADRRTGHRPAGGNEARKRTGQQAGEQPRDGVQVA

SEQ ID NO: 9329 - protein, 392 aa, unknown
  TnpB Polypeptide
MATATKTLKLPFLGLNESKRDDFARMQAINTEVANKIVAMPKAERRILTTKSFSDIPLGSAWMNQTIRNANAKTKVKQFKCLPLETNNQNWTLHKVGDTYSVAFGLFRGIKKRIPIEVHQASHIAWLDALLENKAKAGSIKLYKSRKNIWYACISVSMDVPDADETGNWIGVDRGQNIPAVAALPNGRGVFFKANRIKHIRKQYQLRRKKLQKAGKHRAVRKLESKERRIVTHINHIMSKQLVELAKHNECGIRMEDLSGIRKTSKQHKKTKSDATKNRDFWPFFQLETFSKYKAMLSGVAFENIPASYTSKTHFNCGHIGVRKGFDFFCPHCNKHEHSDLNAGRNIGGWVGIFCVVEPRKVSPVIVDATHPHAVYDSPPNFVSESNPQGLG

SEQ ID NO: 9330 - protein, 492 aa, unknown
  TnpB Polypeptide
MFVYTVKLDANLSHHKELEKRFRMADDIYQKTLREILKRVRKQKKDPRYKQAYKLPKGQERNDILKELDVKYDLQGKFTFGKFANDYRNARNYSRYIPSDVANKLGHRAWEAYSRVKFAKGAHHINLNQPLLSFEAKGDCGLIIRNGVFKMGTKGAQFECPVMFKNDEYEQELLRNPFKYNRLVRKYQYGLWHYYVQMTFDGNPPYTPNGTYGSVGLDIGTSTLAVSAPYETKLCELAQGLDNEQENDFIARLQRKLDRQRRANNPDNYNKDGTIRRGPKKWIDSKEYNKTKEELAELQRQRAMRRRNQHQTLANEIVESGDRFVVEQMSFKGLQAKAKEATISETTGRYRSRKRYGRTIGHRAPAMLIEMIRSKAISQGKEFIKAETSKVKASQLDHITGQYKKVGLGVRTKTIGDEQVQRDLYSAFLLQHVENDGYTVNLQKCEEDFEQFLEHQQQTMSELTTDLKSTGKDTFHIKTGKDDENGIQKTIE

SEQ ID NO: 9331 - protein, 436 aa, unknown
  TnpB Polypeptide
MKLTGDFGALENSIRIYRQALSVLIPIINNDWETVNQCRYSNQKVNLIEKWIHSTKSNQAIFDFDEIFPKLPTYLRRSAIAKALGIVSSYRSNLENWEQNRKGQAPKLSLTHYAYPAYYKGNLFRNFDPIRQTIELKVFKNGDWVYEVYQLKTSDCTYYLTYLTGKKQNVPIIQKKGRRFYATFSYEEETTLIPEESIDRICAVDLGLGTDATCSIMDKDGTVYARKFISFSKEHDRLDTQLGRIKRNQKRGSRHNKTLWRKVAGISQDIADKTARAIFEFGNSHGVDAYVLEYLDFKGKNTVKRAHFWRYKRIYKVLCQKAHQNGLRVSRVNARNTSRLAFDGSGWSKRGHEITTNMPYSLMQFTTGKIYNADLNASYNIGARYFIRSLFKTVPVTQRLVLEAKVPQATKRSTCTLSHLINLRSELAVLTARTQA

SEQ ID NO: 9332 - protein, 497 aa, unknown
  TnpB Polypeptide
MRVQTSSYVVSVNLKLPESVEHRLEKSFHIANSAYNEALSFGLRRFEALKQNSRYRELLELRRNNDNQCKEYDRALFELQKAYGLTEFGLSNLLSQQRKNLNSPYRQLNSGELQVIAGQAYKALEKVLFYQIKSSSIRFRSKYDLNVSYRNRVNTTGTRLIPSDRKGYAYRLYIHKASTFVDIPMKAFNHYQQLSLLRSEKIKYVQIIRKIIRGKRVYILQIVCQGLPLTKVKRGEGTLGIDPGISTIAYASKASVALIDLVPKDINRKEKLMRYLDQAIEHSRRVNNPDCYHPDGTVKKGAKFKRPSNRQLRLQVRRIKAYRSLSEERKKLHGQLVNHLVSQASFIKIEDLNVKGLQRRSREIRINPNTNRPFSKKRYGKSVFRAAPSAFRQSLLTRAHQLGVDIEIVSPKDLKPSQYNHLTQTFEKKTLSTRLYDLSEEWTNVQRDLYSAFLIGHIENSSYQQEQLTQDFPEFYKQMKDFLQQPRQTNRLDWYLR

SEQ ID NO: 9333 - protein, 449 aa, unknown
  TnpB Polypeptide
MTSQKDRKTLYDDLCLCISSHLLSHKDIDNTMSKCSKSFCTMNVKPWFSTKQVTTINKNSQNNNLQSFTSSYADCIVSNTIMIKARRIRIYPSQQQKRLFKQWFGVGRKVYNTCVNHFNEKDIEIKGWMNMGTTVLAELTEDYIKSVPYQIKKIAVKDSYTSWRTNCKKAKQTGKPFKLRYKSRKNPIQSCYIPKSAVSESGIYYRISGKLKFSEKEWLKNDFCACRLINDHGRWYISVPQKITTNTTENQSGIVALDPGVRNFLTYFSEDGRFGWIGIHAFDRILNLNLKRDKLLSRLALTKDKRKKCNLKRTLNRIYHRIQDLVDELHWQCINYFVHNFSVIVFPPFEVKGMTKKGRKLRKSVVRSMLSLRFFDFKERLKLKCKECGVLYIEQNESYTSKTNSFNGELIPNLGSKEWFTYDGIKVHRDLNAARNILLRAMRDSSAVG

SEQ ID NO: 9334 - protein, 414 aa, unknown
  TnpB Polypeptide
MIVRQGFKFRLDTSDTQSARLRVLCGHARFVWNQALVKCNQAAEAEGEYVPRYETMAKWVTAWKREPETCWLSDAYTDNLQQKLKDLDAAWQRYFKKVGGAQRPRFKKKGKSRDSVRFVNFQKYCRIDNRRVKLPAGLGWVRFRKSREIVGTIKNCTVGFEGGHWFISFQTERKIPEPAHSSASIIGVDMGVARFLTLSDGTFIEPVSAFKANQDKLARAQRALARKVKFSANWHKQKTKINRFHTRIANIRRDYLHKASDRLSKNHAMIVIEDLQAGNMSRSAKGDAENPGVNVKAKSGLNRSILDQGWHEFRRQLEYKQVFRGGGVLAVPAHHTSQTCPECQHVSPDNRTSQARFQCVECGFKKNADLVGAINIKARGHRVLACGESGLPDSVKQEPVRNREEVAPGAAHAA

SEQ ID NO: 9335 - protein, 402 aa, Cupriavidus sp.
MQRLQAFKYELMPTSEQHRSMRRFAGSCRFVFNKALALQKERHEQGEKKLDYAGLCKLLTAWRNSTDTAWLADAPVHPLQQTLKDLERAYANFFARRADFPHFKKKGQSDSFRYPDPKQIKQDQANSRLFLPKLGWLRYRNCRETLGTVKNVTVSLSGGRWFVSIQTEREVEQPVPNGGAVGIDMGVARFATLSDGTCYAPLNSFKRHETALRKAQQAMSRKNKFSKNWTKAKARVQHIHSRIGNARRDYLHKTTTAISQNHAMVCIEDLQVRNMSKSAAGTAEAPGRNVRAKSGLNKAILDQGWSEFRRQLDYKLAWRGGYLIAVSPQNTSRTCPCCGHVSAHNRQSQARFECVECGFEQNADVVGAINVLRAGHARLACEVSDAVGSPAAGTHRSDSGAV

SEQ ID NO: 9336 - protein, 288 aa, unknown
  TnpB Polypeptide
MRCPPDRQDLPGLFFRCQRGQVPGFPRFRSASRYDSFTYPQAGFKLSGRLSLSKIGDIKIKLHRAIQGQIKTLNLKRENGMWYACFSCMVEPEPLPANDKAVGLDVGLLSFVTRSDGQRMGNPRLFQKAQKRLRRAQRRVARREKFSKRWKKAVRLVAKVHRKVFNQRNDFQHQLSRKIVNNYGIIFVEDLNVKGLSRGLFAKSVHDAGWAAFFRKLSYKAESAGRKFLSVDPRGTSQRCPCGEANPKRLSDREHVCLDCGLVTTRDHASALEVLRLGLSLQPLTAVQ

SEQ ID NO: 9337 - protein, 450 aa, unknown
  TnpB Polypeptide
LIKEEARLAKNQAIAEAQKATRAKRSMQICKSREIKIQSNKLNKLEANHLRLLFLEAKWFYNHLLADHRRICRESVKLKSVPVKLPDGSYDERELAHISSQMKQSIIDNMVSSFKALAALKKRGVQNPGKLKFKSELKTIELSQYGITYRIDFNHKLLYIQGIRSGLKVNGLEQIIKLKEKYGDVDITSAKLINRPDGIFLKIVCYVMDNKKRIPEVVGIDMGLGKHITMSNNLGFRFKVDETKMLTSLHSSDLQQKLSRKKGAQKGEKKSKNFKKVRKELSKEYQKIVNKRTNAINHIVSLIDEYEFIAMQDEQITGWVKKKRKKRNKEIYHTGMGAIKSRLSNLESSRVDVLDKFKPTTQSCSKCHTLNQISETTRVYHCQACGLTIDRDKNSTLDMIIMSKFSDKPVSTEHRNLSPRHYLRKKIKNMRKIPYLKVSSIKEAQLLVAG

SEQ ID NO: 9338 - protein, 465 aa, unknown
  TnpB Polypeptide
MQLTHTIALRPTPEQVDYFKRACGTARRVWNWALNEWNKQDAAGRKPNARALKKQFNAIKYTDPQWLDENGQPWIKTIHRDAHAQPFKHLERAWSRLFAEVKAGARIAPNDRAERRALRRQGIRLAYPPTFKKQGRSKESFYVANDKFSLSGKTVRLPKIGDVAMTEALRFDGKILGATVSRTADRWFIAIQVEVPDAQFHRRRTGHGIIGVDLGIKAAATLSSGQAIEAPRPLKAALRRLKIRGRRLSRTIEAAKVASGFAPKAPLPKGTWLPVSNNRKKCSDKLARLHARVARIRADFTHKLTTRLCRENQAVGIEDLYVKGLLANDRLAFAISDVGFGLFRSQMEYKAKRFGTRLVIADRWYPSSRLCSVCGWKNEALTLQDREWTCPQCGTHHDRDLNAALNLKRLATATALPVASPSGNGGTMTQTLCAVGGKVTPVRYEGGQQDPSGQEKNRAHLRARS

SEQ ID NO: 9339 - protein, 423 aa, unknown
  TnpB Polypeptide
VFVQEYARYRYRLYPTSAQDHALWRWAGCARVIWNAALEQRQVAWRMRKITLRYTAQGGTELTEAKRALPWLREPHADVLQQALRDLDRAFVRFFRSQARYPRFRRKGRRESFRIQSRPRKGEIAVGRISRRWGEVRVPKLGWVRFRWSRGPRGEIKHLTVSRDPLGWHVSLCCESESAEPALHSGPPVGIDRGVAATVALSTGELRSCPTLPSGQAERLRRLCRRAGRQETARRRRLPGQRRRSQRHHRTLETIAQLRAREARIRRDFLHKFSTDIAQNHGVVVIEGLRIAEMTRSAQGTRDAPGTRVRAKAALNRSVLAQGWGELRRQLDYKLARSGGRLVEVPAPYTSQRCARCGTIDPRSRRSQTEFACLACGHRANADVNAAQNILAAGLGRDSAWSPLRRHGEEARTAPLEVADCAA

SEQ ID NO: 9340 - protein, 412 aa, Bacillus sp.
MIEFLSFLSRGLPPQNVSEGGEVNRKKYFIFKKKERTFYFCYNILNKEVNKMAKENPSNYKTLQIWIKKGHRMYSYFQECCHNAKNMYNTTNFYIRQVYTGLTQEKELQPLQKEVLDHIHKNIGKMNDTQRLAYQKKLEKEKLKPKEEQKELTCNLFSEPNFEKPYVDYNFLDALFKAMIQNDYRALPTQCSQSIMKGVFQNWKSFFASLKDYKKNPNKYAGTPRIPKYIRSSEKEILYTNQDCVIKNGRFLKFPKTKLKLNIGKLGFTEGKLKQVRVIPKYNEYVVELVIDVPSEQQMIEENARYMSIDLGIDNLATIVTNTGMKPVLVKGKHVKSINQYYNKMKSHFTSILRNGKQTNEGPFTSKRIEKLHQKRYLKIKDVFHKVSHHIVKLAQEEDVCKIVIGQNKSWK

SEQ ID NO: 9341 - protein, 337 aa, unknown
  TnpB Polypeptide
MRGKTTHARVVPQGEYVLTLKAQGKLMNGPIEELQEELYLIRRAIQYIINALWELDKIPTLNQVHQMFYKVLREQGFRAHQCKQIYKYALGIVRSAKSNGGRKPVLRKLSARLDKYDASVDLENQLVIIKLRDKEFKIKLLHNRKYIGKFLGRKWYEVIISIDRGGKIWVSMPFRWNYKPYKPKRLISVDINLRKIVVHDGRCIRRIDTRFIEALYLKHIAEDVQKRHSYAWRRNEKWLNIIRAQHRKSKDIVIDWARKFSKYIVLKAKRTKSIIVLEDLDRLWFNTSRKSSRLADKLSRFAYRKLQLAIITKALEYNVPIVLIDPRNSSTLDAGLS

SEQ ID NO: 9342 - protein, 298 aa, unknown
  TnpB Polypeptide
LLKNSENFKQLPAATAQQILILVEKNWKAFFKAMKEYRKHPEKFKNKPALPGYKPKDGEFMLLFTNQQIKIKSNKVEFPKKIVLEIKTRLPDETVLGTSSIVPKGVGFILNIVYKKTIKPIIETTKNILGIDIGLNNLVTIADNIGKTPIIVKGGIVKSINHFYNKRKAEIQSNYDLNGIKKRTKQLNRLLVKRDFKIKDFFHKTSRKIIAVCKMNSIDTIVIGHNNDWKQKIDIGKKNNQNFVSVPFNKLLEMLKYKAEEEGIKTIIVNEAHTSKCSFLDDETIKHHARYLGKRIWC

SEQ ID NO: 9343 - protein, 422 aa, unknown
  TnpB Polypeptide
MKMLSEVLTEVNRTEQIWLNANKELSKLCHIAKNLYNKAIYIIRQEFFKTGKWISYSQLCYLLKNSENFKQLPAATAQQILILVERNWKAFFKAMKEYRKHPEKFKNKPALPGYKPKDGEFMLLFTNQQIKVVSNKVEFSKKIDIEVKTRLSDDTSLGTSSIIPKGVGFILNIVYKKTIKPVIETTKNILGIDMGLNNLVTTADNIGKMPIIIKGGIVKSINHFYNKRKAEIQSKYDLSGIKKQTKQLSRLLVKRDFKIKDFFHKASRKIIAVCKTNSIDTIVIGHNNDWKQKIDIGKKNNQNFVSIPFNKLIEMLKYKAEEEGIKTIIVNEAHTSKCSFLDDETIKHHDRYLGKRICRGLFKTLSGKIINADVNHLTSFGDLKILKGFLNGAYNIIKKAIPNAFANGIQGAGCHPVRLEVY

SEQ ID NO: 9344 - protein, 331 aa, Deinococcus sp.
MESITPPRRNKAFIVRLYPNAAQVERINRTLGCARFVYNHFLARRIETYRQDGKGMTYAATDKALTLLKREEGTAWLAEVDEFALQQSLRDLERAYQNFFRTTKKSGKKVGFPKFKKKRTGEAYRTQFTNNNIEFGEGRIKLPKLGWVKTRGQREMQGKILNVTVRRVHEGYYEASVLCEVEIPYLSEAPKFAAGVDVGIKDFAIITDGKEFDHHANPRYYRSTLSRLRKAQKTLSRRKKGSARYGKAKTKLARIHKRVANKRQDFLHKLTGLTPKLGHFRVETRFKNERTRSSSLFHPVAGMTAACAVSCPHMGTAGRPPASLAHSSGVR

SEQ ID NO: 9345 - protein, 408 aa, Proteobacteria sp.
MSYRTIKIDWLPQSGQQWKTFTEARLEAGRLWSWLVERHADARQPGGLWPSKADLQREIKRQFPCLHSQSAQQIVGDFCEAIASAETLRKHGEPYDYPHKKPRYRQVIFTNQGAKLRAHTLSLPCGKAGTLHVRLPKGVALPGRLMEVRLSYGCIELVCAMLEEARTGGATIGIDLGVNTLIAATDGDQALLLSGRAIKATMQLRNKRLAEIRAKQAHTTQGSRRHRRLQRAKYQMLRATKNKIRDLCHKATRKVAEVFPNATAYVGAPFNDAAQKMRRVQAQTVASACNRKIISLLNYKLAACLEVDERYTSQTCPVCGARSQHRRTYRCTCGCNAPRDVVGSVNIRTIGIGGAMRPGCSVPNAIHWAYPSKYPATCVAGSPSDTGQVARVETREAAGACAPAECHS

SEQ ID NO: 9346 - protein, 457 aa, unknown
  TnpB Polypeptide
MNKIRKGEVKIYKGKEYIAIPEIEEESCTGCCFYDKGICSIDHANDPNCLHSGMIWEQKENGMSDIKEKAIKLAIEAMKPIPVYSSPCYSINDSRSPEEKHEEEMRFCREFNDLKCEMLIDMAKKIEEGDYIRFYTIILYNISKIVYNYFLYHTFASKDSSMLKAYKYRLNPTSEQISLMEKTFGSTRFIYNWALRMKIEACQDDKKSLTAVDLCKKLTDLKKQEEYTWLNEVSSECLQQSIRNLDQAFTKFFREKKGFPKFKSKRGSRKSFKNILNVHIDFDNNRIKLPKLGWVRFYSNQVFKGKVGTVTVSKSSTNKYYVSILVDNGIKLPGKSPINPDTAVGIDVGIKTFATLSNGSVFENPKYLERSSARLRCLQRRLTRKQKGSRRREKARLAVAKAYEHISNQRHNFLHHVVNNILGENQTVVIEDLNVDGMMKNHRLARSIASCSWSEFF

SEQ ID NO: 9347 - protein, 360 aa, unknown
  TnpB Polypeptide
MVVSGRWVNFYFKTPGRFLEKGVRPIAPDIVVDSHGRVMFNWFAEIPVEQTESSNRYVVGVDVGRNSAAFSVVVDVTTGNPVEASGGNRRIRTLENRISRTENQIRNLRRAGRYEEAALHREGLANRRNELSILVGQEVADLSFRYDNALVAVEDLSGIRNTMSHGRWVRGQMVQRATDMVETDGGRVMKVNPAYTSQKCHVCSTQMDMRDSRRPRCLVCKVTWDRDENAAINIAKRAPHGKACSTRKRHASPKSRRNSKGSTTTLRHPLSKGRPTPKAPQNRPQDSHMLDHSKRFRREKKEGGATTRTTCAVGWSPVVKTDVSVPTVGSSCEDVQTTSRTTTPCSAISRETTSYGDTKV

SEQ ID NO: 9348 - protein, 512 aa, unknown
  TnpB Polypeptide
MSPKTVVSRTYPRVPYAAFDKDGGPLDLDEILNGVRKDAELVAHYALKEMTEQNLALVTYFDRLKPSGAGYMMGLRLPAQVKNQFKSGASRLERMFREQVVTNLRSWAARVEVMTQTSNRYVSAGWKMTASDSKPSSMRPRLALSATDLGYHKNFSVTLDLISLDMVVQGKWVTLHFPTPPQLIESGCEPGVPDIWIDKNDRVVFGFHGKTDPGRPEFSERYVIGVDLGITNPAAYVVWDTEQKKVVERSLLGQRARSLNNKIKRTQTQVASLQKKNRSDEAVSHREHLSNRRRELSILIAQELANVSWRYGNAIVSFEDLSHIKNTMAYGRWFRGEIYRRTRDMVEADGGRVMKVSAAYTSKRCHVCQTDLDMSDYSQPRCTTCGITHHRDLNAAANIAQRVNVKKACETRSKHATKTKRVRKSKCHSKPLKHPGTKNRPTPKAPQNKPKTHTRTYPPLSSKEVSVRMCPADSRVSVVDHRGDSGFQTISGTTNPTENLSASTVDWFYPEE

SEQ ID NO: 9349 - protein, 510 aa, unknown
  TnpB Polypeptide
VKYYDTVTRYRFTSDDGVDVEKVGRDLSQMVTWMAEAEHEMLASQEFHDLALKALKGDRPYGALTSWGRKQLSRYDFSFQNHNMNEMLVSNVVSTLELYAMSVGLFQVMSTHPKETKPEKILSYYRSTYPAASQPTSGMVRAHLIRFHKKGEKKASLPGVSAKLNLAVCDTYFAPKASRGENDSLNVVVQVKTPSYGITKIYLRLPDNESRFGEGKVCRPTIRMNNKGQIVFDIAIEHEVQQRDTNKVVGVDLGKIEPFVATVIDPKSNHRSAPYHTNYKRRLGLLVKKEQQCRDLSAHLYKRADLCDKHNRTDHADVLRTEAKRVSAKATRIKHEISQCIANQIVSVADQNNAHVSLENLSWLDSRGGRWPHAEIQSRIENTAKRYGLKIVKVSAKDTSRTCSHCGGKVSNNTKTRVGACNTCGFELNRDVSASREIALRATSPSSRSRERMRSLLRQRAKMRSSAATRQSKPVTALGGNQGHTGTSSNGLEATLMMVRETLDSRGSPT

SEQ ID NO: 9350 - protein, 451 aa, Salmonella sp.
  misc_feature (169)..(261): Xaa can be any naturally occurring amino acid
  misc_feature (349)..(449): Xaa can be any naturally occurring amino acid
MKQQVSFKFRLRPDGQQEREMRRFAGACRFVFNRALALQNENHEAGKKYIPYTKMASWLVEWKKDTETEWLKDSPSQPLQQSLKDLERAYKNFFQNRAAFPRFKKRGQNDAFRYPQGVKLDQENSRIFLPKLGWMRYRNSRQVTGVVKNVTVSQSCGKWYISIQTEREXXXXXXXXXXXXXXXXXXXXXXXXXXXXXXXXXXXXXXXXXXXXXXXXXXXXXXXXXXXXXXXXXXXXXXXXXXXXXXXXXXXXXXXXXXXXXLHKVTTIISKNHAMIVIEDLKVKHMSKSAAGTISQPGRNVRAKSGLNRSILDQGWYEMRRQLEYKQLWHGGQVLAVPPAYTSQRCACXXXXXXXXXXXXXXXXXXXXXXXXXXXXXXXXXXXXXXXXXXXXXXXXXXXXXXXXXXXXXXXXXXXXXXXXXXXXXXXXXXXXXXXXXXXXXXXXXXXXXPL

SEQ ID NO: 9351 - protein, 319 aa, unknown
  TnpB Polypeptide
MRPRKGRCRIEVTKANIAYKFELMPTREQKRIFAQAAGWRRFVWNKAIELQKRCLEQEVPFLKYTELAGRLVLWKKEDDMLWLLEAPSQALQQCLMDASAAIQAFKAKKKGFPKFQARGDGDSFRIPQVRPTDWDEANGRVRIPKAGFVRFRKSRPIQGKIKQMTVSVECGHWFVSVVTEMDFANDGPRRPGEVGIDLGIAQTVTLSDGTVFQLDVESIKKHEKQIAVLQRQLCRNKEARQKLAKLGKANPFDKREPSRKRRRLKAKIQNHHRCIRNIRRDFMLKMAHTIAQNYGGVAMEDLKLKNMTKSAKGTVEEPG

SEQ ID NO: 9352 - protein, 366 aa, unknown
  TnpB Polypeptide
MHKAFQYRLRPTAKQATTLALHLEECQMLYNHFIADRIQAYKDRSESLGRYDQINQLPLLKTDRSTLKQVHSQVLQNVAVRVDLAFQAFYRRCKDGGEKPGFPRFKGAGRYDSLTYPQATAFRLDDKGLRLAKIGCLRGVWSRPLEGTPKTCTIRRSATGKWYATIVCKVEAQPLPKSDEVVGIDVGLEQFATLSNGETVANPRFFRQDEKALAKAQRKLSKAAKGSPERQKSRKVVARVHERIRYRRHDFVHQHARRIVNRYGLIAVEALHVKAMVRNRCLAKSISDAAWSQFRRVLSYKAEEAGRLLVAVNPAYTSQDCSACGHRLQKALSVRRHVCPCCGLDCDRDENAARNICRLGLQSAAA

SEQ ID NO: 9353 - protein, 390 aa, Lactobacillus sp.
MIKTHRIKLYPNATMRRAFQLLFDYRRYCYNLALESWNGMYDESLFMDDKSLRPNERKVRNELVNNKQDWQYELSARVLQLAVHDLAQGWRNFFNPQMPNHGRPRFKSKKRSRNTFTTDRARVVNKKLRIDRPRGCTSWYDIRMAEPVRWAGQLKTATVVEEADGYYVALVVEVDESVAVKAGHTVTGVDANIARFDYRDATGYQSVSTMSAKLLRLYDRITHYQRLLARKRVANPSNFRSQNYRATRAKLQRDYQKVTRIQMDLLHKFTHQLVQTNDVIVIEDLDNLHMHMNKRLAKNLHRSLFGKFKKLMQYKCAWSGVKLVMVDRFYPSTQRCSQCSFVKTGADRIALEGNRRHHTGHDQYLCYQCGASMRRDQNAVENLIQYAMVN

SEQ ID NO: 9354 - protein, 560 aa, Mycobacterium sp.
VSRTQLRRIDDPVVAAGPAGIRVRTRLHLSDDEAAGLGEIGQYLGSVYRRELAHRISLGQLDRKAHGIWRAERKRAVTAMASSRWAGAITRAVEDQYQLGMRALVAEVADLQAAIAVLDARCAVRPGEVYAPDPDAAAVSRRRSRRPVRGYASAGQRFSKTRRLAALRSRLVAAQAALQAGRPSVTVGGNRLWRTRHHLDATGIDEQQWRQRWDAARLFLTADGESGKPGGNETIRVDEHARLRVKVPAALVDRLGSYLHIAAPVAFTHRGDEWAARVAGRRAVRYDISLDPQRGRWYLDASWTLTPQPAAGLVEDLRAGPVLGVDLNADHLAACILDSSGNPIGEPLTTSVETAGLRASRRDGRVRAAITTLLDIAESHQCPAIVVENLNFADARATGRETLGRGRRGKRLRRTVAGIPTRQFRCRLTAMATRRGIAVIGVDPAYTSRWGAQHWRKPLQQQTSDPTVVTVHHGAAAAIGRRGLGMPIRRRPAGPRTQQRMHAGTPPARPVRTPSTTRRCESPGPPTRPQRRRGAPVHQTTHTASGQHRSGRTGLTPAQY

SEQ ID NO: 9355 - protein, 507 aa, unknown
  TnpB Polypeptide
MQAIHTVQVLLKPSKYECQEIDRRFHALAHLHNVCVKHARKCMIRLQHDKQYSEALQLYHELSKKEKLSKKEKSQKSELSKKLEDRRIELGLSKAALERYLKVCGKRFSKLLSSQQVQTEADRVWSGVAKCLFENGKGLHFKKYMDFDTIGGKSNKNGARFDLDAMYVNWIGLSLKCYLPKSENSVAYVWESLKGGISYCNIKRLMFSGGWRYYAEIVIRGNAPTRVSIGTSTMGIDPGVSTIAGVSEDACVLEELAPNAIRYEKRIQTISQSMDRSRRISNPNKYNEDGTINRSNRDPWKHSKNYVKMSRLLKSLYRKKHAYIIDSHRELCNKLITIARYFPVEKMHFQALQKKAKETKRQEKKTEVKQKDGTVKVIQKYKCKKRFGRSINRRAPARFLLELQRKVEAVGGVYAEVDTKEFKASQYNHVTDTYEKIPLSQREKEIGKRTVQRDLYSAFLIRNTDLDFKHPDREKCEYEFEHFANLQEQLILKMKESGLSMRQCFGF

SEQ ID NO: 9356 - protein, 471 aa, Mycobacterium sp.
MSSDKSAGEVDYADHRSDKPHIRAYRFALEPTPLQEEQLRSHCGAQRFAYNWGLRLVKANLEQRAAERTYGLSDQELTPALNWSAYSLRKTWNSVKSEIAPWWQENSKEAYSSGLANLATALRNWVASQSGDRRGRPTRFPRFKTKKSHLSCRFTTGVFGLINSDRRHVKLPRIGKVRTHESTRKLARRVDRGSARIRSATVTFTRGRWFVSFSVEVYDSPALDVRPHHVVGVDLGIRNLAVLSTPVPGLSDANGVVPNPARYETSLKRLRRLQRRAARRVGPDRRTGTTPSRRWIRAAAEVDRQHARIANHRTETLHRLTTRLAERFETVVVEDLNIAGMLRNPHLARGISAAGWSELRRQLKYKTCWRGGSLLIADRFYPSSKTCAGCGAVKANLRPSQWVFSCDACGMSMDRDQNAARNLAAVAYRIADDASSPSCGATKNEPAGNPQNGGRHGRGYRHGKPLEGNVA

SEQ ID NO: 9357 - protein, 613 aa, Rhodococcus sp.
MGDDHGVEVGSLMADAGLPALRQFSFTTRAHVAVDDATGEPIGLDDVDTRVGWLLDLIWGAEAHMLSRLWQPATFDVLAAGVDRQGRKLPMQGHVAAARLGWTPHYPDGVYVPSRVTRVVTAQVMASLRTLAYRDTAIAALSERFDPATGTLAPPTEPGDWVPLGFARGVVRQFTARARRTDGAPSTRLRITDMQGPPQTSAMARLSAADRQLAHITVTDAVMTLTVKLPTTAAPTGRAQWRRVRLTATIPVHLHGRPISVWHLPTLVLDHRGLLLRCAATELVPDCDLGSATVAVGVDWSPSTLGAAVTAAEGPEGLVSDYRGVTYDDRGLGTKLARLQTEGQMLHRKAARLTRLAATAPPEVRTQLEEKIAVLDAHRTAVGIKRGKINRELAFHFARQVTDYATAAGAQVIAVEDLTTLETRGHGRVNNNRAAQSARRHAVTALAHTAAEVGIAVVSVPARGSSARCPGCDEPLSRPGGYHSAWCSGCRVGGNRDHVAGVNLAKRALLGRTTVTRRRGQLPAIRVAKHAPVRRCCDKTGPTPRRPRHRRVRHSLPTVTPRVGVTPNRYVPAPEASVWDTVEPVPPHGDAGSRDTRPSPAPATQVADSMRST

SEQ ID NO: 9358 - protein, 382 aa, unknown
  TnpB Polypeptide
MESLLGRLNWLYNQALERRKTAYLEHEESFSFYDQCKWLTQLRAANEHGLGELALGASRGMLRRLDHAFQAFFRRLRAGEAPGFPRFRSIRRCVTIDVADPHSGMVRCQNGHYLIRVKGFPRLRAYSGRSLPLDAPLKAVRLTKRGRKWEASLVYEVARQALPASVSAVGIDLGVRKRMTCSDGTRYARARRNRKRQRKLQRALARCQQGSRRRGKRRAALARRARKEHVRERNACHRATTEIIRQHGLIAVEKLRTKNMTRSGKGTAAEPGSQVKAKAGLNREILAQNWSLLRSQLREKAKWAGREFVEVNPHYTSQQCSRCGARNHPGKSETYRCTCCGLVADRDVNAALNILAAGVIAAGAQTWAVGPCVAPEPYVEAA

SEQ ID NO: 9359 - protein, 396 aa, Caldicellulosiruptor sp.
MYKTQKNHIRCDKQTYRAVRILCRLSKNLYNYALYHVRQHYFKTQEYLRYENVYHLVKGNENYRLLPSQVAQQTILAVDQAFKSFFGSLKAKKKGKIDKKISMPKYLPKDGMFLLSFPEDQFKVEGNKLRLSLGRNFYKEFGTKYLYFELPVTVSGKRIKEVRIVARFHGKWFEIEYVYEEEEQSCDLNKDRYLSIDLGLDNFAAVVDTIGTAFLIEGRYIKSVNRWYNKEKARLQSIYSKQGVKFGKKLAQISLKRQHIIDNFLNQAVNRIVKHCLNNQIGTVVVGEMKSIKQEIGLGRVNNQNFVSIPYDKFKRKLETKCRYYGIEYMEIDESYTSQRCSRCGTVKKSNRKYRGLYMCRDCGYVVNADINGAMNILAKVAGESAKIADSLVVGV

SEQ ID NO: 9360 - protein, 267 aa, Halobacteriales sp.
VYYAYKYRIDPTDTHRERLAWTVDTCRQVYNHFLYRLDQHEETPAMTTLRSELPDLKEWWTDLRDVYSRTLQVVVERLYDNLRGLSRLKEEGYRVGSLRWKPPREFQSFTYSQRGFKLDEKGGRAVLHLSKIGDVPIVLHREIPDDARLKQVTVKQEPTGEWFATFGVEVDREAPSKPGEPEKVVGIDVGILTFAHDTDGHAVGSLDLADERNRLDRERRKLSRKEHDSANWERKRRAVARRYADLKRKRRDFCTSFRRIMPASTTS

SEQ ID NO: 9361 - protein, 386 aa, unknown
  TnpB Polypeptide
MLANKFRLYPNKQQTEKLDFALDICRQAYNIMLGELRDQVIIDRNMIQAILPDLKICEPRYREVYSKTLQYECYKLFSNLSALSALKKQGRKVGQLRFKGKKFFDTITYNQSGFELEHTFSKNGRLNLSKIGNIKVKLHRLPDGNIKQITIKRENDKWFALVISDGKTRLEHGNKILGIDLGINHYLVDSEGNKVEHPKNYEKTQSRLKMAHRKLSKKKKGSHNRLKAKKSLNRIYEKINNQRNDFLHKTSTDLIRQCKIIVVEDLDIKGMMEQKHFNAKNIQDSSWNKFVQMLEYKAENSGVQIIKVNPKDTTKTCSDCGHIQKMPLWVRTYKCENCLFEIDRDENASINIKQKGLSSERAYVEIMLDSSSEEQLSMKQEAITSK

SEQ ID NO: 9362 - protein, 418 aa, Lachnospiraceae sp.
MLLSHKTTIKVNSDYSNIIGHMCYAAFKLWNVCNYERLHYKELGFDEYPNWYYQKKAHKDDLWARQLPSQTAQEVCKILDKSWKSFYELNKSHGIINPKPPRFKHDGISITYMQKAIVHEPGSALIRLSLSKHLKEYMLNTYGISEKFLFLENQIFKNTDTIKQIKIYPPVNGKCNIIVIYEINDIVPKPDNGNYLSIDLGIHNLMTCYNSCNGETFIVGRKYLSICHYYNKKIAKTQSIWSSQQYKTGVKYPKSSKRINKFYIKKNNAINDYIHKLTRHIVNYCVANDINTVVIGDITNIRKSKDFGEITNQKFHALPYKKIYIMLKYKLAQEGISFIKQKENYSSQTSPLKPCVNKSNTNKNNRVKRGLYQDGVYTWNADCVGAYNILRLYFSAQKIDMKLNPMSIKEPFISKVAA

SEQ ID NO: 9363 - protein, 445 aa, Lachnospiraceae sp.
MILTETHSIKLNTKTKELFTKIDSFTLCSKNLRNYTNYIIKQCSRISYKLKRGEILDSWEKGFIYRINCVIYKYNHIDRKKPIKEVKRIDETNGFISNAYFLAWYLKDFEVYKQMPFSTSAQICIQMLCSDWKAFYASIKLWKVKPELFLGKPKPPGYCDKETGRFWVSLTYQNIKVDDKNYIELPKVFSGIKVKARHTDIKQVRITTTKNQIKVQLLYKQEPKKKTSNKAIMGIDLNVDNLTAIAFSNNAMPIIIDGKPLKSNNQWYNKEKARLQEIAKKDNDRDETNRMSRLTQRRNNKVKDYLHKVSRMVVDLAIQNNIGTIVIGNNQGWKQEVNLGKKNNQNFVGIPYLTLIEKITYKASLVGIKVEIVDEAYTSGTSYLDGEMPIPEHYNKKRRKTRGCFRSNSGEFINADINGAYQIIKKYDNIVPIKHREKVVTLKVA

SEQ ID NO: 9364 - protein, 372 aa, unknown
  TnpB Polypeptide
LEIYRAYKLCIKPTEAQVAEIENTFRCCRFVWNHFLERKSKSYQRRGESLSYYGMKKLLTEMKAYLPWLGSCNRHALDFTVQHLCDAYDGFFRRCKKGKGKVGYPRFKGRKNPKQSFTTDGSVIVTEKFVQIPSIGKVKRGKDKRAVTGVPVNVTVSRSASGKYWASVLCKEEVEPLPVLNTEVGIDVGLHVFAADSDGNTYENPHCLIHSEKRLAREQRKLSRMRKSSSNYEKQRCKVAAIHERIVNQRRDYTHKLSRKLVDENQVIAVEDLNIKGMVKNHKKAKAVADVSWAEFFRMLEYKSLWAGRTFLQIDRFYPSSQTCSSCGYKNAAVKDEKVRDWTCPQCGAHHDRDINAAINILRKAKDTCTAA

SEQ ID NO: 9365 - protein, 274 aa, unknown
  TnpB Polypeptide
LVCAIGKETFAVATTQGRIKLGIINNPFIKEDYKTFSTTCELSYRNGNWYLTVFVETECEEPLPTKDVLGIDRGCINIAVCSNNQFFNSKHLRNIKGKYRHLRKKLQAKGTRSAKRLLKKLSGRENRFVKDTNHCISKQIVALPFDTFVLEKLEVSSQTGKGKAFNTRIANWSWYQLEQFLIYKALLKGKKIEYVDARYTSQKCSVCGYVYRGNRSKKNSSDFHCRRCGFRCHADLNASRNIKNNYIAMLGSASHRRLLSISQTPQPELETVLS

SEQ ID NO: 9366 - protein, 338 aa, unknown
  TnpB Polypeptide
VIVQQAYRYELDPTRHEEEYLRLHAGAARFAHNWAVERCRRAGRPISAIVLHREWNAWKRRNAPWWEEVSKCAPQEAFRNVQRSYTNHRAGRAREPRFHRRGVKDSFRLTGAIRVVSGRVQLPRIGEARTKESTHKFHGRILSATVRREVDRWFVSLAVERERTDPVPVVGPVVGVDLGLSSFAVLSDGTRLDSPKALALSLRRLQHRSRLHARKERDSKNRARSARSLARLHYRIRCRRRDFLHQATTELARTKSVVVVEDLAVANMARNHSLARAISDAGWSEFRRMLEYKADWYGSRVAGSSPETVNACGADVSPVLTDGRTAGSQESERISTLG

SEQ ID NO: 9367 - protein, 174 aa, Lactobacillus sp.
MARRRIGAKKAIARDKHEHPGNVRTLADFANYQKARRKVAAIKAHIANQRADQLQKYTTWLVRAYDLIVLEDLNVKGLLKNHKLARAISNASWGKLVTMIQYKCAWYGKQLILVPPAYTSQECAVCHARNHRLGLSKGQWLKVREWDCPNCGAHLDRDVNAAQNILSKGLKQSA

SEQ ID NO: 9368 - protein, 432 aa, Acidobacteria sp.
MSNEKHLRKTTYRLYPTPKQVVALETLLRSHQQLYNAALEERIDCYRKTGKSLSYADQCKSLTVLRTDLPEWAAAANCSSQQMTLRRLDKAFAAFFRRVKAGQTPGFPRFKSLARMPGFSFKSPGDGWRFAPNVSEPDAEGMTRWTQHGSLRVSGVGQLRARGQARQGGEIRSSDLLFRHGRWYLSLTLDIGRPERERTGDEAMAFDWGVQTFLSGVTHTGEVLHIDNPRWYQVDKAKVAALAQAVSRKRNKRSNRRRKAVRVLAAAKGKTARRRLDWSHKLAAQLAARFALAATEQLTIANMTRSAAGTVDEPGKNVAQKAGLNREILDTAPALFTSLLRCKVLETGGEWVDAPTRKLKPSQRCPKCWAVAKKTLSERVHLCAECGHTEPRDVASARVVLRYALEVNQTGREPRLDGGVFRPRETPSFAQA

SEQ ID NO: 9369 - protein, 107 aa, Clostridioides sp.
VIAVEKAYKFRMYPNKKQQELINKTFGCCRFVYNKYLAKRIEVYKNNKETFTYKQCSSDLSNLKKELNWLEEPDKFSLQNALKDLDNAYEKFFKKKAGFPKFKSKKD

SEQ ID NO: 9370 - protein, 392 aa, Caldicellulosiruptor sp.
MIITYRYRLYPTKEQERQLKKTFGCVRFIWNYFLAYQKEVYQEQKKSPNAFTWIRQLQQHLKREYPWLKEVDKFALENEIKNLEQAFKRFFRIQAKYPKFKRKKSHYFSYTTNFTNNNIQVDFGRLANNTKLNRCWGRIKLPKLGWVKARIHRTFDGKIKTATIKLFPTGKYYVSITIEQDKIENPKINETPPNFAIALDLGVKDFFVDSSGRHVENPKILAKYERKIKKVQRELSRKKVGSNNFEKTRKKLAKLYEKVANIRIDFLHKWSSQIICENQAIICEDLKVKNLVRHHHLAKSIMDVSWSKFVEMLEYKSKRYNRIFLKVPSNFPSSQICSNCGYRNEALKDLKIRTWQCPGCGVVHDRDENAARNILKQGLLQLGITVAVENSR

SEQ ID NO: 9371 - protein, 367 aa, unknown
  TnpB Polypeptide
MIVIRTIKLKLNVSSDNRQSLLQTMRDYTVAFNICSKWGFESHSVSKINCHNATYQNIRQSVPNLPSSLVQGARDVACESLKSVKCHFKPLRKEYSAMRYNSRVIRVCLDSKYATLSTTDGRIKVTFGIPEYYRQYLSWKIKSSTLSLRKNDNTFYLHCQLETDTPKVIMEQTVLGIDRGIVNIAVCSDNTFFNSSAVKNVRSKYAHLRSELQSKGTRSATRKLRKLSGRERRFVTDANHCISKHIVQLPYTVFALEDLSKIRVQKRRGTEFNRKLNNWSFYELERFIRYKAENVGKQVITVDARYTSQKCSACGHVYKGNRNGSQYLCRNCGFELHADLNASRNIAHDGISVLGRLSVNQPIVACQ

SEQ ID NO: 9372 - protein, 400 aa, Lachnospiraceae sp.
MKLSKVVRLQPNTYQEQMFRQFAGTNRFAWNQSKAFYDKVWNDNKEYASVQDMIKHLQDLKHNSSDYAWLNTIPEAITKQAIKDLQKAYKKAYKDRKTHKPDPKNSDKYFPKFKKKGKSKESFFQRTDKIKKTDDTHVKITGIKKPVKCIDLKGIDLPEQILNPRISFDGKYWYLSYSYEVEENDIIDFNRDKLGIDLGIKDLAILSDGQHFGNINKTPEVKRLRKRLKHLQRKISKKYEANVTYDNKGNKVFHKTNNIKKLEKQRKLIYRRISNIQTTYMYEVAKSVMKTKPQTIILEDLNIKGMMQNPKLAKAVQEQNLYKFRQIIAYKGKKNGIRVLLADRWYPSSKMCSCCGNVKTDLKLSDRTYHCDICGFTMDRDENAAINIENCNKFKKIKVA

SEQ ID NO: 9373 - protein, 488 aa, Chlamydiae sp.
MSEQSTVLKLGLEVGLQEAQEIDGQSRICNWLYNHLVEKGSQLKQEFLKSGNKESAMTLYSKRGLRNLLPSIKAENPFLKVVHSSPLKNTALRVTSAIQDYQKSRKGKRKGKQTGWPQFRSWKKGWFSLLYDEPNKGFKVKGQQLILSLGMGIDRKQRSVKLGIPDAGLLKGQTIRNLRIVCELGKYYAIFTIEKLLPKTKPISKVIALDPNHKNLAYGVDTDRKGIEIAAPKWLKIYDKRLDELKSKKDRCNKKAKKVSALNEKEEPTGKEYYLPSRKWKKRDNALKKALRKRREQTKTFMFTTAHALFKEYDCVAIGDYTPNGNGDNSIMRRAMNNRSVIGRFKETLSWVAAKSGKTFLEFDEKGTTRTCNCCHYVEPEGIPLEVRQWQCPICQAIHIRDENAGINGLRRVLRDLSKKNKGEYPSIVSGSDLSFVQKRWAWSVLPSGVLVIPRGQDGGFNHSSKKLKRGHDSPRSKVDYLTNLSQV

SEQ ID NO: 9374 - protein, 383 aa, Halanaerobium sp.
MKLSFKFKPAINHKNLNIIRTLSFHTSKLYNIVNYSINEEKNKPVYTKLDEQFRDNWHCDFLHSHNRQQCLKLLAQNWKSYFRSLNDYKKNPSKYKGTPKSPKYKYLDSNPNEIIFTNYAIRIKNGNLLLSLSKKMKSMYKVDNLKFELSDKVQSFINMDSIQQIKIKRESVSNRWYLIVIYNKECKNNDGSNIMSIDPGLDNLAAITFKDSDKNYLINGKPLRIDRRNYVLNYLHKASRQVIDIALNENVGTIVIGDIKNIKQNSTIKSFVQIPVQRLVNMIEYKAKLEGISFIKINESYTSGCSAVDLEEINKSNYNKSLRVYRGLFKNKKTTINSDINGSLNILRKYLKDKCIPELIHGARDNGVVNPPKRISVAKQVET

SEQ ID NO: 9375 - protein, 305 aa, Methanosarcina sp.
MLKAYKYRIYPTKDQQDLIITHFGACRFVYNWALEQKIKTYEQSKNHLSRFDLQNILVHKVRRENDWLKTVNSQALLASLINVESAFTKFFLEKTGFPNFKSKKNTVQSFQLPQHYNLDFENNTIMFPKIGEIRAVLHRYFEGTLKTATILKSSTGRYFISILVDDRKEIPDKQEIFESSTIGIDVGIEDSAVISTGEKIENPKYLKNSLERLKCLQKRVSSKIKGSNNRNKAKLHLSKIHETISNPRTDFQHKLSFKLVSENQAISLETLNVKGMQKNHCLAQSISDAGWHSFVTKLTYKAEWL

SEQ ID NO: 9376 - protein, 157 aa, Moorea sp.
MDNKGTGKYDLSKYCKVLAKQFPFADELNSTARQAAAERAWSSIARFYDNCKKKVPGKKGFPRFQKHCRITFSDKKGIGKLKLKGTWDLWRFEKKQIKRVRIVRRADGYYVQFCVSVDVNEEVKPTGSTVGLDVGLKDFYTDSQGNTEPNPRFYRTG

SEQ ID NO: 9377 - protein, 367 aa, Nocardia sp.
VAGELEGSVFQRHSESVDCPHQLVLVPCGERRGARVRFPRFKGRRTGASCRFTTGAMGLAAADRRHVKLPRIGIVRTCESTRKLARRLDDGTARIRSATVSSRHGRWFVSFSVEVERSANKAGRPDAVVGVDLGVKHLAVLSEPVRGLTDREGMLPNPKHLDKARKKLRRLQRQAARRRLAASSDSRDEPSKRLRSTNRRIARLHARVVRARVDGLHKLTTALTARYGTIVVENLNIAGMVRNRRLAGSIADAGWGELRRQLDYKVRWNVGTLVVADRWYPSSKTCSNPRCGAVKAKLRLSEREFRCEHCGLVIDRDRNAARNLAGLATRRPPRVAGRRKTSLLEIRVSPVARSAEDIATGTPHLAR

SEQ ID NO: 9378 - protein, 424 aa, Nocardiopsis sp.
MASKTVKRAFKYHFYPTQVQAAQLSRTFGCVRLVYNKALAARSQAWEQHRERVGYSATSALLTGWKKTDDLAFLTEVSSVPLQQGLRHLQGAFSNFFAGRARYPKFKSKKKSRAGAEYTPSAFRYRDGNLTLAKMDQPLDIVWSRPLPEGASPSTVTVSRDAAGRWFVSLLCQDTITAAPVPEGVVGVDAGITSLVTLSTGEKITNPRHERRDRAKLVKAQRSLSRKARGSANRAKARVKVARVHARIADRRKDFLHKLTTRLVRENQVVVIEDLTVRNLVKNRTLARAISDAAWTQLRSMLEYKTHWYGRDLVVVDRFFPSTRMCSTPGCGHVCGRLPLNVRTWECERCGITHDRDVNAAINLKAAGPAAAVGPPLCDSGEARTVGAGAGVRPQREFFRSGRSASKQEGHGATREGAKASNHR

SEQ ID NO: 9379 - protein, 203 aa, unknown
  TnpB Polypeptide
MYAIKLELKLNNAERTLMAKHAGFSRFVYNYGLAIYKQVMDVKGGVTKKISAIRKVLTNFTKKKPEFAWMNQLSSRVYQNALIALKNGLTRFFKGLGEFPKFKRKKDKDSCTVDSCNGLVTVKAGNFIKIPTLGTFRLKESMPFTCASQTFTLSRHADKWYVSFAIHAEKVPPLFHYVEKVGIDLGVKTCLRFVSAQMDSLMA

SEQ ID NO: 9380 - protein, 293 aa, Clostridioides sp.
LRKKGNTEAKYPYKTKKFYIIPFKASAININAKGNLKLSMSKGRYLELDFNIENIKTAEIVWRNGYYLYYTFDDGIINPTPKGNNTVGVDLGKIHSIASITNEGIGLVISNTEGRSIKQFRNKMYAYISKRLSRCKKGSRQYKRLWKLKNSIRTKTDNQLINLYHQTTRKFIDFCVEQQVCEIVLGDIKGIEKNIKKKKILNRINRQKISQIEYGRIKDYIKYKAKEQGIEVKLVKENYTSQTCPKCSKKHKPTGRTYSCTCGYKTHRDIVGAWNILNKKHKYDLVDFSINHK

SEQ ID NO: 9381 - protein, 376 aa, Clostridium sp.
VIKAIKIRLKPTNEQEILMFKSVGCARFAYNWGLSKWEETYKQGGSPSKAKVRAEFNNTIKNDKKYLWLKEVSAQVTQYAFEDLNYAYNNFFKGLSKYPKFKTKKRSRQSFYVRYDAIKFKDGKVNLEKIGKVKYKTNYDIPNLPKYINPRCYFDGKYWYLTLSFEHNENQVELDKDLSVGIDLGVSNLAIVNSLDKPIKNINKSVKIRKLKKKLKRLQRQVSRKYEANKKEKKFIKTKNIIKLEKQIKLIYRKLNNIRLNHIHQATNTIIKLKPYRVVMEDLNISGMMKNKHLAESIQEQKFYEFIRQIKYKCEFNGIEFIQVDRFYPSSKICSCCGNKKENLKLKDRIYICDKCGLKIDRDKNASINLGNYKIA

SEQ ID NO: 9382 - protein, 416 aa, Halococcus sp.
MAIRRTVPVKLDVSDSAAESLFATILDFRFAANCAVDRARKENGYVETTKQGLHERTYREVRERVPDLQANLVQTARNRAADALKGVVARWKDGEYAELPTFTADFIDYNKRAATFHDDHVSLSTVDGRIDAEYVLPHEDDLNDTPHGKYLFSGDFNIGGATLHHRDGVFYLHVRTKADVDDTETSEHPTVLGVDLGIDNLAVTSTGGFWSGGLLNHRRNAYEKLRGDLQRTGTESAHRTIQSIGDRESRWAKDLLHNVSKELVAEAIEYKCSAIVFERLNGIRNRMLGAKKFHVWAFNQLYEYVEYKAEAVGIDVTKVPPQYTSQRCSACGHTAKGNRSNGDDEFGCQKCGYELHADYNAAKNIGWKYVRTGQKSRSGRAARQLALKSGTVNANGDFTPAENIGQSGSPPTSTGL

SEQ ID NO: 9383 - protein, 285 aa, unknown
  TnpB Polypeptide
MDSAYQKFFKEHAGYPKFKSKHDSHRSYTTNFTNGNIAADFERNKVKLPKLKEVKAKLHRNFSGQIKSAAVSQVPSGKYYVSLLVETEHEELQHTSHSIGLDLGIKDLCITSAGKKYINPQIIRKHEKKLIKLQRKLAHKEKRSQNYYKIRKKIALCHEKITNTRKDYLHKISHELISENQVIVSEDLQIKNMVKNHHLAKSISDVSWYELTRQLEYKAKWNGREYVKTDTFYASSQLCSACGYQNTETKDLSVREWICPVCGTKHDRDINAAKNILAEGLRKTA

SEQ ID NO: 9384 - protein, 494 aa, unknown
  TnpB Polypeptide
VSQKVCINNVGHSGASVFLGVDHCGNPRWTRNPERIMVWLCDGWRTRFNQRREQRPHNVPVKDEAGGIVDWRKEPLGGPDVADLLPDKEARLQYSWMAGIPAPILSSTDRIENTEWSAGLKRKKTVGGRVPGFKSRHRGLGFVCWRNKTKTGNAIFRKTGRKSGVVVIAGMNPTRWRRPGEKLHWRVIIHVRVSQPIRPYTSVHVDWTHKSLTFTNMPLPSPRTGDGMIGLDRGCVHTLALSDGTFMDMPKPSKAELKRLRYLQRRMSRQDRVNEARGGRTAKFASKRRRRTLSEFNALQGRIVRRRNDWIEKTTTRLARENVLVALEDLDVQAMTKRPKPKPDSAKPGHYLPNGAKAKAGLNRSILSNNWSRLMKRLKDKMDANGGNLVIVPAAYTSQACHQCGHVASENRDSQAVFHCVECGYEANADINAAMNILGRALSENGRGHRLGRGGPRWRPCEASTPSTQAGSSFGVRAVKGISAAKAGGRMSTT

SEQ ID NO: 9385 - protein, 378 aa, Bacillus sp.
MGVKRMMINKAYKFRIYPNKAQTTLINKTIGCSRFVFNHFLSLWDNAYKETGKGLTYGTCSAKLPAMKKEFVWLKEVDSIAIQSSVRNLADAYTRLFKKQNNAPRFKSKKNNIQSYTTKQTNENIAVVGNKIKLPKLGLVRFAKSREVKGRILNATVRRNSSGRYFVSLLVETEVQELPKINSYIGMDVGLKDFAILSDGTTYKNPKFFRSLEEKLVKAQRVLSRRMKGSSRWNKQRVKVARIHEYMANARKDYLDKISTEIIKNHDVIGIEDLQVSNMLKNHKLAKAISEVIWSQFRAMLEYKAKWYGKQIIVVSKTFASSQLCSCCGYQNKDVKNLNLRKWDCPSCLTHHDRDINASINLKNEAIRLLTARTVEIA

SEQ ID NO: 9386 - protein, 395 aa, unknown
  TnpB Polypeptide
VGDTSAEGGAFLASRTTVKIYSMTDTITKTLKVRVRDSTPKPLVARQQRSTRSGTTSMSSADDSFVSMACFYRPDDIQRYTNGSGKMLGLHSQTVQRVSAEYVTRRKQFRKRRLAWRKTFGARRSLGWVPVNTGAATTWRNGQVHFNGQHYKVWDSYGLSQYRFKTANFTEDARGWWYFNVAVEVPKAQSAGTGAVGIDLGCKEAATCSDGETLDGRWYRDQERKLAVAQRARKKQRTRAIHAKIANRRKDAMHKFSRDLVNQNAAVFVGNVNARAIARTRLGKSSLDAGWGMLKTMLEYKCEHAGIVFKEVNEAYTTQTCSCCGSISDSSPKGRAGLGIREWACSECGASHDRDINAARNILAAGHSRLAGNRLPNHAQRDWKARMSTRYQQQK

SEQ ID NO: 9387 - protein, 271 aa, unknown
  TnpB Polypeptide
MAEPLKYGGHVNGMTISRKADKWFVSFSLNVNVDLPAAKRKPSTLRCGFRHQDPGHHLRGPVTEWESPKPLQAALRKLARYQRRLAKKIKGSNGYCRLKMRIARLHKRIADIRANTLHQLTSYLSTHFSEVVIEDLNVKGMMANGRLARHIADVGAFEFRRQMSYKMDWRGGILTVADRWYPSSKLCSNCGHHKPDLTLADRVYRCEACGHEQCRDANASHNLEHYTARSAGINAAGDDGSAGPRKRTGQPASVNAEESTELGDQGLGKSF

SEQ ID NO: 9388 - protein, 391 aa, Roseiflexaceae sp.
MLRIWYDIFMQRTIRIQLQPSASQAASLADTAHQFTAVFNAVCAVGWEQQIINGVKLHHATYYPLKSAYPALVSDLLVQARVKATEAVKSAFALRKTGRTVGMPVSRACPPRLNLHTYKVDWESRTVRMSTTGGRQTIRFAVPPYNAAYAGYPTDTADLIARNGRWWLHVVVTVPAPTVAPTDQVVGVDLGLVRPAVTSTNRFLGKRGWKAIEGRLFKLKRALQKKATKRAKRHLRKLSGKQARFRKDCDHVLSKQIAYAVEPGGTIVLENLTDIRKRTMIKKHTVASRRVHSWSFAQLKSFVAYKAEERGCMVVAVDPRHTSQTCSRCGHTARNNRRSRDRFVCRVCDYELHADLNASRNVAAKYRASVGISDTGGLSSISLSYPSEQSA

SEQ ID NO: 9389 - protein, 412 aa, unknown
  TnpB Polypeptide
VIKAHKTRINPTEEQAVYFRKACGTARFVYNYGLAEWKRHKSENRDTPFGPMALKKEFNAIKRERFPWVLEVAKDVAENAFFQLGAALSNFSASQQGKRKGKKVEFPKFKSKHSRKQAFHLNNDKVKVRDHELYVPCLGWVARRIAESLRFSGKIMSVTISRRADLWFVSITVEMEKIDKPKSTGRRTVGIDLGLKTFAVLSDGARFESQKPLRHGRRKLRRLNRTLARRKKGSKRWWDARNKLGRFHYRVACLRSDFAHKATTQIAESYDLIGIEDLNVAGMVKNRKLAFSISDASWSEFVRQLEYKCEQSAATLVKVNRFFPSSRLCPKCGTINHELTLKDREWVCECGAAHDRDLNAAHNIRDEAVRLNQCPVVATSDKNARGPNVRPALAGSPGGSETARRSGAHIAH

SEQ ID NO: 9390 - protein, 363 aa, unknown
  TnpB Polypeptide
MERAYKVRLYPTKTQIEMINQTFGCVRYVYNYMLNLRQKLYKFFGVSLNYNQSSKVLTELKKHKEWLNSVDSTALQQSLIDLDSAYQNFFKKRANFPKFKSKKNHRGSYKTKASLRFENGLIKIPKIGWIKAKGYKEILGRILSITITKTKSNTFYASICVTEFEPEHFERTNQNVGIDLGLKDFAILSTGEKVKNHRILKHLEDKYRRLAKSLSRKVRGSSNYQKARIKLARFHEKIKNKRLDFLHKLSLRVVREYDIICIENLNISGLMKNHKLAKSFQDVSLYEFIRKLEYKAKWYGKTLSKIDTFYPSSQLCSNCGYKNKDVKNLNIREWVCPECGVHHDRDINSAINILNEGLRLLSL

SEQ ID NO: 9391 - protein, 390 aa, unknown
  TnpB Polypeptide
MADLNREAMNLLNVFRTIKVALPYDNALFQTAIAFNRACQIVLDYGSQAKTYNKNKLNRETYRKVREAVPNLPSALVQTARDQASEILKNTNFAEVTKKQLSVRYDKRTFKFYPDSNRVSLTTVFGRINFPFKRYAYMDKWKGEYTNAQLTVKRKRTFLNIQVKLPDKPMQPIQSQEILGIDRGIINIAVCSDNSFYNSNHLRAVKGGYQFLKRKLQSAGTRSAKRHLQRLSGRERRFARSVNHIISKAIVNKPYKVFALEKLNITKKKTNSKQFNRKLGSWSFSELQRFISYKAEELGKLVVPVNPRHTSQICSRCGYVDKKSRQGSIFKCRNCGFELNADLNAARNIALLGKIRVEQAEVNQPIVASDETTPTGMVDGSYKPTLFRGG

SEQ ID NO: 9392 - protein, 258 aa, Thaumarchaeota sp.
LRSISGHTPRSLTLTANGLSISLSKEIAEVEPVGAIGIDRNLDNVTTADSDGSTLRHDLGRATEIKARCRETKSHFKRNDARIRRVVYGKYGRIQRNRVNSLLHNVSASIVKRAKKKRFGIVMEEIKGIHRLYRKGNGQGTNYRARLNSWSFYELQRQIEYKARWEGIPVAYVAARGTSVNCSKCGSRTYPNGRRTLFCPKCDVSVDRDVNAARNILAKGRGVKFTPDGPPGARVEAVKGNEMTTPILRADGGKVTQG

SEQ ID NO: 9393 - protein, 355 aa, unknown
  TnpB Polypeptide
  misc_feature (19)..(19): Xaa can be any naturally occurring amino acid
  misc_feature (319)..(319): Xaa can be any naturally occurring amino acid
MFLAVQKDDFTPDSATRKXLEGLASLANNLYNQAVYESRQSFFEHGRKPWKVLSYPKIYAALKTSENAKLLHSQVAQQTMKSANEAFRGFKVLSRLWKLGELDHEPKLPRYRSKGGLYQVVFTGQSLTVNDGMIRIPLGRGYAKEQGQDCFHVPLPDRLANVQIRELRFIPTNGQWVIEYVHESMETPALSCLLQPERVLALDPGVNNLLTGVTNTGEAFVMDGRSIKAENQGWNRLVSRLKSILTKGKESTKGITSKQIQRLTHNRNNFMRDAVNKAARWVIDFCQQNQIDTIVYGRNKRQKESINIGGKNTQEFVQXPHYKLFSRIQQTLLGSWHPAHRNRRELYLSSFVLRP

SEQ ID NO: 9394 - protein, 395 aa, unknown
  TnpB Polypeptide
MEIAYRTLVLKYDLLRLPPEIAEKIPKLLKVQEEFRRWATEWAKSGGSLPPPEHNPLKYFAEEFLHAGKTLDWFKGLKKNVEVKKMRPPLIFNAQLRLSKEKDISRGVFVDLPKREVRVRKWSGKRGETIVLPLGDKAVKWILARVKEGGGLTLATVWIGASRRNSVMKLYVTLVFRREVAPMEVKRLLVVDFNALHNGLSWAVVEERRIVTKGILRPNVSKIAHMQKVVSKLDSVCAKKDKACDGAMAAKSRMWRLLRSWEDEAAKKLVHLALQYRAAVIVDVPEDSSVRALKEGGYSPERKILLNFGRLRKRLKGLAEWYGIPYREERLYSTLCPRCGAKMSVLPNRHVRCACGFEAHRDEVPFHWAIKRFSELTAFFLHRHGMSHDVSRCSM

SEQ ID NO: 9395 - protein, 199 aa, Methanomicrobiales sp.
LHPGDDPQAVDWIGVDLNTTGHLAVVAHPASGGVVMLGRWPERVEEEELCADRCRRYSSTSTYKRILRRRARERSIQGDRNREVAGEVVKMARQLWCGIKLEDLRGAGFAGRKEPNAPLPLSRHEGSLYHLQKLIEARAQNAGVCVVYVDPAFTSRRCSRCGEPGVRRGKEFLCRRCGYAAHADVNAAFNIAAAPPSRA

SEQ ID NO: 9396 - protein, 460 aa, Allochromatium sp.
MKVTRILRAKRPNKGKVAALREQARRLGQVRSEVWQRFGSISGVGLSDRRIRDAWLREGRTFPVSANAWKETLRDAKGDITANMEAAKVKARRRIRRHTQNKAEQKRLFSALKGHGWTSDPYLRRIMRQDWRRGRNHTHNQIIVRSDNYTTFQLGGRAWIKIPGLEKGQRIAIPLNTTVEPTGTLRLILKDAGLEVHYTVEAEVKHDCGARTLGVDKGYSEVLVDSDGEHHGQELGAILTDASDRLKAKYQRRSKLRALANRTRNPRKRQHIRQFNLGRKKLNRQMDQTQARIRDVVFQAVHTVVDKAAVIAAEDLTAPMSGKSFGKNVNRRLSAWTKGVIAEALDSVSSRRGSTVVLVNPAYTSQIDSRTGYLDGKRQGDRFHCFDGVVLQADQNAARNVLARLSDPDIERFTPYRTVKAILQARTERLRLGLLNPDSSCSPARVLSTESESPNEHFRV

SEQ ID NO: 9397 - protein, 397 aa, Lactobacillus sp.
MRSEKTTLIWVVMMPMIRTQKVRLYPNRHMVKALDRLCDYRRYCWNEGLATWNDMYDLHTFDSNSPRPSAYSVRNELVANKADWQYELSARTLQLAIADLGNAWQNFFDKSQPDWGKPAFKSKKAARQGFKTDRAKIAAGKLRLDKPRGTKDWYDIRISRHVDLSGVLKVVSVYRENGKYWASLPFEVELDVKPQTGDNSAVDVNVGHLNYTAGVVNTLPKRLRKLYQRIKFYQKQLTHKRIVNGNKATKSGRYVAMRSKLQRDYRRATNIQHDIMQKFTMDLVNNYDKIVIEDLSVKAMQMSHVASKGLQRSMFGYFRQALSYKCKWYGKKLILAESQYPSTQRCSKCGHIKSGNDKITLQGNTTHRTKHNEYVCYSCGAVFNRDENAVANLLDLI

SEQ ID NO: 9398 - protein, 547 aa, Streptomyces sp.
LNEAGKPFRPIRDPFVVQEATGVAIRDRLKDLTPQDEKILRLTGAHLGSLAAADLALYSRAGFERTNRSWATRKQDLTAQSSSRWAGSLTKGTHDQYALARRGQFAYRDKLADGVRMLMHRLSLPVGEKGAKGNPGGYRSQGEWFHKSRRLHILKTRLAAVENDIAAGRVHVVRGGKRLARNRHNLAAAGLTETGWRESWEAARWFLSADGESGKRFGNETIRVTPDGEVSIKLPKPLEYLANAPRGRFVLSARVAFGYRGAEWADRIAHHRAVAYEIHLDVLKGRWYLTASWKRPAIQVIPLQAARAGGLIGVDTNADHFAAYRLDAHGNPVGNPHRFTYDLTGSADHRDAQLRHALSQLLRWATRIGVRAIAVEDLDFSDGKTRENFGRKKRFRQLIHGMPTGKVKARLVNMAAEHGLAVVAVDAAYTSKWGTEHWKTPLTSSKRAMTRHDAAGIAIGRRALGYPIRRRTAPPRHHQSDGDGHRTVQADRGTPGREGLRRTRHGTTPQRAATGHAVTAGNQRAQHRSGHVAEHESWQQDSLPLSS

SEQ ID NO: 9399 - protein, 370 aa, unknown
  TnpB Polypeptide
VQGKILNPNKEKRHKLNIVLEKYIKAVKFFASFKIKDKKLLQQKGYKEARRRFNLSSTLTQTARDKAAELVKANEERELHIHRASIRVNYRAFKLVKRDTKMTPYWLYLKLDGEGAWYPIQFGERQRQMIDDALSDDSEWSLQQVELVKRDGEWYVYFTLEKPFKNYEPKTLIGIDLGERNLATVIALVDDKPTKGTFFKGSKIKEVRHKYFNIRKRLQEKGRMDVINGLKGKEKRIVNHKLHVISKKIVEYAKQFPSPIIVMEKLKGIRENFKKSKKLNRRFHSLPFRKLQNMIEYKAKLQGIKVVYINPKNTSKTCHVCGYVSRVEGKELRCPKCGLVYNRDLNASINIARALTRGTGRGYVNTLKGI

SEQ ID NO: 9400 - protein, 405 aa, unknown
  TnpB Polypeptide
MRRKPTPKAYKYRIYPTDAQVVFFAKTFGCCRLVWNKMLDKKMPAYKKKERIPQDTPAKYKDEFPFLKEVDSFALCNVQLQLEKAFKDHFRNRKQFKLSKFKKKRDKQSYTTNNTHNSIRIDFEKSLLYLPKIREGVKIELHRTFDGKIKSVTVSRTNDGKYYASILVETENPRNKVVEPKSKACGIDLGLGHFATITNDFGSYKVEHPKYLRRVEERLRRHQRSLSRKQKGSKNSEKAKLRLARQHAYISNARNDFLHKLSKAIIDENQVVVVEDINVKGLLESRLAKSIADSGWSKFLTYLKYKAEWYGRILIQVDRFFPSSKLCHRCGYKNDDLALHDRTWCCPKCGETHDRDVNASINLYFVGLGRPEFTPVEQALVDDRSPHGLPKKPSCDETGSSTTKG

SEQ ID NO: 9401 - protein, 348 aa, unknown
  TnpB Polypeptide
MIQTQLKLRLTKKQETILDEWLLSLTRVWNWAIRKIELDGQDKVYHSKNDFQNLLANHGQKIGIASHTVQGMLRVAWESWSRCYKKIAKKPNLKGLRNKLNSIPFPDKIRRPQENKIRVPKIGKIRYHRQDIPDGIIKCGRIVKRASGWYICLFIDADPEAIEHKNDKVIGIDPGFKTCLTTSNGDKIEKPRRLKELAKRLAQAQRGKNRKLVARMQERLRNRRKDDNHKLSKKLVEENQEIYFSKDNIKKIAKKFGRSVAEAGHYQLRQMLEYKSIASGRLYAEVDSKFSTMTCSNCFSRTGPTGKAGLSVRNWECSECGFYHDRDVNAAVNTLLSGLGLSLECATC

SEQ ID NO: 9402 - protein, 373 aa, Armatimonadetes sp.
MKSAKTVRLDPADPAQLLAWLERFNKAANWLSGVAFRERLWHWLPLQRRAYREVRERFQLPAAATVVVIRKVASAYRNKQRRQHQATFRRRGAIPVYKHQYKRDGTVSLYGFRIPFTARPQLQLSSRHQAVLCYRRGKFILHQVVEVDVPAPASVREYLGCDLGTVNLLTDSAGEAYSGQAVEEKQRIYVHRRQRLQKRGTRAARRKLRVLSGRQRRYQRDVNHGIAKRVVAKAQRLCCGIALEDLQGIRDRIKARRRQRARLHNWAFGQLRQFIVYKAALAGVPVVFVDPANTSRTCPVCGHVRWAGRRHRGTEHSCLGAWRCADGRVRKGSDKSPSYVEGIIALRIHQDRKSYVFRAASGESDDAVSHPAM

SEQ ID NO: 9403 - protein, 326 aa, unknown
  TnpB Polypeptide
MNITTSYKVQIVGINKMLRPTVNKYREALTFLIPIVDKEWDIISTASGVKRKAIVEHLIHTTKDNVAKYPEFDQLFHKMPSYFRRGVIADAIGIVSSYRSKYENWEKNGKIGKPPRLQTKHYNCPIFYRDNTYEETDNPNIVNLKLYINNDWVWYHVHLRATDIKYIQKHCQNKEMSAPILERRYNKYYLRFAFTEKVRLNEVKVENQKVLAVDLGVNNDAVCSVMTADGTVLNRKFINFKSDKDRMYHTLNKIKKKQKKHQSVSKLWSYAKNCNEQHSIKIAQAIVDYAANFSATSNWFIDGAGVSMILSKTSRASTSTIIVRVP

SEQ ID NO: 9404 - protein, 440 aa, unknown
  TnpB Polypeptide
MNITTSYKVQIVGINRMLRPTVNKYREALTFLIPIVDKEWDIVSVASGLKRKAIVEHLIHTTKDKEAKYQEFDQLFYKMPCYFRRGIIADAIGIVSCYKSNYKNWENNGKVGKPPRLQTKHYSCPIFYRDNTYEETDNPNVVKLKLFINNDWVWYPVHLRATDIKYIQKYCQNKEMSAPILERRYNKYYLRFAFTEKVKLNEVKAENQKVLAVDLGINNDAVCSVMTADGTVLNRKFINFKSDKDRLYHTLNKIKKKQKKHQSVSKLWSYAKNCNEQHSIKISQAIVDYAVQNAVHCIVFEHLDTNGKISGSKKQKLTMWRKNYIQGIVTSKAHRMGIRISHICAWNTSKLSFDGSGEVKREKDNYSMCTLGNGKQYHSDLNASYNIGARYFIREILKPLSATVRSQLEAQVPSIAKRTQCTLSTLINLNAGLRTSVLFS

SEQ ID NO: 9405 - protein, 563 aa, Lactobacillus sp.
  misc_feature (265)..(265): Xaa can be any naturally occurring amino acid
VSKVIKGIKLRLYPNQSQREQLWQMFGNDRFVWNQMLGMAKERYQNNPNSLFVNEYGMNYLLKQLKCEYAFLRESDSTSFLVVNHNLAQAFKMLFRHRGGYPHFKNRHSLRQSYTGRSTCKVLARRRMQLPKLGSIRTSRTGLVGDAKIKRYTVSYEPTGRYYLSLQVETEVNQLPETRQSVGLDMGLADLVISSDGVKYGTFNAEWLEKQAVRWQRKYARRRYLAQCQVWKWNHNRFDHLEELDDYSNWQRARVNKARCQKRIXRHRGGYPHFKNRHSLRQSYTGRSTCKVLARRRMQLPKLGSIRTSKTGLVGDAKIKRYTVSYEPTGRYYLSLQVETEVNQLPEMHQSVGLDMGLADLVISSDGVKYGSFNAEWLKKQAVRWQRKYARRRYLAQCQVWKWNHNRFDHLEELDDYSNWQRARVNKARCQKRIANKLRDYLHKLTTDLVRNYDVIVIEDLKTKNLQKNHHLARSIANASWYQFRAMLEYKCAWYGRQLVVVKPDYTSQICSNCGFSSGKKPLEVREWTCPKCGIHHDRDVNAAVNILHKGLKAIGQGLALVK

SEQ ID NO: 9406 - protein, 410 aa, Ruminococcaceae sp.
VREVIHLRKRKEEDPTRHNKAFKYRIYPTTEQRIMLSKTFGCVRFIYNSELYFGMETYEKTGKPNIMPYARFKGEHEWLKEVDSLALANAQLNLESAYGKFLKEKEPTYSKKTKERAERTGKELTYYDYKWHPKFKRKNEGQSYTTNLVGNNIRILDGKLRVPKLGELKMKEHRSAPNDYVLKSVTISKTPTDKYYASILYEYMREIAEVIPEAIIGMDFSMGNGYVDNEGNKTQYPKHYREQEGKLGREQRKLSHMEKDGANYKKQNIKISMIHEKIGNQRRDYLHKESRKIANFYDLVGVEDLNIQAMAQALKFGKTVHDMGWGMFRQFLEYKMKDQGKHFIKIDKWYPSSKKCTKNKIFESLNDISKLSYDLSSAISDAATGYCKGEMDLDALVSLIEQKIEIYSNE

SEQ ID NO: 9407 - protein, 323 aa, unknown
  TnpB Polypeptide
MLTLLKRDPDHRWLAEVSSIPLQQAVRHADTAYRNFYRLYRAGKTRIVRTGKRRRTGLPRYKSRRDGEQSATFTRSAGFKVEHADGCRWAFLTLPKVGRIRLRWTRDLPSRPSGVAIMRHADGSYEASFTVLVEEDAKAPEPVHEACGIDMGLESLMSIVYTDGTREKIPHPRTLKRKARKLRRLDKQLARRKRGSSNYRKTRLKRAKVCRKIQNQRRDMAYKLASKVAGESQAVAMESLNVKALARTRIAKSLSDANWGRIIDRIRRLCLQYGRVFRQIDRWYPTARSAPSAVSEAAGNRWTCANGNARTAGPSWIATGTPR

SEQ ID NO: 9408 - protein, 388 aa, unknown
  TnpB Polypeptide
MTVRHVAQRIPFHPNNTQKALLERCFGDRRFAYNQQVEAFNTYDRESNPTPSYPNVTGIKNANGWLRDSPIPSNALSNAIMDFRKARSAYFRKAQYGKHRPRFASRNDNIQSFRNAMPIRRMDGNRYPLSRKLGSVRIRKRDRLRYPIENLSSWTVKRENRIYCLVLLFDVDIQPKTPAEGRIGIDLGVKDLLTLSTGEKISYGDRLKKLEADVIRQQRMLSHRVKGSNRYRKQKLRLEQAYAKLKHCRENMQHQLSHRLIEENQFIGLETLAVRNMVRRVKPKKSPDGRYMRNGQSCKRTLNRLIHRASWSGFVSKLVYKAEWYGRTLVQVDRFYPSSKLCHECGWKYKELKLSEREWTCRNCGTRHDRDVNAALNVLTEAERLFTP

SEQ ID NO: 9409 - protein, 376 aa, unknown
  TnpB Polypeptide
MWRNSRVLSYRFRLYPSKQTEEALFQHLGLCRWLYNRLLEELNKAKAEGRKLSQKDTQALIVKLKTEKPELEQVYSKVLQMVNYQLWSNIRTLSVLKKNGRRIGKLRFKGQWFKTLNYNQSGFKLEGKKLYLSKVGPINIKLHRSIEGKVKGVFVKRELSGRWFAIFQCKNAVAHLAKTDRAIGLDVGVKHFLSDSDGRQLENPKFYERSLERLQKVHRALSRKKKGSKNRAKARVKLARAYEKVVNQRDDFLHKLSRFYINNYDIIAVENLNVSGMVRNHSFSKRILDASWSRFFAMLSYKAENAGRMLVKVNPRGTSREYKHGELDRDYNASLNVLERGLAGLGRPFEPVKIKPLPVVIRASVIVEAGSPHPSG

SEQ ID NO: 9410 - protein, 408 aa, Synechococcales sp.
MYALKLELKLNNKQRTYLAQCAGYSRFVFNYALAFYNQIDHNDIKGSTSKKLDTIKILFNKSKKKEPELSWCSKYSSRIYQNAFRNLKTAFSRFHSKKAGYPNFKRKRNDCSFTVDSSNGVVLLAEGSKIKIPTLGTFRLKESLKFNCVSQTFTISRKGDKWYVAFAIDAEKIPPIIHEIVEPIGVDLGIKTFAVLSDGTTIESPMPYRKARTKLAKTQSHNRHKQMGNRRLKIPTSNNAKKYFKQLAKKHNRVANVRQDFLQKTTTKLLKKYGHLKIENLNLKGMMSNHKLAGAVTDLGAYEFKRQLIYKAPWYATKINIIDQWFPSSKTCSNCGCLKSDLTLKDRIFNCIDCGISLDRDLNAAINLKNTKDEVIKSRVGSTRTYTPVDRIPPTVLAEAGREHHGQL

SEQ ID NO: 9411 - protein, 376 aa, Synechococcales sp.
MKVRLYPSKELHAVWKQWLAAYRWIYNFCIATLKGVYQGSAFDLQKYVRDFDRPEWVKSLPGHQLQEACSDAFDAFKQAKANKGEAKFKSCKAPSQIIKFKVNNFKKGTWYARLTKGLTFKTIQSLPQNCGYGTQLQYARGKWYGCFPEYKQLEHTEQSNVIALDPGCRTFLTGYDGESIVEFGNQDIGKINRLCFKLDDLMSRISKCQSKRQRYKMRKASHRMRERIRNLVDDLHKKAANYLVNHYKLIFLPTFNSSEMVLKSRRKLNSKSVRNLLTWSHYRFAQHLTQQAQRKGVLVVRCNESYTSKTCPHCGEIHEKLGGNKTFKCPHCGYKAVRDWVGARNIMLRALQASAVIFQDNAILFQSDLKALNSFV

SEQ ID NO: 9412 - protein, 382 aa, unknown
  TnpB Polypeptide
MKFAVQSNVIRGLSKQQYCTLKELCQYSNNLYNVALYNVRKHFFSEKQFLTYESNYHECKENENYVLLQAGVAQQTLKVADRSFKSFFNLLKKCKTGDYRYHDVKIPHYRKKGGCFNLILSTNAISVVNGFLKLPISREYRKLHPDMEDILIPYPERLNGAELKEVRICPHDNGRYFKIQYVYHWYQEETLVNPDNIMAIDLGVENLATCVSNVETPFIMDGRKLKSINQYWDKEKARLQSVAMKQGMWTTHQINKITTKRNNRVNDIIKKTARYIINNCIKYQIGTLIVGYNKDFKRSVNIGKINNQNFVWDSSAKCKDQLKFQEKREQRIKEYVLEHSNLTEKEYDENYRVEFYTYADEAKKYGFTDYIIGVDCSLDEVL

SEQ ID NO: 9413 - protein, 408 aa, unknown
  TnpB Polypeptide
VKNIDLTEREIIYSTDERFNLIKELCHLSKNLYNASLYDVRQYYFKTKSYRTWQSQRPIFTKNHNPDYYALQSHLAGEVLMQVGRQFISFFNNKSTKKKRIAKYKDKNGFNVVTFPKITISKQIKFDEDKQLYTYTLCKRSYNLKIQSSKPNIKMVKFVYDEANDLIKCFKIYEVEQPKLKKDNSRYFSIDPGLNNIVSIYNNIGIRPLLYNGRPIKSINQYYNKTNAKLRSELPTNAKSSKKLKQLSFKRNNKIDYEMHKISNHIINEAVKNNISKIFIGNNIGWKNEINIGRRNNQNFVNIPHSKLYNQLLYKGLLKGIEVIFTEESYTSKASFFDKDELPVYGESDNHKFSGRRIKRGLYRDSKGNLWNADLNGAANIMRKLSDKAYKNIRKTKELIKQPILITL

SEQ ID NO: 9414 - protein, 384 aa, Staphylococcus sp.
LYLWFLSIEERGWQNMLRAYRTEINPSFEQRQTINQTIGTCRWMYNKFIETNQNFHKTGQSYMNGYAFSKWMNNVYLPNNPDKHWIKQSASKAVKQSIMNAHRAYQTFFKNKKGYPKFKKKSGIGSYYLIGTIHVQRHRIQLPKLGWIKLKEKSYIPTNNIKSATIVKEYDRYYVSVLVDQLPSPIFKPKQTDGIGIDLGLKEAVFTPSGVKIRSFKTNQTIVKLDKSLKRQQRKLSRKKKGSHNWYKQLLKLQRIYRRIKNIKRNIKHKGILSIVRTNPQFITIENLNIKGMMRNKRLANSFQQIGLGYIVEWLKIKCQDYGIELRQVDRFYLSSQICSDCGYIQPMPLNQRTYHCHHCGMIKDRDINASINLKQATDYTVIV

SEQ ID NO: 9415 - protein, 405 aa, Streptomyces sp.
VIRAYKFLLRPTAGQEAALRAMLADHCSLYNGALQERRDAYRHVSKTSITYGDQSAQLKAIRAFDPERQGRWSFSSQQATLRRLDKAFQAFFKRVKATRTPGYPRFKGVGHFDTVTFPRDGDGCRWDSTPHDRQTRVRLQGVGHVRVHQHRPVKGRVKTISVKREGRRWYIVLACDEVPPEPLPDTGSIIGIDMGTVHFLTDSGGTHVANPKFLDKMADELTAAQQHLSTFPRRTRRTKKHRAAARKVARIHAKIRRQRLDHHHKTALALVREHDVIGHEKLNTAGMTKSPQPKPDPEQPGGFLPNGAAAKAGLNKSILDAGWGLFLGILAQKAESAARRVIPVDARNTSRTCPPEIGGCGHVAKENRVTQAKFECVNCGLVENADRVGALNVLHRAGLVLCDGV

SEQ ID NO: 9416 - protein, 387 aa, unknown
  TnpB Polypeptide
VLLALKGKIITTEKDALIQTLFKVNEASNWLSEKVVALKTCNAVEVHHAAYYELRERFGLPAAWACAVIRRVCNAYKRRKPKERFKKVIQFKKFSSVDLRRDLFAFRGLDRIVITTVGHGRQLFPVEWGNYYAQRLKFVRKTAQLVYRKDLNSFFIVAYAEIEEQPTIVPTGWLGVDVGIKNVAVDSLGNFYGGEDLTLRRLHYKEKRRELQKKKALKRKLGLDTHSIRRALRRISRKECNFAKTVLHTVSKRVVAAAKTLSLGIALEKLKGARERITATARRQSRYIYSCWSYYTLQQFIAYKARLNGVPVVFVSAKHTSTTCPNCGYQDKRNRKSQAEFKCYQCGYEANADYVAALNIALRAQGINPCPQMPSSFNPSLGQGRQF

SEQ ID NO: 9417 - protein, 328 aa, unknown
  TnpB Polypeptide
VYQECIKYLLKSWKSFLIAQKDYQKNPHKYLGKPKLPKYKKKDGRHFASYTWAGIRQRGNKIYFTSSKLYVETRITSKIQQLRIIPMGNIYKIELVYNMEFPDYKIGNSHILGIDIGVNNFATLTNNIGLKPIVVNGKIIKSINQYYNKKKAKLQSVLKKVNNKNWSNSLDKLTRKRNNKINFLMHCMSKFTINYCLKNNIATIVVGNNKKWKQEVKMGRKNNQNFVDIPYEKYINQLTYKGQMVGINVIITEESYTSKASFLDEDDIMYNNIFSGDRIRRGLYQSKNGILINADCNGSYNIIRKVFSNAFSNGIEGVHLHPVRINVY

SEQ ID NO: 9418 - protein, 423 aa, unknown
  TnpB Polypeptide
MRGMNYNYRYRLKPTESQRQTLDYHRDTCRQLYNHALYRFNQIPKDKGTVKQRVRTIRDELPDLKDWWDALTDIYSKVLQPAVMRIAKNIKSLGKLKEQGYNVGELRWKSPREFRSFTYNQSGFELDKKSGQTVLSLSKLAAIPIEIHRPLPDDATVKEVTLKKEKTGEWFAILGIEMDTKLPAKPSLDEIEAENMVGIDVGILKYVHDTDGTAVESLDLSDEHDRLEREQRTLSRKAYESNNWEKQRQRVAECHRRIKRKRRDSLHKLSAYYAREYELVAVEDLDTKELLESPGNSRNTASAAWNTFSSMLETKCEREGTHFVEVEPAGTTKECASCGVETDKPLWVREHSCPACGFEADRDANAAWNIRSRGLSKLGVDHSESTPVETALPTGTVVVPAKRVLEAGSPCLKEPPKAASRQG

SEQ ID NO: 9419 - protein, 375 aa, unknown
  TnpB Polypeptide
MFRAYKFRLEPNVNQTREIDITLETHRRLYNACLDQRKTAYESERKSIEYTDQSAWFKTERATNPYFARLNFSSSQATMRRLDKAFQAFFRRLKAGDKPGYPRFKGRDRFDSFTYPSVGDGARIIGNKLRLQHIGLVRINLHRPIEGEIKTISIKREGGKWYVITACELPGVIAPDVSDKPATGIDVGIESFLTDANGNQEPTITPLKEASRKLRVEQRSLSRKKKGSNNRRKQCARVRNLHASVANTRRDAHHKIAAKLVNRYSAIAVESLNIQGMLRNHRLARAIQDAGWNQFLGILKHKAESAGVGIFEVNARGTSQTCPACGLVVKKTLGQRRHECECGYSTHRDHAAAQVIFARGVLAGMQPGSLNAGVG

SEQ ID NO: 9420 - protein, 426 aa, unknown
  TnpB Polypeptide
MFAGQANSARKYRLYPTPEQAARLAGWGHTCRAVWNLALEQRRFVWEQRRCAMRAREQNGHLTQARAEIEWLTDLPAQSAQQVLVDLDRAYDNWWNPDHPAEAPKLKKRRAALSVSFPGQAVEVRKLNRHWAEVRLPKIGWVRFRPSRPLGGILRNATVSVNGAGTWHVSFGVAVGRKPAVPNGLPGCGVDFGVACSAYVSDENEPRLMPPTLTSGERQRLLGLERRKARQVTYAKKHNGGKYSRRLRRTLAAIAGLKSRQARRRLDFTHKLTTDLAKNHGWVGIEDLHVKKMTGSAKGTAEKPGKNVHAKAGLNRGILDNAPGERRRQLEYKAPLFGSELRAVPAPYTSQACSACGVVDSESRPGCGRVFACTSCGHQDHADRNAAVNIENRARRAVGLNSTRRHTVPSRPAKGRRLREPLAGAA

SEQ ID NO: 9421 - protein, 437 aa, Geobacillus sp.
MPTITLRLELHNPTKVKQGMYERMTEVNTAFANWLLNHPELNQATSKLFQAFSSQRFPSAVVNQTIREVKSQKKNQKTKKFRTFWCCFNNQNLKVEKKGSFYTVSFPTLEKRIGVPVVTRPYQEAWLNRLLDGTAKQGAAKLYKKRKKWYLAIAITFDVKPRHETKVMGVDVGLRYIAVASVGTKSWFFKGSQCAFIRRRYAALRRTLGKAKKLQMIRKIGCKESRWMKEQNHKISRQIVNVALANGVGVIRMEALTGIRKRAKSAKEAGRSLHAWAFHQLQTMIAYKAEMAGIRVEWVDPTYTSQTCKCGHREKANRNGIRFRCQRCGYTLHADLNGAINIAKAISGFVAEPSALVTGAPPIGVHRNPMGRGDDTPLKLLRCPNQKWMRTQTTQESHAFRRAECQIISSQTRVPRPDGSAGSTMSRRGRRWRISCT

SEQ ID NO: 9422 - protein, 259 aa, Geobacillus sp.
MPTITLRLELHKPTKVKQDMYERMTEVNTAFANWLLNHPELNQATSKIFKEFSSQRFPSAVVNQTIREVKSQRKHQKAKRFKTLWCCFNNQNWNVERKGEFYTVSFPTLEKRVGVPVVTRPYQEAWLNRLLHGTAKQGAAKLYKKRKKWCLAITITFEVKPRHETKVMGVDLGLRYIAVASVGTKSLFFKGSQCAFIRRRYAALRRTLGKAKKLHMIRKIGRKESRWMKDRNHKISHQKESGVCLSNDMSEECMGKGRE

SEQ ID NO: 9423 - protein, 370 aa, Geobacillus sp.
MHRAYRFRLYPTQKQAKLINETIGCCRFVYNHFLAEWNQAYETTGRGLSYNECSKRLTALKQTLPWLKTPDSTALQNALQQLAEAFDRFFDGTSNAPRFKSKKHPNQSYTAQCNYPKNGRPTIEVDGHRLKLPKLGWVKFAKSREVQGRILSATIRRNRTGKYFVSILVETDIPPLPQTDKKVGVDLGLKQIVVLSTGETIEHPRYWRRYEEKLAYWQRVMSRRKPGGSNWEKARLKVAKLHEKIANCRNDFLHKLSTRLIRENQVVCVEDLRVRNMQKNRKLAKSISDSAWGRFLNMLEYKATWYGRTVVRVASTFPSSQLCSCCGHRQVEVKSLGIREWVCPTCGAEHDRDHNAARNILNEGLRLLSL

SEQ ID NO: 9424 - protein, 407 aa, Okeania sp.
MKARFKYRIYPTPGQKYRLAKLFGCVRVVWNDSLACCQQQYRSGEKKTTNSQLQKKFITQSKKTEYREWLSEVSAIPLQQSLNDLNQAYQNFFKSTKGQRKGKPVKPPKFKSRKSLATARFTKGGFKVGQHKVYLAKVGKIKIVWSRELPAAPSSVTVIKDCRGDSRIAPTRYFLSFVVEIQPEILPQTDNSVGIDLGISTFATFSDGTKVDAPKPLKKRIKKLRKLSKSLSHKTKGSKRYEKARVRVAKFHAKLKDTRTDFLHKLSTKIIRENQTIVLEDLNVSGMVKNRKLSRAISDLGWRTFRTFLEGKAEKYGRDFRVISRWEPTSQTCSCCGFKGGKLDLQVREWECLNCGAKHDRDENAAINILVAGGQSETLNGRGGKCKTTAKVAAANEASTHRRAKAR

SEQ ID NO: 9425 - protein, 395 aa, unknown
  TnpB Polypeptide
MNKLLKAYKVEIKPTTKQIQKINQSIGVCRWLYNEYLSTNNQLYTKYKNGFIDKKQVFMSANDFDKYINNEIKVLDEYSWINNCGSKARKKAIQNAEIAYKRFFKGQAKFPKFKKKNKCDVKLYFPKNNKGDWKVDRHKIMIPTLKNVRLKEYGYIPIGSKIISGTVSKKANRYYVSVIIDVENIPQKNTNQGIGIDLGIKDFAICSDKIIYKNINKTQRVRKLEKKLSRQQKRLSRKYESLKLRNKKEKGEATRQNIQKQIAKVQILYQRLNNIRTDYINKVVSNVVRNKPSYITIEDLNVKGMMRNKHLSKAVAQQKFNEFRNKLSNKCNDLGIELRIVDRFYPSSKLCHKCGSIKKDLKLKDRIFNCDCGYVEDRDYNASLNLRDAKIYKIA

SEQ ID NO: 9426 - protein, 397 aa, Brochothrix sp.
MGVCYTKFRKLIKKEGDKMLRYKAYKFRIYPNVEQEILIAKTIGCSRFIYNHFLGLWNETYTQTGKGLTFNACCAMLPKMKKEEETEWLKEVDSRAIQSSLKHLADAYSRFFKKQNARPKFKSKKNPVQSYTTKRTKTNIAIVDKKLKLPKLGLIKFSQSKVLKGRIINATISRRPSGKYFVSLLCEEEIYELPKVNSSIGIDLGIADFAILSDGQKINNNKFTSKMEQKLKREQRKLSRRALVAKKNGIQLFEASNYQKQKCKVARLHEKVMNQRTDFLNKLSTDIINNHDIICIENLNVKGMLKNHKLSKSISDVSWSEFVSKLQYKADWYGKEIVKIDRWFPSSQICSECGNNDGKKGLHIREWTCSHCNANHDRDINASKNILTEGLRLQVLA

SEQ ID NO: 9427 - protein, 393 aa, unknown
  TnpB Polypeptide
MELIHKTYKFRLYPNEKQEELLLKHFGCTRWVYNHFLCEHNEQYKNNEKTDNFYQQEKKLVELKKQEEYQWLNEVNAQSLLCSLRDLNNGFTGFFKQKKGYPKFKHRKDKNTFEVPQYFKIENGKIFIPKFREGINVKMDRKVKGTIKHMTITKSKTGKYYVSILTVQERKELPKTGKSIGLDLGIKDLVITSDGQKFQNNKYINKYEKEIKHEQRYLSHKTKGSKRYENQVIKIAKIYEKISNCRNDTLHKISYQIVRDYDTICIEDLNVKGMVKNHKLAKQIEDASWGNFVRMLQYKSDWYGKKVIKIDTFYPSSKTCHICGKKNENLKLSDREWTCEHCGTIHDRDINASINILNEGLRISGMVVPSTQAEAQIRHSLRNAQACEVCSSM

SEQ ID NO: 9428 - protein, 393 aa, unknown; identical to SEQ ID NO: 9427
  TnpB Polypeptide

SEQ ID NO: 9429 - protein, 300 aa, unknown
  TnpB Polypeptide
MRRIQGYRFRLKPNAKEASILRQFLGCSRFVWNAILAENEARYEMGDPLPLRYLSFAKRLQALKERHEFLREVHSQPLQQTVRDLAAAYDRAFNPKLAAKMPIFKKKGFAQGIRFPQGFKVERNGVFLPKIGWIAIRFSKRTAKRTVLGEIKNVTVRLESGKWYVSFQAEREVPEPIHPNPDSLIGIDVGVARFAALSDGTFHEGANAFKKNERRIAILQRRLARKVKFSANWRKVKAKITAIHSRIANIRRDQIHKASSTISKNHALKELSRNQGAVSRQNRHSINVSRTRAGANFADY

SEQ ID NO: 9430 - protein, 371 aa, unknown
  TnpB Polypeptide
MNLVVQIQLLPDAEMATALRGTVERFNEACNWVAGEAFERQVSNRIELQRLIYREIRERFRLSAQMACLCIRRVCEAYKRDKTIRPTFRKHAAMPFDQRTMRFKGIDQVSLLTLDGRSLVPFVVGSYGKQRLAFPKGQCDLVRRKDGNWFLIVTVDVPDVAPIPVTDFIGIDLGLAKIATDSDPESVPHSGKPVERVRRKHNLQRRRLGKKNTKGAKKKLKRMAGKEARFRKHENHVISKEIVATAKGTGRGIAVEDLSGIRDRLPAWGRDARNRLSGWSFGQLVGFLTYKATLAGVPIETVDARHTSQTCSACGHCCRENRTSQEEFHCVSCGMSMNADKNAALNIRARALSKRALELDDLRVEPEIPAL

SEQ ID NO: 9431 - protein, 412 aa, Microcoleus sp.
VINVFNLTYEFKLKPTKNQVAIFEDWLEQNRRVYNYALGERKDWFKSRSCQINACSLRSEYIISADTPRPTYNRQAVALTAYRKTSSNLKRVHSQVLQQTLKRLEKAFVSMWEGGHGFPRFKKVGTMRSFVFPQLGVEPIQENAVKLPMIGLVKFNQSRPIPEGAIIKQARVVKRASGWYVMLTLHFDFAQWDLDVPQPMPHGEAIGIDVGISHFVAVSNGRLFPNPKPFRKLERKLKLLQQKVSRKRLGSNNRKKAQAKVSRLHERIANIRKNYHWELAHNLCDWAGMIFAESLNLKALAKGMLGKHCLDAGWGQFLQILEQCCFKRGVFFLKTDAKKTSQICPNCLTETGKKLLSQRIHSCGHCGYTTDRDVAAAQVVCIRGLAAVGHTVKMLSEGKFIGIPETKESPSL

SEQ ID NO: 9432 - protein, 402 aa, Streptomyces sp.
MAEAHVKRAYKYRFYPTGAQAAELSRTFGCVRKVYNMALAARTEARTRQERVNYNATSAMLTAWKKTEELAYLNEVSSVPLQQCLRHLQAAFTNLFGKRARYPRFKSRKKSRASAEYTTSGFRYRDGELTLAKMTEPLDIVWSRPLPEGAAPSTVTVSQDAAGRWFVSFLVEDPTVEPLSATDTAIGIDVGLDHLLTLSTGEKVANPRYGRRDRVRLARAQRELSRKAKGSANRVKARLKVAPVHARITDRRRDHLHKLTTRLVRENQTLVIEDLTVRNMVRNRKLARAISDASWAEFRGMLEYKAAWYGREVIAVDRFFPSSRLCSDCGTLQTKMPLHVRTWTCDCGVTHDRDVNAAKNLLAAGLAVSACGAGVRPQRRTPGGQSAVKQEPQRATVGIPRL

SEQ ID NO: 9433 - protein, 421 aa, Streptomyces sp.
MVDAHFDQTADLWLIENGRRIGLVDHVKRAFKYRFYPTDAQAAELSRTFGCVRKVYNLALAARAQAWVLRQERVNYNATSAMLTEWKKTEELAYLNEVSSVPLQQALRHLQTAFTHFFAQRARYPRLKSRKKSRKSAEYTTSAFRFQGGKLTLAKMTEPLAIVWSRPLPEGVAPSTVTVSQDAAGRWFVSVLCEDPGVKPLPATDAAVGVDAGLDHLLTLSTGEKITNPRHERGDRGRLARAQRELARKAKGEGVNRAKARRRVARVHARIADRRRDALHKITTRLVRDNQTIVIEDLSVRNLLKNGRLARAIPDAAWSEFRSMLEYKARWYGREVIVVDRWFPSSKLCSNCGTLQNTMPLSVRTWTCGSCGVTHDRDVNAARNILAAGLAVSACGAGVRPQRSTPGGQSATKQETPRRKP

SEQ ID NO: 9434 - protein, 371 aa, unknown
  TnpB Polypeptide
MEVRRTVSVALDVDSTDAALLEDTVDTFLWSAQYVVDHAFQGEYVTTSKTTLNDETYDDVREATNGFNGGLVQAARNKAVEACKSVVARWKNGKKASKPRFTSPHVVYDHRTATFHDDSVSLATTDGRIEADYVLPDEDSDTPHSEYLFSDGYETTGAELHYRDGDWMLHIHCKKDMKSDAPEQATTGNGTVLGVDLGVNNLAVTSTGTFWSGDEFDHWRREYEKRRGSLQQCGTRWAHQNIRSVGRKEAGRFKITLHRISNELVAEACENDCSVIAFEDLTDIRERTGASWGHKWAFQRLYEHVEYKVEERDIKAEQVDPKNTSRRCSYCGFTHPDNRDGEAFECLKCGYENHADYNAVAGLRPAGSKVA

SEQ ID NO: 9435 - protein, 604 aa, Clostridioides sp.
  misc_feature (237)..(237): Xaa can be any naturally occurring amino acid
VKKAYKFRLYPNKKQQELINKTFGCCRFVYNKYLAKRIDVYKNDKETFTYKQCSSDLTNLKKELKWLKEPDKFSLQNALKDLDNAYKKFFKEKAGFPKFKSKKINRFSYKTNFTNGNIMYCGQYIKLPKLGMVKIRDKQVPQGRILNATISKEPSGRYYVSLCCTDVDIEAFENTNNQIGLDLGIKEFCISSCGEFIENPKYLKKSLNKLAKLQRELSRKTIGSLNRNKARLKVARXKAYKFRMYPNKKQQELINKTFGCCRFVYNKYLAKRIDVYKNDKETFTYKQCSSDLTNLKKELKWLKEPDKFSLQNALKDLDNAYKKFFKEKAGFPKFKSKKINRFSYKTNFTNGNIMYFSQHIKLPKLGMVKIRDKQVPQGRILNATISKEPSGRYYVSLCCTDVDIEVFENTNNHIGLDLGIKEFCISSCGDFIENPKYLKKSLNKLAKLQRELSRKTIGSLNRNKARLKVAGLQEHIANQRNDFLQKLSTKLIKENDIICIEDLQVKNMIRNRKLSRLISDVSWSEFIRQLEYKANWYGRKIVKVGKFFASSQICNKCGYKNEEVKDLNIREWICPSCNETHDRDINASINILKEGLRLITIQNK

SEQ ID NO: 9436 - protein, 260 aa, Mycobacterium sp.
MPVCGCLSSVRSSRRWCTPVRGLVSMSGSGAWRRSPPLTARRSSRLRTHDRSAPRCASYATCAGPVRVARKVHGATVSAPLRFPGCRVNDVRTHHLHVLTTRLAQTHGRIVVEGLDATEMLRQKGLPGARARRRGLSDAALGTPRRHLSYKTVWYGSALVVADRWFPSSKTCHACRHVQDIGWDEQWQCDRCSVVHQRDDCAAINLARYEETSSIVGPVGAAVKRGADRKTGPRPAGGCEARKGSSPKAAEQPRDGVQVA

SEQ ID NO: 9437 - protein, 415 aa, unknown
  TnpB Polypeptide
VQVVKSITVKVSKKINKDKFLSLRDFFNIYQTIARLYYSYILENSLEEKLCSGEITATDLKNILHQKLYKQIRESFDIGSQTVQEIRDVVVEAINSYAQLVRKSRKASLPRVEEFTVRLNHPRVISVFEHGKEFDFFFKVKINGDGRVAIPIDCGEIQKQLLKDALNGKYKIGSFQLVKRDDWFYFVIPIKKEVEFKQSYDGIVGVDLGLRYNAVITLLYKNGKVTKVEFLKYRKLMHKIRMLWHRIDELKSMLPEGQRTSKRIQRLWKRIRRINDWIAHNVSKKIVEIAKENNSMIAMENLKRLYPIKGKNSRKNNRRINNWIRGKVVKYTIYKAKWEGIKIRLVSAKNTSKTCHLCGSQGLRTNATFFCEHCNHTYNSDFNASVNISIRATLPNAKGCVNHPVGLTALQSSQR

SEQ ID NO: 9438 - protein, 482 aa, unknown
  TnpB Polypeptide
MTTEPAAPKLDKNDPDVIVRAYKFALKPTTSQEQKLRQHIGASRFVYNFQLALWHQTLDIRSKEKQRGVSEDELTPFPFSFHRFSIQNQWNATKDERAPWNREVSKGAYEDGCRRVSIALTNWYKSKTGECKGRKVGLPRFHKRGRHDSCTFYNNPIRVNPDRYSVTLPRLGVIKTYENTRKLQRKIAKGTARIVSATISRGHKYWHVSFTVYVRKHIPEHHCYPGSIVGVDMGVGDHVIVAANPRGDEVVRRGLPTTIDNHEKRIRYLQRKMSRKRGPDTRTKTAPSNRWVRANNQVRKHHNIMSNVRRDFAAKVAHELAKNYATVVIEDLNVRAMMARGGAYKRGLNHAIAQASFADLRRRITYKTHWNGGVTIVADRWFPSSKTCSGCGEVKSKLSLSEREYICHRCGIVVDRDLNAATNLAKLAVPKSGVSNIDRTGSSPGMGRGGAGKTSSLSGGLALAGEASMVRKGLSGRKAGTR

SEQ ID NO: 9439 - protein, 458 aa, unknown
  TnpB Polypeptide
MTIPAEKNAARVETHIRNYELTHAAHQSKVDEIASLLNPIRSAMTMVKQRKIAQLKENGYTRKLKATDYDDLEFRCGFDGLFSRRRWKSIEIPVDAALATWREKAVRIGRTHIRELDVTDEERRRLYRLNKAGQFWDVEGLAAHILTRNPFPVFRFTRMIHNDGTVLARKKNARSTFDYWLEVRGFTGHDISIPIVNNPYVLEKFFEAHKVSTTAKIVVDRDGKLHIHQPMEFANPPMRKTGDTLGIDWGLINTISTSDGRTLGRDLYPWLKKIDTQVMQLQSRLQRQGVKLHQSTRFRRFQHRIVTTVKNKLGEILNSLADEDIRTFIVESLDFRGTKLGRKLNRIITRAGRAEMSRRMREMPERYGIEIVEVNPAYTSQECSECHYTHKTNRTGERFVCGFCGHSAHADVNAARNIRFRGENPRLFDRFDTKGKILSTLASLHEVSIQRRLQYGYS

SEQ ID NO: 9440 - protein, 482 aa, unknown
  TnpB Polypeptide
MTTESAAPKLDKNDPDVIVRAYKFALKPTAIQERKLRQHTGAVRFVYNYLISQWRNNIRTRIEEKERGVPEDELTPFTFKLSAYDMINYWNRTKRECAPWWSEVSKEVGNDAACRAYNSIKNWLDSRNRKRKERRVGFPRFHKRGYHESCTFTTGPLRVNPDRRSVTLPRIGTIKTYENTRGLQRKIAKGTARIIRATISRGFNYWHVSFTVYERKHIPETHAHSGSVVGVDMGVRDHVIVAANPHGDEVMRRGLPQSVKKNEARIRHLQRKMSRKHGPDKRTKTTPSNRWIRANNQVRKHHNTIANIRHDFAAKAAHDLAKNYATVVIEDLNVRAMMTRGGAYKRGLNRAIAQASFADLRRRITYKTRWSGGTTIVADRWFPSSKTCSRCGEVKSKLSLSEREYICHRCGVVVDRDLNAATNLAKLAVPKSGVSNIDRTGSSPGMGRGGAGKTSSLSSGLAPADEASMARKGLSGCKAGAR

SEQ ID NO: 9441 - protein, 379 aa, Lactobacillus sp.
MVLKGFKLRLYPNEAQQLAINQNFGFNRFIWNQMLGMLIKRYENSPETKLLSAFDLNNLLPTLKQEYPWLKQAESTSLQCTNADLIGAYKKFFKGHAGFPRFKSRKYPKQSYQCKMGIKFTDRTHLKLPKIGVVRFRGGQQALGKVKSVAIRLTATGKYFASVLIDTDITKLPKTGLSVGIDLGVSDLMITSTGVKYPTIRFDKRLAKKKHYWEKRLARRRLQAKQEIACDHHNHVPEPRELADFKNYVKARRMVAQYNEKIANQRYDYLSKLTKALVEQFDVVKMEDLKTKNLLKNHKLARAIANQAWREIRRQLTYKCAFYGKQLVTVSPYKTSQLCSSCGFDDGKHPLEIRSWTCPDCHTQHDRDINAARNILQGS

SEQ ID NO: 9442 - protein, 281 aa, Lactobacillus sp.
MKQMSSLAYHFGIKLRFYPSSKQKKIIKLNYDAQRFVYNSYAGRNRTNYHARRFLAINQGQAMPFAFPILNDYEAKLAETVVANDELLAKPKNIRDAYSFLRVKEIDSLALANAIQNYRKAWNNYRKIGHGIPTFHKKRSDWSYQTNCQYPKQKEAYLDNGTAKFIDAKHIKLPKLGVIRIAGLRKLIKDRLLKRVSTRIGTVTIKKTADDQFYLSMQLGSDIAFAQKLPKTQSQIGIDLNLDNFLTDSNGAMVANPCFYRQVKKEACSRPTRPLSQAKTC

SEQ ID NO: 9443 - protein, 406 aa, Streptosporangium sp.
MTHRQGFRVELDPTFAQRARLGQHAGLSRVVENFCLEKVKAAFDQREAERSYGVSGKDLTPVPWSAPALERLWRLEHSTRYPWFSEDGLSSRVPKEACRVRAVGFKNFFDSRGGKRKGKKAGFPGWRRRKHGSRFRYDADRAAPAGVRAVKVPGVGKVRTCEDMSWLTERLADGRARVIGPTVKEAAGRWWISFQVEIDRGDLNERRSVPAGAPACGIDVGVKTFATIVDDDGAVTEIHAPQPLKAALRKLRKASKAVARKRRGSANQAKAVQRLARVHLEVANQRADFLHKTTTDLARTKRAVAVETLNVTGMIANRRLARAISDLGFGEFFRQLAYKADWYGSAVWVASRWFPSSRLCGGCGTINRDLTLADRVWACGCGLTHDRDVNAAGNLLAAMKLDQQAA

SEQ ID NO: 9444 - protein, 368 aa, Streptosporangium sp.
VAQIVKRAYRYRFHPTPEQASEPARTSGCVRLVYNRALEMRTRAYTLEGRRVSYVESSATLTQWKRGGDYDFLSEVSSVPLQQALRHLQAAFANFFAKRAEYPTFRSRKKSRASAEYTRSAFRWREGRLTLAKMDAPLNVVWSRPLPEGAEPSTVTVSRDAAGRWFVSILVEETIRPLDPVEGMVGVDAGITSLVALSTGEKIVNPRHERRDRRKLAKAQRNLARKEKGSANRAKARLKVAKVYVRITDRRRDHLHKIATRLVRENQVIAVEDLTVRNLVKNHGLARAISDASWRELRSMLEYKAQWCGRTVVAVDRWFPSSKLCSACGTVAGAMPLNVRTWECACGATHDRDVNAAKNILAAGPAER

SEQ ID NO: 9445 - protein, 248 aa, unknown
  TnpB Polypeptide
MMRGYRLYPSKDQGVLISKHLGCCRFVYNWGLNLKNEAYQNDGVSLSAYDLHKRLPALKVEHPRLKEVNAQPLQQSITHLARAFTNFFEGRAEKPVFKKKHSPEQSFTVPQSYTVDFERGTMKLPKIGAVKTVFHRRFAGKTKSATVTRTSAGRYFISILVEDGRKPPQVAVPIPEQTVGIDLGLTHYLFSTGSRKPSVSGGNPERGQHGEESRSGTSDQRRRVGNVRFDAGIQVSGSRETPAPDRDV

SEQ ID NO: 9446 - protein, 494 aa, unknown
  TnpB Polypeptide
MAQLTTEVRGISAYATYVTRNDEVLGERLAQAGAIQPAAAGCRAGVTMPEFLANGRTGRSRKERLVQYNTVTAFRSWLERIDAVNGESSKYVSQGWKRTMNAAPPSYGEDYINLGATDYNYALIENNPFTDGEIILKLVIRGAWYRLFFPFDNTRFTEGKVTLPVVKVEGGKPVFIFSVVTDNPIVQFSGDYTIGVDVGINDYATVVVRNSSTGKIVHRTTLSQRVHSLWNSVRASERQVKQLREKAESLSLYDRQGRMAARDEADLHRAAASRKKRELAILAAQEIAYLSHFWDNAVVAVEDLSWIHNTMSHGRWNRGAFVQWLTHYVSQNGGWVVSVNAANTSQVCHACGEEVTHPKHKVSECAKHGIMDRDVNAAANIAARAVPKVEKARKKRAKNPKLQDGKAPLKTPIARASLKYPGRDRTKHTPTPKRKNHPRVSREVTLPISPARAQAHRLEASVLADCLTYGVAGTHKAAIKQGNKTYICRLCNLN

SEQ ID NO: 9447 - protein, 442 aa, unknown
  TnpB Polypeptide
MIKRKFTTVTQLHEKNNQDIIDYFESARGTYAQAQRETFYAIRNSPDFNKSSYNTYLQETYGVLKRTANSIITDAQGRLNALKELKAHEQKQLARKLKALEVNIHILEVKKAEQSALLRAGLPVNLGKHRNLKRKIVAQKSKLNKLKQKSANLSYQAESGRYKMCFGSKKLLRADYQAFVGRRDAQMSFVGSKSEVSGNQILQLRFNPRNNQFELKLRKDIGGFKNAKDKYVYGRVYFNHHKRWIKEALHNHNTPLSFKIIKRNGRFYLYCTFEIQMDKSDFKARTTHGTIGLDFNKGFVTLAETNQYGHLTDTLFLPYRFKSGNKTTTDLEAIAALAAKRALVTGKDICVENLNFRGKRASTLPKQGRKYNEMLHSLAYRQFVDKIEQRAYRNAVSVRRVNPAWTSWLAKQLYCPTMKLNTHIGAAYVIARRGQGYKDSVK

SEQ ID NO: 9448 - protein, 423 aa, unknown
  TnpB Polypeptide
MQLTERHLIKPNHELYATLDDLTFKAKNLYNHGLYLYRQSYFEHKKNPDKPVLSWADIDKTLRKQGHDDIRALPSKVANAVLKNLGENITSFWKLVRLKNKGNLAQKPKLPHYLHKTDGRYPLSFNYQTFGAKRGANNELFLCPKGINLPIPTRVANPKQVRIIPSHNNFIIEVIYNVEESAPKSTSKYAGIDLGVDNFATVTFSTQNRPLIIKGLELKSINQGYNRLIAKAQELLPGTCKASKHIHRLWSRRSWILATKIHQITAFLTNLFDEMQIEKVFIGKNTGWKQALPFGKKVKQRFAYLPYETFIEQLQYKCKLRGITVVTQEESYTSKASFLDSDNIPVYGETDNPKFSGRRIKRGLYRSSDGRLINADVNGSYNILRKGLENNNQSLQMGNPLIQPLVVKGIGQEPNEKLVQLYM

SEQ ID NO: 9449 - protein, 434 aa, Deltaproteobacteria sp.
MSPSLLHSILVHLPTPESFVLRKAFRFRLRPTPAVRQRLAQMAGCTRFLYNKALALNLNLLEQKQPILRYTKLCSQLQSWKQEEATLWLQQAHSQVLQQALKNLDRAFQDGLDVKQPGKKMPRFKKRGRQDSFRYPQGFKLRGNRVYLPKIGWVGMFKSQEVEGAIKNVTVSREGEHWFVSIQTEQEVRFEEEIVGGILGVDLGVVHQLTQSDGVQHPPVEAYRQAQQRLRREQRTLSRRVKGSNNWHKQVRRIRRLHQRISNLRKDVLHKLSHTLSQNHAVVCVEDLKVKNMTKSAKGTVESPGRNVKAKGGLNKAILEQGWGEFVRQLEYKLRWKGGRLVKVNPAYSSQECHACGFRSGENRKSQHEFECGSCGWDGNADVNGALNILHRGWEKLCEENVPVDVGCKPVEGEGVGLPVKQEPVGNCEEVPLR

SEQ ID NO: 9450 - protein, 422 aa, unknown
  TnpB Polypeptide
MYEERNRKIKESGKATRERRADMDCRVFSVKVQENRLSNIKREKLKRCFLEAKWLYNAVVASETLTLEDTSSVQVKVKNSFEIRPINTLSVQMKQSVVDSVKQNIFNLSKAKKHGVKVGRLQFKKECNEINLKQFGKTYSIKTNNKISIQNIGVLVINGLGQINVDEVEFANAKLIQKSSGFYINLTVYSDKQPQSSTEKEVIGVDMGIKDQLTFSNGVKVNFYLEESEQLKGLVRKLSRQVKGSNQYKQTLHRIKRIYEHYNNKKNDVVNKLNLVLKQNYVICFQDELLRQWKRKKSKRRFSFGKKVQHGILGRVKDKLKSNPSNVMLKSSVPTTQTCPKCGGLTKHSLDKRSYHCSHCEFENPDRDIHSANMMVLLSGYGTYRSLNTDTVSTERMTGFLYSLSNLGVVVSTTNSMEARCL

SEQ ID NO: 9451 - protein, 387 aa, unknown
  TnpB Polypeptide
MRKLLKSFKTEINPTEEQKVKIRKTIGTCRYIYNFYLAHNKELYNKGEKFMSGKSFSVWLNKEYLPKNPDKLWIKEVSSKSVKRSIENGCVAFTRFFKHQSAFPNFKKKGKSDVKMYFVKNNPKDCRCERHRVNIPSLGWVRIKEKGYIPTTKDGYVIKSGTISIKADRFYVSVLVEIPDNKITDDPNEGIGIDLGLKEFAIVSNGKTYKNINRSARLKKLEKQLIRKQRSLSRKYENLKKGESTQRANIQKQKLKVQKLHHKMDNIRTDYINKTIAEIVKTKPSYITIEDLNVKGMMKNRHLSKAVASQKFYEFRTKLQAKCREKGIELRVVDRWYPSSKTCHCCGAVKKDLKLSDRIFKCSCGYVEDRDFNAALNLRDVTTYEIA

SEQ ID NO: 9452 - protein, 406 aa, Metallosphaera sp.
LKSKDGKVTLSFKYRAYPTPEVERKLINTMEVEAKVYNRLLDYITERRRQGMKVTQFDTQKLLKDMDEKHEVYSKALQMVNNVLWYNIKVLSELKRNGKKVGKLRHKKVFKIVWYNQSGFRVEGDQLHLSRIGEIKLLLHRPIQGEVKGVIVKRSKTNKWYAIFQVEREKQPLEMTGRVVGIDLGIEKFVTTSDGDVIENPKLLDRMEERIKLLQRRLSRKRRGSRNREKARLKLAKAYERLENTLNDYIHKITTWLVKDHDVIVVEKLNTREMVQSSFGRLRKHILYSKFSTFLRHLSYKAERAGRRVVEVDPAYTSQTCSRCGYRVKLSLSDRVFRCPNCGLVIDRDYNASLNILKNGVGTAPLPVEGEPLLFITSREVVYSKFPQRSRKSPSRGGDAPSVRAE

SEQ ID NO: 9453 - protein, 410 aa, Streptomyces sp.
VYLRYSFRLEPTPGQRIALARTFGCARVVYNDALATRKAAYLADRSKIATGVLAKRVITDAKKTPERVWLAEVSVDALQSSLRDLDAAYANFFASVSGKRPGRRMGLPVFKSKKDSRQAIRFSRNGFRLRDNGRLNLAKIGDVRVRWSRSLPSVTVLKDSSGRYFASFVVQVEPEPLAPVTSEVGIDLGLTHYAVLSDGQVIDNPRFLRRAERRLRKAQQVLSRKVKGSKNRAKARLKVARAHARVADTRRNWCHQSASRLVRDNQAVYLEDLAVSGLARTRLAKSVHDAAWGMFRRVLEEKAARHGRHVGVVSRWLPSSQTCSVCWVVDGKKPLHVRIWRCDGCGTEHDRDLNASRVILAAGQAERVNAPGGPVSPGVEIPRQARLVERGTHPKAQPVTTGSQAGIPAL

SEQ ID NO: 9454 - protein, 362 aa, Streptomyces sp.
MAKFRMYPTSAQEQQMLLHCAHARYVWNLAVEQHSHRYPGRRAAPGFAEQCRQLTEARHASEWLGSGNADVQQQALKDFAQAKNARFTSGFGEPTWRKKYRHEGFRVIGTARVPELTDDGSPKLNAKTGRQVMGRSVVVHQLNRRWAQVKVPGCGWVRFRLTRTDLPKAKTFRVTYRNGQWHIAFAVIPAPVTAPATGEVIGVDRGVNITAALSDGRKLNCPQLTVKERAQVRKHQRRAARAPKASEQKTTAYAKVARLKAREADRRKDWCEKTSTMLARTYRLVRFEKLNIKNMTRSARGTTEQPGKQVRQKAGLNRAILAQGWGLLRQRTGHKAPGRVEDVPAPYTSLRCSVCWGHLPRP

SEQ ID NO: 9455 - protein, 376 aa, unknown
  TnpB Polypeptide
MLIATKVRLYPTSEQRRFINGQFGAVRFCYNKAVALKRDLYRKKGISLSVNKEIKPLLSVAKKSRKYRWLSQYDSISLQEAVRHADTAYKRFFKKEARFPQFKSKRNRQSSYHCTSLSVGKDFIKIPKCEPIKAVIHRQIQGKVKSITVSRDRVGDYFASILSETPEKVPDKPTEVEESKVIGIDLGIKDFLTDSFNRTVDNPKELKSALKELEKAHKEVSRKVKGSRRRSKAVSCLAKVYRKVSRKREDFQHKVSKRLIDENQAVIAESLKIKNMMHNRKLARAIADAGWGGFLSKLKYKAERSGKFFIQTDTFFPSSKTCPRCRYKFDGLTLAMRQWICPKCGGLNLRDYAAAINIKREGIVQLKAAGLAVLRR

SEQ ID NO: 9456 - protein, 244 aa, unknown
  TnpB Polypeptide
MSRYRIQPTQTQESTLLRHCADARYVWNLCVEQESWWRAGRDPMPGFTERCRQLTAAREANPWLAEGSVIVQQQAIRDHAQAMANFFAGTHRRPTWRKAGRDEGFRIVALKPGDVRRLSRNRGAVRVPKAGWVRFRWSRPVPADAKSCRITRDRAGRWHVAFAVIPDPVPGPVTGEVVGIDRGVAVSAALSTGELLHVPGLSGRERKRLGRLQRRLARARKGSQRRGRVKHAASRLRAREADRR

SEQ ID NO: 9457 - protein, 381 aa, Gemmatimonadetes sp.
METIRTLSCRLVVPPPATARIDATLDAFAQACTYVADWGNEHKKHRQYDLHKGCYRDMREQFGLSANLSVRAIARVAPRLANPKTRHSQFKPTSIDYDARIFKLDVQNEVVSLRLLDGRCILALRLGEFQRQGLQGQQPTSATLKKGHKNRYYLDVQVKEEAPEPPSDADIDAALGVDLGLRQIATDSAGHQFQGQDLADYREHRADVRAALQAKADTGSKQTRKACRRALKRLSGRERRHQKQINHTISKHLVAYAKEHGLAIVFEVLKGIRDRCRFRKGQRRRLDSWAFYQLQQFVEYKARRAGVRVVSVDPRYTSQTCADCLHVGVRRQDDFSCNDCGQRSHADFNAARNIARWGLAVIRGEYSLLSCVLPSGGRVGG

SEQ ID NO: 9458 - protein, 231 aa, Nocardia sp.
VAVEAADLHAGHRHPFRPDGDVGGWVGADRGLSAFLVAATGDGVEVDRVVDHPKPLAAALQRQRRLAKAVTRKQRGSKSRGRAVTRLARHHRRVGAVRAHFLHQVSNRLVKTHDRLVLEDLNITGLMANRHLSRAIADAGWGELARQLRYKQAWRGGQVHVVDRWFPSSRRCSRCGTDNLALRLADRVFACGCGLVVDRDVNAAVNLAVRAELDHARVREPETRAPVINAC

SEQ ID NO: 9459 - protein, 252 aa, Lactobacillus sp.
LKEFGYIPTDSEHFVIKQGRIKFKAGRYYLTCLVEQAELPKLALTGEPIGIDLGLKEFAILNDGTLYPNQNKSSRVRRIRKRLRRLQRKLSRQYHALKARRQKEGKSATDFNLAKTQLKVQRLYQRLTRIQADYQNKIIAAVVRTKPQWVALEDLNVKGMMKNRHLAKAVSYQGFYNFRIKLVSKCQQLGIPVHLTNRLEPTSKLCHQCGHKKVDLQLKDRVYECQNCDYTEDRDINAALNIRDTENFELAY

SEQ ID NO: 9460 - protein, 203 aa, Anabaena sp.
MVVVVDNESELEIKSTTSKIAGFDFGLKTFLTCSDGTLIDSPQFLKQSLNAIKKASRIHSKKVTGSTNRERARKNLVRKHEDVCNRRRDWFWKLAHKLTDKFDVLCFETLNLKGMQRLWGRKISDVAFGEFMQILEWVAKKKNKQVVYINQWYPSSKTCSCCGHILASLDLSIRQWRCPSCQSINGRDENAARNIQRFGFAHR

SEQ ID NO: 9461 - protein, 419 aa, Streptomyces sp.
VTLDVRSGWCVVIQLRYAFRLYPDADQQTALARAFGCARVVFNDAVRAREDARAQGMPFPKAGELSTRLITEAKRTAERSWLGEVSAVVLQQSLRDAETAYRNFFTSLKGTCKGPKRGAPRFKSRKDARQAIRFTTNARWKITGGGRLDLPKIGAVKVRWSRPLPTTPSSVTVIKDAAGRYFASFVIDTDAAADAARMPAADCTIGVDLGLTHFAVLSDGTKIDSPRFLRRAEKRLKKAQRKLSRKQKGSKNRDKARLKFTRAHAKVTDARREFHHQFSTRLIRENQAIGVEDLAVKALARTRLAKSVQDAGWTAFVHMLEYKAVRYGRTLVKIGRFEPTSQVCSACGAKDGPKPLQVRSWTCEACGTLHDRDHNAAKNVKTAAGLAVTACGAPVRPEPVQAPRDEAGSHGFSPEPDTA

SEQ ID NO: 9462 - protein, 484 aa, Desulfurococcales sp.
MSGGGNPRGVSVRDSDPLQFFRELVEKRKKSNKRAVRLRLLPEKHEEEILFNIGLTSVRLWNELNYEKRQLFFKNDLKPEKRIEINRRYYHKYKNFLGVNAGQVINKNEEAWESFFELLKMKRQRRLPPHIRKISPPGYWKDKITGEKKIYMLIRNDRYYLEPINKGEGRLVLKDFKLSIRYVGRIKWEGKQGRLEIIYEAGRWFAYIPIEVGEKPSKSNPKGYIMPNYKDKKNRIVDPKSIKQRDPVGDKKAFIDIGLNNLFAVVVSDGSAFLVKGGSIKSEYYWWKREISTYQAVRDLLRNAGIHRWKDYHEKYLKALYKRDERLRHLYRTAIRFLAETLWSRGVMKIYIGYPIMLSQYNGNEYNNNIWWYRKIILWMIDVFIEYGIDVEIVPEDHTSIKCSICGEIHKNGRIYRGLYICRKTNKKINADINAALNIARRIGYKITTTRKIESYLISHNGVKSLIPRQRANTRDPEVRNPAL

SEQ ID NO: 9463 - protein, 394 aa, Symploca sp.
MLKAYRYRIYPNPEQSLLLTKSFGSVRWFYNYGLELTSNTYQETGKGLSRNDIIKLLPQLKKEYEWLKEPPSQILQQAALDLSSAFLNFFEGRARYPRFKNKHTKQSIRFPQGCHLTGSYLSLPKLKKVYCRVSRVPIGTLKSVTVSLTVTGEYYAACLYDDGQEKLNPSSEGKAIGIDVGLAHLAITSDGSKHGNPQYYRQYEKKLSIHQKRLSRKQKGSSNRNKAKIVIAKVHNKISRCRADFLHKLSRKLVDENQVIVVENLAIKGMVRNHKLAKSISDAGWGMFCTMLKYKAEWEGKTYLEIDRFFPSSKTCHVCLNQVSNLPLNIREWTCGKCKTHHDRDTNAAINIREEGLRILAGGHLATASGERVRPSKGTAFTRRFSMNEESPCM

SEQ ID NO: 9464 - protein, 367 aa, unknown
  TnpB Polypeptide
MEYSYKFRLCPNAAQRNLIQRTFGCARFVYNHFLSERIAQYRETGKSPTRFQQDKELTVLKQKLGWLQEPDKCALQNAVRNLDATYKNFFRRVKNGEKPGFPKFKSKRNHRQSYKSNGSIRVFDNAVQLQKLGKVKCRISRKVEGRILSATVSQNPSGKYFVSLCCTDVEIEPLPKTGAVIGVDMGLKAFAITSEGMEYQNQRYLAKNQKKLARLQRQLSRKPKGSNRRERARIQVARLHEHIANQRSDMMHKFSAQLIRENDVICIEDLAPKNMVKNHRLAKSISDASWGEFRRQLEYKAAWYGKKIIAIDRFFPSSQLCSCCGYRNTDTKNLAVRDWTCPECGTHHDRDINAAKNILSEGLRLLA

SEQ ID NO: 9465 - protein, 283 aa, Haloarcula sp.
MEVRRTVSVKLDVDSNDAALLRETVDEFLWAANYVVDHAWQGEYKTTSKAQLQAETYDDVREQTRLHANLVQNARNKAADAVQSAVARWKQGEYAGKPHFTSPTVVYDKRCATFHDEYVSLATVEGRIEVEYLLPAADRDTPHSRYLDSDDYQVTGAELHHRDGQWFLHLRTNAEVESDTPKQATTGHRTVLGVDLGVNQLAVTSTGTFWSGHEFDHEARVRGAAWLAPAVWHAGRSREYPVGRREGNGPVQTDAPPDCQRYHRRSRRERVYDHRLRGVERHP

SEQ ID NO: 9466 - protein, 387 aa, unknown
  TnpB Polypeptide
MYRAYEFRLYPNRTQVRHLGEMIETHRRLYNSALAQRKDAWEAEQTSVKYKDQSSWFKGQRSTNTWFANINFSSAQATLRRLDKAFQSFFRRIKTGEKPGYPRFSNRDKFSSVEFPSHGDGVRLFGNRLRVQHVGVVRVCLHRPTEGEIKTIRIVRRAEKWFVIATCLLPDVATISNGKPDTGIDLGLENFLTASDGFVVESPRFQKHELPALRVAQRAVSRKKKGGSNRRKAGKFVARIHERVANLRKDFHRKVALDLTRRYGFIGVENLTIKNMVKSHLLARAIHDAGWAGFVVRLEHKAASAGVQVVKVNPRGTSQECSKCGAVVPKKLGDRTHRCSCGYVAHRDLNAAKNILARARLVRTEPVEVNTCKGICSPRSRRLQATE

SEQ ID NO: 9467 - protein, 390 aa, unknown
  TnpB Polypeptide
MVNVCIAVGMEENVSSLKTLSLRSYHRLSRGILGYYRLCAISAATGILRNYRKTRKKNPRTRFPYARKLMLTTCYGFKIQNGLLRLPVRPRQYSYVRLNNHTLQVLSGLSVHSVTLTPDLLTISYSKETVETEPEGYVGIDLNLDNITIASTDGTVKTFDLSKATRIKADYRYVKSRFKRNDIRTRTRVFSKYGEKQRNRVQPLLHNVSKSIVEEAKSKRQGIVLERLTGIRRLYRKGNSQSRNYRARMNSWSYGELQRQIEYKARWEGVRVIYVPARDTSKRCSICGYKTLESTQRRLWCPHCGTVLDRDENAARNLAAGGLRFSPNGPPGEAMVEEREPGERDPNPQSRWRQVRSNRSNEDLTEPAETRTRLPARPLDPQQVRSIIRS

SEQ ID NO: 9468 - protein, 349 aa, Moorea sp.
MRIAYQYRLKPRKNQQAKIDHWLSMLCAQYNYLLADSAKPTLRERFRWYEENRCSINACPLVCHLPELRDNPDYYSQKKTLPNLKKTHPWYKDIYSQVLQDVVKRVKLVFDRFIKGDSNGKRSGRPRFKKQHRYRTFTYPQMKEGCLEGNLINLPKIGKVKVVLHRPLPVREASATPNGFKIKTASITKKCDRYYLVLSLEDKTVPEIKPDINLDSIVGIDVGLKEFLTTSEGETIKIPQYYRKTQKRLRVIQKRISRRNKRGSNRLKAIKQLGKQHKKVADKRKDFHFKTANYLLSKYDVVAHEKLNVKGLAKSRLAKSVLDAGWSSFLTILTSKAVRVAWPTALNAG

SEQ ID NO: 9469 - protein, 383 aa, unknown
  TnpB Polypeptide
MKSYKFKIKRPSKMIVQKFEQTLSICREIYNAALQERRDAYQLNRISISYQDQQNQLPEIKLIRDDLKDVYSQVLQDALKRLDKTFAAFFGRVKRKEKVGFPRFKGANRYDSFTFPQATGGFRLDGNSLYLSKIGKVKIRLSQTMKGKVKTLTIKREVSGWFAIFTVETTKEILPKTGKQIGIDAGIESFMTLSDGTKIENFKYFENSQKRLRVAQRKVSRRKKGCNQRRKAVLQLRKIHEKIKNQRNDFAHKLSTNLVKNFDLIAIENLNILGMSKGILAKQIHDVAWNGFFQKLTYKAENAGRQLIKVSPNYTSQDCSACGERVKKDLSVRVHNCLQCGLILDRDVNAAINIFSAGQADKSVKWAVAPCLLLESPSITVSV

SEQ ID NO: 9470 - protein, 493 aa, Bacillus sp.
  misc_feature (302)..(437): Xaa can be any naturally occurring amino acid
LFHFFLNIYLSKIILILPLRKVVKTMARKKAVKVLRKQKKRENMQRFTQKQNIGRACLTAKEFRLLQRMSHSSKALRNVGLYTMKQSYLNNNRMATVKEVDTAMQNDMNYSGIQSNSVQAIRRSLFTEVKSFFKALEQWKKNPEKFTGRPKFPNYSRSTDKRIIEIYQVPKVDEKGYWMIPMNVAFRKKFGSIKIRMPKNLRNKNISYIEIVPKQKGRFFEVHYTYEMHVSQMKKQPTTTSNALSCDLGVDRLVSCVTNTGDTFLIDGKKLKSINQYFNKMICNLQQKNMDNGISKRIVTNXXXXXXXXXXXXXXXXXXXXXXXXXXXXXXXXXXXXXXXXXXXXXXXXXXXXXXXXXXXXXXXXXXXXXXXXXXXXXXXXXXXXXXXXXXXXXXXXXXXXXXXXXXXXXXXXXXXXXXXXXXXXXXXXXXXXXXXXRLVGACSTRRSHLSGGFFHKEELLFFERVVQVGKQSFVASTNPKLTWGVTIRWHEC

SEQ ID NO: 9471 - protein, 436 aa, Bacillus sp.
  misc_feature (287)..(424): Xaa can be any naturally occurring amino acid
MNFLRKVVNTMARKKAVKVLRKQKKRETMQRFTQKQNIGRACLTAKEFRLLQRMAHSSKALRNVGLYTIKQSYLNDNKMATVKEVDTAMQADMNYWGIQSNSVQAIRRTLFTEVKSFFKALEQWKKNPEKFTGRPKFPNYSRSTDKRIIEIYQVPKVDENGYWIIPMNVAFRKKFGSIKIRMPKNLRNKKISYIEIVPKQKGRFFEVHYTYEMHVSQMKKQPTTTSNALSCDLGVDRLVSCVTTTGDAFLIDGKKLKSINQYFNKVIRNLQQKNMENGLSKRIVTNXXXXXXXXXXXXXXXXXXXXXXXXXXXXXXXXXXXXXXXXXXXXXXXXXXXXXXXXXXXXXXXXXXXXXXXXXXXXXXXXXXXXXXXXXXXXXXXXXXXXXXXXXXXXXXXXXXXXXXXXXXXXXXXXXXXXXXXXXXDLSGLVAHAGFI

SEQ ID NO: 9472 - protein, 387 aa, unknown
  TnpB Polypeptide
MLALGCGECYNILAMTLTARVKLLADPAQAEALKRTLERANDACNWASELAWNAQTFRRFPIHRLAYRPIRQGFALPSRIAVRCIAKVADAYGKGRTHKCNFRSHGSIPYDNLSLTWLTHKRLVSISTVEGRVFLRFVCGPRDRELLKYRAGESDLALIDGCFYLLAACDVPEPDPIEPVDVLGVDLGIKQIAADSDGEMFSGALVNGLRKRHRRLRAKLQSKGTLSCRRLLRERRRHESRFARHVNHCISKKIVSKAEDTKRGIALEDLKRRSLTTVRRHQRDTFSSWSFLQLKTFIDYKARLVGVPVVIVDRGNTSITCPLCGHIDRRNRKAQGLFLCTSCGLAGAADVIAAENIRRAALIVRPNVSDFGAPAPKVPETRPSALS

SEQ ID NO: 9473 - protein, 397 aa, unknown
  TnpB Polypeptide
MQLRYNYRLYPTPDQRTALARAFGCARVVFNDGLHARQAAFAAGQPYLTDRELSAQLTAAKATPERAWLGEVSAVVLQQALADLNAAYRNFLASINGRRTGSKVAPPRYRSRKDHRQAIRFTANARFCITRGGKLRLPKIGDVLVRWSRPLPSAPSSVTVIKDAAGRYFASFVVQVEPDALPEGGQLIGIDLGLTHFAVLSDGRKIASPRFLRRAEHKLRRAQKALSRKQEGSKNRGKARVKVARAHARVADARREFHHQLSTALIRESQAVAVEDLAVNGLARTRLARSVHDAGWSAFVRMLKYKARLYGRMFCRIGRFEPTSQVCSACGVKDGPKPLHIRTWQCQRCGAWLDRDVNAAVNVAKAAGLAVSACGAQVRPGVIPAQRGEAGTHPGTA

SEQ ID NO: 9474 - protein, 462 aa, unknown
  TnpB Polypeptide
MADIQTRSGHIHEWLMKRTNTFAVRPLSDDGEQVLRDLLDASAALWNEVNYGRLMRYNDQAGFENEDVFEADTGRLEGKYKDVLGASTAQQVIAKNSEAWTSFFKNKKAYHDESNTSVTEHPEPPGFRGNEKDGRVLKGVIRKDAYTVEWGDRSRLEIVVGEDLRDKHNSPGSRLRLEIAGDPNWLDYQKQGRLELWYDETDCTFRASQPVTVTDARDTPLADEKAALDIGANNLVACTTTTGEKYLYEGRELFQRFRDTTREIARLQSKLREGQYSSERIRRLYRKRTRRRDHAQEALCRDLVERLHEDGVDTVYIGGLTDVLETHWSVETNAKTHNFWSFKKFTERLACTAEEYGISLEARSEAWTSQECPQCGGTDRTTRHRDTLTCPCGFEGHADLTAADTLLKRHAEKAVRLMAQPVRFEWDDHDWSELSRSHESPKEQRTDPSTVHDNGNVASGES

SEQ ID NO: 9475 - protein, 521 aa, unknown
  TnpB Polypeptide
MEKVVITITTGVEFLQPQDEQIVRKAAEWYTKAREALFDHALQQGKVKKAASTLRTLNLPMAPHSRLPDLLTRDVGGILKALKEKRKGYLREFKRWWKEVCKVANEKGSQAVAVLKPHVDKLLNLVRQLPWNSPVWDGEAQEAFKNLKEAWAVVRQKDHEQLKIKWRAEVSPLRRPPRTPKFQRLVFNADGRVSGGSKSEALQIEEREDGDLYLRLQLRDPEGVVGGGAYQEVWLRLVVEDEERKQMLRDFAPKYLQLRQDGKRWIAHIVIEREIKFGLKGIMWTAGDYLYGVDIGARKYLLAAVAVPLKPGLPKLPNIAIPSGKFWQAVERVEAEWRKWQRLRTGKKDKEGKVVLKKRTAWRVLKRKRHMRREVAKNMIAEAVNTFINFIKGDNVDIRLWLAIEQIKNLNLSPAFQDRKSRWRQRRWAYRLLLEMLRYKAEWEGIRVIEVNPAHTSQICPRCGKKDGKARQGNRFCCTECKFQHNADFVAAYNIAVRALKKLGMREEIGWKVLTGKPRVL

SEQ ID NO: 9476 - protein, 391 aa, unknown
  TnpB Polypeptide
MASGDEGVLTISIGMRVSPEPGAIELLRRYNVVLNYAINKILRLNLRSFRRIHNVLYRELMEWFGLPSRIAIDSYRDALANAKSWIRNPKRGRKPRVKKLSMLLHQGQGYRVKDGYVKIIGGIKLSIIGWDKRYDGYENGEARLVYRGDRMILWISKKIPKPQPHQPRDVIAVDVNERRIVYGDHVINGEKDTEIDEAHRWKKLAEDLQKRYSSSKYLAWRRRKAILNRIRSYHRRARDILEDWARKTSLEIVRFAKKLGYAVAREDLTGFINTLRRIKSKDHRTKLIIIGYARLERWIDWQAERHGVPLAIVDPRGTSSECPQCGSKDFEEAGHRRLRCPRCGFEADREVIRKLNIRKRALKILGISGGSLTTPTAPQMTDVNPNRWGNQ

SEQ ID NO: 9477 - protein, 270 aa, Anoxybacillus sp.
VKLEKLKPSKKKNRQKLNWVRLAERGRIPHGKHVTYVNPRIVFDGIHWFLTVGVEEAEVKHETYSEGIGIDLGVKSFATVSNGMTFPNINQTPKVKNLEKSIRRMQRQISRKYEMNKTKTEGGEFRYRKTENIKKLEFLVLKKRRRLKNIQLNYTHHISTTLVKAKPTYVVMEDLNTSGMLKNRKLSKAIQQQTFHEFKRQMMYKCAWHGIELIVADRFYPSSKKCSRCGHVKDHLSLSERTYRCEACGIEIDRDLNASINLKQYAESMM

SEQ ID NO: 9478 - protein, 397 aa, Moorea sp.
MLFKVGKYLNNAELDKIMKTNVHFRALRSACAQQTLHGVIESFKSYKALKKKYDKGQLTDKPRVPKYRKKGGLSVVSYPARWVKLVKGQLKFTLGKQVKAWFGIDHFLLPMPSNIDFKSIKEYRFVPRNGCFYLEFVYERPKPKPVTPTENVLGIDPGLNNWLTCVSNIGKSFIVDGRKVKSQNQWYNKRVSAIKKGKQCDYWDEQLASLTERRNCQMRDNVNKAARFVVNWCIRHQISIVVFGWNKRNKDGINIGNKNNQQFVQIPTAKLKNRIEQLCIEYGIKFIETEESYTSKASFLDNDFLPTLGGKPKGWKESGRRVKRGLYRSRKGELINADCNGAGNILRKVETQLGFPLAKVCRAVLSLPQRYRLDSLSKSYREATSRSAVLTREVKSA

SEQ ID NO: 9479 - protein, 385 aa, unknown
  TnpB Polypeptide
MKLTLKIKLLPTDEQSKYLFNTIQEANLACNIISDVIWEKRIFNQFKIHNEVYHSIKQSTNLSAQVIIRCISKVTDAYKLDKKTKRSFRSLGSITYDPRILSYTPNDTVSIWTVGGRLKKLPFICHNRNYIPYIKGEADLVYKKGKFYLFQTVEVPDEKITDVEEFIGIDFGITDIISTSNNIKHSSEWLNDYRKKKQNIRSSIQTKADTSKRSTKRNCKKLSKRLSGREKTTATIINHTISKSIVKLAKEQSKGIAIENLTGIRFTSKKRNKSFTTKLGNWNFHQLRSFLEYKSILFGVKLVVVPPAYTSQMCHVCKHIGKRTNKVFKCANKNCKEKILDADNNASKNISLLGVAINQPEKSTLYCVMHSVSGLKPNHPVNVIG

SEQ ID NO: 9480 - protein, 418 aa, Bifidobacterium sp.
MDVVEQTVRYRYRVYPTTMQEQALRRLFGCCRVVWNDTVHMFRDRFDPTDRGSVPKPGEAQRIILTDAKRTPEREWLGDVSNVALSQIHRDAMQACWNGVRRNRRQRFARYRSLKRNPVNSARFTVDGFRIRGNGKVYLAKIGDLKVRWSRPLPSIPKSCTIIREPDGAWYVSFVVTRETTPLPETETNAAIDLGFTYLGELVDTDGKRHRIPAPKPLNRLQRRLARLQRKESRQRQGSRRREDTRDRINRLYAKARHQLDDRQNKEALQIIRETQTVGLETLSVRGMGKRHGRSVLTVAPARFVGKLKAKAEQYGRAIIQIGRWEPTTRLCSQCKHHVAGGIPEQVRVWECAQCHTILDRDYNAALNILDAAGLAESLNAHGDHIRLRLATAGRSNGRRSANPSDGQFMSGPGIPVL

SEQ ID NO: 9481 - protein, 408 aa, unknown
  TnpB Polypeptide
MAQLWRRSVGGYCAKFRPVRDRWIADQKVCDLPQRIWRVTLSDALNDIKANREAAKEKVIRYIFRNVDDKDKPKELFKKLKNDWVNDSYLRRLMRKYWKHGKNHTKDQIVLEPGSYKCFSHNNKNYLEVISLIRRKRIAIPIGTNFSITGQIRLILRDKRVEIHYTIDNTDGHVCGDKEIGIDKGYTEAFVDSEGDFYGKGLGEVLSKEPDYLKIKYQRRNKIKAVLGKLEQKNPKKVKRIRKNNLGRKKLNRRSQLHQAKVKTIVFTAVNGVVDKAKIIVCEDLTKTFKSKNLGKNTNRRLSGWVKGLMAKAINIVASLRGSRVVQVNAAYTSQTCSKCGCLGKRTGDTFHCASGCGAVMQADLNAAINVKARSDDKELHRWLPFQKVKQILLERCRQSDETAHPVV

SEQ ID NO: 9482 - protein, 403 aa, Mycobacterium sp.
MQMRYRYRIEPTPAQQSMLSRVFGCCRVVFNDALRLRDEAYQAGIKLSDSEIQRRVITVAKSTEARGWLCEVPSVALVQSANDSRRAWRNFFDSISGKRSGRKVGRPRMKSRKDHRQSFRLTRNGFSVRPNGRLFVAKVGEVPVRWSRDLPSDPSSVTIIREPDGRFYASFVVDVPASPLPPVQREAGIDVGITRLATIAATDCVRTDVANPKHLGRKLRKLARLEREKSRRQKGSANRDKTRRKVAVAHNEVARTRRDYHHKQALALVRENQVIHVEDLNIVGMVKNRRLARAISDAGWGQFVRIIGEKADRYGRTMHTVSRWLASSKTCSECGHRLDELPLQVRQWTCPACRAVHDRDHNAAKVILAAGRAERLNAFGAPISPPATREAQGDESGSTPTAA

SEQ ID NO: 9483 - protein, 423 aa, unknown
  TnpB Polypeptide
MASVTLVAESKLYLKDNLSLYNYFDDYSKLFNFLVRRTVHHLRHQLNGEPESKYRTNLLLEFGITNRMAKAIVVTAKNQLQLLKESSYYQYSRLYKRKRSLQRKIDKLKLSLNSNRLKRRKLAKVRLFWTQMKLNKVNQLISNGLKLNLTFGTKHLFKTNKTKFLAKRDNQVVYIGDKNETCGNQQFQIKFDSKYNHFNYKLRLDNKWVSGNNKYIFGSFVLKNKEAKVNILQALSTKLSNPLTYRILKRDGTLYLQIIYRRETPNITQNANGVLGVDFNKGFISVSEINSSGKLQSLTRYDYLHKEKATRTKTSMLDLVSKLVTQAISIGKDIVIEDLVSLDLNKKQDKTTSKGYNRMLNSLKFGLFKRCLFSKAAKEGVSIHVVNPYNTSKIAKASYTNRMKLNVHDAASYVIARRFYQYD

SEQ ID NO: 9484 - protein, 388 aa, unknown
  TnpB Polypeptide
MIRTSKHIISNANQGKQASLDQVFIDYKHDLEIYINYIIEGILPLKPNLSSKLLPTEVIKHSRYKQIIYKQASEIIRSQLDKSKKKRYSSYKNIYTYMMKNHPDSSFCKTKFSDLSLNNILKTKYFTKPNLNNISINLDERFFNIQNGNHFDNFVNLKLPYFNEKGTRALQINIPFNHHKHSLSFKHNTFKLRNNIQIKKVKDNYYIALIWEKEIDIKTNGKAIGIDMGYKKLIVTSDNQFINGDLSDIYSKISRCKQGSNGFKRSLNHRDNEINRLCNLINIEDVNNIIIEDLVSVKTGKKYFTNKIQRWSYAKTIDKINRMCEDNGIMLVKVSPAYTSQTCSSCGHVDKKSRQGETFKCRSCKYEIDADYNASINIYNRGIYSFSN

SEQ ID NO: 9485 - protein, 428 aa, Bifidobacterium sp.
  misc_feature (107)..(107): Xaa can be any naturally occurring amino acid
MAGKKSATARRREGMADNTPTRALVLPLALSPDQHAMYSRLADLYNRVWGSAVSWYDSNHTVNAVAAHKALYADLRGRFPQLPSQFVCNALRDAAGAVRSWNSNHPXLRGRFPQLPSQFVCNALRDAAGAVRSWNSNHPRRGWSLRASRKRPTVSFDLRTMGLRGNLLTLNSMHGLKRQRFLLPPIPAWFDERYPERRLQTVTLVLGPTDLVARLTLTFRIPKVEPAKGKVLGVDLGMHALYKDSEGGEYRYPRVQRVKRRYAYDRRTLQEKGTRSAHRRLKTMSGREERFIRDVDHCAAKRLADTPGIGVIAFEDLSRIRRLARKGTRTGRKRRNMLNQWSFSQLQEFTAYKAAAKGIKVVMVNPAYTSQRCNACGYVDKGNRDRARFDCLRCGHSDDADHNAALNIRDRALQSLGQTQDQGAVNHP

SEQ ID NO: 9486 - protein, 435 aa, Acinetobacter sp.
MKINKVYKFRLEPNAEQEVILNNLVGSARFVWNQILAVSFEMFAKDKFINATNLVNKITDLKKNPEYAFLATSSNAVSLQQKVRDLASAWSKFFDPKAHAHLKENKRKPKKPKFFKLDDGTEIQLRPLMPRFKRKSEGFDSIRLVQFDKYCCIDGNRVKLPNGIGLVKFRKSQEVLGRIKNVTISRKSGHWYVSFGTEKESLESPIHPSKSALGLDMGITKLIATSNDQHITPKNSFKTNQFKLAKLQRKLAKKIKFSENWKKQNRKIQKLHSHIANIRHDYLHKVTTTLSKSHAMIVVEDLKVANMSRSASGTLEQKGRNVKAKSGLNKSILDQGWSMLINMLEYKQYWNGGLLVKVNPQYTSQTYCKCGHVAKENRQTQAKFECVDCGYVANADFNAARNILSAGHAVLSAEGGCGKGRPTIQKTSEIREEVA

SEQ ID NO: 9487 - protein, 519 aa, unknown
  TnpB Polypeptide
VKKSTTPTFLLELPLQVDAGQAKRLRAHFEAARCLYNALLGEAMKRLRAMRADPAWQEARAIPQVQKQKRKEAFSHLRQAHGFSEYALHEFAKVANCAWIADHIDAVMAQTLATRAYRAANRVCLGQAKKVRFKSKGRGLDSVENKRNDAGMRFLLQPPEKGNQGWLLWRGDLLPALIDWHDPVVHHGLRHPIKYARLVRRKASSPQAQGADLQGYRYYVQLALEGEPYQKPKHTVGTEVIGLDVGPSTIAIVSQQGEAQLLPFCEELTPDARAKRRLQRKLDRQRRANNPENYDEKGRIKKHGRQRLVWKNSKGYLATRRRLAHQERKLAEHRKSLHRRLVHQIIRRGNTIRTEKLSYKAWQKLYGKSVGRNAPGMFVEQLRRTVASTGGILLEFPTHSTKLSQYCHGCGSYVKKPLSQRWHSCPCGIGPVQRDLYSAFLAAHLDYPADTTPSIAQDSWEGAGLRLRAAIEVLQQRATEGQALPRSVGIPRAGARLPKSLAPNQQELVYRRGRLEALE

SEQ ID NO: 9488 - protein, 399 aa, unknown
  TnpB Polypeptide
MLKTYKYRLYPTKEQIAKLEQTLEICRLVYNSALSDRRVYYKETGKGLSRIKQQEALKSYKKDKEFLQEVHSQVLQNVLFRVERSFDNFFRRVKEKKGKPGYPRFRGKDRYDSFVYPQQGGFQITQQGLKLSKIGTVKIKLHRSIPIAIKTCTIKREIDKWYVTFAVECSHITQNIPENPVGIDVGIKAFAVMSSGDIIENPKHLQKSEKQLAKKQRHVSKKKKGSANRHKARIILAKQHRKIRNQRSDFHHKLSRQIVNRYNPVIVEALNIKGMVRNHHLAKSISDAGWGQFLSYLASKAVEAGSQIEKVPPHYTSVNCSNCGNQVPKTLSDRIHKCPFCNIVLDRDHNAAINILNKSTVGTTGSHAWGDPTPTLPTGALQVRSLNQEAPSEFPIQEG

SEQ ID NO: 9489 - protein, 409 aa, unknown
  TnpB Polypeptide
MQTQTLRYNFRLKPKPDQEEKLTLFGASARGVWNLMLSECIRRYRYDKTFLSYGDMWSLAKSLKDFEEFAWLKALDQAALQQVLRDLDEALRNAVIKKRLQRFPKHKVSYKKKKLHDDAFRCVNTNNSVRLENGCLRIPKIGLVPIVLHRKLVSKLKSVTIEYQHGKWFASIVQEASVAEPKHRLNSVSGYDINSNQIIVGSNGLDINNPKYLKQSEQKLKQLQRQLARRNKGSIRWHKTKQRINKLHGRIARQRHDMLHQLSNTIAKASDLVIFEDLNVRGMQRFNGRMISDNGMAKITDMVKYKVKREGGLYHEINRYTKSTGVCVSCHHEHSLALSDRSFTCTHCEAHQIRDVASAHTIERIGVDELIAIGAIVGDIPNAQEKLPGKTKVFKRLKFDNGLEKNEVA

SEQ ID NO: 9490 - protein, 313 aa, Paenibacillus sp.
LSYNACATQLPALKQQFEWLKSVDSIALQSAVRNVADSFERFFKKQNQAPRFKSRKHPVQSYTTKYTNDNIAFSGNRLKLPKLSWLRFANSRACEGRILSATLRRNAAGKYFVSILCEVEMNPLPQTDKEVGIDLGLKEFAVCSDGGRVANPKVFRKYEQKLAFWQRRMARRNQGGSNWQKAKQKVAQIHEKIVGSRHDFLHQLTTKLIRENQTISIENLRVANMLKNHRLAKSIADASWGEFARQLAYKAEWYGRTVKVVDTFAPTSQRCHVCGTIHPEVKKLSVREWTCLSCHTHHDRDENAAHNIKSLGV

SEQ ID NO: 9491 - protein, 238 aa, Paenibacillus sp.
MNGNRLKLPKLGWLRFANSRACEGRILSATLRRNAAGKYFVSILCEVEMNPPPQTDQEIGIDLGLKELAVCSDGRRVANPKVFRKYEQKLAFWQRRMARRNQGGSNWQKAKQKVAQIHEKIVGSRHDFLHQLTTKLIRENQTISIENLRVANMLKNHRLAKSIADASWGEFARQLAYKAEWYGRTVKVADTFAPTSQRCHVCGTIDPEAKKLSVREWTCPAGTAGIDWYTIFREKISI

SEQ ID NO: 9492 - protein, 374 aa, Paenibacillus sp.
MILARKVRLHPTEEQEAQLWKSAGTARWAYNWTLIRQKVNYENGGKFLSDNDLRKEITILKKSDGFNWLSEVSNNVAKQAVKDACEAFKRFFKGQSRFPRFKTRKRSTPSFYNDNLKLKVKEGKFVLIEKVGWMKTSEQIPIGVKYINPHVTYDGRYWYVSVGIKEDIRKEELTDHVIGIDLGINYLAVTSAGQVFPNINKTVRVRKIEKRLQRLQRRASRKYEMNKEGNRFVKTGNTIKIENMVRHLHRRLRNIRLNYLHQTTTAIAKTKPCVIVMEDLNINGMLRNRYLAKAIANQSFHEFIRQMKYKCEKHGIQFMQAHRFFPSSKRCSFCGEIKSDLKISDRIYSCGCGREIDRDLNAAINLANYGTLAG

SEQ ID NO: 9493 - protein, 371 aa, Oceanobacillus sp.
MTKQNKAFKFRLLPNEMQEVLLAKTFGCVRFVYNKMLAERKNTYKKFEDDKEKLKDQKLPTPAKYKDEFPFLKEVDSLALANAQINLQNAYKNFFEGNAEFPKFKNRKSKQSYTTNRVNGNIELQNGHIKLPKLKLVKIKQHREIPSDYKLKSCTITKTKSGKYYISILTEYEKEIKAVSIQKVVGLDFAMDGLYVESEQGKKANYPRFYRQALDKLAKEQSILSRKKKGSARWEKQRLKVAELQEKTANQRKNFLHHKSKEVASTYDAVIIEDLDMKGMSKALHFGKSVHDNGWGMFTLFLGYKLKEQGKQLIKIDKWFPSTKKCSWCGAEKKLSLSERTYQCSCGFVADRDYNSAINIKNEGIRLLALA

SEQ ID NO: 9494 - protein, 421 aa, unknown
  TnpB Polypeptide
MATYCVQSNVIRGLSKEQYDVLREMCRYSNNLYNVALYNIRQHYFNTKQFLNYEGNYHECKTNENYKLLQAGISQQIMKVVDRSFKSFFNLIKKCKLGDYRYHDVNIPHYRPKGGMFNLIMSTNALVVKNGYLYVPMSRNFRTLHPGMKEIKIAFPERLTDKIIKEVRILPFNNGRYFKIQYVYEVEQEDAYVDKNNILSIDLGVDNHATCVSTVGTPFIMEGRKLKSINHQWNKELARLRSISMKQKLKTTNRIQNITTKRNNRVNDIIKKSARYIINYCIKNSIGTLIVGYSVDFKRYSNIGKVNNQNFVQIPLGDLRQQLEFLCWKYHIDYIKQEESYTSKSSFLDKDVLPEYKAEQPYEGTFSGKRIKRGLYQSKNGTILNADVNGAANILRKCKQNVDFDRLCKGLLASPVRIRIS

SEQ ID NO: 9495 - protein, 395 aa, unknown
  TnpB Polypeptide
MQKIISINIRTPTIRKQTELNKLQFEHLACCQELFSILQANKGVTQNEFHHLTYNDFRRKYKLSADLLISARTCVWNRRKITNKINSVPIRFNSKLFRIDTNKNFIICLSCLNKSKRIALPVIQDGAYQRLVKNLVNGFVISSVLLFKDFRVQVLIKKEFEKPVESKNIIGIDTNGNNIAVSIYNSKNKKILRHFYFGKYMFVKRKIIERRKSKLQGFSDLGSQKAFKSLRRLKRYEYNFIKDSCWKIAHKVIDLSKSYENASIVVEDLKNLRTGRKLGNSKGKRVNKIINKIPYNRLFTFISNLCEENIISFNKITPYHTSQLCSRCGALNKSGKVYKTYVCKSCGLIMNRDNNASKNICKLFGERSILTNTSQTSLNRVAVNQPLLFNEIYAL

SEQ ID NO: 9496 - protein, 347 aa, unknown
  TnpB Polypeptide
MIQTYKLKHEQDFSKELELAEKIAWIGFYSKTISSKDVKHIGLKSIISNQILKKYSRNKKLKSVKSVKLAIPNQGIKIKDDKIYIPCLKLSLEIWFDKNFKKINQIEIGKEYAYISVSYKEPELIKPETFIGVDRNTTHHTLVASNLQTGKVLKLGKSCNHIHKKYKEIRRNLQKKGKYQKVKSIKNRERNIIKNINHQISKKLIDYALKVKGGLVLEKLKDIRKTAKTRKKQRYSLNSWSFYQLAQMIEYKAKKQGIPIFYVEPQYTSQRCSRCGHIEKANRQGNLFQCKKCGKVEDSGVNAGFNMAEMQQKGILQFDIERDISKGNTDIPKEAMLIQATSEPHAL

SEQ ID NO: 9497 - protein, 408 aa, Synechococcales sp.
MHRAIKVRIYPNNEQSHHLNRMMGCARFWWNFALNLCNETYKETGKGVSQIALNKELPKLKKAEETAWLAECHSQVLQSTTLNLTKAFKNFFEKRAKYPCFKSYKRMQSIQFPQSVKIVDGELKFPKINGLVKASIHRIFEGEIKTVTVSKTPSGKYYASLLFETNAEYPEVQIEGKTTGIDLGLWDFAVTFDGDKVTKYPNPRHIKRHEKNLARKQQKLSRKQKGSNSRNKARKLVAKVHERISNARQDYLHKLSRKIVDKSQVVVVENLNVKGMVRNHCLAKAISDVGWGMFVNFIDYKLKEKGGLLIEIDRWFPSSKTCSNCFYQIGEMPLKIRSWTCPHCGTIHDRDGNAAMNIRAEALRMLQTGGTPVSADGGDVRPKGGRKSVLRHSPVKSEAPLSSSDRAG

SEQ ID NO: 9498 - protein, 235 aa, Staphylococcus sp.
MFKIHYEKVKYVIENSSDEQLRDIGIDQKTISRMRDHSNYSKDLNLSTAYKLYHKYFSEWATVIGIDIGTGNYLSASDASMERTYTDTSDELARIIKKYRARLKQKKFDNNEAEKKFARGIKKHINKVVKEIMEIYPPPRVLVVGKGSGAGVSESMFGRIFVYTHKSLLKYSDKFDDIVLVDEAYTSVKCPECSFVHKKNRKYNNHFKCRSCGYENEDDNIVASYNIAQEFLKII

SEQ ID NO: 9499 - protein, 441 aa, Actinomadura sp.
MNPHSIMSRLVQPKQSENEVERHATPASTTRILLFCKVPVMRTAYKCRAYPDPEQAAMFGRTFGCVRLVWNKTLAERRRAYRTDGKRTSYKETDAALTMWKKTEELAFLSEVSSVPLQQALRHQHAAFANFYAGRARHPRFKSRHSRQSAHYTRSAFRMKNAELWMAKSTAPLEFVWSFDDVDPATLTPTMVVISRDPDGRWYVTFAADIDTPEALPAAGHAIGIDLGVKDFAVTSDGDRVANPRHLERKAANLARYQRRMARKQPGSVNRRKAKEKVAHARRKVRNARRDFLHRTSTDLIRRVDVIVIEDLAVANMVRNRSLARAISDCGWGEFRRQLKYKAERAGRTLVVIDRWYPSSKTCSACGHLLDELSLSTRRWTCPGCRTRHDRDHNAAKNILAAGRVAAGGGASGDVCGADVRRQGSSLPRSAAKQKPLQREP

SEQ ID NO: 9500 - protein, 372 aa, Ruminococcaceae sp.
MDMNRAIQYRIYPSEEQKQLFAKTFGCCRKIWNLMLADREAAYQKDKTVIKPTPAMYKNEYPYLKEVDSLALANVQLDLQDAYHRFFTVKGTGHPKFKSRKRSRNSYTTNNQNGTVAIDREHNTIRLPKIGLVRAKLHRLPCEDWILKAATVSRDSKGDYYCSVLFEYKDAIVPVEHPENNAIGLDYKSDGLYTDSEGNQCGSPKYYRKGQKRLKKAQRKLRHKQPGSNNYKKACRKIGKEHVHIANQRKDYLHKISTEITNQYDMVCVEDLDMKAMSNKGFGNGKATMDNGYGMFCNMLSYKLADRGKAYVRIDKWYPSSQTCSCCGSVYPELKDLTIRSWVCCDCKAEHDRDVNAAINIKEEGIRQFLAG

SEQ ID NO: 9501 - protein, 433 aa, unknown
  TnpB Polypeptide
MLEAVKVALDPTPAQERLLLSHAGAARFAFNAGLAHVKAGIEAGDKLDWSFYSLVRWWNANKDTLAVNPATGVVWWSQNSKEAYSMALRDLAQGLSNWVKSRKGQRKGKRVGFPRFRTKNRVMRFAYSTGFTAPPARDPYGLKLPRIGRVHCMENVTARVGDARVLRMTVSRRAGRWYAALTVEREDKPVTKPPKGGAVGIDLGIKTLATLSDGTIIANPRYLAASERRLKRAQKALSRKTMGSRRRTKARAKVARLHAHVANQRSDAIHKATTWLASTYSHISIEDLNTAGMFRNHRLAKAVSDAAFGEFRRQLEYKTARTGARLHVVDRWYPSSKTCSKCGRVKAKLSLAERVYKCDGCGLVIDRDLNAAVNIRVAGSAPETINARGGDTSRADTTSGNADPGETRTKPAQSKPRRLGADGRKPVLQAKSN

SEQ ID NO: 9502 - protein, 336 aa, unknown
  TnpB Polypeptide
VEEKALFSERVSFSSPPTSIERFGEGLQEFFCQESEISKVQKEISARFIPIPAGIQIDEDKQRIYLPKIGTVGYRKSRSIIGKPKNITVSRQGQKWFVSIQTEFEIESKRMINSEIGIDMGVKKFVTFSNRTFVEPVNSLKNNLKQLAKLQKELSRQQKGRNNSKKTKAKITKLHRRIANIRRDFLHKITTTIAKNHGIVFMEDLKVSNMSASASGTVEQPGKKVRQKSGLNRSILDQGWFSFKTMLAYKLEERGGLLVLVPPKNTSRTCPNCRYISAENRRTQAHFSCIKCGYKENADVVGAINVLRAGHVRLACEMNGAVRLLSAGTQRDLLQQ

SEQ ID NO: 9503 - protein, 381 aa, unknown
  TnpB Polypeptide
MKARKTIKCGVVFLTKHKQNLLDQEYDNFQHFLQTGEDLGVYSAHKQQARRFYKKIKKSREYPISIRNDLLKIEKRPTKIVKYWARIPVKGQYGGVWVAIKPHEDFPDLSTCKICESKLYRKNGKFYLNVTVEKEVNIELPKEKEKIAIISIDIGERNPITYTVYAGGRILDVGFEGREIRSIRWHYLQRRREIGKKKVKHALRVIKKIGHKERNKVRDILHKATSKIVRMAENLRKEGYTPIIVIGDIKHVRKPREKGKPRNRKLNRMIHSMPSYQVKHMLQYKALWREIPVMLINEAHTSQLCWRCGALGRVNKRRFFCPECGLDYNRDLNGSRNILKRSLGYMLGDWAVVNQPVSPPLNSSQLRVQSAGGEATDSNRW

SEQ ID NO: 9504 - protein, 404 aa, Microcoleus sp.
MIVYEFKVKGKEAQYRAIDEAIRTSQFIQNKCLRYWMDNKGLRQYDLNKYCAVLASEFPFAEELNSMARQSAAERTWSAIARFFDNCKKKVKGKKGFPKYKKHCRSVEYKTSGWKLSSNRKAITFRDGKSIGTLKLKGTYDLNYYDIKQIKRVRLLRRADGYYAQFAVDARVRVETEPTGQVIGIDLGLNFFIADNKGNTEKSPQFYRKSERQLNRANRKKSKKFVKGGLPQSKNYHRARNRYARKHLRVSRQRKEYCKRVAYSVIQSNDLVAYEDLNVKGLVKNRHLAKSISDAGWSTFRQWLEYFGHKYGKVTIAVPPHNTSQNCSSCGSKVKKSLSTRTHVCPDCGLIEDRDTNAAKNILKLALCTVGHTGTYAWGDLPSWAVGAILSSNGELLNQESHAL

SEQ ID NO: 9505 - protein, 370 aa, unknown
  TnpB Polypeptide
MGNMHKSTYQYRLWPTKGQQRLLAQQLETCRWVYNQTLAARRDAWEEQQESLGLYDTIKLLPDWKAERPSLKNVHSQVLQNVQVRVDLAFKAFFRRVKAGEKEVGYPRFKGKGRYDSIIYPQYGNGAKLNGATLILSKIGSVRINLHRPIEGTIKTVTLRCSATGKWFVCFSVEKECTQPKDVPEAAVGVETFATLSTGDAIPNPRFFRRDEKDLVRAQRKLSKEEKGTPARAKRRKVVARIHERIANRRKNVAHQISHKLVHTFGMIVFEDVSITRMIKNHCLAKSIADAAWNQLITYTHYKAEEAGRVCLQIDPRGTSQRCSRCKTTVKKGLSVRVHSCPVCGLQIDRDLNAAINILAVGRHSLGARP

SEQ ID NO: 9506 - protein, 357 aa, unknown
  TnpB Polypeptide
LGASRFVYNRTLEYLKGLTETRPVWTDVATDIILPELPEWAGEIPFQIKKLAVKEACAAYSGAKQKYRRKGTVSQLHYKSRKSPFQTCYIPKSAVKPQGIYYTYSGILRYAEPLPDSFLDCELSWQQGRWYLCVPFQTAVPMGENQARIVALDPGVRTFITFFSPDMTGVIGDHDFGRLVRLCHHLDALISQRSTSKKKKQRYRIKKAENRLRWKIKDLRDELHAKTIRFLVDTFDIILIPTFETSQMAKREQRKLRSKTVRSMLTWAHYAFKERLKVVAAQDGKTVVEVNEAYTSKTCSWSGEMVRIGSSERIRGSDGIQMHRDVNGARGIFLRALAELPLLETLQHALVNDAGNL

SEQ ID NO: 9507 - protein, 358 aa, unknown
  TnpB Polypeptide
  misc_feature (2)..(18): Xaa can be any naturally occurring amino acid
LXXXXXXXXXXXXXXXXXPTLHKSEHGYTLDLPVSVPEIETETADDRVLSVDLGVTKQVTAVVIDDTEGQVAPPQFINHESKQKLFRLATEADGINDRLGNLRRNGKSHTDRFAHLHDEYHHLRQKEKRLREQIQHDAANQLIWLAAKHGCETIVFESLGQIEAPDTSGALARSISTWARGSLLNKTEYKAELVDRETTTVNPWGTSRHCPRCGERGKTVKAPDDHTECRHGGHFHCPNCKYECDRDVVGAVNVGRKHLSTSKMEEAKPVAYTETGNHASFPSPPRDARSTSVQSTASQDTASGRQTLLTQDCSTACRVSQRRVDCNKIMGVTRTGSCPAVVSYRVSSPTLLILHKHY

SEQ ID NO: 9508 - protein, 464 aa, unknown
  TnpB Polypeptide
  misc_feature (442)..(459): Xaa can be any naturally occurring amino acid
METTHRTHICRLSNHSQVKEAFDTHAWSASTLWNVANYHAQQVWDDTGEIPDEAALKHELKDHPTYDGLHSQSSQNVLEELSEADSSWYGSDDDRDNPPGYRKRNYYDADGNRVHEEHPRSTVTWKPSAIRHDTENARLRLSKGANHKSSPRAREYILAEYDAPPEVTLENIQQVRAVWQSREERWELHVVCEHDLDTESPGDTVAGVDLGICNPATVAFPEDAVVYPGNRLREDKHYFTDDEYQTEGGNGPSQRAEWAREKLARRKTHFLHALAKDIIERCVSHNVGTLVIGDPSGVDESDWGRHGNKRLDNWAYKRTMNLLDYKSRERGIEVEQRDERGTSSQCSVCGFEDDDSRIERGLWKCGRCGVVGHGDVNGADNSRQETLPVTPPLEDSGNGCVAQPRIIQFDRTRGFQPRESVSDVKPSYPNPAVAVPWDSPAXXXXXXXXXXXXXXXXXXGVRSA

SEQ ID NO: 9509 - protein, 433 aa, unknown
  TnpB Polypeptide
MVVGASRTVTIPLRVPGDRTDDFHATSVQYQQCQNAASDYCWNDPKTPDDLITTKKTVEDDLYHPLKEQTDLNANLVQKAFKDVTAATTGLQTTWKNGDRVSKPEWRERPDESYTMTYDKRAATYNQREATFATVNGTVDCQYELPKDIAGTPYERYVLDSDWSFTTSKLVYDGHRFHLHAVLTRTYTEDSVSDMDSDTHSENRTRVLGVDLNVKGYSAVTSAGGFHGNADHLNHRREQYEALRGELQETGTRSAHLRLQQRSSHEGNWFDQYAHDVANSVVADAVRVGATHVAVEDLTRIRKRISNQPEYQQWLFRRIQEYVEYKLEEFGIEFEQVDARYTSQSCSRTDCEHVAEANRDGKEFCCGACGYELDADLNAAKTIALKLLSELPASHTCSSGKATSQLALVSGALTPAGEFSRQDWSSTDKPHPQ

SEQ ID NO: 9510 - protein, 487 aa, unknown
  TnpB Polypeptide
LPTASNNSPRRKPTNSTSKYSDWQYSPTTYTCSSRAIRNSLRTKSFSRSRATPRGTSARNSTSVSPRCGHARTSSPQQERCRVNPSKNTSKHKRDSRMQHEVTTTVRVKLHSLTERKARLVEREYGAFQDAVHGDDSANLYSATKQQAGKVRSNKNPREDTEQPVVLRNDCITIEHDEETVLSSWWFKLPVYNPEKERGDSIWVPVRAPEKDTNLLKGEYIRDSELVHRDGEWYVHLVCKRSVAVADEYDDVLAVDMGAKWIAVSTFLSDRDTQFHGEEIRHVREHYKQLRKSIGKSKVRSGAQVIERLGDKESRTVEHELHQVANALVARARERNAVMMFGDMSGLRFDNDKGRYVNDKTHKMPYAKMANILTYKSHLDGRKCLPVNEYDTSVTCWRCGSQNTSREVQGRLECDDCGLEDNADKNGASNIGKRAVGKTIQSPLSTVGAVVAQPETQVVLKGTNGEMEPANSPEDVGLTLSEGSPRL

SEQ ID NO: 9511 - protein, 413 aa, unknown
  TnpB Polypeptide
MEVRRTVPVTLDVDSPDAALLEETIDEFLWAAQSVTDYAFHGEYVTTSKTTLNDDTDDDVRTATNLHANHVQSARNKAAEACKSVVERWKRGKKASKPHFTSLHLVSESRTATFHDNYVSLATVNGRIEADYVLPKTREDTPHQQYLFNDDFSITSAELHRQHGEWQLHVCCTATVESDTSAQATTENGTVLGVDLGVNQLAVTSTGRFWSGDECDHWRREYEKRRGSLHEHGTRWAHENIQSVGRKEEGRFTQTLHRISTELIAEARTHGCTVIAFEDLTDIRERTGASWGHKWAFNRLYEYVAYKTEACGVAVTQVPPEHTSRRCSECGFTHPDNRDGTHFECLKCNSQNDADYNAAKNIGLRYLRGTHTEGGGGAPVGVRLNSGTLSVNGGYSPAEKSARTGVHAESPRL

SEQ ID NO: 9512 - protein, 293 aa, unknown
  TnpB Polypeptide
  misc_feature (287)..(293): Xaa can be any naturally occurring amino acid
VRDQLPALKNWWDDLTDLYSTVSQAAVMRIEDSVKALSQLKQNGYNVGSLNWKAPREFRSFTYVQSGFEFDRKNGQTVLSLSKLADIPLTRHRDIPDSVTVKSVTVKKERTGEWYASFAVDGKDEPTKPDNPDRCVGIDVGILKYAQDTDGRAVGFPDLQDERERLRREQRALSRTQQGSNNWHKQRQTVAECYQALRRKRHDFLHKLSNYYATNYDLVAVEDLNVKSMLESSGNSRSTAFAAWDTFTTFLEYKCKREGTYYVEVEPAGTTKECASCSVETKKPLWXXXXXXX

SEQ ID NO: 9513 - protein, 343 aa, unknown
  TnpB Polypeptide
  misc_feature (296)..(302): Xaa can be any naturally occurring amino acid
MRYTYRYQLNPTDSQREQLDLYRDTCRQLYNHALKEFNEIPKSAGTLNQRVRQVRDQIPDLKDWWDDLNDLYSTVTQAAVMRIEHSIKALSELQNQGYKVGSLNWKAPQDFRSFTYVQKGFEFDSKDGHTVLSLKKLADIPVVKHREIPDTETIKQITIKKEPTGEWFACVTVDGKETPEKPENPDRCVGIDLGILKYAHDTDGRTIGSLDLSQERERLQREQRKLSRKEHGSHNWEQQRQKVAECHQQIKRKRHDFLHKLSNYYATEYEFVAVEELNIKSLLESSGNSQNTASAXXXXXXXQSNGSNSRNDSQMAGSTMRWFCPEKQQPRSSRRPGWSYSQS

SEQ ID NO: 9514 - protein, 173 aa, unknown
  TnpB Polypeptide
VTQLAVTSTGTFWSGDECDHWRREYEKRRGDLQEHGTRWAHENIQSVGREEEGRFTQTLHRISNELVTKARENGCTVIAFENLTGIRERTGASWGHKWAFNRLYAYVEYKAEAHGLTVEQVNPENTSRRCSECGFTHPENRDGTHFECLNCEYQNDADYNAAKNIGLRYLRQN

SEQ ID NO: 9515 - protein, 436 aa, unknown
  TnpB Polypeptide
MPVVVRRTNTFAVRPLSDDDEKLLRGLLDASASLWNELNYERRQQFFDGESVWDTADYRKQYVDVLGSATAQQVIRKNKSAWHSFFAARENGENTAPPGYWGNEDEGRELRTFIRNDQYTLETGERSRIEIPVGQALKGEYGLGYHDRLRLEVCGAPQWNGEQGRLEIQYDETAGTFRAFQPVTVPDSQQDSPLASEEAALDVGANNLVACTTTTGQQYLYEGRDLFDRFRETTEEIARLQSTLREGRYSSQRIQRLYRKRTRRRDHAQDALVRDLMERLYAEGVATVYVGDLTDVLSTHWHAEVNAKTHQFWAFQSFIDRLSYTAEEYGITVEVRSEADTTRTCPACGKQEDTNRDGDVFRCPCGHEAHADLCASRTFLNQQAGEIEVGSMARPVRLKWDDHNWSEIAHSPERASPNEERTNRSTRTGNVASVSG

SEQ ID NO: 9516 - protein, 345 aa, unknown
  TnpB Polypeptide
MEKRRTVPVKLDVGSDDTALLQDTVDEFLWAANSVTRHAFEGEYVTTSKTTLHDDTYEDVRNETGLHSNHVQAARNKAADACKSVVEKWKRGKKASMPHFTSPHLVYDHRTATFHDKYVSLATVDGRIEVDYVLPDNERDTPHAEYFFSDEYETTGAELHYSNGNWMLHIHCKKDVESGTPEQAAPENSTVLGVDLGVTNLAVASTGTFWTGDEFDHWRQEYENRRGNLQECGTRWAHENMQAVGRKEDGRFKLTLHRIANELVDEARDHDCSVIAFEDLTDIRDRTGASWGHKWAFNRLYEYVEYKAEACGINVEQVDPETHLGGVQRVGSRTQTTVRASRSSV

SEQ ID NO: 9517 - protein, 433 aa, unknown
  TnpB Polypeptide
  misc_feature (17)..(23): Xaa can be any naturally occurring amino acid
LTDTVSELISILESVSXXXXXXXEYTDFYEDYAPILGKAACQQVARKNSEAWRSHFRLLEQYHNDADSSVTEKPSPPGYWGNRDEGYELHGLVRNDLYTFDWGEDRSTLEFGVGDVLEDKYDFEHQERVTLEVRGSPQWNGDDSRLELVYDEAADTLRVKHPVRIRPERLQEQRLDSFTHTLDTENTTYTAAIDVGANNTLAIVTSQGDTAVYHTRPEFDEFQELSGLIGELQSELPDDQYTSKRIQRMYDKRGKRRDHSRDAAVKHAADWLLERNVDTVSVGELTDVLGTHWSATVNEKTHNFWSHRQLVDRLELTLGDAGITVEQVSEADSSSRCPECGSEDVTRDGDEFRCHDCELDAHSDVAGAWNLLQSEVGPMARPAALSAERERDAPRKGAYWEWNGHDWTPSSVEEQSRPVDQTSISEPASSQPG

SEQ ID NO: 9518 - protein, 232 aa, unknown
  TnpB Polypeptide
MQKVEPDENASETTAKHRTVLGVDLGVNTLAVASTGRFWSADEFNHWRQEYEKRRASLQQCSSRHAHENIETVGQKESGRFENYLHTVANELIEEAVENDCSHIVFEDLTHIRENIPEATWHHIWPFRRLYEYVEYKAEEHGIEAVQVDPRNTSNRCSTCGFTHSDNRSGASFECQQCGYENHADYNASKNIGLQYLRRRQNADDGGAPVDVRLNRGTLNVNGEYSPTVVTG

SEQ ID NO: 9519 - protein, 420 aa, unknown
  TnpB Polypeptide
MATTTVTRTLQATLVPPTSHKQTSLQDTVETYRCALDDAFQADCETQTAVNDVVTPYELSSYAKDALKNYVPGLVDEADELDDSHPVRYTDRGLTLDHDADREHSFCWRVPKAQSADGSPFWIPLRISPAQRSVWHGVLDGDVGSNQFQLHRDGETWSLHVGVDIEVPEPAYDPDDEEVTAVGFDIGEAHLLAGCACTNGSPTDPLLITGDRARHLRKQMFTTLSRLQDRDASQWRIDERFDHYQNALTDIVEKASRKAIEYAQRFAKPVIVLEQLTGIREDLDYGKWMNRRLHNWAFRRVQDAIERKATELSIPVVYVHPHHTSQTCHACNQLGYRNGDEFRCTTDDCWVTEYHADINAAVNIAERLDPWGESLPVKSAGDDILRNGRTCDSAMTPAEESPPGQMTLGRYVESEPTSSD

SEQ ID NO: 9520 - protein, 257 aa, unknown
  TnpB Polypeptide
  misc_feature (10)..(16): Xaa can be any naturally occurring amino acid
VTAASKRQPXXXXXXXTSGNCICLRDADDQPESPVRNGRHRPWYLQHCGCLCRRRDTAVSGQCPERRRSLLRQEEYETEGENGPSARAEWARQKKSRRQAHFLHALSKDIVDQCAERDVGTIAVGHPKNIRDGSDWGRHGNKRLHDWAFETLLSHVEYKAEERGIDGDRTPEAKLKTSKTCCECGTEADSNRVERGLYVCENCELIASSDLNAAENMRTTVTSSPATNRSNGCLAQPSGRLFDKSTGRIAPREQVVP

SEQ ID NO: 9521 - protein, 453 aa, unknown
  TnpB Polypeptide
  misc_feature (340)..(421): Xaa can be any naturally occurring amino acid
MHYAYRYRLHPTESQRETLDYYRDTCRQLYNHALTEFEQIPQSAGTLNQRVRQVRDQLPALKNWWDDLTDLYSTVSQAAVMRIEDSVKALSQLKQNGYNVGSLNWKAPREFRSFTYVQSGFEFDRKNGQTVLSLSKLADIPLTRHRDIPDSVTVKSVTVKKERTGEWYASFAVDGKDEPTKPDNPDRCVGIDVGILKYAQDTDGRAVGFPDLQDERERLRREQRALSRTQQGSNNWHKQRQTVAECYQALRRKRHDFLHKLSNYYATNYDLVAVEDLNVKSMLESSGNSRSTAFAAWDTFTTFLEYKCKREGTYYVEVEPAGTTKECASCSVETKKPLWXXXXXXXXXXXXXXXXXXXXXXXXXXXXXXXXXXXXXXXXXXXXXXXXXXXXXXXXXXXXXXXXXXXXXXXXXXXXXXXXXXSSVFSASRRLNSRFICILPDLLCVDDYRKNGP

SEQ ID NO: 9522 - protein, 345 aa, unknown
  TnpB Polypeptide
LRDETDLTANLVQKGIRRAIHAVTGGVEKLKKGKKTSQPAFNSWSVVYDKRSATFNADHATLSTPNGRVRAEYVLPPDSERQEAPFGRYYENNDWDASSATLQYDEQEDTFSLHVTLKNQDDAVDRTERQEAESPDDHDKNGVVLGVELNVTGAFAVTSTGTFIGSVDYLNHKRDQYEQRRASLQRAGTQSAHLTIKSIGNVFSEWSLDWLHNRANDLIEEADNADVDGIIFENLGHIRENIANGSQFQQWAYAKFVELVEYKTESTALFVDFVNPAYTSQRCSHCGLRTTVTTSCSIVSTANTRRTLITTQRKTSPIDTADISIAGRSLVMDGPPVNWPSSQER

SEQ ID NO: 9523 - protein, 444 aa, unknown
  TnpB Polypeptide
MKRTNTFVVRPLTDADEQVLRELLDASAALWNEINYQRLMRYNDEDGFEGDVWDADTGQLEGKYKGVLGTSTAQQVIGKNSEAWRSYFRIKEKYHDPSEQQVTEHPEPPGFRGNKDDGRVLKGVVRKDAYTVEWGDRSRLEIVVGKQLRQRHNSPKTRLRLEVGGNPNWPEYDEQGRLELWYDETDSRFRASQPVSMSADAQASPLASEQAALDIGANNLVACTTTTGEQYLYGGRELFTDFHKTTEEIARLQSKLCEGRYSSHRIQRLYRKRTRRRDHAQEALCRDLIERLYAEGVDMVYIGGLTDVLDTHWSARTNAKTHNFWAFKKFTKRLATTAEEYGISIEVRSEAWTTQECPQCGSTDRTTRHQDTLTCPCGFEGHADLTASETFLQRHTEQAVRPMARPVRFEWDSHEWLEPSDSHRPKEQRTNRSTREGKLASVGR

SEQ ID NO: 9524 - protein, 310 aa, unknown
  TnpB Polypeptide
VEITARVPEHDVFAVWLRTQKHECQTATLWLSKIGDIPIQYHRDIPDNAVIKEVTLKKETTGEWYVTFGLEIEDTELPEKPEANIMNAEDCVGIDLGIQNYVYTSDGDSVDWLDLSDEYERLRREQQSLSRKKRGSNNWERQRKKVAKLKRRMKRKVEDFQHKLSTWLVKKYDAVFVENLNVSGMLQSNGNARNKQDAAWRGFIKMLEYKGDLYGTHIVQVNPRGTTKECAECGVETDKPLWVREHSCPSCGFEADRDLNASYNVLSRGLRELGLGQTESTPAETATAVDPSHRESVPASRVIETGSLGA

SEQ ID NO: 9525 - protein, 408 aa, unknown
  TnpB Polypeptide
LKIVADDYLRRTAITRPILTDEQQDLLDVTINEWKDACNISSRIGWDTGETRKTYLQDLAYDTVLEETRLGSQHAILVTHQAAAALDGVDAIEDLDEHYKTSRPEFTSNTVKYDTRTMTLFDDGSVSLSTVDGRIRCDLNLPDEEDGYQHEYLTDDEWEVTESTLSKRDGDYYLHLGFRKPKPEKQVEKQGDDEDRTVLGVDLGIINIATTSTAHFASGRELRHQHREFERIRGNLQQTGTQSAHRTIQQMSGRESRYLRDQLHQTANQILEEALTHDCEYIAFENLKHIRERAPPVKEFHQWAHRQLVDLVEYKSEAEGISVEFVDPENTSRRCPECGHTSKGNRVRQAEFDCESCGATQNADYVGAKNVGWRYVRRGLQSSWRTGDSQLALKSGTVTPNRGFVPSD

SEQ ID NO: 9526 - protein, 420 aa, unknown
  TnpB Polypeptide
LSNQVVTRTLTASLTNHSQVSNDLDSHGFAASKLWNVGRWTISRIWDEIEYIPGADELCSSLKSHNRYADLHSQSSHRVLQELGEAFVSWYEQDDPDANPPGYRKHGDKHPRSTVTWKNQGFKLDTQYNRVRLSKGANMKESRYAADYILCEYTIQPDNQTLEDVETVQTVRSVWTGDKWELHFVCELQIDQPDSPGERTAGVDLGICNTAAVSVGDETLLYPGNALKEDAHYFRHEEYATEGEDGPSAHADWARAKKSRRQDHFLHALSNDIVAQCAQRDVGTIAVGHPKNIRETEDWGRHGNKRLHDWAFETLLSQIEYKAEERGIDVERTPEGTLKTSKTCCECGEEADSTRVERGLYVCENCELVANSDLNAAENMRATVTPSPATDRSNGCLAQPSVRLFDKSTGRVAPQEQVVP

SEQ ID NO: 9527 - protein, 321 aa, unknown
  TnpB Polypeptide
  misc_feature (253)..(259): Xaa can be any naturally occurring amino acid
MELVRNIQIKLDVPKEDYGVLDETFEQFRQAAQHVADYGWNDNPCEITDAKNTLHDETYSDVRDKLSLQSSLVQSARNLASTALGNCKDRIIEDGEKASKPEFRGTVVVYNGRTITYNDDYVSLATTDKRVTAEYVTPVNNEGTPFEDYWTDEWEKSEATLHKRNGTYYLHVAVKKDVEPSYDEESENGVVLGVDVNVDGYLAVTSTGAFLGNADYLNHKRDEYDVARNLHRQAPVLHISHQSIGSRSPAGVXXXXXXXDSDSDWRRSSARTVVGQLSTAAVAYRVVNGATLRTRSPSNPDPKSRLRSRHSSPSSNTRLPP

SEQ ID NO: 9528 - protein, 307 aa, unknown
  TnpB Polypeptide
MVEANRTVILPLETPLSDEDKRFHQTIEKYQHCRDRASEYCWENPTQPDDIVSSKRAVEDALSHDLREETDGLHANLVQKAIKDVTSAMDSVKKAWERGERISKPTWKASGSWVMTYDTRAGTFSKHDATFATTGSTVTLDYQTPANLDENPYDKYVLSSEWEQTTSKLVYRHGQYWLHLAVKRDVSDQHWTTQAGTEVSNAPTEDTSRVLGVDLTVKGWTAVTSAGGFHGNADYLNHRRTEYEQLRGELHQTGTRSAYLRLQERSGTESAWFDEYAHLVSNAIIEDAVDTRSRTSHSRSSMESASG

SEQ ID NO: 9529 - protein, 417 aa, unknown
  TnpB Polypeptide
MHYTYRYRLKPTDGHREQLDFYRDTCRQLYNHALKQFNNIPKSAGTLNQRVRRVRDQLPNLKDWWTELNDLYSTVTQAAVMRIEDSVKALSQLKKNGYKVGSLNWKAPQEFRSFSYVQSGFEFDRKNGQTVLSLSKLADIPVVHHREVPDDETIKEITLKKEPTGEWFACVTVDGKEPPEPPEKPERCVGIDVGILKYAHDTDGRAVGSLDLSQERDRLHREQQKLSRKEHGSHNWEKQRQKVAECHQTIKRKRRDFLHKLSNYYATEYDLVAVEELNIKPLLESGGNSRNTASAAWDTFTTLLEYKCKVEGTHFVEVDPAGTTKECASCGVATDKPLWVREHSCPACGFEMDRDANAGLNILSRGLDEVGVGYSEETPVETALALFTSSDGSDVVDTKRVIESGSPTLQEAASAAE

SEQ ID NO: 9530 - protein, 326 aa, unknown
  TnpB Polypeptide
NELNYERRQQFFDGESVWDTADYRKQYVDVTGSGTAQQLIRKNKSAWKSFFTARDEWQSGERDERPSPPGYWGNEDEGRELRTFIRKDLYTLETGKRSRIEIPVGSHLKDEYNHTGRLRLEVCGAPKWDGQQGQLQIQSDETDDTFRAFQPVTVPDSQQDSPLASEEAALDVGANNLVACTTTTGQRYLYEGRDLFDCFRETTDEIARLQSTLPEGRYSSHRIRRLYRTRTRRRDHAQDALVRELIQRLYAEGVATVYVGDLTDVLSTHWHPEVNAKTHQFWAFRAFVDRLSCTAEEYGVTVTVKSEANTTRSCPVCGEQEKPTAT

SEQ ID NO: 9531 - protein, 402 aa, unknown
  TnpB Polypeptide
  misc_feature (44)..(60): Xaa can be any naturally occurring amino acid
VATHGANRETRAATLGGPELDSYPSVDGILGHSARLYRMVAVDXXXXXXXXXXXXXXXXXDLYTFDWDEKRSTLEFGVGEVLEDKYDFEYQEQVSLEVRGNPQWNGDDSRLKIIYDDTADVLRVKHPVRILPDKLNTQRLDDFTQTLDSENTSHTAAIDVGANNTLTLVTSTGESAVYHARPEFKRFQKYSMRIARLQSALPEDKYSSERIRRLYAKRTRKRDHSRNAAVKHAADWLLEQDVDTVYVGDLSDVLESHWSSTVNEKTHSFWSHGRLVERITLTFGDVGISVTEVSEAGSSSECPECDSTNVRRDSDEFRCHECGLEAHGDVVGAWNLLQAEVGPMARPAGLRAERRRDVSQSCDGEGAYWEWNEHDWTLTDCEEQSGSIDQTRISKPVSSQLG

SEQ ID NO: 9532 - protein, 322 aa, unknown
  TnpB Polypeptide
VLEVHRTHQAKIRNHSQVGELLDRHGWSASKLWNVANHHSREVWDDTGEIPDHGELKKELKTHLKYKGLHSQSSQRVLEELAEAFNSWDGSADERENPPGYRKKNHYDQQGRRVHEEHPRSTVTWKQNGIRHDATNKRVRLSKGRTHKEYPRAREYILVECETRPDVSVENLQQARAVYDQSTERWELHLVCKDEIETPDPPGTETAGIDLGICNFAAVAYSTEDADLYPGNRLKQDSYYFPKEIAHCDNPGGNEATRLHAKWSERRTHIFHSLTKHIVEQCVEKGVGQINVGDLEGVRDDQSGESKKLGHAWESRLALVGV

SEQ ID NO: 9533 - protein, 348 aa, unknown
  TnpB Polypeptide
MGLSETTCIRSIGMRKEVRLSSASEKCSKTSTTSNIKNASRSKCVATRSGTVTIAGSKSSTMILLMCFVSRIQSAFTQTNSTHSGWMSSLRHSTPRTQATQQLSTSVRTTRSLSSPALVNQQSLMLVLSSSGSRQYSERIASLQSELPEDRYSSERIRRLYTKRTRKRDHSRNAAVKHAADWLLEQNVDAVYVGDLSDVLEAHWSSTVNEKTHAFWSHGQLVERITLTLGDVGVSVNKVSEEDSSSECPDCDSTNGQRDSDEFRCHECGLEAHSDVVGAWNLLQEETGPMARPAALRAERRRDASQSSNGRGAYWEWNEHDWTLTDCEEQSRSLDQTRVSEPASSQLG

SEQ ID NO: 9534 - protein, 238 aa, unknown
  TnpB Polypeptide
VDLNGDGATAVSSTGQFYGNADALNSYRSEQEQLRGELQQTGTRSAYLRFQQRRGTEWRYSDQYAHHVANSIKQEALRVRATHVAFENLTRIRKRISNLPTFQQWLFKNVRKYTEYKLERYGVTVDTTNPDYTSQACSRTDCDCVDEDNRDGKQFACLECGYTIQSDYTAAKNVGFRYLNTELSSPAGHTCSSGQATSQLALMSGTLSPTGDFAEHDWVSTDKPYPQQASDSSSARAQ

SEQ ID NO: 9535 - protein, 289 aa, unknown
  TnpB Polypeptide
VLSSGWELTTSKLVYRHGQYWLHLGLKQDLSDQHWTARADEEVSNAPQEDTSRVLGVDLTVKGWTAVTSAGGFHGNADSLNHRRTQYEKLRGELQQTGTRSASLRLHERAGTESAWFDEYAHLISNSILQDALDTRSTHIAFEKLNGIRKRMSNLPQYQQWMFGRVQEYTEYKPAEHGISVGYVNPKNTSKGYSHTECQTVSDSNRREKQFECAGCGRSWNSEYNAARNIGLRQIFKTLLPTSQTRSSGTATCQLALMSGVLSVEESDVTHFSTDWMSTDKPTASAVGS

SEQ ID NO: 9536 - protein, 339 aa, unknown
  TnpB Polypeptide
MEVRRTVSVSLDVDSDDAALLEDTVDTFLWSAQYVVDHAFQGEYVTTSKTTLDDETYDDVREATHGFNGGLVQAARNKAAEACTSVVARWKNGKKASQPRMTSPHVVYDHRTATFHDDSVSLATTDGRIEADYVLPDTESDTPHAEYLFSAEYETTGAELHRKHGEWQLHIHCKKQVESDTPEQLTTTHGTVLGVDLGVNNLAVTSTGTFWTGDEFDHWRREYESRRGDLQECGTRWAHQNIQAVGRKEDGRFKMTLHRIANELVAEARDHDCSVIAFEDLTDIRERTGASWGHKWAFNRLYEYVEYKAAEDGIEAEQVDPGKHVSAVFNVWVHALGQP

SEQ ID NO: 9537 - protein, 413 aa, unknown
  TnpB Polypeptide
MEVRRTVPVTLEVDSQDAALLEDTIDEFLWAAQYVTDHAFHGEYVTTSKTTLHDETYNDVRETTDLHSNHVQSARNKAAQACTGVVERWKQGKKASKPHFTSPHLVYESRTATFHDEYVSLATINGRIEADYVLPENREGKPHQKYLFNDDYDITSAELHRQHHNWQLHICCTTDVESDTPSQATTENGTVLGVDLGVNNLAVTSTGTFWTGDEFDHWRQEYEKRRGDLQACGTRWAHENIQSVGRKETGRFTHTLHRISTELVEEARETGCTVIAFENLTGIRERTGASWGHKWAFNRLYEYVEYKAEAYGLTVKQVNPANTSRRCSECGFTHPDNRESTQFECLKCEYQNDADYNAAKNIGLRYLRQNQTGADGGAPVGVRLNSGTVTVNGDYSPAENSARTGVHAESLPL

SEQ ID NO: 9538 - protein, 490 aa, unknown
  TnpB Polypeptide
VSDDLDSHGFAASKLWNIGRWTISRVWDAIGHIPDAGELCSYLKSHERYADLHSQSSQRVLQELGEAFGAWYKQDYSDANPPGYRKRGDEHPRSTVTWKNQGFKLDTTYNRVRLSKGTNMKESRYAADYILCEYTSQADEHTLDDIENLQTVRAVWTGDQWELHFVCEMQIDQPVSLSEKTAGIDLGICNTAAVSVGDETLLYPGNALNEDAHYFRQEEYETEGENGPSAHAGWARQKKSRRQAHFLHALLKDIVEQCARRDVGTIAVGHPKNIRDGSDWGRHGNKRLHDWAFETLLSHIEYKAEERGIDVDRTPEAKLKTSKTCCECGTEADSNRVERGLYVCETCELVANSDLNAAENMRTTVTPSPATDRSNGCLAQPSVRLFDKSTGRIAPQEQVVPETTISQRRSGIPRLQPWEDVKLSGGPGIAQISPRFFNSSTTSSTIVSTSGYGNSCSLPSFEANSMAVKLTSPASNFVPGPLGNAGTRSI

SEQ ID NO: 9539 - protein, 416 aa, unknown
  TnpB Polypeptide
  misc_feature (356)..(373): Xaa can be any naturally occurring amino acid
VSDRPQRTNTYTADPTTERYRQCLFEWLAAHAPLWNQINYRRRQQYFDEDGDVWDAKYTDLYDKYAPIIGKATCQQLARKNSETWRSHFRLLELYHDDSNTMVTEKPSPPGYWGTRDEGYELHGLVRNDLYTFDWDEDQSTLEFGVGDVLEDRYDFEHNESVTLEVKGNPQWNGTDSRLELVFDEHADRLRVQHPVRIQPAKLTEQRQEAFTHTLDSENTTQAAAIDVGANNTLAVVTETGDTAVYHARPEFKRFQKYSKRIATLQSELPDDVYTSHRIQRLYDDRSQTRDHSRDAAVKHAAEWLLERNVDTVYVGDLTGVLDAHWSTSVNEKTHAFWSHQQLVDRIELTLGDGGXXXXXXXXXXXXXXXXXXRPTGSRARHETRTETRRLARVVSAGGLCVLRPSPCHHDPRRLN

SEQ ID NO: 9540 - protein, 426 aa, unknown
  TnpB Polypeptide
METTHRTHICRLSNHSQVKEAFDTHAWSASTLWNVANYHAQQVWDDTGEIPDEAALKHELKDHPTYNGLHSQSSQNVLEELSEADSSWYGSQDDRDNPPGYRKHNYYDAEGNRVHEEHPRSTVTWKPSAIRHDTDNNRFRLSKGANHKSSPRAHEYILAEYDAPPEVTLENIQQIRAVWQSRKGRWELHVVCEHELAAESPGDNVAGVDLGICNPATVAFPDDAVVYPGNRLREDKHYFTREEYQTEGGDGPSQNAEWAREKLSRRKTQFLHALTRDIVERCVSHDVGTLVIGDPSGVDEAEWGRHGNKRLDNWAYKRTMDLLDYKARDRGIEMERRDERGTSSTCSVCGFEDGESRVERGLWKCGRCGVVAHGDVNGADNIRQETLPVTPPLEDSGNGCVAQPRIIQCDQTRGFEPRDSVDGVTP

SEQ ID NO: 9541 - protein, 433 aa, unknown
  TnpB Polypeptide
LWNQITYRRRQAYFAEGGDVWDVEYTDLYDDYAPILGKATCQQVARKNSEAWRSHFRLLDKYHDKSNLSVTEEPSPPGYWGNRDEGYKLHGLVRNDLYAFVWDEDQSTLEFGVGDVLEEKYDFEHQERVTLELRGNPQWNGDDSRVELVYDEAADTLRVKHPVRIRPEQVQKQRLDGFTHTLDTENTTHTAAIDVGANNTLAIVTSTGDTAVYHARPECERFQELSGLIGERQSDLRDNQYTSKRIQRVYDERGDKRDHSRNAAVTHAADWLLERNVDTVYVGDLTDVLDAHWSATVNEKTHNFWSHRQLVERLGLTLGDVGITVEQGNEADSSSQCPECGSNTVTRNSDTFRCHKCELDAHSDVAGAWNLLQSEVGPMARPAALSAERGRDAPCDGAYWEWNGHDWTPGSFGEQSRPTDQTSISKPASSQPG

SEQ ID NO: 9542 - protein, 442 aa, unknown
  TnpB Polypeptide
VRRPATPLSEWTATKSNHRTARIRGLGVILVKRTLRFRASLSDAIASEAWRQIDILRQIRNHAVRNYYRSDYHNRPSEYDQNTNLKHWNTRWPLFAEPSQHAAQQAIGQIYSDLEGLQERRNNGSDVGRLRWQGAGEFRSVSYNQPRRWNVDHNTGGERFVRFRLDKIGWFNIRANRPVPDADEITEAILKKQNTGEWYLSLVVEVADTPEKPALSEIEPQDCVGVDLGITSYIHTSDNLTVDTLDLSEEYDRLRREQRMLSRKQHSSHNWEQQREQVAKANRKIKRKVTDFQHKLTTWLVTEYDLVAVEDLDVIPMLEDSQNARNKQDAAWSRFVNFLEYKADLHGTHVITVNPAGTTKDCASCGVATEKPLWVREHSCPACGHTQDRDLNAATNILNQGLSQRGAGRSESPPMQTALPASAPQREAVDAKCVDELGSLGA

SEQ ID NO: 9543 - protein, 292 aa, unknown
  TnpB Polypeptide
LPNDPEGTPHGEYLLNDDYSFSTSTVHYDSEADEFYLHAAMEKEIDASSPEKAEDSSVLGVDCNVDDHVAVTSTGRFVGNADYLNHQRREFEKRRASLQQTGTRSAHLTYHQIGDRFGRWSEDRLHQWSKEIVAEAQRHGCTHIAFEDLEQIRERISDGKKFQQWAFNKLQELVAYKAEMAGIVVETVAPSYTSQQCSQCGCTVEENRNGQHFCCLDCSYSVNADYNAAKNVARKLALKLQRGQKSPAGGAYCQYALKSGMMTVNATEVASDAYVSAERESTDKPTASAVGN

SEQ ID NO: 9544 - protein, 412 aa, unknown
  TnpB Polypeptide
MKRTLRFRASLPDEVASEAWRHIDILRQIRNHAVRDYYNSEFNDRPSDSDQHEKLKDWNSRWTVFTAPSQHAAQQAISQIHSDLETVKQRQKNGYTVGRLKWQAEGEFRSVSYNQSSRFNVDHNTGGDRFVRLRLEKIGWFTIRAERDVPPAEDIDEVILKQETTGDWYVSLVTTVEDTPDKPSVSEIDSDDCVGVDLGITSYIHTSDNLSVDTLDLSDEYDRYAREQRKLDKKEHGSANWEKQRQQVAVAKRAIRRKVLDYQHKLTTWLVTEYDVVAVEDLDVKPMLETSQNAKHKQDAAWSRFLELLEYKADLHGTHVVQVEPAGTTKECAVCGIETAKPLWVREHSCPACGHTEDRDLNAAKNILHRGLKQLGAGCSESPPVQTALPPFTPQREAVDAKRVVEAGSPEA

SEQ ID NO: 9545 - protein, 412 aa, unknown
  TnpB Polypeptide
MKHTLRFRAYLPDEVASEAWRHIDILRQIRNHAVRDYYNSGYNNRPSEYDQNQRLKHWNNRWTVFADPSQHAAQQAISQIHSDIETLKQRRKDGYNVGRLKWQGAGEFRSVSYNQSSRFNVDHNTGDDRFVRLRLEKIGWFRIRAERTVPDAEDIDEVILKQETTGDWYVSVVTTVESTPEKPPLGEIEPEDCVGVDLGVTSYIHTSDNLSVNTLDLSDEYDQYAREQRKLDRKEHGSSNWEKQRQQVAEVKRVIKRKVLDYQHKLTTWLVTEYAVVAVEDLDVKPMLETSQNAKNKQDAAWSRFLELLEYKADLHGTHVVQVEPAGTTTECAVCGVETAKPLWVREHSCPACGHTEDRDLNAAKNILHRGLKILGAGRSESTPVQTALPPSNPHREDIDAKRVVEAGSPEA

SEQ ID NO: 9546 - protein, 564 aa, Chloroflexi sp.
MALPYLEVCAVGEYAGLTEQAPSARMRTNIQRTRREVKKSQTTTFLLELPLAVDAGQAKRLRAHLEAARCLYNALLGEATKRLRRMRTDPAWQAASAIPRSRKHERHAAFSQLRKTSGFSEFALHDFAKEANCRWIADHIDSVLAQTLASRAYHAVNRVCVGQAKKVRFKSTGRGLDSVENKRNDTGLRFVLQAPQEGNAGCLVWGDDRLPAIIDWNDPVVKYGLEHRIKYARLIRRKASSPQAKGADSQGFRYAVQLVLEGKPYQKPRNAGGTDVIGLDLGPASLASVPRQGPARLVPLGEELRADARTRRRLARKLDRQRRATNPANYDTQGRIKKHGHQRLMWKDSRGYLATRRRLAHQERKLAAHRQSLHGRLANEIVREGNTIHLEKVSYKAWQKQYGKSVGLHAPGMFVDRLKRTVARTGGTLHEVPTRTTKLSQYCHGCKRYVKKPLSERWHHCACGIGPVQRDLYSAFLLAHLQAAETIPSIALKEWEGAEPRLVAAMEHVQQRAKEGQSLPRSFGISGARARRPKSLGSLRQEPISLYRRGRLEALDDEQEPPCL

SEQ ID NO: 9547 - protein, 436 aa, unknown
  TnpB Polypeptide
MNAKKIKKLSEQTFPFFLKCDIMEISRNKQVRRCKSVIRTHKTTFRTSKIDLERLFACNRVSAQVWNNCLGHDKNHHRQTGRWINLSELQQLTRKKYHLHSQSVQSVQERYIKARTNAWQAKQKGFKNIRYPYREKKHYPARWKKDGFVVHPNGLIELKMCLINGKRQPPIMVRVFNIPKGQIKEIELIWDGKLMLAISYEDGLQPKENNHQGIAAIDMGEIHGIACIADNGRALVITSRKLRSQKRLRNKKYAELQKKLSRCQKGSRRWKKLRRALAKTLQKTERQQRDILHKSSCRFVRWAEANRIGQAVVGNVEGVQRNTKAHRKNPKKKHRSRKVNQKLSQWPFGILLWYLTYKLAAAGIDLIKTDESYTTQTCPVCNRKKKVSGRTFRCYCGYAEHRDIHGAKNILAKYKYGEIKDLGIKITKVTYLRPAS

SEQ ID NO: 9548 - protein, 528 aa, Escherichia sp.
  misc_feature (395)..(482): Xaa can be any naturally occurring amino acid
VKRLQAFKFQLRPGGQQECEMRRFAGACRFVFNRALALQNENHEAGNKYIPYGKMASWLVEWKNATETQWLKDSPSQPLQQSLKDLERAYKNFFQKRAAFPRFKKRGQNDAFRYPQGVKLDQENSRIFLPKLGWMRYRNSRQVTGVVKNVTVSQSCGKWYISIQTENEVSTPVHPSASMVGLDAGVAKLATLSDGTVFEPVNSFQKNQKKLARLQRQLSRKVKFSNNWQKQKRKIQRLHSCIANIRRDYLHKVTTTVSKNHAMIVIEDLKVSNMSKSAAGTVSQPGRNVRAKSGLNRSILDQGWYEMRRQLEYKQLWRGGQVLAVPPAYTSQRCACCGHTAKENRLSQSKFRCQACGYTANADVNGARNILAAGHAVLACGEMVQSGRSLKQEPXXXXXXXXXXXXXXXXXXXXXXXXXXXXXXXXXXXXXXXXXXXXXXXXXXXXXXXXXXXXXXXXXXXXXXXXXXXXXXXXXXXXXXXXRCLLLFNVLADDGYWRTSAATGKIARTPQNAFVVIPDCNIWSISSQ

SEQ ID NO: 9549 - protein, 346 aa, Helicobacter sp.
  misc_feature (341)..(344): Xaa can be any naturally occurring amino acid
LLKAIKFRIYPTIEQKTLIHKHFGCARVVYNYFLAYRQKQYAQGIRENYFSMQKALTTLKKQEAYAYLSECNSQSLQMALRQLTTAFDRFFSKLADYPRFKSKKHSKQSFCVPQHLEMDLGNNQVKLPKFKEAIKAKFHRHLPTNSIVKQGFISCVADKYYLSISYEDNEPEPKPTTIRKAVGLDMGLESLVIASNGVFYPYKKFFQNLQTKLTKAQRRLSKKLKGSNNRKKQAKKVAQIHASIRNSREDYLHKISNEITNQYDLIAVETLKVRNLVKNHKLAKSIANASWSRLISLLEYKAGWKGKTLIKIDQYFPSSQICSTCGSNTGKKPLPIRNFIXXXXEG

SEQ ID NO: 9550 - protein, 487 aa, unknown
  TnpB Polypeptide
MLRRAVAVELEVTKELNKLLHSVESMYLSIVRDVVEYAVANNITSANQLHRLFYSKYRQEYPDLNSGLVVQAIRQASEIAKSFMEERRKGLAYKPYPEVRSVSLRFVETTWNYEQFIKSIAPVRIAISPISTGRGVSGRFEVWLRPHKRFWQYWWRVLRGEAELASTLMIKRRANKWYAVFVFNIKPREEEPRSIIAFDINENTVAVSRVDLPSTVSKVVNWNRQYMIPELYTIKTDFGKLARRYERVRNAIIERLKPGFALPNGNYVNVTSTREFRKRVKRLRESGRKVGRVRHVANELTKTPAIIITEDLGEKPQEEMINSVSKGELRHRIKQIPFKNIEEAVEDKALERGSKLFHVSSYKNSRVCPIHFTKLEGTNDWHTLQCSLGHYVDRDYASILNMAWKITPESWAKAFWWNMKNLNKNMNWRKHEGKSNPIIPYFIVKHIHAALKTFKASEQSPAVLARGKPMNPARGADEGRAREKASL

SEQ ID NO: 9551 - protein, 393 aa, unknown
  TnpB Polypeptide
MYLVERHFINEKHKDFKEIDDLAFRSKNLYNYALYTIRQHYFQTRFYINYNELNKQLQSHEAYKALPSKVSQQVLIKLHKNWLSYFEALKAYKIDPSKFYAKPKIPRYKDKIKGRNLLTYNNQAIGKNNKQLSKTNITINTTKIVQEVRIVPKTFGYYIEVVYNTEEAKQFRKNKKFASIDIGVNNLVAITSNSAKALLVNGRPLKSINQHFNKQMSNPKLGEKRRHMLCAKRYHRIQNYLHNTSCLIIKYCLKHNIRTLVVGHNEGIKQELKLRKDSKQNFVYIPFLDLIKQIDYKGAINGIKVIKTEEAHTSKASYYDKDPLPKFDVPVEYSGSRVKRGLYKSKDGTALNADLNGSLNIGRKVIHDYVVDRSLVARPVKVNPLRTDYCSLL

SEQ ID NO: 9552 - protein, 407 aa, unknown
  TnpB Polypeptide
MKTYKVKLMFDCQEVYDFWVGQLCMVRDCFNYASKIIYDEKLTLSLKPLHKRLYYELREKFDALPSQMCISIERALIANYKSCRTNGAELTSPIEMKNPAIQLDKRLYSGMTQESFKISNGIGNKRSVVKFQTYPKFRELSSKYRMCDPKLTYNEKSGEFFACVPFLTLDITPKNNETVGIDIGIKRLATLSTGVAYSEKKYLANRRKIRHNKRMLKKHKKHSHSARTKLKNMRRHERNVSNDMCHRLANQILATKASILVMEDLSGIKRSTARTKSGFKRTGHNRRIGQVPFYKLKTILTYKAPLVGKRVETVPPEYTSQEDCRSQSKEGCRRVGCRFYAADGRVFDADWNAALNIRNRYRPCSLDVLPIDGTLDLRGRSRQLTDRRTASDNSDARQAHALQRVSS

SEQ ID NO: 9553 - protein, 327 aa, unknown
  TnpB Polypeptide
MVQRAYRYRFYPDAEQEQLLRRTLGCARLVYNKALAVRTEGWYERQERIGYTQTSSMLTQWKKQGDLEFLNEVSSVPLQQALRHLQTAFANFWAKRSRYPKFKKKSNAGSAEFTRSAFKWANRQLKLAKTKNPLNIVWSRPIPQGCVPTTVTVKLEPSNRWFVTFLVDNPTVVPLPPSQNKVGLDMGLSTLVTTSSGEKIANPRHFKHKFRRLKASQKDLSRKKLGSNNRKKARLKVARAHAKIADARNDFLHKLTTRLIRENQTIVVEDLAVRNMVKNRSLARSISDAGWGELVRQLKYKSEWYGRELIKIDRFFPSSKGVETAAL

SEQ ID NO: 9554 - protein, 478 aa, Hydrogenibacillus sp.
MSLPLNRRKWETLKQTIEAYARQKDAFLVRYAHLDFLPYLGPGGRRALRDGLVRAGFKSPYGLQARLWKMALEDALLTIERHWEAVLQDVRKNIPETWSDGMKHYARWLLYRPANGSRDWRRIRDLMRGLETGTPKNGPGARLTPEERARVRRWLRRQVRRRLTRPRVKIARSMMLDAEMYASFTRTMKNDRERQFVGIMTLEPKRRVVIPLAGVHAISGNIRIVLAEDRRVEVHVVDDVVAAPPAPNPGPDEAAFDFGITEVMTDETGVKYGETYGRVLQEMSETLLRKSQRRQKLWTLYRKSLETDPARARRIRRHNLGTAKQTRRHRRFRRRLENEINHAFNRFFAARRPKVIAIEDLGLLSGKAKSKGLSRKVTLWTRSALRERAEFKTAVYGSSVEPVNAAYSSQTCPVCGFVDAKNRNGDRFHCQNCGFTGDADHVAAMNILARLHDPEIRRSTPKEKVLAILKQRFKARQA

SEQ ID NO: 9555 - protein, 229 aa, unknown
  TnpB Polypeptide
MIKIKYHREFTGTIKSCTVSKTPSNKYFISILVDTENKTLPKVDKKIGVDVGLKEFAICSDGYRVDNTKYLRKSEKRLAKLQKDLSRKQKGSNNRNKARLKVAKLHEKITNQRKDFLHKLSTKFIRENQSIAIENLKVKNMLKNDKLSKAISEVGWYEFRTMLEYKADWYGRNIVVAPTNYASSQLCSECGYKNKDVKNLALRNWTCPKCGVSHDRDINASKNLLKLIV

SEQ ID NO: 9556 - protein, 386 aa, Methanoculleus sp.
MLFTTMERYNAACNAASPVAFSERQFSNIGLQKQLYYQVRETFGLSAQMAQLAIRKVAGSYRSTNEAIKERNKVLAALGQPLKSLTEISFRAHGAICYDARVLSIGRNRVSIWTLDGRIKLRYTRPQYFPAVTTVKQTDLIYRDGAFWLYATVEIPDVEPAEPTGYLGVDLGVMNIATTSDGEVFSSAATEKVRQRYGSLRARLQACGTKDAKEKLRRISGRERRFKADINHIISKRVVCAAQGTKRGIALEDLKGILLRTTVKKTRRERQYKWAFHQLRSVIEYKARRAGVRVKVIDGAYTSQQCSVCGFVHPDNRPTQAAFRCLACGHAENADLNAAKNIAARALVNEPIAVRSPVTGGEVESQACKERDATYGIMPPTSVGGS

SEQ ID NO: 9557 - protein, 440 aa, unknown
  TnpB Polypeptide
MLEAHRTHQAKICNDSQVGDWLDLHGWSASKLWNVANYHARQVWDETGEIPDHKDLKRELKDHPKYNGLHSQSSQRVLEELAESFTSWYKSDDDRDNPPGYRKRNYYDQDGNRVHEEHPRSTVTWKQKGFKHDQKHNKIRLSKGANHKEHPRAREYILVEYETRPDATVENIQQVRAVYDRAKDRWELHVVCKDEVETPESPGNGTAGIDLGISNFAAVAYSTDEAELYPGNRLKQDGYYFPKEIAKCDDSGSDRATRLHAKWSERRTHFFHSLAKHIVERCVEKQVGQLNIGDLEGVREDEDGESKNWGRHGNLDLHGWAFDRFTSILEYKAKVEGIGVTEVDEKDTSKTCCVCGKTDETQRVERGLYVCDEHGDAFNADVNGAENIRLNINEETESNSESSANLDEDRCTGWLAQPSVYLYDLSCGFQPQTEVVNCRP

SEQ ID NO: 9558 - protein, 248 aa, unknown
  TnpB Polypeptide
MILWISKKVPKPQSYQPRDVIAVDINERKIVYGDHVINEEIDTKINRAHRWKLLAESLQRRYSSPRYPAWRRRRGILNRIRSYHRKARDILEDWARKTSLEIVRLAKKLGYAVAREDLKGLINSLRKIESKDHRTKLIIMGYSRLGKWIDWQAMKHGSPLAIVDPRGTSSECPKCGSKLEENGYRRLKCPRCSFEADRDVIGKLNIRKRALKTLRIKADLGGALTPLTAPQMTDVSPNRWGGGTDEPP

SEQ ID NO: 9559 - protein, 526 aa, Vibrio sp.
MQRKEKSSVHIVEFPLIATPSDIKEIEVRFSFLRQLYNAALAELFKRNIKLNDDAEFQALLTQYRDRKSAKDEKALKPLSKQLSEKTKEYGLTEASIQSFTTANKNACCFSNHLDAHTTQAIATRAFKAFSEWKFKGKGKPRFKSWVRGIHSAEGKAKSCLMIVIGDDNKPTRFKWKGLEIPVKLSKKDNQGYEAAALELIGKGEWKFCRILSRTVRGKIKVYLQVLLSGESYQKQSHLDRIKQNKGKRTGVDMAPSGFAAVSESDAILSPLGAEIQQIKSQIARLQRQNSRRLRLANPANYSAKTKRKGRKSLTVFKVKKGARNWIKTNAYLNTQAEIKELHRQMVARRKQEHDRLANDIISLGNIVMAETLSYKAWQKRFGRSVGAFAPGQFVSTLRRKAENAGGRMVDINTWKAKLSQYDHVLDEYHKKKLSERVHYLGGELPVQRDLYSAFLAMCVCEKEHIVSLTTAQAAWSGVRHSLDAAVIRVNQTAISRSLPTSFGLRELIPYLQSERLAVKATEPLL

SEQ ID NO: 9560 - protein, 263 aa, Limnoraphis sp.
LVKGLNFRVSEPLQKTNFATQLVRDRKRWFACIPVLEEVKPKELDRVIALDPGVRTFLTGYDGESFQEFGGADIGRIQRLCSHLDNLLSRASKACRKQKRRMNQAANRIRVRIHNLVSECHKQVANYITSQYKVIFLPTFETSQMVVKSKRKLNSKTARQMLTWSHYRFKLHLKQVAKKRGVAVIDVNESYTSKTCTKCGHQHSKLGASKIFKCPGCGHEHDRDWGGARNIMIRALRDGSFALNLSVEGIAIASDVFVHRCTA

SEQ ID NO: 9561 - protein, 315 aa, unknown
  TnpB Polypeptide
MDIKAFIFDMDGLLFDSERIVQRSWEIAGDELGIPHMGNVIYHTLGMNRAGRNEYFRKYIREDFPFEEFLELCDVDVADRIICAVDLGINSAATISVMCSDGTILGRHFLKLPKEQDCLTHSINRIKKAQQHGNRKMPRLWAKVNGINHEISVKTAKFIMDIAVLYNADVIVFEYLEKKGKKRGSRKQRLHLWKSQEVQRVVTDKAHRLGMHIARICAWNTSRLAYDGSGRVLRGKQAGFSSYSVCQFQNGKVYNCDLSASYNIAARYFIREILKSLPEKERLLMEAKVPPCSKRSTCTWSTLISLNAELMSFVS

SEQ ID NO: 9562 - protein, 548 aa, unknown
  TnpB Polypeptide
MITLQCRLEFQNTQDKEAVLDLMRRFSSAMRYAYQRLLEGEKRKDLKKQLSKLFNINTRYSDDAIFLAQSTIASCKERGQNPKKVIFGSRKVFEQLKKNHLTGKRIRKLKEKWKESRQGNLYSRGDKSKQGNLNLRFEWINDKLYLRINTGDKQYIYTEVIRGVKRKNDKWIEFMFILENAYKYGAWFPYSVRLKVKNGNIYAFISIEEKLPPITIKRDNGIIGIDVNAYPFHLALAFASKDGNLERYQSISLNELLEVNSEKRQYLEWQIAHRIIEIAKEENKAIAIENLEKLPKGKRGDGFVKLRIRLQKWSYKRLLEKIEILARRNGIEIRKVSPAYTSVIGKLKYSPQYNTDKDIAGAYVIARRGLGFKEKLPKNYKELLNDTDFLSYTIVRIEDNITKLKQKLKEEKNEYKRNKIKSTLAKLRKNLKTLQKHLESGKSKTATQKPVNQRKEQVRGLSTGRHKSWQVLSIALAFCCLEKSYRDFSPLKRVIISKDWIAVANRLVPVLGTGTMTLPKYRLLGSEVSEMAEYKYPNPSCASFVQFG

SEQ ID NO: 9563 - protein, 358 aa, unknown
  TnpB Polypeptide
LLTERPGLSRWPPGRTREAAPGLPVGARSHRRPGAEAPLPCRSLSIRRELGPDPGHGAVRSREEVVLSGRAPSALERGEEDRSRSGLVEGELQCVYQEAVTLPRLGTIRTHESTEALAGKIAEGKARDPLRHRVADRPAVVRVLHRGGGARGPGSSSATPDGGGHRSRDRFPDHGGGPPRQGDQVPWSQAASGCAGAPPPSRARPFPQKDRLSQPQEERAAAGAYPCPDRQLPSRCRAQCHDPGTRYETVVVEDLNVAGMVRNRRLARSLADQSFGTVRRQLDSKTVWRGDRLLVAERFFPSSKTCSGCGTVKAKAGRAHLPLRGLWPGHRPRREGCEELIDARRQWEGEDQRLWSRG

SEQ ID NO: 9564 - protein, 265 aa, unknown
  TnpB Polypeptide
VKAKLPSALCNQCIRDAKSIVKKYDKACKEVEKAKKSKKNKNSKNVKEVEEIKEVKEVKKLKEIKVPVLKKMCCYINNQNFKIQDNYISFPVMIDGKSKRISVKTKMTDKQRLILSSHRLGTMRIVIKNINTLVAQFVYEINEIEKVNESNNVMGVDLGIKCPAVSYCTDGSVKFYGNGRKNKYMRRHYANLRKWFQKAKKPTVVKRIKNKEQRIMKDIDHKISREIVNTAKKHKAKVIKLERLENIRSTTRTSRKNNPSLHTWY

SEQ ID NO: 9565 - protein, 398 aa, unknown
  TnpB Polypeptide
MSRYRLLPTPAQEAVLRDHCAHARYVWNLAVEQHAHWRPGRRNAPGYLEQCRQLTEARADHSWLAAGSQTVKQQALRDFAQAMAAFFNPDNPAGRPSWRKAGRDEGFRIVGRRGLQWDVRRLSRHVGEAWIPKVGWVRFRWSRAVPASVKSYRVTMDRAGRWHIAFAAVPEPLPAPGNGQAVGIDRGLAVSAALSSGELLHAPGLASRERKRLRRLERRLARAARGSNHRARVRHAIARLRTRETDRRKDWAEKVSTDLARRFDTIRVEDLRIKNMTRSARGTAGDPGRNVRAKAGLNREILRSGWGLLVRRLEDKAPGRIEKISPVFTSQRCSACGHVDAESRESQARFVCTACGFADNADVNAARNIAAGHAVTARGGDGVARPVNREPQLLLLSA

SEQ ID NO: 9566 - protein, 415 aa, unknown
  TnpB Polypeptide
MSIKAYKYRIYTNTATTEKLQCVLDRCRELYNAALSECKDAYKLHSRQTIYQNEQGQCIVAIMEAPIRLKFICYYDQQNDLPQIKEMRPEYKEIAAHVLQDVIRRVEKAFDAFFRRVRNGEKPGYPRFKGKNWYDSFTYPDHAGWKLEGNRLRLSKIGTAKVKLHREMQGTIKTLSIKREGQHWYAVFSCEVKTVRLPLSYEDVGIDLGVTHFAAFSNGEFVDHPRYFRRAEKKLAKLQQALSRKKRGSHRRAKAVQRVAKQHRKIKNQRRDFQHKVSRMLVNRYQFIAFEDLHAANMVKRPHPKQDESGKYLPNGASAKAGLNKSILDAGWSTFTEMVSVKAASAGRTVVFVNPSMTSQLCSGCGAVVRKDLSERWHSCECGTELDRDTNSAKLVLQRGYEQLSGGTRPTSAMA

SEQ ID NO: 9567 - protein, 427 aa, unknown
  TnpB Polypeptide
MKRLQAFKFELQPNGEQVRSMRRFAGNARKVWNLALAKQQATHAAGEKFTNAFGMNGWLLDWKKEFPFLSESPSQTLQQVMGDLAQGYKNFFEKRADHLVFKKKGKSADSFRFPQGFKLDQSNSRIFLPKLGWIRYRNSRDILGVAKNITVSANGGKWFASIQTEREVEQQRHPATSIVGIDVGISRFATLSDESYIKPLNTFRKHEIQLAKYQRRMSHIKKHSSKEYSSNWKKAKARVQKIHTRIANARRDFLHKTTTTISKNHAIVCIEDLQVRNMSKSAAGSSDSPGRNVKAKSGLNKSILDQGWFEFRRQLEYKQVWLGGDVLAVPARNTSRTCPACGHVSADNRQTQAKFACVECGYENNADVVGAINILNRGMKMLEGQDTADASVGQNIAARIACEVNGAVMPSAAGTHRSDSGVAQCLA

SEQ ID NO: 9568 - protein, 377 aa, unknown
  TnpB Polypeptide
MILAHVYKLKPSNSQSQKINDWLNMLRAFYNFCLRDRIEAYEQVRCPVMGNYSRLDNQGLCCPLTCSVSKSASVGYPWSNKNQKRSAGHQQSSYLPKLKQLRPWYKGIDANVQQMNLIRLNAAFDKFFDGVGGYPKFKSLSKFRSFSYVPGQVRIDANRVKLPGIGWMRFYLSRPLPEGFKVRTVTIRRKSDGWYMSVRLENKDVPSFEPMNIKQVKTAVAADLGVRKLVSLSNGETIANPQYAKRVKRKIAIRQRRASRKVKGSKNRAKAYRELAKIDCKLANQRADYQWKVANKLCRLGDVVIFEDLNIRGMMARCKPKKCPETGKYLKNNQAQKKGLNRVIADAAWGELKLKTKAVAEKLGLRNPVKIRRHHQR

SEQ ID NO: 9569 - protein, 440 aa, unknown
  TnpB Polypeptide
MKTILTAKLKLHPTPEQFAALRATQLAYRDSLNYVSHYAYEHGKMSNKVKLQEGTYDELRVRFHHRSQMACSVARQVGSTYKTLWTKFKQNADARKAGLTRQRYKGLDQAPKYISPTLTYQYGKDYSFKKEQHVSVLTLGGRVIVSYTGYNKHVSLIQNGAQIGVAQLWYDKPKKHCYLLVSLEVEVADPTPEAHTQVVGVDVGMRYLAVTSTTTGASTFYSGKRVRAKANHYARLRKRLQKKGTRSAKRRLVALSGRERRLKADANHVVSKRIVEQHQHSLIGLENLTGIRERTQRRKGKRASKKQRKANAAYSRWSFAELHSLIAYKAVMHESMAIKVDANYTSQACPICGHTARENRPNKGLLFVCQNCHYILHADLVGARNLTMRTLLIRQDWIGTGTLSMCPDVSDREAKAARRLRYAELRWSPDTSPLHSCGGD

SEQ ID NO: 9570 - protein, 356 aa, unknown
  TnpB Polypeptide
MQRTIKLVLPYDKRVAETVHIYNQACNYVMAEGFRLKTFNKLKLHRATYKATRKKFPTLNSSYVCAARDQASDMLKREKMKRLPVKKKFSSIRFNHNTFTPFLKNGIISVSTTFGRVKLPVKIPVYFQPYVSWKITAATLAIKGNRIIFNLVAEAPDVEKVQIIKALGIDRGIINPVVTSDAQFFNSCKIRAVKGKYQWLKSQLQRKGTRSAKRHLRKLRGREQRFMWNVNHCISKKIASGDAQLFVLEKLTIRRSKKNGRRFNKLLGTWAFRQFEEFLTYKAEGLGKTVEYVNPKYTSQTCSSCGQVRKANRKGVWYRCNGCGLTLNADLNAARNILALSKLFVREAAVNQPIVT

SEQ ID NO: 9571 - protein, 435 aa, Sulfolobus sp.
VKRTNIVKLIVDKKTHEKLKELAIVTAKCWNEVNWLRMQQFKKGERVDFSKTEKDVYEKYKQILKVNTQQVARKNAEDWRSFFSLIEEKKEGKLPRWFKPRPPGYWKDKIGKYKLIIIIRKDRYEVNEEKSIIYLKDFKLSLSFKGKLKWHGEQGRLEIIYNEARRIWYAHIPVEVQNDVKAEGKLKASIDLGIVNLATVYVEDGSWYIFKGGSVLSQYEYYSKRISIVQKTLARHKQRRSRKMKLLYEKRKRFLKHAINSMVRKIMEELKKKGVSKVIIGYPKEISKDHGNKLTVNFWNYGYIIRRFEEVGEELGIEVVEVDEAWTSKSCSLCGEAHDGGRIKRGLYRCPRMGKVINADLNGAINILHIPESLGAGSGGQLLVRDRGNGLKAQPAVYRWTNGAGWVSSPTSYEVMKMKAVNRKPMNRPKGTLAL

SEQ ID NO: 9572 - protein, 553 aa, Lachnospiraceae sp.
MRIIFKGGDRIRKAYKSIFIKKNFMPAADNALLSQDIETYNRMMHTAFVWNNQDRVFPDDHSIHLHLKDQYHCNDYFANSANQEAKGKLRSLKELRSSYISDMKDDIRAITKKITGKQKYLGSLQATLDSIIIYTKGNYSNPAKIKSCPGVTFRPDGSVKWRCFHKTKIFDNIYLFEHQWLRPQIRKTATNISFMQHKIDRLKIKIISLQNDPRYHICFGTKKLYHDTRVCGQDRKNAIRKARYHRMQISGRSDSKNGNWVFSYDPVLQKLKYRSLNDWAHTIVFPGVRFPYGQDKISVFLAERRGAVAWEICDMGNAWQVTCIIEDTPEHIKNDYFGTGCVAFDMNYDNIAMAELDASGNLLHHKILRFDLENKTSGQVEQLLSRALEDVFRYAANKRKPVVMENIRFLQRKKFYDWNTKRTRRISMFACNQMALLAASKSNKYCIEVVQVNPAYTSKTGLLKYKKRYGLSTHEAAAFVIGRRGMGFTDKVPDSWKRHLKPEHRTKPRYEQWKTLYAVLTKMNYRDLNQLLYPGLQPALNFMQPINYSHSDY

SEQ ID NO: 9573 - protein, 445 aa, Pseudomonas sp.
MGAPVIRTDKWPLQATAHQQHLMRLTLAEYRAYCRALSIVVLNNWPALSQAPSFAAAVERLIHPTAKNPKPRHRYFARRFYKFPSYLRRAAIEFVKGQVSSYLTRYDAWLDGDRRRPDAKPPLFSPASGCYPAMYRGQQVKFNDDFSQASLKLWDGREWLWHDVPIKSVRHRHLLGTIKSPALVVARHCHLSVPVEVKPERLPMADRVCAVDIGINTLATASIVSSGGTVVARRFFHPAADIDRRNKRGLLIRRKARKTAKLSKGFCAELHRKARHINEQIAQLTSKHLVQYALAHGADVIVLENLKGWRPKAGGKRSALRQRFHGWLHRRLATLIEAKFAEAGGRVEYVYARGTSSWAFDGSGKLKRDAKHYELATFSTGKQYNCDLNASYNIAARYWAWKLKLTRRKDGQLPEDKSSPGKPRMPVTLSTLWQREQEAPHLCAA

SEQ ID NO: 9574 - protein, 449 aa, unknown
  TnpB Polypeptide
MEITSSYTVEIKNIKKLFNPTIKIFNQAVSFCIQAFESEWSELKDINDAKTQCGAARKLIHSSKSNKAKYPDYDKLFHKMPSYFTTAAINAAIGVLKSYHSNLQKWYNEGCKGSRPTLQINANKYPVFYKTNMFEWSDKKDAIKLKLFIKNDWKWVELNLKHTDMQSIRKHSINATISVPTLEKKHKKWFLRFAFTNKADLNKTPVSEQKILAVDLGINTDATCSVMDYYGTVLARSFINHASEKDYIKHNLNKIKKYQAAGQKDVVRKLWSITRNHNIELASKIANNIVNYAKQQNVDVIVFEHLNMKGRKKGSKRQLLHMWNKNTVQRIVTHKAHLLGIRISHICAVNTSKLAFDGTEYVLRGKDAELPTYELCRFQTGKIYNCDLSASYNIGARYYIREIEKIYTRKSICKGISIWSDMQAKVPGCQKRTQNTLSTLRAIHQYLAS

SEQ ID NO: 9575 - protein, 238 aa, Desulfotomaculum sp.
MKGGLVFKVLKIGPVKIKLHRPMDGKVKTLTIRRQNGKWYACFSVEIDAVPLPPTGESCGIDVGLEKFATTSDGEMFDNPRQLRQAEKKLKQHQRRVSRRKKGSNRRKKAVRELARCHEKVANQRRDLHHKVARSLVNRYDLIAIEDLQVKNMTQNHHLAKSIADAGWGNFRLILTSKAESAGRKVVEVDPKQTSQLCSRCGAEVKKKLSQRWHHCPVCGLSIDRDVNAAINILKRAV

SEQ ID NO: 9576 - protein, 474 aa, Ardenticatenales sp.
MASSTKTQRIRLEMRPGLLDWYEATTTLYNQVVAFYFDLYQAQPGLLDLNQQEALTQAERLTHRTTANPAPLWPLEEAMGADIPAMLRRAAINAARGAFQSFHSRYQRWQNEKAKFEAKGKRFAHRPPVPPRTFRFNPPFYQGMFKERTATSIRVRLYSGTSWQWVKLHLRGEPLPEGWEAGSPSLVRRRGHLRLHTPLTKQIPTPSKALVQVALNPSLRICAIDLNLGDAQAVCTILQADGTEVATRYIRGGKSLHARRKRLLGKVARKRRQSGRLSEGEADNIKLWQKIRAIDEAEAHRVSRRIVEVAQAHGATILVFEHLGNLKPQKGRYSRRGNEKRAYWLKGTIVQYSRYKAWEQGILTSRVSPHNTSRDCSGCGHSPVARYAADEAPLDYRPGAPLYLCPACLKRGNADHNAALNIGFRFFQRAFRTLSKSLHSKGSGVPTVNLIAWQHFAAWQDRRSGSALPAFSLA

SEQ ID NO: 9577 - protein, 400 aa, unknown
  TnpB Polypeptide
MYLCETTIVKPSNRQLYKACDELCFKSKNVYNSALYIQNKNYKEGKPYITAFSMMNLMVKEKNKAYYDLNTTVSKYTIKTLDEAFQSTFKLIKLKQDGKYEGKIVFPKFKDSIHGRFVAIYYKDRLLKRTYQKEGLIHLSMTSIKFKSRIPFEQIQEVKVVPKKGFYAIQVVYKIEEDKQVSSNNYAAIDLGLNNLATVTTTNFSPFIINGRPLKSINHHWNKRVSKIKSKLPKGVYSSKQIRQITNKRNRRVNNYLHQTSRTLVNELRKLSISKVVIGSNKGWKYNINLGKKTNQKFVQIPHQKYIEMISYKCKLAGIEVITAEESYTSKCSFLDNEMVEKHEEYLGKRIKRGLFRSSTGSLINADVNGAYNIMKKHLGIEISSLDSVQVCGTPKVLKP

SEQ ID NO: 9578 - protein, 358 aa, unknown
  TnpB Polypeptide
LEGKSYIGFYDMCKLLREQKNSDYYAINAMSSNYVVKQIDNSYKAYFSLSKLKKEGKYNKKVKLPYYKDKIKGRNVATFYKQRMVKSSYDKDGLIHLSKTNIKFKSKIPFKQIQEVKVIPKNGYYELQVIYKVEEENRVSSNNVAAIDLGLNNLATVVTNVSSPMIINGKPLKSINHHWNKRKAKHQSKLPKGVKSSKQIRQITHKRNRRVNNYLHQTSRTLVNEFRRLSISKVVIGSNKGWKENISLGKRNNQNFVQIPFNRFIEMISYKAKLSGIEVIVKEESYTSKCSFLDNESVEKHDVYMGKRIKRGLFKTSNGSLINADVNASYNIMKKHLGIEISSLDSVQVCSTPKVLKS

SEQ ID NO: 9579 - protein, 505 aa, Caldilineaceae sp.
MTADPHSTIQPLPHGEPQVRNERYRVRFDNRAQAAYCARIAGANRFVWNLVLTICEWRYDRHLAEKESDPEAKPPGTSAFDLFKLFTVVRSRPQEEWYRDFLQSDRGEYYRDRDLAWLRDLPFAPVRYSLKYLADSYKRFYKAAKEAKKQGRKLPRRKSDGKPQGFPRRKGFGVKCDGFTIPDGVRMDGERLRIPKAGWVRLDGSGQYLGCDAKQVRIIREGTEDRPKWYAIVSYHVTPDRLKQPAWTGALGVDRNVGQATDSDGVVYESPDDSLIDTKIKRKQRELSRKKGWGPKTRGQKKSNRGRRVNGQLKKLHRKKKRRRENAAHQHSRKIANTAHTVVLEDLNTAAMTKSAKGTVEEPGLNVKQKSGLNRSVLASGWGALDRNLDYKAGAVKRINPAYTSQTCSHCGNVNKENRKTQANFNCTACGFKANADHNAAINILVGGGFSAPDPTARGTGATARRDALGHCLGPPAQGKSASTTREQDMPPPPGAAASGDQSGI

SEQ ID NO: 9580 - protein, 234 aa, Nostoc sp.
IQSDVDFKKCLGIDPGLNNWLTCVSNVGTSLIVDGLHLKSLNQWYNKRVSVLKENQPQGFWSKQLALITEKRNRQVRDAVNKAARLILNHCLENKIGTIVFGWNEGQRQNINLGSKTNQKFVQIPTARLKDRIAQLCQQYGLRFEETEESYTSKASFLDSDLLPTFGEKPEGWQESGKRVKRGLYACANGTKINADCNGAANILRKVAVKLGLDLSRISSGDLIAPLRIRFWIS

SEQ ID NO: 9581 - protein, 307 aa, unknown
  TnpB Polypeptide
MLKRLDKSFKAFFRRVKTCDQAGFPRFKGRDRFDSITFPSYGDGIKIKDNRLYVQNVGLLKIKMHRVLEGAINTVTVKRECSKWHVVFSNTVEVEPLPVSDKSVGIDVGLESFAVTSDGEYIENPRYLKEAEAILRISQRNVFHKKKGGSNHGKAVKLLAQQHLRVRRQRADFAHKVADNLVKNYGRIAVENLRIKNMVRNHHLARGISDAGWGQFVDILSYKAEYAGREFVLVKPNGTSQICFGCGVTVKKSLSTRVHNCPACGLSLNRDFNAALNIKRLELSLWDPTCDSGQCVSQEAVALWATE

SEQ ID NO: 9582 - protein, 307 aa, unknown; identical to SEQ ID NO: 9581
  TnpB Polypeptide

SEQ ID NO: 9583 - protein, 284 aa, Bacillus sp.
LQTAYKNFFSGQNDFPTFKSKKSRKSYTTNMVNGNIMLFHGYIKLPKLKMVRLKQHREIPQKHIIKSCTISMTPTGKYYVSVLTEYEKEIVQKEVESVIGLDFAMAELYVSSEDEKANYPRFYRQMLGQLASAQRVLARRVKGSARFNKQRIRVAKLHEKVANQRENFLHHKSRELATHFDVVAIEDLNIKGMSRALRLGKSVADNGWRMFTTFLAYKLQEQGKQLVKIDKWFPSTKMCSRCGNRKEISLSERTYECSCGLKISRDYNAAINIKKEAIRLLAWI

SEQ ID NO: 9584 - protein, 408 aa, unknown
  TnpB Polypeptide
MMEIKSLKLRKAYKFRLKAKPNQLALFQQQAGCCRFVWNKALALQKERLDGGEKVLRHVDLCKLLTGWKREEGTVFLADAQSQTLQQTLKFLDQAIREAFDKKNPKRFPVFKKKGLAGDSFRYPQGFKLDGDRIFLPKIGWVRFIKSREIKGVPRNITVSRRGEHWYVSIQTEREIAEPVHPATSTIGIDLGVARFATLSDGSFLEPLNSFRRIEKRLAKEQRKLSRKVKFSANWQKQKAKITKLHIRIADVRHDFLHKASATISKNHAIVVLEDLRIRNMSASAKGTLELPGRNVRAKAGLNKSILDQGWYEFRCQLEYKQAWRGGVVIAIPPQYTSQTCPACGSISPENRKTQSRFACACGYRNHADHVAAINILAAGLAVSACGEPVLSGRFVKQEPTEEVRHAA

SEQ ID NO: 9585 - protein, 383 aa, unknown
  TnpB Polypeptide
MQNFKYKLYHKNKRNSRLGELIVTSNYIWNYALTIQKLSYRIYGKYLSVSQLQKFIAKKRKRNSYWMKLNSQTVQGVVQKLDESYQRFFNKLQKAPPKFKKIRQGGSIRFTQSGFKLEDNKFQINKVGTFRFHKSCEYYNVKQIVVKKSGDRYFICMSCDIQPKKLSRACNGTVGLDFGLITFATKDTGETIASPRFLFQQVDKYRSLSKRLSKKQKGSNNRRRARKHLNNFHYHISCQREDWQWKLAHELCKSYDVICIEDLCLKGWIRLWGRKVSDLALGSFIQKLQYIATKYDTRVVKVVRFYASSHICSACEKKLDRKLLKSERSWTCPCCGVNHDRDVNAAINIKRQGIASLCDVKHTQRKTLRKARRSVEAQGIPAI

SEQ ID NO: 9586 - protein, 405 aa, unknown
  TnpB Polypeptide
MYTTLYKLFRAPRNRNLKRKTWIAHTIWNYFLGWQRMRYSLGLPYMSFYEMSRAFTVLKNSHPEMFAHWQELNTWSAREILKRLDEGYQRFFSGLAKRPSRFRSWRKPYSFTMCQSGFRFADPEEGDFGFGIYGDKVRIMRKQYRFNLSRPIFGNIKTVTVKADALGDFYMSVRTDHIATEVTPKTGQAAGYDFGIKTMFTCSDGTQHESPHFYQTGYSDLQTAQRRLSSKQKGSNNRERERLNTARVHRKIRRQRENHHWKLTKRLVHQYDVLCFETLTFEGMKRLWGRKVSDIAPYAFHLKLRHQAKKHGKALCYIDRFEPTSRRCSHCGAGQMLMDLSVRQWHCHRCKTDHHRDVNAAINILKVGASTFGLEGVRLAIASNPRRLHPKSIPHDPHRKATDSL

SEQ ID NO: 9587 - protein, 237 aa, unknown
  TnpB Polypeptide
LTIRISATGKWFACFSAEVEENPLPWKDETVIGVDVDLESFATLSNGEKIPNPRFFRSEEKELARVQRRLSNAPKGTPERKNALKVVQRVHERVANKRYDFAQQLSHDLVERFGTVCFEDLNIKGMVQNHCLAKSISDVAWNMLVTITSYKAASAGSRVILVDPRNTSKMCSRCGTFVEKSLSDRVHNCPCCGLFLDRDQNAAINILRLGMQSLRKCHDYRRGSLDAIEGIDRSPAI

SEQ ID NO: 9588 - protein, 413 aa, Pyrinomonadaceae sp.
VVDTRYRKNAGAIYSLKYAIVFCPKYRKPVLVDDILRKTFKYRLYPTRDQVEAMNHQLGEACRLYNAGVQERRDAWCINRESVNYYMQANQLKEIRANGDLSLANFSACQDVLRRVDQTFKTFFARVKRGERAGFPRFKSHTRFDSLTFPSYGDGCRLLDNEKLRLQGIGQVKVKLHRAIEGNIKIVTVKREQGRWYVCFSVECEPKLLPPSAASVGVDVGLKEFATLSDGTEVENPRHFGHAQAKLRRAQRKVARRKRGSHRRRQAVCELQRAHAHVRNQRADFHHKLASWLVLMFGLIAVEDSNIKGLASGMLANSVNDAGWGRFIETLADKAENAGRQLVKVDPRGTSQTCLCGAHTPKTLSQRWHECQSCGLSASRDHVSAQLILGRGLRLRALTWSDATCVAREVALL

SEQ ID NO: 9589 - protein, 382 aa, Virgibacillus sp.
MLVHKAYKFRLYPNKGQKIMIAKTIGCSRFVFNYFLDQWNTAYRETGKGLTYGSCSTQLTQLKRGLTWLKEVDSIALQSSLKNLADAYSRFFQKQNKAPRFKTKMNQIQSYTTKQTNGNIAVIGNKLKLPKLGLLKFARSRTIHGRIVSATIRKTPSGKYYVSILVETEVQPFRKTDSAVGLDVGLNDFAVLSNGLRFPNPKFFRTLEKKLAKEQKKLSRRKELAVKRKGKLTEAKNYQKQRKTVSRIYEKMVNARHDSLHKISTMMIKNHDIIGIEALQVTNMLKNERLAKAISEVSWSQFRSVLEYKAKWYGKQLVIVARDFPSSQLCSNCGHQNKEVKNLAVRDWVCKKCYVHHDRDLNASRNLCQEAIRRTAGTVGIA

SEQ ID NO: 9590 - protein, 410 aa, unknown
  TnpB Polypeptide
MGVGKAPNRPRAGLGFRVYKPRVSRVNRERLKALYNDVINYILGVVHELKGSKYLTYYAEEWKKIYENAKRMRREAGKRTPPKAPPLPLPVRFVMPDGSVRGDRNAPAVIDLRKGELRVPSYGVVQRLPRSLVRALVEENNLNPRPDFVLQVTRKGLVRLIASRAPPRKDASALLLVCMDENLGHGLYTTLIRFDGEKVKVARGPTFKPPNAALLRRIAARLQSAADRGATSELRALIEKAYEELGEKREVEGGKLYATPDRLRELKRRIGARERRLNREWRNRVVAWLRRTMRANADARAVVLVDEVTVETAQSGMLRRVRRKLMNLCAYEGAEYLPLRASGKLCPRCGAMGVEVVHRVYRCPRCGLEWNRDRCATFALALNYAKITENEALRKALLEWLNEHPRALLS

SEQ ID NO: 9591 - protein, 539 aa, unknown
  TnpB Polypeptide
MEDPLDTEMRLFCSCTRWAFNRLLEGASRDDVKRRGQELFGINSRYADDARLKAKAVIDSQGELLEIEVDETESKLARARKKLGQAMRKLARAEEKGVAPEEIEKLRLATNGRNARVASLEKKLSELKEHQENGTIPKVVFGGKKLWKKVCRRRVAREEWRAVRKNRLYTQGDETKGGNPHFKVSYRDGQFRLAVTISHLSEQVGVDAKGRPKMTRAPKVEGKVWLPEKHRDMVRIWLAVGLPYTVELIRTVDGRYLVHLTLSLSGAPEPDFAKGCLSVDTNPDGLGLCNVGPTGQPEPWPEDFSVPYPSNLGKYEGEFQVIPYPNGFMYIRIPDLEYARGFRRAYLTGVLAKVVVDIAKFLGKPIALEDLDFGEDRLDTGRKFNRMASNFPYAKVVEAICRRAVKEKASFKLVPPRHTSTIGWWKYMRRFAVPIHCAAALVIGRRAMGYREKVTKELRQLFEQIKQKLAQKVSSDKPREGRGMTRRVRACLKRLEKKMQTHNALPLWKQIRFYSLWHDFKLLARVPAVTPFNWCRTNQ

SEQ ID NO: 9592 - protein, 492 aa, Pseudoscardovia sp.
VGLGPAAAGAACRRGIQLLSDFLVFVWSCALSLIPTTQVHGQANRMESVRGCAMTANEAVKVRLDPTPRQERMLMSHTGAARFAFNAGLAHVKDMLDKGEEPEWSHYSLRKWWNANKATLAVNPETGEPWWQENSKEAYSNALKSLADGLRNFSESRKGQRKGPKMGFPRFKSKGRAVPRFAYTTGEFGLIDGDPHALRLPRIGRVHCMENVAKRVGGAKVVRMTVSQRAGAWYAALTIEIERADSAVPKPPKGGSVGIDVGVKEFATLSDGTVIHNPRALESNLRRLGEAQQDLSRKQEGSGRPRKAKARVARLYARVANLRDDFLNKTTTMLANTYEDISIEDLNVAGMLRNHSLAQAIQDVSFYEFRRQLTYKTARTGAKLHVIDRWYPSSKTCSNCGTVKAKLSLSERVYRCDECGLVIDRDLNAAINIMVVGSAPETLNARGGDVRRADAKRRATRTPVKREPSGRANAVRLGAGLGNEAMQVSCQR

SEQ ID NO: 9593 - protein, 241 aa, unknown
  TnpB Polypeptide
MYETEYIQRNLNKNNTLALDLGVNNLVTTVSSKDRSFPIDGRKLKSMNQWFNKENARLQSIKDRQGDKRRTTNRQKLLADKRNRQVNDYMSKTAKKIMDYCIANDIGTLVVGYHEIFQRNCDMGKQNNQNFVNIPYGKLRSKLEYLCELNGILFVKQEESYTSKASFWDKDVIPVYNADNPQSYNFSGKRVKRGMYRTASGKLLNADVNGALNILRKSNVVSLDTLYRSGEVNTPVRIRVA

SEQ ID NO: 9594 - protein, 435 aa, Gammaproteobacteria sp.
MQQNQQWHQQLVNCMLNHMSPPSGQSVTIRAVRYRVLPGIPAKARQLNRLAGACRHVWNWSLDQQRAAWLGWRFSSTKRPPPPTFFTLGKAFAELRNASGHEWLKALPFSPVRYTLKHQADAWQAFLKGQRGHPKFKGRGGEAGFTIPQDVRIADGFISVPKLGNYRLRRRGGNPHPDGRPKQAVFRREGGKWFCTIFYQVAINPRPDDGAVVGVDRNVGQCALSTGEIIRLPDVARLEARKRRYQRRMARQAKGSGRRCRTKAKLARTHARVRGIRSNWCHQTSRRIADAAHTVAIEDLNTKGMTRSAKGTKEEPGTNVKAKSGLNREILASGWHGLERNLDYKAGKVVRINPARTSQTCHECGFADSANRLSQSTFRCQACGHEANADVNAARNIRRQGLAQLDGEGRGCRRTKGSLARPMTRQTGGGLRQAA

SEQ ID NO: 9595 - protein, 492 aa, Arthrobacter sp.
VNSHAAEALQNSGRPLRCRTCTTGNDAPRVSDPSTSVGLVSIRQRLYPCPDQRAVLVEHCHHHRFVYNIGLEQRSLWRRDKHLRGELSLPKVSTLTQMRELAELRGELDWLRAGSSSVQQAALRDLERAFQAFFSGRAKYPSFKRRNDREGSFVVRDLAVKRLNRKWGVVNVPKIGKVRFRVSRPWYCIKAATSARVTLRNGHWHIAFTTPPAAKIEARTNAVVGIDRGVKNTLATSDGKMLQAPALTDNEQLRFLALQKQLARQPKGSNRRGRTLDRMGVLRTRLEQRRGNWVEQTTTTLAFAYEFVAVEDLRIRNMVRRPQSKPDLDTDNPGAFLPNGARAKAALNKAILASCWGRLLDRLGHKMPDGAVVRVDPKNTSRTCAVCGHCAPGNRESQAVFECIACGHEAHADFNAAAVILDRGLATLAPGHGASGRRGPAVHAGSVNQSAAMQPRIPDFQFGEDVKGKGTGSAPLLSDPRERNRSICKPRV

SEQ ID NO: 9596 - protein, 374 aa, unknown
  TnpB Polypeptide
MNKAYKYRLYPNKEQAQLINKTFGCVRFVYNQMLASRKATYEQYKDDKEALKQQKHPLPAGYKKAFPWLKEVDSLALANAQLNLNSAYSNFFRQKSVGFPKFKSKHHDRKSYTTNNQKGSIRFINNKTIRLPKLKDVRIKIHRQLPPDAKIKSATISQTPTGKYYIAILVKYEVQIEQIKPRAETTIGLDYSSKALFVDSETNSADYPKFYRMAEAKLKNEQRKLSKRKKGGKNRFKQRLKVAKLHEKVANQRKDFLHQLSRQIANAYDVIAIENLNMRGLAQSLNLAKSTNDNGFGMLKTFLSYKLAEQGKHLVIIDKWYPSSKLCHKCNYKNKELRLADRNWTCPHCGVDLDRDVNAAINIKNEGCRILGIA

SEQ ID NO: 9597 - protein, 442 aa, unknown
  TnpB Polypeptide
MRTVSSYGVELRKQNIPIRQTLEIYRSAVSYLIGIYVQVWEELAEIPDAKRRFNAAEHLVHTTKKNHACFDFDIRFPKMPSYLRRSAIQHALGTVSSYKTRLDLWEKTDGKSGKPKLVYENHAMPVFYRDVMYREGAEGKDEAYLKLYDGHDWKWSCVRLDHTDMEYLRKCWSGKKASAPTLEKRHRKYFLRFSYKEEVTLTKTPVKEQIICSVDLGINTDAVCTIMRADGTVLGRKFIDHPSEKDRMYRTLGRIRRFQREHSSAQSRGRWAYTKRLNIELGRKIAGAIVKNAEENHADVIVFEYLEMQGKISGKKKQKLHLWRKRDIQKRCEHQAHRKGMRISRICAWNTSRLAYDGSGAVTRDWENHSLCTFQTGKRYNCDLSASYNIGARYFIRELLKPLPATERSLLEAKVPSVKRRISCVYADLRELFLEMELLRAA

SEQ ID NO: 9598 - protein, 379 aa, unknown
  TnpB Polypeptide
VKLEVSRKVFCSLKVNEADLAKLNSMVKSFEDACNYASEFSFRKRIIEAKILHDRVYRELRVIFKLPAALAVRAIQKVASSYRESSYKLHIFKERSLTLDRKLFCLKRTGKLVASIATASGRIKAELKVGDYQRSLLRNPVTGARLILKRGVPHIQICVACDVLPKEMDYPVGVDLGTRKLLVASNGFKIDGRAVNAKKQHFRSLKNSLKEKGTSSAKRRLKRLIKREKQWFRTTLHQSSRALVESLDEGNYLVLERLYGTKVRRGSKRNRRCTKPSFQSFAIGRLHQMISYKCGDQGIPVILAKPDFTSQRCPRCGTIDKFNRRSQALFRCVNCGYQHNADFVASINLRELALGGWAAVSQPNAVPPIGRDCKSISAA

SEQ ID NO: 9599 - protein, 427 aa, unknown
  TnpB Polypeptide
LRRGDPGLQAGGNAASPPRKCQWWSLVCSYVPIPAAPHPRSASSAAGPVRARSVHMEPCGRAALALAPGPQESAGLPGAMPAAHAGTGRVPVAGRRLPDGAAAGVADFTHAMAAFFDRGNPAGRPSWRKAGRDEGFRIVGRGKQWNVRRVSRKVGQVWVPKAGWVRFRWSRPVPPDVRSYRVTLDRADRWHVAFAAIPSPVPGPGNGKVVGIDRGVAVSAPLSTGELLHAPSLTALEQQRQRRQERKLARARRGSNRRGRVRLGIARLKARQTDRRKDWAEKTSTDIARRFDLICVEDLNIGNMTRSAKGTLGDPGRNVRQKSGVNRSILASGWGLLVLRLQEKAPQRVEKINPAYTSQRCSACGHVDRNSRESQARFRCTACGFACNADVNAARNIAAGHAVTAREGDGVARPVNREPQLLLQSAR

SEQ ID NO: 9600 - protein, 284 aa, Moorea sp.
MEFKAVLNKSQEIAIIEAIRTARFVRNKVLRYWMDNRGVGKKELYRYNTQIREDFKFVKDLNSHACQASVENVERAIKRFYDNCKKKTPGKKGYPRFKKHSRSVEYKQSGWKLSPDKKFIKFTDKKGIGKVKLKGTWDLWRFDQKLIKRVRIIQRADGYYVQFCIKLDNHEQLEATGFTVGLDVGLKEFYTDSDGYSEPNPRFYRKSERRLKFYQRRVSRKKKGSANLRRAINKLGRTHLKISRQRSEHAKRLGTKLPQEECSQSKLVGYASACDRFCCKAALF

SEQ ID NO: 9601 - protein, 461 aa, Moorea sp.
LYKTIPVKATFSDEERAFWEFLCQQANSLFNCAIYYAKQKHYDWLKEQEAYTTYWRGDELRIGWKTYKCTTKYPEIDKALKMSPHYKAMAAQSAQQTLKTVGEAIKSYNQLVGLYYKREVDRPRFPRYRKSGGFAAVTFPRQALTYKQGLFYPSVSKESKPELLTEITLSPPEFIDSDWVKEVTIRPCYGQLWIDWVIDDGKSPIETNPELDYSHALGIDHGGDNWLTCVSTLGKSFIIDGKKLKAMNQGYARLVAKHKTGKPEKYWDSTLDRIQLKRNNQMRDAVNKAARFIINRCLKDGIGNIVIGWNEDQKNCSNMGRKGNQKFVPIPTKKLIERLKQLCLEHGIKLIVTEESYTSKASFLDGDSLPTYGEKPSGWIPSGKRVRRGLYQTASGKLINADSNGAANILRKVSTQPFNMAKVSRGSLAVPHRYDLFSGLSTSYRYKSGAGRENRSRVTTL

SEQ ID NO: 9602 - protein, 399 aa, Chloroflexi sp.
MQLVEQHVINRNDTRFPLIDAAAFAAKNLYNAANYIVRQSFITDGVYVNYQAMHRLMKATEPYRALPRKVSQHVLMLLDTNWKAFFASIATYRANPTACTGKPGLPKYLDKTKGRFTLVYTIQAISRPALAQQVIKPSGLDIHVQTKQTRIAQVRIVPRSGCYVVEVVYARDVVPAAVDPTRVAGMDIGLNNLAAIASNKPGFVPVLVNGRPLKHINQFYNKRKAHLQGKIGTTGTTALMERITIRRNRQMTHYLHTQSHRIIELLVEEGIGTLVIGKNDGWKQQIAIGRRNNQNFVQVPHARFIQMLTYKAELVGIAVVVTNESHTSKCSFLDNEPVGHRERYVGKRIARGLFRAADGRNINADVNGAYNIIRKAIPNAFGNGIGGVVVHPVGIAPTN

SEQ ID NO: 9603 - protein, 363 aa, Escherichia sp.
MAIQTKTLQVRVKDRHAALLRQMAFEVNQVFNFINEMTAAEYSTVSEYGPKQRVWLTEFDVDKRIAGIQKERGYHIQAATCQEISKHHAKARKQFKRSKLRWRKSGGAGRSLGWVPFKGAQVKWVNGCIKFAGHYFKVWDSYGLNGFKFRAGNFAEDARGRWYFNVAVEYECEPTKGTADVGIDLGLKDIATTSDGEKLPAKRWYRELEGKLKIAQRAHNKKRVRAIHAKIKNRRKDAHHKFSTALVNKYAAIFVGDVSSKKLSKTNLAKSIYDAGWCQLKNQIQYKAIARSVVFEVVDEAYTTQTCSCCGAISCSSPKGRVGLGIREWICVECGELHDRDVNAAKNILAAGHRRLEGGIHAL

SEQ ID NO: 9604 - protein, 412 aa, unknown
  TnpB Polypeptide
MRSQKLRLKLTKEQERLAWWYSKVSRNFWNLLVDIDKRNNKGEFDEILSKQGNKTYRSKFYDREIYHLNQSDYLNLAKLVVAKNYDEDQEQWSWYYQPNQSFIYTFLSRELVKIRRQNKGKLNFRSIDKIQPNFNIRCDVSANKKRPSRIYLKENGKLQIPTLGDVKYGSARLDFDLSCKKQVAKVSFDGKYWYLSYIEDIEPQVANLPDYTDGVGIDLGIKTLATVSDGTTVPNIKTFRRVRILNKRLKRLQRKVSRKYHINNCNKHNKTKNILKLERQIKLIHRSLRNIRINHIRKFVSELVKKQPEYIAIEDLNVKGMMKNKYLAKDIANCSFYAIREQLIRKAKERLIAIRLVERFYPSSKTCSACGHYKKDLKLSQRVYHCSHCQEKIDRDFNASLNIAKTDRYVLA

SEQ ID NO: 9605 - protein, 194 aa, unknown
  TnpB Polypeptide
VRSKEPTEKLLRLLEEGKARILSATVSREADRYYVSLTCEVARPDPKPKEVKGEHDVVGVDLGLSAFAVLSDGTRMEAPKPLAKKLRLLKRRSKGLSRKQKGSNNGKKAALRLARLHRKVKNLRLDFLHKLTTWLARTEPVIGVEDLNVKGLSRGRLSRSVADVGWGAFRRMLEYKAGWYGATLIVAPRSFPTR

SEQ ID NO: 9606 - protein, 216 aa, unknown
  TnpB Polypeptide
MSSVSDIVTPYDLPYQAKAALCNYVPKLRKTYNAQDLDDEHPIRLTNQAAKFDHSEERDYEFTWWVPRPGRGTNFWMPLRINPEQEDLWHDLVSEDAKAGEIRLQQHRKNWVLHVTVEYPVEEPAADGDATHIGLDIGETALITGCALKDGSPTDPFVCSGSRAKHLRKEMHTTLKRLQERDASEWRTDERFDLPERPHRHRGESVSGSRRVRQAV

SEQ ID NO: 9607 - protein, 212 aa, unknown
  TnpB Polypeptide
MEVRRTVLVTLDVDSDDDALLRDTVDEFLFAAQYVVDYAFQGEYVTTSKGQLQDETYDDVCKRTPLNTGLIQNARSKAAEACKSMVERWKQGKKASKPRMTSPHVVYDHRTATFYDDYVSLATTDGRVEADYVLPDKDSDTPHNEYLFSDEYETTGAELHRKHGEWQLHIHCKKEVESDTPEQATTTHGTVLGVDLGVNNLAVTQHRYVLDR

SEQ ID NO: 9608 - protein, 418 aa, Lysinibacillus sp.
MARTAKSAAAPTLIKAIAIATAGIVIVKTGDFIKILYNTFSEGGEGMTTITAKIQIYVTEHQEESLKITSRAYQKACNWLSEKVFSSKNVNQAQLNNLFYKELRDTFGLKSQMAQSVMKTVIASYKSAQSNGHDWSLIHYKRPSYDLVWNRDYSLNERLFSLNTLDGRIKLPYEKKGMYDYFDGTWKFGTAKLVRKFDKWFLHIPMTKEIPQLNIQDVNNVVGVDLGINFLATSYDSKGKTTFFNGRKVKHKRGQFKAVRKSLQQRQTTSSRKRIRAIGQRENRYVLDVNHQVTKALVERYPKGTLFVLEDLTGVRQATERIHVKNRYVSVSWAFYQFRQLLEYKAQLYGHKVIVVSPKDTSQTCPKCGHVAKRNRNKKTHTFMCVNCSYQSNDDRIGAMNLYRKGIAYISDTVTVEV

SEQ ID NO: 9609 - protein, 402 aa, Escherichia sp.
MKRLQAFKFQLRSDGQQERQMRRFAGACRFVFNRALALQNENHEAGKKYIPYTKMASWLVEWKKDTETEWLKDSPSQPLQQSLKDLERAYKNFFQNRAAFPRFKKRGQNDAFRYPQGVKLDQENSRIFLPKLGWVRYRDSRQVTGIVKNVTVSQSCGKWYISIQTENEVSTPVHPSASMVGLDAGVAKLATLSDGTVFEPVNSFQKNQKKLARLQRQLSRKVKFSNNWQKQKRKIQRLHFRIANIRRDYLHKVTTIISKNHAMIVIEDLKVKYMSKSAAGTISQPGRNVRAKSGLNRSILDQGWYEMRRQLEYKQLWRGGQVLAVPPVYTSQRCACCGHTAKENRLSQSKFRCQVCGYTANADVNGARNILAAGHAVLACGGMVQSGRPLKQEPTEMIQATA

SEQ ID NO: 9610 - protein, 368 aa, Thioclava sp.
MTATRSLSFKLYPSPAQAAALARKHLMLKDLWNAALEERIGAWRHSQIRVSRSDQEKALKEIRFGLEGWRGLVHTHEAQVVLKRLDLAFQAFFRRLRAGEAPGFPRFKSAERFRGWGYKEHGNGFRVEMRDGGRHGHATLFGIGRMRMRGIARTPGRVLKADVTRTIRGWRLNVVVETGCAERASAEGQAVGLDWGVSTFATLAHEDGAFEELPNPRHWDLEAEDLKAEQRRLSAAARARKISRRALRKHRRALARRHAKIAARRKDFLHKTSAQIVGRHRLIATEALTVRNMTGSARGGAGAECGPEGGPEPIDPGHGSGRFFEHAPIQSGRSWCGVLRGEDARAEAVTALPGLRRGAQEDARGAPA

SEQ ID NO: 9611 - protein, 459 aa, Lentzea sp.
MSHLGAAPVRSPGRRRCVHPAPSAGRGAHLTGAGPGRPSSRPPVPRLTHRVSPGTLCVVRTAYKCRAYPTPEQAAMLNRTFGCVRLVWNKTLSERNHRYSTNGTRTSYRQTDSALTAWKRTAELAFLSEVPSVPLQQTLRHQHTAFQNFFAGRARRPRFKARTGRQSAHYTRSAFRMRDGTLMLAKTSAPLRFVWSFGIDVTEVDPTMVVVSREADCRWYVTFAVDTDAPAQTAPIGKVVGVDLGLTDFLVTSDGERIANPRNLARKAHNLARYQRRLARCQRGSSNRSKAKIKVARAHRKVRNARRDFLHRTTTTLVRSADVIAIEDLSVKNMVRNRYLARAISDAGWGEFRRQLEYKCRRAGRTLVVIDRWYPSSKTCSACGYALTELKLATRHWTCPDCRTRHDRDLNAAKNILAAGRAVARGDSGDACGADVRRQGPSLPRSAVKQESRAARRSP

SEQ ID NO: 9612 - protein, 406 aa, unknown
  TnpB Polypeptide
MLITKKIKLMVSPQDAATLEFMQGKCRGLYNWWVIRLRNGEKWPGWREAKKTLQESKRHDPELCQVYGKLLQEVYFRLDNAMKAFKRRVKNGEKPGFPRVRPRHCFFTLCYPAMYLRVEGKTLILPTAGRGRSKQYPDIRALLTEQPPANFREVAISRDTHGNYYASFAHDVEKEETGKHGGMLALDLGVKTLATGVNEQGRLYHIGGFKGVRWYNKQLDRIRSKRDRCKKGSRRYIHLSKVYKRVSEKKRNKQQDCLHKASHLIAHRLVESTVVIGELSQRQMVMNKHAERNKHLNRAIYNDWGLYGFVQMLLYKCLLYGKELVILDERDTSKTCSQCGHKCNMPLWKRTYRCRNCGLIMDRDENSAVNILMRFLARLEPHMERISMRCTDGFTVIDNVSPHEHI

SEQ ID NO: 9613 - protein, 434 aa, Haloterrigena sp.
VVEEAFKYAAKPEDTSTAKSAWKAIQTCRQVHNHALTQEYKPAPDYDKPSYTTMQNKLPEWKREWPEWGSVYSKCLQMAVRRIKNSESVLDSLEERGFDVGKLKWKSPREYRSITYNQSGFDVDSNTGRTDHATVEFSKIGTFHLNFHRPLPDGSDIKEVILKKQKTGDWTVSIMVEYDADYPEKPAVADIDVEDTVGIDLGITKFIHDSDGRAFRPLDEEEDRERIDKRHQSVSRKEHESNNWNKARQQLARAYKRLSNKRKAYREALANAYTKQYDAVFLEDLNVGSMMKQNGNSRNIASMSWYETLQTFQRFGEKNGCHVVLVPPDGTTKRCVKCGVESDKPLWVREHSCPSCGFETDRDQNAALEVQRLGLLELGVVEDESGLGQELAESTPAETGTAAGSRQRDVVPASAVVDTGSPTLNERTALAVSE

SEQ ID NO: 9614 - protein, 418 aa, Calothrix sp.
MAKKKKDKKAMGVQQVLLHPDTERKAILRYLCEQSGKLYNNGVYFARQTFFKTGKLLTGKFDLDFEPSVAKTLTAQSLPSTPMQQTLTSVTEAFKSFKELRALFLSGQLHFKPQVPNYLTGSKLFKVAYPNSGGQKPLINEGQLRFSLGLTVKRWFGVSEFFLPMPTNMDYSKVKEFTILPKNGAYYLEMSYEVEEKKHDLDINQALSIDLGTADNLAACVDTLGNSLLIDARAMKAMNQLWNKKVSTRKENKPQGYWDSWLDRVTRKRNHQMRDGINKAAKLIIDHCLKYGIGTLVIGWNEGFKLNANIGRVQNQKFVQMPLGKLKDRLKQLCDLHGIRFQITEESYTSKASYLDGDTLPVFGDKPEGWTASGKRVKRGLYRTANGSVVNADLNGSANILRKVASNLNIILKVRDKV

SEQ ID NO: 9615 - protein, 515 aa, unknown
  TnpB Polypeptide
MSKTWNEETQKYEHTPSFVLEFRLLTSNSDEQELEKCFGIAGHINNVMVKEAKRRLGNMFRDKEYKDIMKSYFRTGKFKKGDKKKLMTLRSIYGLTEYSFHKYVDAKQLYPAYIDCDTRQKEATKVWNAVKKVLYSNGQNIHLKKLKNKNSVEGKTNRTGIRYRDGTIFWHGLIMPVRVRKNDWYAKQALNDCEIKYCRIVRRWHKHTYRYYVQLVMEGTPPVKRKRQMIFDRAMKEDTPVGIDIGPSTIAIVSKDHVSLDELASDVTSIEKEVRHLNRLIDKETRLANPDNYNSDGTWKKNNKNRTHNKSHSQIKKEQKRKWLYQKRKNKLRYSHQVLANEIISTFGTDIRIENMNWEALRKKAKKTEKSDKTGKYKRRKRFGKSIQNHAPSMLITLLKQKLGYIHKPLMVIDTYKTKASQFNHITGEYKPVKLNERWKEIAPDIFVQRDLYSAFLLMNCDTTETIDIESCFDNFDSFKKEHDACIRELMMQKQYTKLPSCMGLEASCAKDFIL

SEQ ID NO: 9616 - protein, 339 aa, unknown
  TnpB Polypeptide
MLAYWKEKYEQGEKPNKYTVKKAFNAVKKILFPFVQEVNAHAVANDASDRLGVAYKNFFSGRSKFPKFHSKKQGVGSFSLTGSEIKYDHEKQKVFIPRLGWLMLAEKIRFEYSKIYNITVSCKAGRWFVSFCLEVEPVALNENQVDNAVGIDLGISALATLSDGTVIPNLRLSNKYSDKLRMLNKQLSRRTKGGKNWWKTVFKIRQLFYKIDCIKQDYIHKFTTNVSRQFSTVALEDLNVKGMVRNRKLARHISDCSFAEIRRQFEYKANNVVIVDRFFPSSKTCSHCGFIQNMPLSKRTFECESCGVSMDRDFNAAVNLYNFAVSSTGSKKPVAYCGS

SEQ ID NO: 9617 - protein, 414 aa, Natronomonas sp.
VYYAYKYRLKPSDAHREELDRHRDICRQLYNHALYRFNQIPEDAGTLNQRVRSIRDELPSLKDWWDGLSDVYSTVLQTTVMRIEQNVKSLGELKNNGYGVGHLKWKPPREFRSFTYSQCGFKLDKKGGQTVLSLSKLADIPIRLHRAIPDDDTVKQVTVKKEPTGEWFATFGIELDRDPPEPPENPERCVGIDVGILKYAHDTDGHAVGSLDLSAERERLEREQRSLSRKQHGSNNYEKQRRRVAECHANLRRKRRDFLHKLSNYYAREYDLVAVEDLNVKGMLESTSNSRNTASAAWRTFLSLLEYKCEREGTHFVAVNPRGTTKECAACGTSTEKPLWVREHSCPACGFEADRDANAAWNILSRGLEDVGVGHSESTPVETALPVDTSVSAKRVVEAGSPTLNERTAQAVSE

SEQ ID NO: 9618 - protein, 393 aa, Brasilonema sp.
MQLGFKTKLKTTPIQQQLFAQHAGYSRWVYNWALAAIEDFYQSGVKLSYRKARSFYTSFVKPEYPWMNTMSSRVYVYAFEHLNVAYKRFFSGIAKKPTLKKKGKSKDSFTVDWNGKVKRTGGTCIKLPAPLGTVCTFEKLPEVDIKKVTISRCADGWYISFNYEIPYVSVSQSQCTDVDDVIGVDLGISSLAVAVSLNTVKTFENPKKYRESTKTLARLQRQLQRKEKGSKRHLKAKNRLARYHKHIADTRNNTINQMTTTICKNHAVVVIENLNVEGMMQNQKLAAAVADCGFGEIERQFHYKTQKFAHTLIQVDRFYPSSQLCPKCGAKQKMPLNVRQYECSCGYKRDRDENAAFNLCLFGWEKLGFKAGELPGSDRGGLKMPTSPAETIK

SEQ ID NO: 9619 - protein, 367 aa, unknown
  TnpB Polypeptide
MANKAYKFRIYPNREQKTLFAKTFGCVRFIYNKMLDDKIKYYEKTKKKRNNTPAQYKKEFPWLKEVDSLALANAQMNLQKAYNNFFRDPKVGFPKFKSRHKTRASYTTNNQKGTVALENGHLKLPKAGYVKVKQHRAIPEDYRIKSVTISQNPGGDYYASVLFEYENQVQKQPMHQFLGLDFSMQELYRDSEGREPEYPGYYRKAEQKLKREQRKLSKMQKGSKNRGKQRIRVARMHEKVAAQRRDFLHKQSRKIADAYDCVCIEDLDMKAMSQALHFGKSVLDNGWGIFVNFLKYKMEEQGKQLVKVGRFFASSQLCSVCGYKNTETKDLRIRAWICPKCGTHHDRDVNAAVNIRNEGMRLMYSLQ

SEQ ID NO: 9620 - protein, 514 aa, unknown
  TnpB Polypeptide
MFVSLQFKLELKKEDREKLIKLMRKQSSAIRVAYNMLKELEKEKTRNPHTQIYHRLKQLFPELPTKYIDSAIYKAKQYPINKSVVFGGKRLFEKLCKNHLTGKVRERLKKQWRELRQGTLISIGSKSDKGNRLTRLENINGQLHLRITTGNREFIYAKVLREPSNSKDKWITFMAMLLESWQTKNYFAYTVELKLRDGEVYGNVSFEIPTPEVKYTKENGVIAIDTNASPIHLAIAEVSKTGELLSYQTINLHHLLELSQNSKDHQEWILAHQLLDLAIQKGKAIAIENLKKLKKGMRGDGKAELRKRLHNWNAKKFLQKLKRVAMLKGVEVIEVNPAYTSVIGMLKYAPQLSIDKDIAGAYVIGRRALGFKEDMPENYEKLLKDKAYLEFALKRYEEREKELRELLEEETNQYKRNATKSELRSVENARKLLTNLLQSLQSEPSGCEGANGRNPEQGETKKVSQSAWQVLKVALLFPVLERKILLSSRKGAWDRVRKGLVPLEAGRTVPIRDF

SEQ ID NO: 9621 - protein, 333 aa, unknown
  TnpB Polypeptide
MDLKLKVKENNIKDLTKYRNLKTKVAFLKIKKDKLVNKIKSLNYQLETNKFKITFGTKKLFRQNLEKFLNKRDNQIVFVGSKDETACNQTFQLNYISKINQFIIKIRKDFKYKDKKGEERYVYGKCFFNNHKNLLKEILKSQSSPLTYRIIKRNNKYHLQCTFEIKNNQNILTRKNYGTIGIDFNKGFVTISQINRYGHLVKTDKMKYRFGRGNKTKNDLLLLINKLTELAIKTGKDLVIEDLNFLKTKSKSTKGKSEKGKQYNKMLHSLAYRIFLNRTEQICNRKNVGLIKVNPAWTSWIAKNKFCDKMKLNIHTGASFVIARRGMNIKDVV

SEQ ID NO: 9622 - protein, 437 aa, unknown
  TnpB Polypeptide
MQLVEQYIISKSDPRYNVIDEAAFQSKNLYNAGNYEIRQSYIFTGTYLTYNEMDRRMQSHEAYKALPAKVSQQVLMQLHHDWDAFFKARVAYKQDPSKFQARPKIPGYKHKTDGRNLLVYTIQALSRGKKGLKRGMIKPSMLDISVQTKQKDIHQVRIVPRKGFYVVEAVYEQEEKQAAVNPAYYAGIDIGMNNLVALTSNKPGFRPALVNGRPVKSINQFYNKRKAELQSKLRRKGTTKRMERLTNTRNRRIDHYLHTASKRMIDLLVKEGIGTLCIGKNDAWKQEVTMGKRNNQQFVQIPHARFIAMLTYKAELVGITVKVTEESYTSKASLLDLDPLPERKSANEKHTFSGKRVKRGLYRAQDGREINADINGSGNMIRKVAPDAFSKVEGVEDGKAVLASLVVHPVRFVVAPSRSQKASNGGNKRSTERSISL

SEQ ID NO: 9623 - protein, 352 aa, unknown
  TnpB Polypeptide
MVSSYMSNKKNWEESDPKTRKSCPGLPKVGYSYPALYKDNMFIRTGTYTARIKVFIRNTWDWIDVSLKKSDVDYIIRHCSDFKECVPILHKRYKSWYLDFAFETKAKLNNTNIFDQKILAVDLGINNACTCVVMTSKGAVLERRFLRLSRENDSLTHALGKVKRAQCLHARRKPRLWARVNGINTDITSKTAKFIMDLATEHHVAVIVFEHLNLCQKKKGRKRKRQRLHLWRAKSVQRIVTERAHLRGIRISRINTNGTSRYAFDGSGKVLRGIEAGFSSYSLCRFSNGKVYNCDLNAAYNIGARYFIREILKTLKESITTEQEVLAKVPELSHRSTCVLSSLISLNEVIAA

SEQ ID NO: 9624 - protein, 425 aa, unknown
  TnpB Polypeptide
MKLLCSFKFELYVDKPLRAALSRNAGCRRFVFNKALALQNERRQSGQKLLTYNELAAKLVLWKKDEATSFLKEAMSQPLQQTLLDLDRAIQDSFRPKDDPAQKKWPKFKARDAGDGFRIPQFKPSDIDDANGRVKLPKIGWVRYRRTRPIAFRNADGTLTRGIVKQIHVSKDCGHWFVVFTTEFEIEPPQMKSAEIGIDIGVVHAVALSDGRFFDLDTDKLKKIEERIAVLQRKLSLNLSARKKLAENGLAKPFDKYKPGRKRRRLKERIQKLHRRMRCIRQDFQRKTAHALAQEYGCVYAEDLKTKNMTKSAKGTVENPGTKVKQKSGLNRAILRTGFYGLTQAVAWQLVKTGGILEKVNPAHTSCLCPTCGCCDKRNRPKQAVFHCIVCGHHQNADTVGALNVLRKGRTGPSAHVKKSASPVQ

SEQ ID NO: 9625 - protein, 333 aa, unknown
  TnpB Polypeptide
MQTVSSYGVEIRKQNIPIRQTLEIYRQAVSYLTEIYEQVWAELKMIPEAKKRFNAAEHLIHTTKKNHVHFDFDIRFPKMLPCVFKPYGYGIPAQERVWEKGICSVDLGINTDAVCTIMRADGTVLGRKFIDFPSEKDRMYRTLGRIRRFQREHGSAQAGERWAYTRRLNIELSRKIAGAVAEYAWENHADVIVFEYLEMNGKISGSKRQKLQLWRKRDIQKRCEHQAHRKGMRISRICAWNTSRLAYDGSGIVLRDWRNHSLCAFQTGKRYNCDLSASYNIGARYFIRELLKPLPATERSLPEAKVPAVKRRTSCVYADLRELSSEMGLLMAA

SEQ ID NO: 9626 - protein, 443 aa, unknown
  TnpB Polypeptide
MKIVTSYSVRLRQAPACFKDTVMKYREAVDWFIGVMESEWNSYSDCNNQMAVRVSERFCVKTAKNESPKYSFSDSFHKFPSYLRRAAIAEAFGLVSSYHSSLDNWKVLPVSERKTRPSIPRAGFVCPAMYRDNCFVRTGTYSARIKVWIHNTWDWVDVAFRKCDVDYILRRCSSRKECVPTLRQRGKVWSLDFSFEERVTLAESNDIESQRIMSVDLGLNNACVCSVMTSDGTVVGRRFLHLPSEYDHLRHCLGNIKHAQQSGAKRMPGLWAKARGVNNDISVKTARFIVESAMFYGVDTIVMEALELNGKKRGSKQRLALWRARYVQSMVEIKAHRGGIRVSRVCAWNSSRLAFDGSGRVMRGGETAKTGGNYSLCEFSNGKVYNCDLNASYNIGARYFIREILRNQSERTRLALTAKVPSLAKRSTCTLSDLKDLRAAMVA

SEQ ID NO: 9627 - protein, 405 aa, unknown
  TnpB Polypeptide
MKSFKTELILNNKEITKCKKHAGVARHAWNWALEQTQKALDDKELLPSAIILHKRLVAEVKKNNPWYYEVSKYTPQQALRNLEVSWKRCFKKLSKKPKFKKKEQNDSFYLEGKIQIKGNKIKLPNLGWIKTHEVLPEILKGESGTANVTISERAGRWFISYKVNHKPEITDKTLDCAGMDLGIKTLATLSDGTTFENPKAYRKNKAKLSRTQRSFSRKKKGSANGTKQKQKLRKIHYRIANIRKNAIHKITSYLTKNHSEIVLEDLNVSGMMKNHKLASAIADCGFHEFRRQLEYKSEWHGCTLTFVDRFFPSSKIFSNCGCKKEQLSLSERMFNCSDCGFQIDRDLNAAINLKKQIKSIPEALGELTPVEMKALVAGKASNETIVTEAGIKYQLRTNVQNCVSF

SEQ ID NO: 9628 - protein, 424 aa, unknown
  TnpB Polypeptide
MNYRYRIYPDTAQQEQLSEWMETCRLAYNHALAEIKDWLNSRKCQIDRCSIQREYIMAADLPFPTEIKQLNALPKAKKVFPRLGEVPSQVLQQAVKQLHRGWEAFQARGTGFPRFKKYGQFKSLLFPQFKESPISSGMILLPKIGNIEIDLHRPIPEGFVVKQVRIVKKADIWYANINIQCDVNVPEPRPHGHPIGVDIGLEKFLATSDGILVKPPKFFRKMQRKLKSLQRRLSRKQKRSSNYEKQRIKVARMHHTIDNTRKDFHYKQAHALCESADMIFMEDLDFRIMSKGMLGKHMLDGGFGQFRSIVKYVCWKLGKFFAEVNSRGTSQECPECGATVKKALKVRVHHCPECGFTTDRDVASGLVIRNRGIDLISTDGWSGTETVCAGVLAGVGATQSSQVPKSRKARLERSRKGKTRKTKK

SEQ ID NO: 9629 - protein, 406 aa, unknown
  TnpB Polypeptide
MQTIRKAHIFRLKTNDEIESKLIRFCGSSRFLWNKALAMNLERLEKGQGILWYNELAFWLTLWKGSEEYSFLAECPSQVLQQKLRDRERAFRDCFDKRQPLKRLPVFKKKGRGESIRFPQGFKLDNRRIFLPKIGWVSYYKSRNICGRVKNITVSKKGERWYASIQVEQRIEIGKHPSETEIGIDAGIDCFAAFSDGIMIKGVHSFRKHEDRLAREQRELSRKKKGSENWKKQKKNISGIHHTIANVRSDFLHKLSTEISQNHAKVYVEKLNIKGMSTSARGSIEQPGRNVKAKSGLNKSILDQGWFEFRRRLGYKLFWKGGELVEVDSRYTSQRCSGCGHKAKENRRSQAIFKCQTCGHEENADVNAAKNILTAGRAEMACESNRVSDRNQEPAGTREGVLPMAS

SEQ ID NO: 9630 - protein, 770 aa, Streptomyces sp.
VGPGAPWPARPHPVSRGGHSHACAPVVAAGRREGLEEHARRLPQHAGVARQVPPRLRVLEDRLERARADWEAGTVHVVRGGKRLARTRHHLHAARLTEAGWRRRWEAERWFLQADGESGKRYGNETIRISPDGEVSIKLPAPLAGLANAPHGPYLLTANVRFPHRGQEWADRVAANRAVAYRIHYDTDRGRWYVTAAWQIPVSPTVPLAAALAHGVIGVDLNADHLAAWRLDAHGNPTGSPRRFFFDLTGSADHRDAQVRHALTRLLHWARTCGVKAIAVEDLDFTTEKTREKHGRKRRFRQLISGMPTGRLRARLASMADQTGIAIIAVDPAYTSRWGAQHWQKPLTGTTRKTTRHDAAAVAIGRRAQGHPIRRRTTPPPHDRSDRAGHRTVQADRRAPGREGPRPPLPGPRTRCVPPDRGAKAGNQNAQHRSGRSAEHEFWQQDSLPLSVQERLHVPLLQQRVGAGERGRGDAEGDPQRVPAGRAGLAEGVGVEDAELVRDGVLEQGLAQALQRLREHEQRDDQRGQQQADHDGDRARRVPDDRADDQREQSEQRDVQRDADRALQPLSTGRVPGVVQQGDVREGDHDGRHQRDHERDHEEHDRLGREDAAAGGTGDHRGADHAGAVLGGRGQYAERDDADAAQQQPEESERQRVLALQTARVGVGGDQRGGPQPDTDDEQHEDAERPHRGAHRLDLRPLGGDRVPEVRGHHRDRRGVAGVGRSGRRLPGGGGLRHRGLRGAHRASSGLVRSEEGTEFGAAGCGAACA

SEQ ID NO: 9631 - protein, 399 aa, Streptomyces sp.
VTANHVKRAFKYRFYPTDAQAAELSRTFGCVRKVYNLALAARSEAWAQRQERVNYNATSVLLTAWKKTEELAYLSEVSSVPLQQTLRHLQGAFTNFFGKRAKYPTFKSRKKSRKSAEYTTSGFRFRNGSLTLAKMADPLDIVWSRPLPEGAQPSTVTVSQDATGRWFVSMLCDDRPAMPAPVSAAVGIDAGITSLVTLSTGEKVTNPKFERKDRARLAKAQRELARKAKGDGTNRAKARRKAARVHARISDRRRDFLHKLTTRLVRENQTIVIEDLTVRNMVKNHSLARAVSDASWTEMRSMLEYKAGWYGREVIAVDRWFPSSKLCSHCGTLQGRMPLNVRTWTCDNCGTTHDRDVNAAKNILAEGLSVSVCGAGVRPQRSTPGGQSATKQKTPRREP

SEQ ID NO: 9632 - protein, 406 aa, Rhizobium sp.
MKINRGYRFKLRPTEEQAKLLFQHVGVCRLIYNLALEQRRDHHRQFRAATGKHISYGSQAAELTALRAEFDWIRAVTQTAQQQALRDLDRAYQNFFSGIAAYPSPRKKGVNDSFRLQGREVAFRRLNRSWGLAKLPKIGEVRFRWTRDIPGKLKNATISLDPLGWHISFSTEVEVEVGRNFGPTLGVDRGVVEAVAYSDGTFADFPKARIKRLDKKARRAARALSRCRKGSNRRRVVKARVAALRAKAARVRKHFNHVETARLARRFGVVCIEALKTKNMTASAKGTVEEPGVNVRQKAGLNRSILEIGWFQFHQFLTYKLAASGGELRLVNAAYTSITCSCCGIIEKTNRKSQAVYECADCGLSANADTNAAINILQAGTRPSRRERVAVPAKRKSHLEASGLSA

SEQ ID NO: 9633 - protein, 406 aa, Rhizobium sp.
MKINRGYKFKLDPTEAQAEAFVRNVGVCRIVYNLALEQRRDHYRQFRRATGYGISFASQCRELTELRAEIDWIADGSLTAQQQALRDLAAAYSNFFAGQADYPTFRRKGINESFRFQGREVTFRRLNKSWGLAKLPKIGEVRFRWTRDIPGKLKNVTISLDPLGWHISFATETDAEAAKHRGPTIGVDRGVVQPIAYSDGTFAAFPKATIKRLEKEAQKATTALSRCKKGSNRRKVAKARVAALRAKMARVRKHFNHVETARLARTFGVVCLEALRIRDMTASAKGTVEEPGKNVAQKAGWNRSMLEIGWFQFHTFLEYKIAAAGGEIRLVKPAYTSIDCSCCGMREKANRKSQAVYECADCGSAINADTNAAINILQAGTRPAKGKRLKAANGRKSRLEVSSLAA

SEQ ID NO: 9634 - protein, 329 aa, unknown
  TnpB Polypeptide
MGAAKIILSTLPDWAKEIPYQVKKIAVEDAYKAFSNGCKKWKDTGEPFSLSFRSVKDPKQSCFIPSSALKPNSVYPTILGMLKMTESIPVGFRDSRLVHEHGRYFLVVPYRVKPTQAENQGDRVVALDPGIRTFLTGHSQDEMFKIGEADFMRIARMGRNMDKLISKISKAKSRQKYRMRKALSRMKFKVWDLIDELHCKSICFLLDNYDLIFLPTFKTSEMAAKSTRKIRSKTVRAMMGFAFHKFGMRLESKAKECGKVVKRVSEAYTSKTASWTGEIKKIGGAKTITSCGLTVDRDGNGARGIFIKSVRELFPELCEITPSALSAVA

SEQ ID NO: 9635 - protein, 460 aa, unknown
  TnpB Polypeptide
LRGQGRGSGHSQSRRRRHVRGRLGEGCAGDHHRVQRTALRCALAQEPKAAGRGEKSRGRGTGMILAHKIALDPNNAQATYFARAAGVARFAYNWALAEWGRQFEACKADPRLPKPSQAALRRQLNAIKREQFPWMLEVTKNAPQMAIMQLSEAFKHFFAGRARYPQFRKKGVHDRFTLTNDQFNLDGCRIRIPNLGWVRMRESLRFAGKILSATVSRVADHWFVSIAVETPDDSHLPKAENQGAVGVDLGVSALATLSTGEAIPGPKAHKALLGRLQRLSRSLSRKQKGSANRKKAKAKLARLHARIAAIRSDALHKLTTDLTRRFHTLGIEDLNVRGMMKNRHLSRSIADMGFFEFRRQLEYKAAMRGGRVVVADRWFASSKTCSGCGHRLEALPLSVRAWTCPSCGKTHDRDTNAAINLKHMAVSSTVSACGEEGAGLGRKTKTKPASVKQEISFVPV

SEQ ID NO: 9636 - protein, 482 aa, Streptomyces sp.
LWGEASLPGFPKDALPPFTRAAMKWITQHPQSGRTDNDRPRPTQTPRNTFITLRRVHGVKADMGRRYRLYPSEGQERVLTGWGHTCRALWNMALEQRAYLWTQRRLTLRANEQCKQLTIARAELPWLAELPAQAAQQVLRHLDRAYENFFNPDHPARFPQHKKRTHRLSVSLPGQTVEVRKLNRHWAEVRLPKLGWVRFRLSRALGGPIRNVTVNRDGSGWHVSFGVATGVRPQAPNEKPGCGVDFGVAASAYVSTESSPRIKPEGLTSHERQRLGALEQRKARQITYARKHQGGRYSRRLRATLASIDRPRTRETNRRRDFTHKLTTDLAKNHGFVGVEDLRVTQMTSSARGTPERPGRSVSQKAGLNRAILDNCPAERRRQLEYKCRLYGSELIAVPAFHTSQTCAACGKVDPASRKGCGRLFVCVHCRHEDDADHNASVEIEARARRAGGSDNNSTRSTGKVRVPAPGRRRMREAQSAT

SEQ ID NO: 9637 - protein, 352 aa, unknown
  TnpB Polypeptide
LNDGVNIAGYIWNYCIAVHRTYYKLYKKPLPLNDLQKHITKLKKRSKYLYWKELNAQAIQNVAERIDRSYKAFFNHIKNGKSGKKSPPKFKKVAKYSSFTLKQAGYSFHNDNTITIMKRDYKYFKNQEIQGEIKTVTVKRDRLGDFYIFVVTEQEMQEISSRVGNAIGIDFGMKHFLNLDNYSVIDSPEYFKQNLEMLRKANRKVSRCKLGSNNRKRAIKELDRIYRKISNSRKDWFYKLANSLVKEYSIICIEDLNLEAMKKLWGRKISDLAYYEFVQILEWEALKNGSKVVKIGRFAPSSKACHCCGFINDELTLNDRRWVCPSCGEHLDRDVNAAINIRNLGLAKLNNM

SEQ ID NO: 9638 - protein, 398 aa, Rhodococcus sp.
MISVKQVVQVRLLPTPAQASALLATLNACNTAASWLSQQMHTTGIFRKFDVQKRFYTELRERFGLAAQPAIRVIGKTCDAYTTLRANLTAGNYGPPGSERRRKVEDTPIVFRPQAAQPFDARCLSWQLGEAGREGPVSIWTTTGRLRNVRIVGHPEQLALLRSRPAIGETDLICRDGVWVLHAVIDSPEASRRVPVNGFLGVDVGIVNIATTSDGDRMFGARLNRYRKRQQRIRKRLQAKKTSSARRLLKKRRRKEARFAADVNHQISKRIVAEAERTGRGIAIEDLRGIRERVRLRKPQRATLHSWAFARLGQFLAYKAQRVGVVLVQVDPAYTSQQCHRCGWIDKKNRRSQASFICGRCGFVGHADHNAAHNIAAHGVVRWGEVMRPHAAPTLAAS

SEQ ID NO: 9639 - protein, 369 aa, Nonomuraea sp.
VAQIVKRAYKYRFYPTAEQAEELARTFGCVRLVYNKALEERTRAYTLQGRRVSYVESSAALTQWKKTPELAFLGEVSSVPLQQALRHLQAAFANFFAKRAKYPAFKSKRKSRASAEYTRSAFRWRDGRLTLAKMDAPLNIVWSRPLPEGSEPSTVTLSRDAAGRWFVSILVEEKIAPLAPVEQSVGLDAGITALATLSTGEKIVNPQHERADRRRLTKAQRALARKEKGSNNRAKARLKVARVYARIADRRRDHLHKVTTRLVRENQVIAVEDLTVRNMVRNHSLARAISDASWRELRSMLEYKAAWYGRTSVAVDRWFPSSKLCSACGTLQDTMPLNVREWECPDCGAVHDRDVNAAKNVLAAKLGES

SEQ ID NO: 9640 - protein, 303 aa, Ignisphaera sp.
MRVLATAKIEAVAPEGGETLLIQFIKMYRDAVQCVVNRIWGLDDVPSEKSLHKMFYSELRRLGFRAHHVSEIYRRAREVVEGAKRNRGSKPVLKKLTARIHPLDYRVDFSAKTLRIAVLNDEWVELKLKWYKYLDKYLDGSWKPGEILVSCRSNKIFVYITFHRDVESTDFRAVMGVDINFNNVTYTVLDLNGSLVSIGVIPFKGLERALHLKKLAEDLQKRYPNSWRFLKWVRGRWLNKAKNILVDSAHRVSKRLVDIAREYRALIVFEDLERLRENSNNGYKLSWEKSLWCYKRIHNVYRV

SEQ ID NO: 9641 - protein, 413 aa, Ignisphaera sp.
VSYSVRGEEPVVEALRMRALPEDSYDHLLEFLKLYRNAVQMVVNRIWSFNDRLSKRKLHRLFYSNLVSMGFRAHHAKEIYVYAESLADSARSNGGRKPILRKLSARIDRYDYKLDLDDMTLTLKLHSDYEARLKLLTSGERVEKFRGWGNYEVVVKCDGSGFWVSIYFRRAVKAVKPRTVMAIDLNFDNITIAVFSFNGRLAKLKRFKTPLRKVLTHRIWVERVQRRYSKSWRFIKGVRKAIDRHGERIRSISWVYAHKVGDLVAELASKHSSAIILEDLEKLRENNKKGKRFNKRLGLWIYRRIQFCIEYEARERGIEVVKINPRSTSSKCPRCGKKLAEYRHMVLRCRKCGFVGDRDVIAAINLYKKYMSRHPRCGVSGVALNASKPDENPSGMQGKRDDAMKNIKPHELI

SEQ ID NO: 9642 - protein, 475 aa, unknown
  TnpB Polypeptide
LFGVSWVTPPGELSRHEERGLIPPAIPGGSIHEVKYTNVRTNVVRLLPNGFQERRLRRLADACARLYNEVNYERRQQFFQHQRVDFKGTWDKYYEKYKGILGPANTQAVMQKNNEAWNAFFSLLNLKREGELPPFMRRVSPPGYWKDEGTGRRRLILVIRQDRYVVDEQRHVIILKDFNLEVKFTGRLKWYGKQGRLEIHYDEARNAWYACIPVEVGVEVTKTGRMSRHIVKGERRLIQVESPKGSRVASIDLGINNLASVVVDDGTWLLYKGIRAKEDYFYFMKRIAEVQSLRDTLKDKLLDDAVKELNREVRRLHGKLRRRLLHLYRNFANHLIKVLHELGVSTIYLGYPFNIAQQKGNKFTVNMWSYRKLMEAIELKAQEYGIKVYEVVEYNTSKHCAYHGVEVKRHPRGVVNCPKGHKLHSDLNGALNIMKRAIGWIPPVIKKPQSFIVEHNRVAPIQRGVTLKTSGNPRP

SEQ ID NO: 9643 - protein, 196 aa, unknown
  TnpB Polypeptide
MTLSDGKSIQSPLFFNRYQKKIKKCNRNLSRSEKGSNNRKRRLFELHQTNRKIMNLRSDFQWKLAHQLCKQYDYIFIEDLNIEGMKRLWGKKISDLSHSSFINKLTYIASKYGVIVHKIDKWYPSSKTCECGCINKGLLLRDRTWVCPGCGSINDRDLLASKNILRKGISELESTGNSNGCKTGVPYTCIQESQSL

SEQ ID NO: 9644 - protein, 626 aa, unknown
  TnpB Polypeptide
MDSTPKKKRKRKDVSDKLKARRHEEEFIIKTSLRGSLKGSRDEKDRLQHCFKDWSDAMSQRLVFASRGLTLMVKECFNKSKDFKTAQLPNFLDQTFIRQLMLCGEGSRIENSYIKDLFTQHPYLLKPTPRHKGDRNLYSSAARAFLTNILTSLSYIFEKRFLKLVFYTKKLMDWKENETIAFIKHHILGDFLSKDILDMKLENKYPSLFNFIQSSKDFLGLEQSEIVTEQWLKANPYQVIRFYAYILSELSKDKELKLFNLLPLTDVKNHYATLDASCLLGVFKDVKILGEKAKEENITKELLDSVFKIPRNKAFTGTIQTDGTSICFHFRRPKKKVTKEQVDKHILQTKELFKEEKTRRLGCDPGRENIYTIIEEGTNKVWKLSRKEYYSVSGIYQGRERTEKWTRSILPNLNALSKVSSKGISLKSYLDYLKVFLENYETLWSVYSKKYWAEQRLRMYGGKKRCFDRFWNEVLGNEGERNQITVIAYGAGKFAPGGKGEISVPTSRAFKECKRQKGLKVLVVDEFRTSKLHHETEQLLHLVKVQGEKKSLRGLLWCCSTISEKQGFFVNRDVNAALNILKNCVDRKNIFTRKKDMKRLPKQEVKKIIKKERSSYKPRTLHDQKI

SEQ ID NO: 9645 - protein, 313 aa, unknown
  TnpB Polypeptide
VLSLRHLDQAYSRFFKGEAKYPKRKKKGRSRDAATYVRTGFKWVEDAERPGTGLITLARQSRTLDVRWSRALPAGVVPVRLSATRDRAGRYFVSTLVEERIAPLPPVFVPGTREPKAVGVDVGLASLVTLDDGTKLDHPRLLKRYAERLARLQRELHRKVKGAKNRGKVRQKIARLYALISDMRRDMLDQLTNRLVHENQVLVVEDLSVETLMRAGRGKGRRRKAKLNQAIADASWGELVRQLRYKCEWYGRKLVVVDRFFPSTRRCSACHVMGPRLDVSVRQWTCAECDVLHDRDVNAAVNLRDEGMRLLAA

SEQ ID NO: 9646 - protein, 456 aa, unknown
  TnpB Polypeptide
MKITKTAKLKITSHSKIFDDTIVLYNKALSFYIDVCDKELGVMEQFKHSKEKLNYIEAITHLTASNKNIKYDFDKEFYKFPSYLRRTAIMEALGVCNSHFSRLENWQTKKDERLSCGKKFFEKSPTLNYEPKSFPTLYKDNMWEKLSDCKAKIKVFKNNDWVWIEVDFSTKNLKSGQNYRFKDYKEFNPMLVKKGKKYFLHIAYETDIKLNSTPLVQQRVIGVDLGLTNSAVCSCIDIDGTVIDRLFINQSKEKDLLKTKLNKLAKAKRKSGILNEKPNYWRKINGLQKLIIQDTVDKIIGFAIKNSADVIVFEYLGKMKLPHGLFGSKRLRAKLQYWAKLKIQQKAEEKAHSIGIRYSRVLARGTSMYAYDGSGLVLRNSKKDIATFQSKSKDDKNKTYHADLSASYNIASRYFTRAILKPLSETRRLQAEANVPLLADRTSHTLSSLIKLREVC

SEQ ID NO: 9647 - protein, 396 aa, unknown
  TnpB Polypeptide
MFNITTEHIRSLIYKGSKLITIKEARKVLNFINIRKTLCDQKNTLASSIKNNIPTHILDEAIKLSISNHKTCLTNFAEGHIKKFRVRCLPKNRNKKILIIEANFFRESTFCPSTFDNIVSSELFNDIDRTVILQYNQDTRKYILMVPHSIKEKTINKKKLACGGDLGVRSFLTVYSEDHTLNICPNIKLDKDIVKWHKKIDKIHEIMNFTNPNQKITACIRKNGNKVHYIKTKRVRRSRLRRALRKYHQKINNKIRDMHYKVSHHLVNNFDNISIGKFSTKQILSRHNQKITYQTKRMIGVLQPYRFRQVLKYMGNKYATIVTEDSEYLTTKTCSHCGKVNEIGGSETYYCPKCELETGRDENAAKNILKVGYKNAINTEQKEKQKIIGKIKFVEV

SEQ ID NO: 9648 - protein, 439 aa, Chloroflexi sp.
MKQMFTAKLKLHTTPDQFKALRTTQLAYRDALNSVSRYAFAHGKTSNQMRLQRETYLDIRATYGLPAQMACNVPRQVGATYKALWTKARQNAEARQAGYTRKRYKGLDEAPKYVSPTLTYNLGRDYSFKPEQQVSLLTLAGRVIVPYTGYNQHVALLQDGAAIGAAKLWYDTPHQQFYLLVSLEVELADPTPESHTAVVGVDVGQRYLAVSTTTQDTTAFYSGKAARAKADHYARLQKRLQQKGTRSAKRRLVQISGRERRLKLNTNHTIAKRLVQAHPQAMIGLEDLHSIGERTKRKRGKQASTKQRKANRQASKWAFAELQGVIAYKASLAGSMTVRVDAYHTSQMCPVCGYTGKDNRPAHGLLFVCQNCHFTLHADLVGARNIALRTLLIRQDWMSTGSLSVSLDGSDAETKAAQRQRYAELRWSPGPSLLSSDMG

SEQ ID NO: 9649 - protein, 510 aa, unknown
  TnpB Polypeptide
MSENKTPKKMRQTDDDKENLIMKSYRFRVLENKISDTLWNYLKQSFGNQRFVWNHFLREMENHYQSQNELKKYYKENNIEIPKTFSTTLSFNDLCSRLTMLKNITTTETYFNKRGKEKVRTIKHFLYNTHSQPLQSTLRNLSDAMEDFRKGNKGKPQPKRKIDSFESYFFKQFNSIHVDFKGGYIVLPKTQEKLYVNFHRFWKNNETPKTLSLTWNGTKMFVSIQTERKITQQEKEIKQDNLYNVNPHTTLAYDLGCNKMLVTQSGKVYHFSKKHEDKLKLIAKKIIFLQQKLSHKLEIHKKRKAKNPDIKYSKQYLRIKAQIQKLYEKSTSIKKDFLHKVSHDISKSHTCIIREDLKIKEMTMSKRRQKLILNSEYLEKLAIKKKKNPFLRAVYDRRNINRKILGMSWGIFNKMVEYKVKNNMGLIIKVDPAYTSQCCSQCKYVSPDNRISQEKFHCQSCGFTCNADHNAAINIYEKGLLSLPTGSVAIKMPVVSFLKEQRQNFYCLKQ

SEQ ID NO: 9650 - protein, 559 aa, unknown
  TnpB Polypeptide
MVQLTGDYIMAETEKKQLKTFSLHEKNMKYVAMMKKAVLRYKHVENMLNIILNKESDIIFALPVEQRDYTLFNLLTNSIIMKAVISGNNGGEKTQKGIAQCKAHLELHHKDLYQQLLSEGQQLNDKNISQIITRLAKDWKNSFKNLKAYYADKSGKKFTGKPDTPKAKKLSKVFNYSVPLEVSKFSLNKKNKLGINIWKKMEYVFFRDNAYLKDKKINNVTVALSHGHIYYQLSYQNKKIEDITEKKDSNLLPVRKPEKTAGLDIGVHHLFSLFVNDDRTESLVYRNAKMVHYNCSFNKQMARLNTLLTRHVAEYKTVSKQDGTVVTVPERYTAYGQHIKKTISNMFNSRNLFMEGEMNKLSSALLQYLKKHEVTRLVLSKNLSFAKTAGTIELRKKTKQNFYQIPFGKFLNLIEEKAFHYGISITNINEAYTSKTSSLTADVNQVKQMAASKEPVTSNELNGVRGVKSKKLTRGLFRDNILNTIIHADINAAVNHIKVAFPDGISAEGLLKYRRKLNNSVKLKSANEFSFLLKENSDSRKKEVDIKLIQPALYVRDQV

SEQ ID NO: 9651 - protein, 366 aa, unknown
  TnpB Polypeptide
MEKAYKYRIYPNEKQKEVIAKTFGCCRFVYNKYLAEKIELYKTEKKSITYVKCAKAMTELKDELKWLTEVDSTALQSSLKDLDNAYKKFFKEHTGYPKFKSKKGNRRSYKSKCVNGNIEYLNNHIKLPKLGLVKTKNKLIPQGRIVNATISQEPSGKYYVSLCCVDVDIKPFPFTGNAVGIDLGIKEFCITSDGELVNNPKYLKQSLKKLAKAQRELSRKSKGGSNRNKARIKVARLHEKISNQRRDFLQKLSTQIIKENDVICLEDLQVKNMAKNHKLTQAINDVSWSEFVRELEYKASWYGRMVIKVDKFFPSSQTCSVCGHKNEEIKDLKVREWDCPVCHTHHDRDVNAAINILNEGLKQLTA

SEQ ID NO: 9652 - protein, 408 aa, unknown
  TnpB Polypeptide
VCRGRESPGVYAGDESYSTFTLQIYIYYNSVNMYVLKSFKYRLYPTKVQTTKMERTLYLCRWTYNETLAYRKNLFETQGKSSSKYTTNALLPSWKIEKPELNEVFSQTLQNVQERVDLAFKAFFRRVKAGEKPGYPRFRGRGWYDSFSYPQMGFKLLDNKLRLSKIGDIKIKLHRPIEGKIKRLTVRRSVTGKWFACVSVEIEDRPKPPWKDGALVGIDVGLKSFATLSNGEKIDNPRFFREEEKELARVQRKHSKVPKGTPQRKKALKIVGRVHERIANKRYEFAHQVSNNLVKRFGLIAFEDLNIGGMLHNHCLAKSISDAAWNMLVTLTSYKAESAGSMVVLVDPRNTSKMCSRCGLLVEKALSNRVHSCPQCGLSMDRDQNAAINILRLGLQSVGITTVEAPVF

SEQ ID NO: 9653 - protein, 251 aa, Shigella sp.
  misc_feature (224)..(224): Xaa can be any naturally occurring amino acid
MRRFAGACRFVFNRALARQNENHEAGNKYIPYGKMASWLVEWKNATETQWLKDSPSQPLQQSLKDLERAYKNFFRKRAAFPRFKKRGQNDVFRYPQGVKLDQENSRIFLPKLGWMRYRNSRQVTGVVKNVTVSQSCGKWYISIQTESEVSTPVHPSASMVGLDAGVAKLATLSDGTVFEPVNSFQKNQKTLARLQRQLSRKVKFSNNWQKQKRKIQRLHSCIAXTMPSTPDIGFFFHRPKYHLACETTTSI

SEQ ID NO: 9654 - protein, 400 aa, unknown
  TnpB Polypeptide
VLLAFKTELDLNNKQRTLASQHAGVARHAYNWGLAVCKKAIEEKQKVPTAIDLHKRLVAEVKKENPWYYQCSKCAPQQALRNLEAGFKSWCKGERKFPVFKKRGRRDSFYLEGRTRISGNKIKVPIFGWLKCHEQLPAVCPKNVTISRQADRWFISFTFEAPEPELPEKEEEVVGVDLGINNLAACSNGKVFANPKPYRRAKKRLKRLQRQVSRKKKGSQNRKKAVKRVAKVHKRIADIRKDNLHKITTYLTRKHRVVVVENLNVSGMLKNHKLASSIADCGFYEFKRQLEYKAKLYACQLVVVDRFYPSSQLCSRCGHQQKIPLSQRVFSCESCSLEEIDRDLNAALNLVKWYQTTLSSRGSYACGDSSAGVGSPTRHESLNQEVSNKLNKSSLSFSIV

SEQ ID NO: 9655 - protein, 559 aa, unknown
  TnpB Polypeptide
MADSPARLRSVGRFGIEPISLMIRRGSVTIASDASTSTVAVPSPLVRKSRPRPSSTVSPARPSGQVKSMVVVRRTEPARRGGADSTEPPGLRPTGTGIAMRPPSPRPPGMLRAFRPGRNPVPRDAGRHGERQVRPARLRRFYEKTCDSGTVRTAYRCRAYPDEQQQAMLRRTFGCVRVVWNRTLAQRRARWHLERTGTSYAETDRALTAMKKDPDLAFLNQVSSVPLQQALRHQHQAFRGFFAGRARYPRFKSRAGRQSAHYTRSAFSLRGGVLRLAKAASPLRFTWTWPDIDVTALDPAMVIVSLESDGRWYVTFTVDTQAPEPLPQTGRAVGVDLGVKDFAVTSDGQRIANPRHLERRARNLARYQRRMARCRAGSANHAKAAARVARAHRKVRNARADFLHRASIGLVRHNDVIAIEDLAVHNMVRNRHLARAISDCGWGEFRRQLEYKCQRYGRELVVIDRWYPSSKTCSACGHLLAELSLSTRHWTCPSCRARHDRDINAAQNIRAAGRAVARDAPGDACGGDVRHSGSSRVQSPANQEPQPARAGIPVFQGGE

SEQ ID NO: 9656 - protein, 398 aa, unknown
  TnpB Polypeptide
MIISKKVRLLPTKEQEQKMWQSVGTARFIYNWTLNRQLANYQNGGKFIQDGELRKELTQLKKSSLSWLNEVSNNVTKQAVKDCCNAYKNFFKIKDKHFSKETIEKAKRQNKQLTVYDLEGHPRFKSKKKSRNSFYNDPVKLKVKENKTVLLEKIGWIKTSEQLPICKYMNPRITYDNKYWYISIGIEVNIKKQELTDVSLGIDLGLKDLAICSNGKVFKNINKTKMVKKLEKRLKRKQKQCSKKYELNKTMKGGSCQFNKTKNIYKIEDAIKLLHRRLNNIRNNYLHQVTNSIVKTKPYKIVIEDLNVKGMMKNGHLSKAIQKQCFYKFRQYITYKSELNGIELVVANRYFPSSKTCSECGCIKPELKLKDRIYKCSHCGAIIDRDLNAAINLSMYQN

SEQ ID NO: 9657 - protein, 285 aa, Escherichia sp.
LQQSLKDLERAYKNFFRKRAAFPRFKKRGQNDAFRYPQGVKLDQENSRIFLPKLGWMRYRNSRQVTGVVKNVTVSQSCGKWYISIQTESEVSTPVHPSASMVGLDAGVAKLATLSDGTVFEPVNSFQKNQKTLARLQRQLSRKVKFSNNWQKQKRKIQRLHSCIANIRRDYLHKVTTTVSKNHAMIVIEDLKVSNMSKSAAGTVSQPGRNVRAKSGLNRSILDQGWYEMPASLSTSSSGVAVRCLLFRQRTQASVARAVVIQRKKIACHKVNSDARYVDIQRTPM

SEQ ID NO: 9658 - protein, 489 aa, Mycobacterium sp.
VARFEIPEGWTAQGYRFALDPTPTQLRELASHAGAARFAHNHMLALVKAVMDQRAAERSYGIGEAELTPVLGWSLPALRKVWNQRKAWCAPWWGENSKEAYNTGLDGLSRGLEAWSKSRTGERKGRMVGFPRFKSARATRSVRFTTGAIRIEADRRHVTLPRLGAVRTHESTRKLARRIEAGSARILSATVRQDSAGRWYCALQVIVEAKTRPAHARRAVHPVIGVDVGVKADSLLVVATPDGMEVERIRAPKSLSAAQARLRALQRRAARQHGRYDSQTRSPQQPSKRWRRTQARIGRTHAHVAAVRRDVLHKATTVLAQQHDVVVVVETLNAAGMRAKGGARKRGLNRALADAALAEVRRMLGYKTRWYGSHLVEADRFYPSSKLCTACGRRKSNLTLADRIFECDDAECGMRIDRDLGAAINLARLGVPTPVGEQSPAGSGPVAGRGATHETDPAPAGDAAGDETSTPHHQTVDQTGTASPQGEAA

SEQ ID NO: 9659 - protein, 482 aa, Streptomyces sp.
VVEPTGKGEAVRVIGAEAGRVKREVLGVPDRAKHRRKAAVPVRRRAPEADTRQRVYRYRCYPTPTQTAQLTQTFGACRWAYNEGLALRDRAWREHRVSLGFAESCRALTGWRNAEGTRWLQEVSSVVLQQALRHLDAAFGRFFQGTARHPRRRKKGRSRDAATYVRTGFRWTEDPERPGTGLIALAKQAGPLRVRWSRPLPAGARPVKLTVSRDRAGRFFVSVLVEERIEPLPPVFLPTGGAPKAVGLDLGLAALVTLDDGEKVEHPRLLKKYGAKLAARQRSLHRKKKGSNNRNKARQEIARLYALIGDARRDALDRLTTRLVRENQVLVVEDLSVASLVRSPRGEGRRRKAGLNRAILDASWGELLRQLRYKCAWYGRTLIVVDRFFPSTRRCSACGTYSPKMDLAVRGWSCGACGAVHDRDVNAARNLRDEGLRLYGLVASALPAGRAVPSMIRASETPDCVRVRVREDVRAGPTGRRP

SEQ ID NO: 9660 - protein, 350 aa, unknown
  TnpB Polypeptide
MLAKTAGTARYAYNWGLAKWNDLYEQGERCSWPLLSRLWTVERPEWAKEVTRCVQTSAFVHLGGAYKAFFEKRRNHPTFHRKGLNDSFTISIDKGAVRGNRVRIPNVGYVKMAESLRYTDCSIISYVVSRKAGKWCVSIQVELDSDVRTESTSVVGVDIGIKHWAVASDGTVLDRPAQLKHYERCLKRKQRLLARKAKGSANRAKARLAVSKAYQKINNIKLDAIHKFTAVIAKNHGIAVIEDLDVDGMKQSDLKGVRKGIQDSALAEIRRQLMYKCNNFVQVSRWFPSSKTCSHCGSIKADMPLSERIYHCPSCGHILDRDLNAALNLLNEGIRIITLGHKESACGETR

SEQ ID NO: 9661 - protein, 368 aa, unknown
  TnpB Polypeptide
MIQRAHTIKLKPNKHQAVLLSKTAGTARYAYNWGLAKWNELYEKGEKCSAYSLISLWKQERPDWSLEVGAACLQRPFMHLEGAFKAFFRGVRKHPTFHRKGRNDSFYVPNTHFKLVGKKIRLPKVGYVRMTETLRYPDCKLLSAAVRRKADGWYVSICVEIEEERRTESTSFVGVDVGCKHLAIASDGTVCDTPGKLKDLERQLRRRQRLLARKMKGSHNRAKARQKLSRTFQRIQNIKQDTVHKFTAHIAKNHGTVCLETLDVKDMKEGENKYVRKGVQNSCMSEILRQLKYKCNNFIEVDRYFPSSKTCSNCHSLKADLDLSDRVYTCQSCGLKIDRDLNAALNLRQEGFRIYTVGHTGSASGETR

SEQ ID NO: 9662 - protein, 368 aa, unknown
  TnpB Polypeptide
VIQRAHTIKLKPNKAQAVLLSKTAGTARYAYNWGLAKWNEMYERGERCSWMELSRLWTQERPDWSKETYRGSQTTALRQLGGAFQAFFQGFRAHPQFHRKGQKDSFYVDSFHAKLRGNKVQFPSIGRVRMMEELRYSDCKIMSYTVRRKADGWYVVISVELEEERRTESESFVGVDVGCKHLAVASDGTVCDTPGKLKDLERQLRRRQRLLARKMKGSHNRAKARQKLSRTFQRIQNIKQDTVHKFTAHIAKNHGTVCLETLDVKDMKEGENKYVRKGVQNSCMSEIHHQLRYKCNNYIEVDKYFPSSKTCSNCHSLKADLDLSDRVYKCDNCHIEIDRDLNAALNLRQEGFRIYTAGHAGSASGETR

SEQ ID NO: 9663 - protein, 388 aa, unknown
  TnpB Polypeptide
MKTVRQKHQVSPELLRLLDEFRRMVNVCIAVGIEENVSSLKTLPMKSYHRLSRDMLSYYRLCAISKTTVILHNYRKAKKKNPRTRFPNARKLMLTTCYGFKIQNGLLRLPVRRRRYVYVKLNSHTLHVLSGVSVRSVTLTPDSLSLTYSKETIEIEPEGYLGVDRNLDNVTIASTDKAVKTFDLSKATGIKSTYRFVTSRFKRNDTRIRTRVLSKYGEKQRNCVQPLLHNVSKRIVDQAKTRRYGIVMEKLTGIRRLYQKGNGQSRNYRARMNSWSYGELQRQIEYKARWEGVRVIYVPARNTSKRCSICGYKTLESTQRRLWCPHCGTILDRDENAARNIAAGGLRFSPNEPPGETVKGNPTTVILKVDGGKLSQQTSDKNCQTKKT

SEQ ID NO: 9664 - protein, 208 aa, unknown
  TnpB Polypeptide
MEIKRAYRFRFYPTPEQESILARTFGCARFACNYMLRLRTDAWCERQERVGYHETSAVLTALKKTPEHAWLNEVSSVPVQQALRHLQTAFANFFARRARYPNFRRKDGVQSAEYTTSGFRWDGNSLTLAKMKEPLAIRWSRTIPKGAKVTTCTVSKDTAGRYHVAMLCDDSVSARKKADGEVGIDLGLTHFAILSTGEKIAAPRVPQE

SEQ ID NO: 9665 - protein, 338 aa, unknown
  TnpB Polypeptide
VVVNYKLSGYAKNALKKYVPQLTTTYNAGELHDAHPVRFTNEGLRLDHKPENAIEWYVKIPHHEDYHLWMPAQPNPEQRDWLEALNGRRHDGRESAIRAGRNVVSSRHRNPRRRGRFRGVRRRTDTHRCRYWEASLVTVCHRDDHGCPTAPELWADEGKTVRRLRKTYFTATRRLQTRGSERIAESFGDDLWNQIDDVFHRVTREVVDYAESVKNPVLVLEDLTYIRESMDYGEYMNRRLHGWGFAKLHAQIRYKAVEKGIPVKTVNPRNTSKECHACGEVGYRPQQATFKCTNDACWMGEYQADVNGAVNIADRYLSGESRFREHENDDDSAEDGGV

SEQ ID NO: 9666 - protein, 246 aa, Crocosphaera sp.
SINLDYSLALGIDHGVTNWLTCLSSQGQSFIVDGRKIKSINQGYNRQVAKLKRGKPAKYWDERLSTITDQRNNQIRDAINKAARLVINYCFSHRIGNIVFGWNTGQKDGIDIGKKNNQNFVQIPTARLKKRIEELCFYYGIVFTETEESYTSRSSFLDNDLLPKFGEKPASVKFSGKRIKRGLYQIKNGQTVNADTHGSANILKKVKTQLNLDLTKVRRGALTLPKRYDLYKNLNKLYRKRCEGAF

SEQ ID NO: 9667 - protein, 357 aa, unknown
  TnpB Polypeptide
MHRQGLTGNAIKIYCKKNYMALLNGRYVADAACEASKTEQEHALFGGRKLWHKFIKGSISKKKWQQVRNNTLYSRGEKAKSGNPNIRVVGNQLWVNDPKMGWMKGKLWLNKPINPECYDARIQLKDGKFHVTVSWAEEKTTPVITDKSTGVIGVDTNPNGLALSEINQTGNLQSHVFLKNDRIQFAKTGKRDYDIKVMAIKAVRVAKDAGKPLVLEQLNFKNKKMGKKFNRMAHNFIYHRLIEAIKSRALKEGVEVIEVPAAYTSIVGKLKYQDMYSLSIHNAAAMVIGRLGFLNKSDKVVVDVSGKGSLLKLEARGRTVSLKKKSFLWFKSKFRVHARDGTCQQSPLLTGACLAPC

SEQ ID NO: 9668 - protein, 393 aa, unknown
  TnpB Polypeptide
MSQKVVLERVTLDGAKPFVGYTDQHDPCSEKLYANTGNQAMEWLCDAWRYRFNQLRSNRCKYGKDKTLVPIGGEPDTRSVSQSRSECSWLAAVPSLILESPTRIERVEWFTAVQRRKTLLSKRLKPGRMPRFKSYKRDGQRFVCWYNNGRNAVYRRVNRNHGIITITGQNPKGMSLPGEPLRYRILLHVRVSQPIREYTAIQVDWTNRTVVFNNIPLPIRRKPTGKAIGIDRGCAHAASDSNGRFMDLPKNRLKAIDREIRKRQKSQARRVKTAGYSSEKEYANSGRTSRAYWKTRLEITKLHAKSKRILDDVYQKYTTQLVRDNDLIVLENLRLANMSPTQQACSPTRCMKAGIFTTVRRRNVDSTVVSDRRAWEDCPPCSHTRPSLPTAWA

SEQ ID NO: 9669 - protein, 392 aa, unknown
  TnpB Polypeptide
MDSESTSLLSKKIRVYPETALAKIWFQWISASRWCFNQAIAILKAQKIGKYDLRKTVMGLAPEWVSQAPYNPRQLAVFQAYEAHKAAKKSGGDAKFRSVREPVKSIRFQKDNWKKKTFYPTQTKGLSFKVSEPIIDKMHHEPTLVLDRGRWFICYAVDEPKPKPLNSQLAIALDPGVRTFLTGFDGSEIWEIGKSDMGRIYRLASHLDKLMSRVSLSKGRRFKRLRYRLRKAAQKIRVKIRNLVDELHKKAANYLCTKYKVIFLPTFEVKNMVKRGKRRLNTKTARKLVTWSHYRFKQMLKHQAAKYGCVVVDVTEEYTSKTCSKCGHIHTKLGGNKKFTCPSCGHTIGRDINGAFNILLKALRDTSTSGVIASFQIVPHSETSGICQIFPG

SEQ ID NO: 9670 - protein, 379 aa, unknown
  TnpB Polypeptide
MYIIVKGFLELLDLYSELRWIVQNALRDLDQAYEHFFRRVRERKAGKKHQHLGFPKFKSKSQGRGSFRLDKPIRVFDDRMQLPKLGTIRLKEHSYIPTSGVKVLSATVSERAGRWYVSVLVEEQVPPVVNASGQPIGVDLGISSLAVCSDGRPPLANPKALRTNLTRLKRYQRHLCRCKKGSKNREKARAQVARLHARIANIREDALHQATSSLVHAPLSPSERISLKTHLASLLPRPKTKAEQKKAKKQVKKLIHQTTQINAPLRPQVIVLEDLNVEGMKRNRKLARAISDVGMGEFRKQIEYKSLWNGEMLLFADQFFPSSKTCHCCGWKWEEMTLSDRIFICQNPKCRLYQIPQDRDVNASENLVELGYEYLRSLR

SEQ ID NO: 9671 - protein, 465 aa, unknown
  TnpB Polypeptide
MPSSGQFSKNGGRGPTSPAIPGEDIKEVEFKNRRTNVVRLLPNGFQERKLRRLADISAKLFNEVNYERRQQFFRGEKVDFEGTWGKCYEKYKEELGVNAQAVMQKNNEAWNSLFSLLRLRKENKLPSHMNHVSPPRYWKDGETGGRKLLLVIRQDRYVVDEQKLVLKDFRLEIGFAGRLRWYGKQGRLEIYYDEVGNAWYASIPVEVGVEKTKKGRRSKHILRGERKSIQVKSPKGSKMASIDLGINVLASVVIDDGTWLLYKGVRAKEDYFYFGKRIAEVQSSADKMKNLEEYEAYDELNREGRRLFKKLTRRLLHLYRNFASHLMRELHERGVSTIYLGYPFNIAQDKGNKFTVNLWSYRELMNIIELKAQEYGIRVFEVVEYNTSRICAYHGVQVERGPRGVVNCPLGHKLHSDLNGALNILKKATGIVVSRVRKPLSFIVDHNRVAPVMGRNPLDLGEPPP

SEQ ID NO: 9672 - protein, 351 aa, unknown
  TnpB Polypeptide
VRAIKSAKQVFHPDESLLSLMETFRRMVNECIRIGLECEKTSMKALCKLCYPRLKVFAVDSRYRLCAISRAAGILNNYRKLLKRHHVKIPYCTRPMLTTCYGIRVDDGLLSLPSKVKIPLNSHTVDVISESWLELRSVTLTTTSLSIAYTRSIKPMQSPGMIGLDSNLDNITLADTKGNSIRYDLSTITRIKAMARQTKRKFRRNDRRIRRSIYLKYGTIEKDRAGWILHNVSSSIVRRAKEFKMAITMENLTGIRKLYRKGNGQGKDHRFKMNSWSYRELQRQIDYKARWEGIPVYYVNPRGTSVRCSRCDDKMFVKEGRTLGCSSCGLTIDRDVNAARNIMEGGAEVQP

SEQ ID NO: 9673 - protein, 540 aa, Bacterium sp.
MITLQCKLELSGKDKDMLKDIMRKQSACFRYAYNRLLEGKTRKELKKELQSVFNINSRYVDDAIFKAQTLINTYIKRNKNPKKVIFGSRNLFRKLTKNHLQGKDREKLLSLWQEKRKYFLYSRGDKAKSGNLNTRIILGQDGTYLRINIGDRAWIKTKVIRDVERKNDKWISFISDLLTAEKTGNYFPYSVEIKIKDNQIYAFISYEEPVREVEITKQAGVIGIDVNARPFHLALSEVSTDGNLLSYQSISLHNLLGKTRNQRDYLTWQIAHKVVEIAKEKNKAIVIEKLSTIDKGKKGDGNKILRKKLQQWVYRGILEKVKVLAKRGGIEVIEVNPSYTSIIGMLKYAPIYNIDKDIAGAYVIGRRGLGFRGRLPENYEKLLRSQEYIQYAIAKLEEERQKSKERLKEEKNKHKQKPIKGQIKQLSKDINLLKNLNSEPLAQKPENRWKEQVRGEVKTSYKQWQVVKVALTFPILEKSFGRDFSPLKSYLVDWDRVVRRLVPTPGVGTMANQIPPVSAGLPEMAEYKYTNLKCSSLHFS

SEQ ID NO: 9674 - protein, 435 aa, Geobacteraceae sp.
MEEKKISPVTLTHTFRLPDEIQAESLRFVAASRKTTNETIEKLWGQLDVFKDTKGQAWKQVGKILEQPHDNGNRQWRCESETAGRILRQQADRKVAFEQIFPILSENMIVPADEKHRTRKNRKEIFAQLKLLKEKLAGDAEKSAYMINVVEQACNFFFKNEKFPETFEEMQEIPLLKTGMLTYAADDGGVKGQAYRYSIADGKLNLKLRTPDENGKWRWLEPVEIKLPEATAKFVKDSTRLAAPTLRAVAQADGTLVACLDIIIERVPLDKPAWNHSENILSFDWGIRRLITPAVVSPDGEQLSRPLFLDTGGFDGKQARLRKHISELQAKRDKLKKKTKKRIALQIEIDKCWQAYSNRNGAVAHFCSNLLLLMAEMFGCHAIACESLTTLRTLGHGRDTKSRWRNWRNNTTIRSALTTVLKYKCKLAGVILRFE

SEQ ID NO: 9675 - protein, 518 aa, unknown
  TnpB Polypeptide
MFVSLQFKLELKREDKEKLIKLMRMQASAIRVAYNMLKELEKEKAKNPHAQIYQRLRQLFPDLPTKYIDSAIYKAKQYPTDTPVVFGGKRVFEKLCKNHLSGKAREKLKKQWKEQRQGTLISIGSKTDKGNRLTRFEDEEGQLHLRITTGNREFIYAKVLREPSNSKDKWLTFMVMLLESWQTKNYFAYTVELKLRDGEIYGSVSFEIPTPEVRYTKENGVIAIDTNASPIHLAIAEVSKTGELLSYQPISLHHFLGLSKNAKDHQEWILANKIVDLAIEKGKAIAVENLKKLKNGTRGDGKAKLRKILHNWNAKKLLQKIKRAARLKGVEVIEVNPAYTSVIGMLKYAPQLSIDKDIAGAYVIGRRALGFKEDMPEKYKKLLKDKAYLEFALEKYEKREKELMELIEKETNEYKRDALESELRNVEDAKKLLTNLIQSLQSEPSGCEGANGRNPEQGRVAKTTLQSAWQVLKVALFFPILGKVLPRDLSPLKPVLVEGVWDRVRSRLVPLEAGGASR

SEQ ID NO: 9676 - protein, 358 aa, unknown
  TnpB Polypeptide
MNLTLPVKLAPDANQRSALLETVHRFNAACDSIAETAFSEKCANKVALQKLVYYDIREQFGLSAQLTIRAISKVVEAYKRNRSIQPRFRTDGAVPYDERIMSWRRLEAVSLLTLSGRQVIPVRFGEYQAARLDRRKGQADLVLRNGTFFLFVTLDVPEPTEAQVPDYLGVDLGIVNLAVDSDGAVHTGENVERQRRVHSHRRRNLQRKQTRSARRKLRRISGNQKRFQRDTNHVLSKALVRQAKDTNRGIALEDLQGIRQNGKRFRKRQRSRHANWSFFQLRCFIQYKARLVGVPVVLVDPRNTSRTCPACGLVDQANRLSQSQFLCIGCEFAGHADAVAAWNIRARAVVMQPMVPAA

SEQ ID NO: 9677 - protein, 359 aa, unknown
  TnpB Polypeptide
MNKAFKFRIKPTLEQKILLGKTFGCVRFIYNKMLADKISHYEKYKTTLKNMPAQYKSEFEWLKEVDSLALANAQLNLETAYRNFFRRPNIGYPKFKSKRVSTKSYSTNSVNNNIVLNEDYLKLPKIGRVRIKQHRQIPKGFKLKSVTISQSPSGKYHASILFEYEAHMPQVEIKNIVGLDFSMSELYIDSSGANPHYPKYYRKAQSKLAKEQRKLSRRKKGGQNYQKQKIAILHEHIANQRKDFLHKQSRQITNDYDAVCIEDLNMRGMSQALNFGKSVADTGWGMFTTMLNYKLVEQGKKIVKIDKWFPSSKTCSSCGKVKDNLLLSERIFSCECGFQCDRDVNAAINIKNEGLRLLA

SEQ ID NO: 9678 - protein, 373 aa, unknown
  TnpB Polypeptide
MEYSYKFRLYPNREQANLILRTFGCCRFVFNHYLALRKDTYDQTGKTLNYYACAKDMTRLKQQEETLWLREVDATALQSSLRDLDDAYQNFFRHVKQGNKPGYPKFKSKHDRKQSYKSKCVGTNIKVLENVVQLPKLGSVKCRISRAVQGKILSATVSRSASGKYYVALCCRLDQEPEKLPDTGASIGLDFGSKHLVVASNGEMYLNSKPFTKSEKKLARLQRQLSRKTKGSANWNKARIRVARLHEHIANQRNDAHHKLTTKIIRNNDIICIEDLDVKEIEQNRYLAKYVADASWGELRRQLTYKAQWYGRRLVTIDHLYPSSQICSNCGQQRPEVKNLQVRKWTCPHCGAKHNRDVNAAINILNEGLRLLA

SEQ ID NO: 9679 - protein, 400 aa, unknown
  TnpB Polypeptide
MIIHKGFKYRLDPTTEQKQMFLQHGGNTRFIWNSLLANNIEYYNKEGKFNFGHVMITSLPKLKEEYEFLKLSFSQSLQTVGRQLNDTLTRFLRERKTNNSIGFPKFKKKNIERDSFHCPQKWKLEKRYVKIPKIGKVKWIKHRPLQGRPKSITITQNGDQWYCSVLCEITTKDKPNKNKNIIGVDVGLKDFSVFSDGNIIKRQKFTKKYEDKLSQKQRKLSRKKKGSNNRTKQRRIVQKIHRKIRNSRNDFLHKTTHYMITKYDGFCLEDLNVKGMMKNRKLAKRITDASWYEFKRQLEYKSLWNSKHFIQIDRWFPSTKTCSLCGRKRSMKLKDRIYECKCGFVIDRDLNAAVNILNEGLNTLGLRGINACGDGKVHDFPLENQVTVDEARKKNMRITV

SEQ ID NO: 9680 - protein, 328 aa, Bacillus sp.
  misc_feature (293)..(326): Xaa can be any naturally occurring amino acid
MAVGVSLRFLVYCRHHTKSEVQPMLVNKAYKFRIYPNKEQEILIAKTIGCSRFVFNHFLALWNDTYKETGKGLTYPSCSAELTQLKKKQDTIWLKEVDSIALQSTLKNLADAFSRFFKKQNDIPRFKSKNNKVQSYTTKQTNGNIAIVGNKMKLPKLGLVRFAKSREVEGRILNATIRRNPSGRYFVSVLVETKVQKMPKTESTCGIDVGLKDFSILSDGTTYKNPKFFRILEEKLVRAQRILSRRTKGSSNWNKQRVKVARIHEHIANARADYLHKLSTEIIKNHDVIGMEXXXXXXXXXXXXXXXXXXXXXXXXXXXXXXXXXXSC

SEQ ID NO: 9681 - protein, 416 aa, unknown
  TnpB Polypeptide
MAIQVTRTYVGSIQNQQQVCEGLDSLGDSASKIWNVARWTADRIWDATGEIPAEGPLKTYMKNQPCWKDLNAQSSQKVIEELSDAFQSWFDLRQKNDEANPPGYRKHGDTRPRSTITFKADGFKHDPENNRVRLSKGKNLKEHRSDFLLCEYQTRPDVDLSEVNKIQNVRAVWNGDEWELHFVCKVELETNDSAGDGVAGIDLGITNIATVAFPDEYILYPGNSIKQDKHYFTREEYDTDGEDGPSEKSMWARRKLSERETHFYHGLTDAIITECVERGVGTLAVSWPENVRDSDWGRTGNKKLHSWAFDRIYQYLAYKGEIRGVEVRKENEWDTSKTCSQCGDDTKSNRVERGLYVCSSCELVGNADCNGAENMRQKITPSPHGEDRSNGCVAQPSVHLFDHESGMFKSRERVVS

SEQ ID NO: 9682 - protein, 573 aa, Natronolimnobius sp.
MSDHLSLPIRLPDDDADRFDRLATLTQQIATHVLEDHWTPTHLDRIADSSHQAWKYFDEHDPFEELDLYLPSRFRRCILQKVGETLRSHADRRDAFQSIQSVLPDHKIRRIYRRHIKDQLWDDGDYLSSGYVDILIDQLNSYYDQHGRYPDTYLEMQDCPEYDNGVLPFSADDGPTSGQAINYQYDASSETLTIRLKTPDTHSPETRGDWSWTKYERDGYKAFHDLLAHGDLSAPEFQPARRKTGDTYYELSFPVEVEQTGTSDDTDCILALDAGMRKDMTAVVVTDDDEQLSTPQFIRFTDRERMRRLHRERTRLNDRLAALRRDDRSHTDEFAHVQSEYERVNSKIRHKREQLTHDVANQVLALALAYDVDAIVHEDLRSLSPPRNESTLSWELSSWARRDIIENIEYRADCAGLTVERVFPQGTSRSCPRCGSTGHTCKSPDHHHEHWWGGHFRCDNARCGFEGDRDYIGALNVARVFFSDTDELDHGFTSSYNGDSEIVLARRSAGTRLTFGSGIVAYKPEQTTATTGGGSAVIAPAVAVSETKTTGSDGRGPVVHQCTRFLRCTTENY

SEQ ID NO: 9683 - protein, 393 aa, unknown
  TnpB Polypeptide
MQTTYKFRLYPTGEQEQKLLWTLNKCRYVYNFLLSEMNQQKVIDKAQLQEMIVDLKRIEPDLKNVHSKVLQYENYRLFSNLRALSQTKKMGRKVGSMRFKGKNWFKTFSYNQSGFAVMQNRTRYDKLWLSKIGEIPFIMHRDIEGKIKQITIKHHPSGKWYASIIAETKTEIPETKNKEKVGLDLGTMNYVYDSDGNHSDNPKHLDKSLGKLQKGQRRLSRKRKGSQNRNKQRISVARVHEKIINQRDDFLHKLSRYYVDKYGFIAVEDLQIKNMVRNCHLAKSISDASWSKFIQMLEFKAERAGVRVVKVEPRGTTQICSSCGIKVHKELWNRTHKCTCGLEINRDYNSAMNILKRALGQELSKSTPVEIEPLLSNEQVWSEKQETPCESYG

SEQ ID NO: 9684 - protein, 387 aa, unknown
  TnpB Polypeptide
MVKAIKVMLIPNNVQQTKLFQYAGASRVAYNWALAREKENYEKGGRFIPDTELRKEFTRLRNSDEYAWLLNVSNNVTKQAIKDACSAYKNFFKGLQRYPRFKAKKKSMPKFYQDNIKIQFRDTHVKFEGFSFSRKANKQKLNWVKLAEHGRIPTDAKYRNPRVSFDGLNWWISVCVEFPDCRDRSNHDGIGIDLGIKDLAICSDGNTYKNINKSQTVKKLEKCKRRLQRSVSRKYEHNKKGGSYCKTNNIVKKEKLLLKVNHRLANIRKDYLNQTTSEIVNRKPRFICIEDLNVSGMIKNRHLSKAVQNQGFFEFRKQLEYKCNDRGIQLIVADRFYPSSKRCSCCGKIKKDLRLSDRTYKCECGNVIDRDFQASLNLKAYGEQFAS

SEQ ID NO: 9685 - protein, 383 aa, unknown
  TnpB Polypeptide
MKRTGSFKLMTTPPQAEALSDLSRLFAEACNAMVPFVQEHRCWNRVALHHLVYYQVREKYPALGSQMVCQAIHRVADAYKALRANGGIPNDQPVPAITFTPSSVNFDRRTYSISGEYFTLFTPTGRAKVEFACGPHQKALLLSGIPKEGRLTTYKGIWYLNLVFDLPDPVPLQGDRAMGLDVGENNLAATSTGKVFGGGKLRHDRDRYLASRRRLQSNGSRASKRKLKAISGKERRHVRHVNHVTSKAIVAQALQAGAAILRMEDLTHIRAHIKAGLRVRTRLHRWAFRQLQDFVQYKAEAVGLRVEFVEPAYTSQTCNVCGAIGKRVKHRFACSCGNLAHSDLNASRNIAKFAGLSNPARGVVSRPEFAHRARPCVVKSSFP

SEQ ID NO: 9686 - protein, 377 aa, Burkholderia sp.
MDIKRAYRFRFYPTPEQVVMLARTFGCARFVYNHMLRMRTDAWHQRQERVGYHATSAALTALKQTPEHGWLNEVSSVPLQQALRHLQTAFANFFAKRAKYPNFRRKDGAQSAEYTASAFRWDGTSLKLAKMEAPLAIRWSRRIPSGAKVTTVTVSKDPAGRYHVSLLCDDVVCAKSAATGKVGIDFGLTDFVVLSTGEKIAAPNAFRKNEAKLAKLQRRLARKQKGSANRRKARLKVARMHARIADSRRDFLHKLSTRLINENQVIAIESLAVSHMLKNRKLAKSISDAGWSEFVRQLTYKAKWYGRTLIGIDRWYPSSKRCADCGHTVASMPLKVRAWDCPGCGLTHDRDINAARNVLAAGLAVSAHGESVIPMSL

SEQ ID NO: 9687 - protein, 530 aa, Streptosporangium sp.
MALQRIQQAFKYALDPTPAQARMLTSHAGAARYAFNWGLATFATALDAYSAEKTAGVKKPVTKLPGHFDLCKLWTAHKDNPTSDLGWVGQNFSGTYQAALRDAHAAWKAFLDSKNGRRRGRQVGRPRFKSRHRTTAAFQTHGTGLRVADHRHINLPKIGPVRSYEKTKKLRRLLTRPDVTCTTCDGTKEAPAPAPATKSCGDCKGTGHAPHTRIVRGNITRTPSGRWHISLTVETHRDIRTRPSQRQREGGIVGVDWGVRDLATLSTGEVIGNPRHLERNLARLRRAQQDLARKADGSAGREAARLRVARLHGRVANLRRDHLEKVTSRLVHSHTRIVVEGWDVQHAMQHSGDGAPKWVRRDRNRALSDTGIGAARWMLGRKAAWYGSAIVETGPHEPTGRTCSACATARTKPVAPADERFTCPSCGYSGDRRVNTARVLVRLAHTSDAPSSGESLNARGGDVRPAAPSTRPGGQTPTRPSGHIAVHALGKDEEGRDKGKDKEFRGRRSPMKREARSRPPGRGKAGTPDP

SEQ ID NO: 9688 - protein, 409 aa, unknown
  TnpB Polypeptide
MVNIMQVTRVLTINLTRKLTKEQWIILNHLTYSASKLWNVANYQIIQGNVKLSELEKKLKDNFWYKNLHSQSAQAVLQKLKVAWHNYYNQHTKRPRFQPKDGHFPVKWKKDGFRIIDNMLRLSLSKQTRQYLKEKHGIEFKYLWVELPKALPLDAMQIKEVEIVPHDIYGQRFYVLHIIYKKEVNPVKLKEEKVMAIDLGVRNLATVVIEGEKHPLIFDGKILISKLRWFAKETARIKSIISEQGLKNCKRLARLVVKERNYVKDYIHKISRWIVDLAKEKGVSRIVIGDLNKHIAKIDIGDRVNQQLHRIPFGKLVKMIEYKAEELGIKVEQIDESYTSQKCSVCEAIKKSHRKYRGLYICSKCGTVINADVNGARNILFKVVPNPERGRDSGLGNPWRVRVLNPLLS

SEQ ID NO: 9689 - protein, 562 aa, Streptomyces sp.
MAERKKRLRPIARSFVAPGPSGVSIRDRLKGLTAQDEKVLRLTGEHLGSLASKDLRTRCADGLEHSTESWASRKRELTAVSSSRWAGALTKSTHDQWALARRGQAAHLQSLEAGVRTIAHRLSLPIGERGAKRTPGGYRSKNEWFQKTRRLAALEDRLAAVRADREAGRVRVARGGKRLLNTRHNLAAAQLTVPEWRQRWEAARWFLSADGESGKRYGNETIRITPDGEVSVKLPAPLTEHANAEHGRYVLAAKVSFPHRGQEWAGRVEANRAVAYRIHLDARRGRWYVDASWTHPVTRTVPMETALADGVIGVDTNADHLAAWRLDTHGNPVGRPRRFSYDLSGTAQHRDAQVRHALSRLLNWAKTCGVAAVAVEDLDFQAEKTREKHGGKRRFRRLISGMPTGKLRARLTSMADHTGIAVVAVDPAYTSRWGAQHWQKPMHAPTRKPSRHDAASIAIGRRAQGHPIRRRTAPPPHHQSDGAGHRTVQADRRALGCEETRRPVTDRGQEPHARTGRHHGTRATSAPKTVRDARSDRQWVQDSLLLTEQERLVSKSYDLEQA

SEQ ID NO: 9690 - protein, 549 aa, unknown
  TnpB Polypeptide
MGRSKGVTITVKVPIAWDTMTELKKQRLRQIVGRDTRIIRSFLGVIEQHESNLLSGRYKTRINDGALDHLTITAVHVASKYPQRLEVLHDMKEKFPRCSSGELIECRRTAIALYESYLALRKRRRSRSARPCETIKSGRIPRWIYSLKFRLLETTSSASRWWLDLQDSFDSAPKKKSIHDRIRIPLKMCQFHIGQIERGKIKALQLINDRRGRWWVHFAVRLNEDSVSAEGNLPPAVLGIDLGIKKAACTALITPEKVRETRYFVQQDKANAIEKYDQLVAELQSEMESRRSRHQSYDNIAKRLRQLKSKREDVSREYDLLLLRELLQYIIQLSEKHTLYVALGRLKHIRNKARRGSHTSLSHRKMINSWSFARITNGLKHQLSQLGWVVDGKKARYKVVSEAWTSSLCWKCSSRGRRPKQNHFVCPSCGHETNADRNGAINIAARLIMLTDSLHSVRGRGKWVDSVNTGKNPQLMSLLQKRSYVSDSRESAADHFVQSDLLNFGDESEKSENDPAVERTVEKLSVCGNDTPPEIQEKETRPVGGTVSQ

SEQ ID NO: 9691 - protein, 250 aa, unknown
  TnpB Polypeptide
LLELCPIINTFQNPKIILSRKLDRQRRSNNSNNYNPNGTIKNGIMINGKKTKLNWINSKKYIKTKNELNDIHRKQAAIRTQAHEKLANQIIGLGNRILVEAMSFSGLLKKAKKTTINIRTGKFNKKKRFGKSLANKAPAMLLKIINRKLKYDGLEILKINTPKVKASQYNHFTDEYDKKDLKERWNTTINIQRDCYSSFLIMNIKDDLDQIDRVLCNETYDNFKLLYDKEIQRLRQLKSNGFKLISSMGI

SEQ ID NO: 9692 - protein, 451 aa, unknown
  TnpB Polypeptide
MRTAHVHVAKLTPAQQQLAEDVGPWARACRDVWNAALQERLEALRVARGRTIPKGWWPTYASQCRGLTDAKKVAPWLAEAPHHVLQQTLKDLDTAWGAWLYERRAGRPRFRARKRSARNWWAPSYRFPDRKQFTIRRLNRRWGDATLPKIGPVRFRWDRDLPDDAQVTNVTLKRDRVGDWTVAFALDIPDVEVAHPNPGTVVGVDRGVTVLAATSDGQLLDRNIIDPDGRLGPDLLTNGERTRLSRLERRKARQKRGSKNQARTRRQIATLKRRQARRRGDLAHKISARLAAGYETVAVEQLDVAAMMASARGTVDKPGTRVAQKRGLNRSIASKGWGMLHGQLAYKTARHGGRRPVAKAAYTSQTCHVCSHIDPVSRENQARWVCVACSHRCHADVNAAINVLARAVPAGQAPRKGPAAGHAVAACQALQTSVGASKQEPAPRPRARQAA

SEQ ID NO: 9693 - protein, 382 aa, unknown
  TnpB Polypeptide
MYRYRIYPSRKQKISLIETFKACKDIYNELLELSINNYKKTGKGLFKYDFNKFLTNKHKNMHSQVKQNVSDRVNKSFSNFFRRVKSREKKKGFPRFKSLVKSITYPQSGFNFVNERRLYASKIGNLPIVLHRIPKGKIKTLAIKRNNAGQWFAVFSCKIESNNITHSSKKNAGIDVGLESFAVLSDNKIINNPRFLVKSENKLKKLHKNLSRKKKGSKNRFKAKLLLSKQYIKVTNQRNDFLHKSSAIIAGEYKLIAVEDLRIKNMIKNHHLAKHIHDASWNSFIQMLSYKAVACGGQIIKVNPRNTSRACSSCGNIQEMPLSRRTFECTKCSLVCSRDLNASVNILKVGMDYAELNACGDIVRPSDKACVNESGTIFRRNF

SEQ ID NO: 9694 - protein, 306 aa, unknown
  TnpB Polypeptide
MDKDKWGQTTKTGLYRDIFTPHMKSDEVLPAAMIHDGRLKREWTGRNRYFYIFPIPLGENQAPKHESDKGVVAIDPGVRCFATLYGPQNRTVTNWGDGDVDKLYQLHYKLDRLQAKLNSNVPKKLGTSLNGKQRPTTWPEWKVRKRQRYRWRKESAMLWRRVRALVDETHKKLATYLCNSYSTIILPEFATQRMISRGHRNIGPKTARAMCSWAHYRFRQRLLHKAWEYPACRVLLRDESYTSKTCGACGSVHSRLGGSKRFVCPSCTASLDRDANGARNILLRYLNECGVESLATGSFIPGDPAW

SEQ ID NO: 9695 - protein, 262 aa, unknown
  TnpB Polypeptide
LTISSIKKSFKFSLSRPYDGKVKRVSVKRNKLGEYFVILCLDKEAEPYGKSHDGASVGIDFGLKKYMTLSDGREINNPQFLKADLQELRRKSRNLSKCKKGSNNRKRKKLELERLYRNIVNKRSDFQWKLAHELCKRYDLICLEDLNLEGMTKRWGRKMSDLAHGDFVVKLEHVAKKYGVKVHKIDRFFPSSRLCTCGYKNDKLSLSDRIWTCPSCGAVHPRDLFAAENILRQGIAELGSGSKSPKHSQGRSHASNPTISCK

SEQ ID NO: 9696 - protein, 393 aa, unknown
  TnpB Polypeptide
MNQVLTLVVKLQPTPEQYTKLKDTALEFASCCELINSSVKPTLTNRNSIQAVIYNDAKENFNLVSNHIIRACARVGANRLTAKHKGRKVKGFKPTSFDCDKDTFTFREKDWTVSLSTVRGRERITLNASNYHRGKLTGQKPTSAQVCLHRDDNFYVHIQLKSETPEPIQIGKVIGVDFGRREIAKTSTDKGWDGKQINQVRDEFARVRASLQRRASQGTRSTRRRCRQILQRLSGRERRFQSWLNHNISKRIITEAKELNSIVAIEDLTGIRERTNEQPKDKTERRRSNSWSFHQLRNFLEYKGIKEGVKVVIVPPAYTSQTCHCCLYLGVRTNKKFKCINRSCDWIGDADTNGSRVIALLGATYVNSPVKGSWLSCPLDETTRGLLKASSSA

SEQ ID NO: 9697 - protein, 411 aa, Limnoraphis sp.
IPDSGQTKVIEHSLSVCRSVWNYALRERKDWLNSRKSPVNACSLIQEYIINPDTPYPNYHNQAKALTEAKKTNDILKSVNAQVLQQVLRTLDRAFADMQSKKLGFPRFKNKYTMRSYVYPQILKGCLKGNQIKLPQLGWVKFRKSRDIPNGFDIKQARIVRKASGYFVLLSMQLDVNIPDVPFHGHPLGVDLGLDKFLATSDGELVERPRFLNQLHRKLKLLQRRLRNKKKGSNNRHKLNQKIARLHQRISDTRKEWHFKLAHHLCDHAQSIFVEDIDFRSWGRGMLSKHCLDAAFGQFVTILKWVAWKRDVFVAEVDKNYTSQICPNCGFHTGKKTLDVREHNCPECGYTTHRDVAAAQVIRNRGIENALGHSVSENACGDGLTGALPSQESVKQEFLNASLRISRQATL

SEQ ID NO: 9698 - protein, 554 aa, unknown
  TnpB Polypeptide
VVLGDVLTKETTRVIVPLVGFEAKLLNIKSTHVAVHAKLEFLSNEDKREVLDLMRRFSSAYRWIYNRLVEGGNPSEIIQVSGPVSRFGLNSYYYLSARELALYKISSLEAKGVNPRKIIFGTRTLFNRLCRKGSLKSRAEAKRVWRERRKGILLNFGNKKSVSGNYALTLSLINRELWLKINMGTSKNPKSGKKKSRYIYAKVKTSHPYLNHIMEVVGRSGIAPISVYLKLIDGKVYAIFTKKIDLPEPVLTRYYGVLGVDINARPLHLALAVVEPDGNLRKYTTISLEEVIRIRERYKEESSKVLDNFYWQVAHQVVDLAKNEGVAIAIENIFNLPKGFRGDGNKKLRRILGRFAYRSILERIVRVASREGVEVWGVNPAYTSVIGMLKYAPMHSLSKDVAAAYVIGRRALGFSEKVPKRYLQLMASPEYREAVINWFNQELRALEEKMGGERNEYKLNRLRREKESLEKAFNHLNRFLSLEGSPEGLQRGLTCGRNPEEPNKGDSLHLWKALQVGVLRPLLGQKVPRDLSVLKPLLIGGVWKGGGGLHLGPS

SEQ ID NO: 9699 - protein, 373 aa, unknown
  TnpB Polypeptide
MEHWLHLLNVSREAFNTCVKHLDEVKPQLSMSGVHNACYSYIRELYPSLPSQSVIRIQRLAAAALKSIKSNKCKNADLPVKHSLSMTLDKRLYSNLTVNGISLTGKTERKREHCGFVLYNKVEEMFNKYNPLDPTIFYRNGKMFLSVPFEIPTLPCNDDMPIGVDMGVKRLFVTSDGTYFSDKDYLKQRRKLRYLKQCLQSKGTQSAKKHLRCARRKETNLSKDMVERAVNVLLKNTNASILVLEDLSKIKQKTSKTTEGYTRKRHNNMLSQVPFYHFKERLSHKAQLVGKRVETVSPAFTSQTDSRSNKRDGNRVGCRYYCIDGIVFDADWNAAINIARRANHPISSVLPIDGGLTPLIGRVQSITQSSNNC

SEQ ID NO: 9700 - protein, 335 aa, Escherichia sp.
MMMLILKAYKFRLEPTPEQSQRLRQLCGCARFVWNLGLAETKRILDSGEKLPSAFELNRMITVWKKMPEYIFLQDAYTDNLQQKLKDLHTAWKRCFDKKLAAKAPVWKRKNEGRDSIRFVNFEKYCCLENRRVKLPSGLGWVKFRQSQRVNGKIKNATISQLAGQWYISFQVEIETAEPNHTSTTIVGLDAGVAKLATLSDGTVFEPVNSFQKNQKKLARLQRQLSRKVKFSNNWQKQKRKIQCLHSRIANIRRDYLHKVTTTVSKNHAMIVIEDLKVSNMSKSAAGTVSQPGRNVRAKSGLNHVKVSSGYGQPAGAQCPGKIRFKPFDTGSGLV

SEQ ID NO: 9701 - protein, 395 aa, unknown
  TnpB Polypeptide
MLIAHRIALKPNNKQATYFSRACGCARFAYNWALAEWTKAWKPDGYLPKPNQMALRRKLNSIKREQFPWMTEVTKCAPQLAIIQLGQAFQNFFAKRAKYPTWRQKGVHDRFSISNDQFSINDKTIRIPKLGCVRMTESLRFNGKIISATISRTADKWFASITVEVPELNLPKAENQGEAGVDLGIHALATLSNGETVRGPKPHKAQLNRLKRLSRSLSRKQKGSKNRDKARRKLSMLHARIANVRSDALHKLTTDLTSRFQTIGIEDLNVRGMQKNKHLSRSINDMGFFEFRRQLEYKAEQRGGLIVVADRFFASSKTCSKCGYKLQTLPLSTRKWQCPKCDTEHDRDINAAINLKQLAVSSTVTACGEGSTGPGSTRVKLPSTKQEANSRFAQL

SEQ ID NO: 9702 - protein, 393 aa, unknown
  TnpB Polypeptide
VTYRLRPGSAGRAARLQGIVDGCRFTWNAVLGETRDATRARSLGAPVPPVSTTFFTFSGRFTRLRAEHPRLETLPFHVVRYTLKRQSDAWSRYYSGTGQRPRFKSRHRDGGFTIPGDVRIDGDLLTIPGSRSCRGFRVRLCRRNEPKVMGDPVQVVVRQAFGRWYATVFYRVAVEPVPDNGIAIGIDLNHAARAVACSTGEIVSFPDTERLEARKRRYQRRISLNRRGSMKRGSKRRARMKRRLSKTCRKLANVRSNWQHQTSRALADTAGQVCYEDLKVGAMSTKGRGKRGLNRENLRVGWRGLRTKIEYKAAVATAVAQHWTSQTCSKCGSRGERSGESFRCGCGHRAHADLNAARNVLASGSGATGRGEALALATSTIRQWTVRVDRVPN

SEQ ID NO: 9703 - protein, 370 aa, Bacillus sp.
MAKQNKAYKFRIYPTDEQALIMRKTFGCVRFVYNKMLAERIETYESLKDDKEALKKVKHPTPAKYKKEFEWLKEVDSLALANAQLNLDKAYKAFFKGNAKFPKFKSKRHKQSYTTNVVNGNIQLLDGHIKLPKLKMVKIKQHRKIPSEYKIKSCTLSMTASGKYYISILTEYEKKIDCKEIEKIVGLDFAMDGLFVDSEGEKANYPKFYRQMLEKLTKEQRKLSRKKKGSSNWDKQRIRVAKIQEKVANQRKNFLHHKSKELVTTYDAVIIEDLDMKGMSQALRFGKSVADNGWGMFTSFLQYKLKEQGKQLVKIDKWFPSTQSCSNCGNIQPMPMNIRTYACSCGLNLDRDYNSALNIKKEGIRLLASA

SEQ ID NO: 9704 - protein, 513 aa, unknown
  TnpB Polypeptide
MKGLKAMRTQTSSFIVKVKLHLQDNIKNHLNKSFHIVDSAYNETLNFGLKRFAAMKKNKRYQELLELRRALIEIKKPTKPQRTRLKKIKEELGKIQIDYGLTGYQLSLWLLERRKKTKAYQHLNAGELQVIAENAYQTLSQVIFYKVKPDALKFKSKYSLDHSFRNRVNSTGTRLVESKKPGIAYRLYIHKRTTFIDIPTIVFTKYQQMQLLRANKIKYVQIVSKTIRGKQIFYLHILCQGVPVSKIEKGEGVTGIDPGISTVAYVSKKSCELVDLVPKDFARKERLIQNLSRKIERSRRVNNPEAYNKNGTIKKDVRFKPLSKRARRLAVRRQTAYRKLTEDRRKLQGELVNRIISESSVIKIEDLDVKSLMKRKRETRINPKTGRPFSKKRYGKAIFKAAPGYFRTLLLQRANSTGCKVDIISPKKTKPSQYNHITGEFEKKELKIRIYNLTDEITDVQRDLYSAFLIAHIEDDKYLTEQLEGNFRNFYNNMKEQLCKLRQKPTRLSWYVE

SEQ ID NO: 9705 - protein, 382 aa, unknown
  TnpB Polypeptide
MLTAVKCRIYPDENQIILIHKTVGCARLIYNLMLSDFYNNNLLKTPAKYKEEYPFLKEVDSFALCNSQMHLQQAFRNYKKNKDHFQKPTYKKKSRSRLSYTTNNNNNNIRIENNRLILPKFKSGIKIKLHRPIEGVIKSVTIDQVPSGHYTASILFEVPDNQEKPVLSKDNAVGIDLGLTHLAIMSNGEKYENPKHFHELQRKLRKEQRTLSRRFEQNVKERIYDEDGNCTEIIYKKPLRECKNYQKQRRKVAKIHNKIKNKRSDNLHKVSTEIIKNHDYIALETLKVKNLMKNRKLSKSIADVGWAKFINMLKYKAERNGKLIVQIEQWFPSSQICSHCHHNDGKKALNIREWTCPNCHTHHDRDVNAAINIRNKGLELIS

SEQ ID NO: 9706 - protein, 496 aa, unknown
  TnpB Polypeptide
LVLSNQRNNDLRAYKNNWSKTQMKRTVKIKAICLNNEDKILLIGTVQRNIKNYVWSRYSGIGSLLKQSGWTIRDELIQKDLLSNKIPKTLSRIAIEKSASTIKTNWIATKKKVKQAIAQNENLTKSDRHYLFLCLKHTPTLYNILNYKKVDYNIDYLKDLKIDVHRLNNLLRRYIRRYKTKPHTNKANIILTSNLYKFNSNNKEFSFTGKKKNSQIELTLIGNIPKLKGTLELVKNQKTNQYYLHVPLDRVISKKNITKESEILGLDVGITDLVTLSNGSIYGANSSELFYTLSDNLVNKNRSRLFSHKQKLEQRILIEQDQYKKSVLESKLKNLEENNLGSKKKNAKIGKYKSRIASYINCELNKMIKEEDIQEIIREDLNWPSKKRNKRNVSRKQQNRFSTWSKGLLLERLSIKLAEKGIKETIVNPAYTSQVCCRCNHLGSRKGKEFKCSNCNLSIDADFNASIIIKKRKFIKEINIDTPYKEVKKYYENISV

SEQ ID NO: 9707 - protein, 361 aa, Brevibacillus sp.
MHRAYKFRLYPNKEQAILINKTIGCTRFVFNHFLAKRKDAYEQEQKTLNYNDCSSLLTQLKKEIEWLKEVDSTALQSTLKDLDSSYKKFFKEKKGYPKFKSKKNPKQSYTCKMNIKVEGDRIKLPKLGWVTFAKSREVEGRILSATVRKNPSGKYFVSVLCETEIQPLLQAGKTVGVDLGIKDFAILSTGDKIANPKILRQYEKKLAIWQQKLSRRKKGGQNREKSRKQVARLHERISNTRNDFLHKLSTQLIRENQTICLEDLRVENMIKNHKLAKSITDASWSAFRTMLEYKATWYGRTISIVGKQFPSSQLCSGCGYQNKEVKNLNLRNWTCPNCGAQHDRDKNAAINIEKEGLRLLA

SEQ ID NO: 9708 - protein, 362 aa, Brevibacillus sp.
MLKNKRKGGEHMQALTVKIRIFPDQPAILRQLGNEYIRVVNQLTKRAEQRGAFPKMTTKDVETILPSAVCNQAIRDAKSVFSKIKKLGVRPILKKSVYFVNIQNYTVSENTVTFPIVVDKKTKKTAFRATATSRDMELLRKAKLGLMRIVEKSGKWYAQISVEVPTSVTNNENIMGIDLGLKVPAVSVTSIGRTRFFGNGRQNKYIRRKHQQRRRTLGKLKKLSAIRKLGNKEQRWMKDQNHKISRQIVDTAIQEGVSIIKLERLENIRKTARTSRKNAKNLHSWTFYQLQQFISYKANLVGIKVVEVNPAYTSQSCPACAEKNKVKDRRYECSCGFNAHRDRVGAINIMNQPVADGNSLSA

SEQ ID NO: 9709 - protein, 395 aa, unknown
  TnpB Polypeptide
MKTGYSIRTWRMRLFCPEPLWLDRTEEYFQSVVEFYYDLLKSREELWNNSLFDIQRSLELLTVAGRDGRQPTNPLPMGKVPVYLRRAAINKASAAVKSSLTQEESGFPGKIEAKVTFFKGMYSDLTDHTICLKLWNGEKWVWTECQLKGRSFPKDGQLMSPTLVKEGKGYMLNIPVKQENEDARTAKERMAEGTRICSVRFTNTDTFAMCCILDEQGEQIAVHACRGGDKYRYTCKLLEDRILKSRPSTAGDNSPQPNRKYYIRLKNLSQHYGHQVSREILSFCKESQAGIIVLPDYDQNFTRMAMVKSGNFSPLHLSSKIRSCLQYKAWAEGILVLEVRTDGLKDKCSVCGGKVKRRGKEFLCENGHQGNRFLNDARNLGRKCQESFHSGNKSK

SEQ ID NO: 9710 - protein, 380 aa, Ectothiorhodospira sp.
MMRTASIRLEVSAEQASALAALRTAYADACNRLVPIVREYRLWNWVGLHQRTYSNLREATPLGSQMCCNVIFSVCKAYKAQKELGRIRKDEPIPEIRFDRLSVHFDKRTYTLKNDAVTLYTLDGRIKVAMRPGEHQRRILTSGQPKEAELVLRKGQWFFNLVVESGDAEPVASGPVMGVDVGENTLAAHSLGKVFGGDPLRDKRDRYLALRRRLQSNGSQSAKQKLRQVSGKEARRVKHINHETSKAIVQTAIQAGVAKITMEDLTHIRSRIKAGKRMRGRLHRWAWRQLQSFVEYKAKAAGIAVEYVNPAYTSQTCSDCGSIGKRSKHRFVCEHCGLRAHSDLNASRNLARIGSGAPLSRAAVNTPDVGNGINHALVSQ

SEQ ID NO: 9711 - protein, 417 aa, unknown
  TnpB Polypeptide
MKIRYCCSGIIEDAAAVKVVKRVERIWLKSSKNLSSLTHLSKNLYNEANYIIRQEFFKTGKWTRYNELDKLLKGSPNYKSLPAQTAQQILILLDKSWKSFFKAIKEWKKYPDKFKECPHIPCYKKKKGEHILVFTNQQAKLKDGILKLPKLIGLTLKTRLESGLKEVRIIPKGIGYVLEIVYEKILKVLAKNKDRIAGIDLGSANIVTICNNIGEKPIIVKDGGRGIKSINQFYSKKKAELQAVYDVQGIKDGRRLRQLRVKRERKATDWIHKLSRFIVDWCVAHEIGLIVFGYNGEWKQNIELGRRTNQTFTQIPYMELIHQVAYKAEEEGIEVREVDESHTSKCSFLDDEVVAHHEEYVGRRKTRSFFRSKSGKIIHADVNAGYNIIEKANPGAIPERIREWIGGWGLHPVRCYI

SEQ ID NO: 9712 - protein, 394 aa, unknown
  TnpB Polypeptide
MNTVRIYQLKNLSATQFRRLRDAQMEAAQVWKCCMLMHKAARLSHEIWPDRIELQKATKGRFALHSQSVQMVVHAFLANIDTTRQLRQTHPQMRMRYPYKDKRFYPVHWPAQAVSREQGRVVLPMGKGRKALVLALSLPETSRSCTLVWNNGFELHVSVEIEQAETAPGDVHATVDLGEIHLAAVTTNTGKAMMVTGRGIRSLKRQRTMQIGHITKKQSKCKKYSRRWKKLQQAKNKQCKRAERRIRNQRHQATRKVINFCIERKVGSLFIGNPHGVRNQNNGRHQNQRMALWEYGRDIDYLTHKSKQAHMMCFTGSERGTSSQCPTCGHKHKPRNRQWTCKKCGFKGHRDLVGSINMHTLAFGEQVKFPRSFTYLRPSVLEKVVVGQTRPNVV

SEQ ID NO: 9713 - protein, 528 aa, unknown
  TnpB Polypeptide
MAGLPCYVGLGIRFIKPCFAGWLVPGLVPPRGGLVSLDELVGRLPTVFTNPGTESSKSRGKGKRKQDENRRTIRLRLLPSGSQERKLRRIADATARLWNELNYTRLVQYREGGEVDFEGTEHEFYHKYKDRLGVNAGQVINLNNNAWKSYFELLKLYRQGKLPKFVNKPSPPGFWKDKVLGERKLIILVRNDKYYIEPVNGGEGYIVLKTWGLRIKYAGRIKWSGKQGTLVIKLEGNRWFAYVPITVGEKPARSNPKGYVRGIYEKIQIEKPRGDNKAFIDIGLNNLFAVVFNHTDVAILIKGSTIKSEYYWWKREIKTYQAIRDWLRNHGFESWKKYHTYYLHAVYKQHERLRHYYRTAIRFLAKEVHKMGVDEVFIGYPYMVSQDNGNEYNTNIWWFNKIINWLKDVLEEYGIKLNVVNEYGTSKQCSICNAEHENGRVKRGLYVCELTGIKINADLNAARNIAKKVGYKTPTPKKILSYIVTTNGVKPITPKKGQQSRPPKNETRPKRAGKGVIHKNRCTITNLY

SEQ ID NO: 9714 - protein, 395 aa, Mycobacterium sp.
MSRFRLLPTPAQQVVLLDHCRHARFVWNLAVEQQQMWQPGRRAPGYNEQCAQLTEIRAEYDWLADGSQTVQQQALRDFAQAMRNFFAGTHGRPSWRKAGVHEGFRQVGFKPSHVGKLNRRYGRVWVPKVGRVRFRWSRAVPDGMKSYRITRDRAGRWHVAFAHIPDPIAGPGDASVIGIDRGVAVSAALSTGELLHAPNLTAGEQIRLRRLQQRLARAKRGSNRRARTKLAIAKIKAREADRRRDWVEKTTTDLARRFDTIRVEELDVRAMTRSVRGTREKPGVRVAQKRGLNREIHRQGWGRLVARLDDKAAGRVERVPAAYTSQRCAACGHVAPENRKSQAVFACVACKAGPCNADVNAARNIAAGRAVPAQGDLAEGWSTNCEPHSALLLPK

SEQ ID NO: 9715 - protein, 394 aa, unknown
  TnpB Polypeptide
MQLVEKHIIDNNHPYYQECDSLAFLSKNVYNCALYAIRQHYFENKTYLSLAECYKQLKSSVDYKVLPAKVSNQCLKLADQNFKSFFALKKKDDKARIPKYKDSKTGRQVVVYESQAISKKEFKKSGEIVLSKTNIRIKTKITDFNSINQVRIVPLLNSYKIEVVYTHQEKLPVEEGIISACDLGLNNLATVGFSDGSTPFVINGKPVKTINQLYNKLVAHHQSKLEGNKKTSNRIRRITNKRNNRVNDYLHKASRELVNQLVSKNVKTFIIGHNKEWKQEINLGSKTNQNFVYIPHSRFIEMLKYKCQMEGIEVVVREESYTSKCSFLDLEPICKHEKYLGKRIKRGLFKASSGRLINADVNGMYNIMRKEIPNVFDNGIGGVAVHPVILKTKK

SEQ ID NO: 9716 - protein, 420 aa, unknown
  TnpB Polypeptide
MLTLTYEYKAVPTSEQTQLIEHTLTVCRKVWNFALRERKDWYNSRKCPVNACSIISEYITPADAPYPNYYEQANSLTCAKALFAELKTVNAQVLQQVLRKLETAFVDMKRKGMGFPRFKNKYGLRSFVYPQLGKSKFLNGHQIKLPQLGWVEYIKSRDIPDGFVVKQVRVVRKASGYFLMFTLECAVNVPDPVPAGYPRGLDLGLDKFVATSDGELIERPRFLSTLQRELKLLQRRLKHKNKGSNNRHKLTRKIARLHQRISDTRKDWHFKLAHKLCDDTGMLFVEDINFRVWAKGMLGKHTLDAGFGQFVSILEWVCWKRGVYFAKVNKDYTSQVCPQCDTHTGRKDLSDRLHACHECGYTTQRDVAAAQVIRNRGISGLGRSLEENACGDGLTGTGNSLVKSRRDRKKGGEVRLQPAS

SEQ ID NO: 9717 - protein, 367 aa, Escherichia sp.
MRRFAGACRFVFNRALARQNENHEAGNKYIPYGKMASWLVEWKNATETQWLKDSPSQPLQQSLKDLERAYKNFFQKRAAFPRFKKRGQNDAFRYPQGVKLDQENSRIFLPKLGWMRYRNSRQVTGVVKNVTVSQSCGKWYISIQTESEVSTPVHPSASMVGLDAGVAKLATLSDGTVFEPVNSFQKNQKKLARLQRQLSRKVKFSNNWQKQKRKIQRLHSCIANIRRDYLHKVTTTVSKNHAMIVIEDLKVSNMSKSAAGTVSQPGRNVRAKSGLNRSILDQGWYEMRRQLEYKQLWRGGQVLAVPPAYTSQRCACCGHTAKENRLSQSKFRCQVCGYTANADVNGARNILAAGHAVLACGGCQQTG

SEQ ID NO: 9718 - protein, 362 aa, unknown
  TnpB Polypeptide
VNKAYKFRLYPNNEQELLLIKTFGCCRFIYNKMLKDKIDYYKDNKSMLKNTPAQYKQEFEWLKEVDSYALCNEQMHLQSAFNNFFRKQNIGFPKFKSKKRHKQSYTTSNVNNIIRINNNKIHLPKLEWVKFKKHREIPEGQKIKSVTISKTSSGKYYISILVEYNEDIPQIELNKNNALGLDYASHSFYVDSQGREANYPKFYRKALEKLAKEQKSLSRKKYGSNNYHKQRLKVAKIQEHIANHRNDWLHKLSTELANQYDYICIEDINLKEISQHLNLGKSTMDNGFGIFRNLLEYKMRDRGKKLIKIDKWYPSSKTCRFCKKVNKELQLNEREWTCECGAKIERDVNAAINILEQGLLLV

SEQ ID NO: 9719 - protein, 385 aa, Acinetobacter sp.
MSRFIRGHIIELMPNNKQASHFAQASGVARLSYNWALREWQRQYKADKEYRDQCEYYDVAVNEMLLNRPKESKLRKHLNTFKFEKYPFMKKVTKCAPQLAIKQLGSAFDRFFNGKSGYPKPRKKGKDDRFSLSNDQFSVKGRSIKIPNLGWVKMTENLRYKGKILSAKIFKQGGKWFVSIAVELTQIEKLKPKTGLSIGVDLGVSNLATLSNGEVIPSNAPLKRQLAKLRRLNKSFSRKKKGSQNREKAKAKLSRLHYKIVCLRKNNLHQVTTDLVTRFDVIAIEDLNVKGMLRNRKLARAISDMGFYEFKRQLIYKAKQHGKSVLSVGRFFPSSKMCSCCGELNQSLTLSAREWKCLVCQTIQNRDVNASINILRYADKDLITA

SEQ ID NO: 9720 - protein, 572 aa, unknown
  TnpB Polypeptide
MSIRELHVNFTKYTQTHFVAGLNKIKSILYGLPQIAECIRLKCIRMQCAMLIMLLKNKKYIIVEYPQSNKKMISLVKSNLCNLNTLNILLFKILVQESIGNVKVFKPFWNSQCQINSRKLWLPTETDYADSHSNSFNGSWKKIKSNSWFSMKEFNPQNRNLLKTFYQSSTSSLVDKWEKDVIKKRKRKRKQKKVKCCKKIRFLPTEEQQKYLREWNNTARYTYNKTIHKINNEKQKINFYGLRDKLVPKKVIPKNKMWITNTPKEIRANAVKEVVTAYKACFSNLKNNNIKYFKMSYRSKKTQTQESISVPKQAIKKLDDGTAFKLYSRTLKSSIKLHHETILENFNSDIRIIHIKKCNLWYLCVPYDYNINSLTEIQGGNSNIVSIDPGTKTFLTLYDYNGHVYKLGNDDIKIKLIPMYKKIDKLKSLTTKRCSKTKYNIKRRIRKQIYKFKNYIQEIHYKSINFLLSRYSTILIPHLVDKRIIKNMFSSSNRRNLLSWNHSKFLTILEHQAKKYNKNLVVASEEYTSKTCGNCGNINYYLGNKDIYCCNSCKVKIDRDINGARNILLKNL

SEQ ID NO: 9721 - protein, 426 aa, unknown
  TnpB Polypeptide
LTKAERIKQTRLETNQKRKEQIPVVYQLKVNLNSLSKKDRQRLFFLFSEAKWLYNYIVADIDSRLKYETYKLSEVEIKAGDKFETRPIENLSSQMRQAIVERIKQSLYALHKSKDNGNKVGELKFKSFVNSIPLKQYDVTFKFTNEQKTKVKLQGLEKSIRVLGGHQIPKECEIAKAELVRKASGIYLHATCYIDKSLFIKTWENRVNRKQVSKPREWKTFNQAIAIDFKPTGVVLSNGLKIEWKIEETPRLKKLQRTISRKQKGSKNRQKVRVKLRKEYEHITNVREDIVNKISSLLYRYDTVIYQDDNIHVWHKGQFSKSIQTSAVGEIKRRLRNSLRVSTVLIDRYQPTTKTCSQCGNEQEIELSDRVYRCAICGNEMDRDLNATYNLLKLVGLDRSEVRPVEHETTVKIFGANPKVLISLVQ

SEQ ID NO: 9722 - protein, 400 aa, unknown
  TnpB Polypeptide
LHFSLPFVIPSQTKETVSVTRKIRIFPKNKSEIFQLLSLARRSYNFAIEHFKETSYKDQLKVIELRRSIKQKVKEEWTDKLYRAEVAGEAVRHAFNTRQSIIRKRKRGLKCDYKFQSIKQTKQSFVEQRLTKKFMGRFYITEEIPEFSFGRTTVISFEYGRWFVNALEKIELDQGAENQGLGMVAIDPGIRTFATCYNGKVVHKYGKNFFGEKIMPLLLQVDKLLSKRKLFLNKYSKKENRNLFFFDSIRYFNKKIYKLRNRIDDLISDLHRRVAYDLVQKHDIILLPKFEVKGMIKKFHRKIGTKTVRSMLGLNHYKFKQVLQWMCKKYNKHFVEVNEAWTSKTMSWNGFIDENLGSKKTISDGKISVDRDINGARNIFLRAFSVASTDIRFNSCDCCG

SEQ ID NO: 9723 - protein, 139 aa, Symploca sp.
VLVLEYKAVVKKGQAIAIDEAIRTSQFVRNKVLRYWMDNRGIGKKELYQYNTHLRAEYQFVNHLNSHACQASVENVERAIKRFFANCKHNKPGKKGYPKFKKHSRSVEYKQSGWKLHPSKRRINFLDKKGIGTLKLLGK

SEQ ID NO: 9724 - protein, 326 aa, Streptomyces sp.
LDSSAVTWTERYGDRVATERAQEKRQFGHRARLALTPAQIRLVDAQAHAVRTMWNLLHDWWTMLPKGKRTLAAADAAIRQARRDIDWLVALPAQAAQAVLKTYFQAWKNCWDGRAEAPNFKARFRTVMSLEQRAAHRKSFRKPGQETSNRLKRTYDQIASLRATAKRRASDWQHRTTTHLARTYGVIVVERLDIPNMVRSARGTIENPGKNVAQKSGLNRSISQEAWGRTVTMLTYKAARQGGTLHKVPAPGTSRRCSMCGFTTPGSRESQAVFVCKNEGCGWSDNADRNAARNVLHLYRMSHALVPAAGRAVGRRPRGVKPATAR

SEQ ID NO: 9725 - protein, 268 aa, Escherichia sp.
  misc_feature (198)..(237): Xaa can be any naturally occurring amino acid
VKRLQAFKFQLRPGGQQEREMRRFAGACRFVFNRALALQNENHEAGNKYIPYGKMASWLVEWKNATETQWLKDSPSQPLQQSLKDLERAYKNFFQKRAAFPRFKTRGQNDAFRYPQGVKLDQENSRIFLPKLGWMRYRNNRQVTGVVKNVTVSQPGRNVRAKSGLNRSILDQGWYEMRRQLEYKQLWRGGQVLAVPPXXXXXXXXXXXXXXXXXXXXXXXXXXXXXXXXXXXXXXXXSGDSLNVAGIHVLQGVEDVNKQVELTPRPGF

SEQ ID NO: 9726 - protein, 338 aa, unknown
  TnpB Polypeptide
MRRIKETTVVAYTVEKGTPDEIVFNIFQRINTGGTILKPQEIRQALYQGKATILIEKLAKCDEFLQATQNAIRSDRMQDREYVTRFIAFTELNFEKEYRGNIDEYLIKAMKLVNTYDDNKIRKLEKRKRRLQRSISRKYLKNKKGESYCKTSNIIKSEKKLLKIIKKLTNIRHNYLHQTTTEIIKRKPSFICIEDLSVSKMMKNKHLSKSIQQQNFYEFRQQIEYKSKWNNIKLIIADRYFPSSKLCSCCGDIKKDLKLSDRIYKCKCGNIIDRDLQAALNLKKYGEDVLKFLVNVYMCTNTLVRNLRLWRVYKIVSRNVSMFSKTYSNEVGMKHKSL

SEQ ID NO: 9727 - protein, 412 aa, Firmicutes sp.
VTKTEQIKKTLQETRQRREAQKPVVYELKLQNLTKKKEGLLKRAFLEAKWLYNWLVSDAERLNVPANKINVVEVKAGEVLEQRELTVLGSQIKQEIADRLRDNFWALGKLKKNGHKVGALKCKRYVNSIPLKQYGITYSLDFARNRVRIQKLGKFRVLGLHQIPADAEIANAVLVRKPSGYYLHVTCYLPKDSYAPPTKIDKDVGIDFGIGSKLTLSNEIKIDFEIHETARLKQLQKKLAMTQKSSKNREKIQLLLRKEYEKISNRRRDAQNKVLAFLRCYRTVVFQDDCVKGWSVLFGRQVHSSGIGGLKSRLRTSLETAVTVERTETTTGECFACGKKYRLSLSDRVIGCECGWKCDRDVNAALVILRKGLGLRHEQAVGLDRPELKPLEREAAARILGSNPYIRVSFSR

SEQ ID NO: 9728 - protein, 361 aa, Firmicutes sp.
MLVNKAYRYELKPNRNQLVLLKKHAGCARFAWNWGLAERIRLWEQERKRINAIEQHRELNRLKKTDFPWMYEVSKCAPQEALRDLDRAFKNFYEGRANFPKFKKKGIHDSFRLTGTIKVFPKHVQLPRLGKIRVKEETVKFKGKILSATVSREADRWYVSLAVELETPDPLPVQGEPVGIDRGIAHFAILSTGEKVAAPKSLEKNLKKLCRLSRQLSRKQKGSKNRKKAALKLARLYRRIGNQRRDFLHKLSTWLAKTKPVIVIEDLAVKNMMRNKHLSRHIADAGWSEFRQMLEYKTKWYGSKLVVAPRFYPSSRMCSKCGHVLPELKLSTRNWVCPECGAVHDRDVNAAINLLQCLNSA

SEQ ID NO: 9729 - protein, 709 aa, Streptomyces sp.
MKMLPRQQPASAPGEDRRFRGPNKAEPWRREKDAAASVIRLPLVADDPGTRRRVELLFGAMWQVKRALQRDARAVVDAYWAGDVRRERDAKAWRAELGLSRTGLEHRAYAHVGRSRWLGDHVSKALAMHQADEVWIGVARHLHPDASGRRAGRPRTGSWWEYTRIPGRARSHTVERKWETFRLHGTLTGHLNAFRHPALPGHITTPAQAAALPPGTSVLAQPRNLPALSRPTGCIPTGAVDDRGRARTRVASWFDHTGPLSVVFASGPNSGDGDLVLPVRLPQGAGRWSYLAHYLSDPAGWHKVDLVRRRDATAPGGWTYEAHLMVLTPGYASPATRARRIQAAALGRVGGVDGNVSNLAVVSFPASGDPDHGPVGVDTITLTEAEQHALMVRRRKAKGRQRALDRSRRSANPAQYRPSRRQQQRDERRHTAGLPPRTTATPAGPRRTTTGKPTQPYCRDQLSNSYRTLRARHAMAAAREAEAKHHRAKKTAAALVAVHGPNLTIEDCDIRTWFRLWGRACSATTPGRLITALAAECTATGGRLLRASTFTTALSQHCLCGRRVPKSLRDRPSLRPSGRRMRAARRPGPGLRRPGRLHHPRQPSRPRHRPPGPHARPGRPDPLHPRAARSPVRVNRTEVRALGPDPRGSPHSGDLHPWTAGLCSAKRRKCTVATPDETRPTPKRPKAHAGTTRPHTALPRTTPRLRDSS

SEQ ID NO: 9730 - protein, 533 aa, Richelia sp.
MARSKTPSFVTELPLKVSSKQEKELLARLQAARQLYNCCLGEALIRLRQVRNSEPYKQAKNTKDKEQRIELYQQADKENRFTKYELQSFATLTSNNSKWMSDKLGAHEKQTVGTRAFNAVKKLQFGQAKKVRFKVASRYRSVEGKSQSSGLKWRVIEQKRPNRIGKAKDVRNKIKCAKYALIWNGLELEPIIDLFNPVIAHGLNSPVKYCRILWRNVNEKRRWYVQLINEGLPYQKESNYLGEGIVGLDLNISNVAFVGDNKAGLLPFVDKVPTFEKEIKAAQRKMLRSQRMANPDNYEPDFDAKVGNRIVRNKGKVKQGKRQWIKTRNYRRIQAYIAELERRKSSYAKSQNRNLANEILRHGSIIKTENVSVKGWQKRYGKAISAKSPGFFQSELKRKVEQTGGKFINFSTKKTALSQTHLDGTRIKKSLSQRVHEDVTGFRMHRDLFSAFLARHVNDDLLSLLDAQNEYPGSEPILADAWKLYQQTRSKVGASEIKSSHCSSDELSHKSVTSSQIVNKDDKLECMPESQIL

SEQ ID NO: 9731 - protein, 425 aa, Mycobacterium sp.
VADTARVSELMVVKRCVKYPLSPSAAQTQMLAQQAGAARALWNLIHAHHTFHATSKRWPSWSDSDAAIRQARKDIDWLAALPAQAAQQVLKAYKQAWANYWNGSHGRPTWKTRRARCAVDVPQARDLNITKLNTKWATAAIPKVGTVKVRMHRGLPERVTGARVVREATGWMLVVRGENQLVNPRRRRADRGSVGIDRGVVHTLALSDGSFLDQPATLAPGEHKRLYRLERKAARQRASAPRRSKPSGRLRRTYSQIAGLKACQARRRYEFAHQVSAALVGTGAAAFVVEELRVKNMTHSAKGTLEEPGVNVKQKSGLNRSILDQGWTQFLTLLTYKADQAGARVIAVRPHGTSQTCHRCGSTAPGQRENQAVFRCADPTCGWTGHADTNAAIVIKQRGQEVALQDVEPNATRQATKRQSPKTAA

SEQ ID NO: 9732 - protein, 578 aa, Rhodococcus sp.
VGEHESGFAVARQFSVTTRAHMAVDDATGEPIGLDDVDTRVGWLLDLITAAGAELVSRLWQPATFDVLAAGRDRQDRRLPAQGHVAAARLGWNPTYPDGVYVPSRVTRVVTTHVLATLRTLTYGDTAIASLSQRFDPVTGVVAPPTGSADHVPPGFARGVRRQLLAHAHRTGGAPAGRVRITDLQDPPQTSAMARLSAADRQLAQITVTGDELVLTVKLPTNPAPAGRAQWRRVRLTAAIPAHLHGRAIIGWHLPTLVLDHRGLLWRCAATELVPAGDPRSATVAVGVDWSPSTLGAAAITAENPEGLSSDYRGFTYDDRGLGIKLARLQAEGQLLHRKAARLTRLAATAPPEVRAELEAKIAVLDAHRTAVGAKRGKINRELAFHFARQATDYAVAAQAQLIAVEDLTTLETRGHGRVNNNRAAQSARRQAAAALAHTAAGVGITVVSVPARGSSALCPGCDEPLARPGGYHDAWCPGCRVGGNRDHVAGVNLAKRALLGRNNVTRWRGQLPAVRGAEHAPVRPSRDENAPTPRRPRHRRVPQPAHRDTAGGGDSETACSCTTSVGVGHGQTHTTAR

SEQ ID NO: 9733 - protein, 422 aa, unknown
  TnpB Polypeptide
MKQFISYKYRIYPTEDQQVLLSKTFGCKRAIYNHYLEIQETRFENKEKNLSHFDINKDITKLKKEKEWLREVDINALQAAAGDLTKAYDNFFKSVTGKRKGPKVSPPKFKNKHSRQSYRTRNVRINEDGTLRIPKLKSVKAAIHRKIPEGSVIKTATISRNPDGRYYVSILVETEVALKPMTYREVGCDFGLKDLLIMSNGMKFKRPDDLPNIARTKQLLKAKQKQFARTEKSSKNHDTLRRQVARLYSKSTRQRNEYYHLVSRYLVDNYDSIYVEDLSSKNMLQNRKLSRAIHEVAWTTLANMISYKANWAGRTYHRIDRWYPSSKTCSSCGHKLEKLDLGTREWTCPDCGTHHDRDLNAAMNILQVGQADCYGEAIKSHAIGDLGFLIPMALQKMTSKIERSSTMLVGHGSGQATSFKTW

SEQ ID NO: 9734 - protein, 330 aa, Caballeronia sp.
VLPFKAHRAYGIANTIVVREVAGQWFVSLCYAHESAIVLREPHELAYELNGLDDGAVQQVTLGIDRNVRDNCIATSEGRQYRAEAIVLERMRRKEVGAKHYQRRIARAKKGSAHRRKRVARLARKKAYARRARKDFAHQVSHGLATSGAQFFVLEDLGIQGLTRAPKARRDEASGKWLANGARAKAGLNRSILASCWGSIHRTLAYKAARRNKLVGLVPAAYTSQECSRCGHIHPENRQAARFVCQRCGFEAHADHNAALNIKARGIELLRGGEYASVKTRKRVAFRRRDERAQQSTERNTTGGRPAYACGGDGPHPAHRIERTQDRVAA

SEQ ID NO: 9735 - protein, 372 aa, unknown
  TnpB Polypeptide
MLKAIIYELKPTEAQKQAFRKACGCARYVYNKALAYKKERYEKDGVSLSKYDIDKMITVWKKENTFLSDCPVHALQQKVHDMCDAFGNMRKTNAGFPKFKKKGRCRETFRVPEPCKIDYGDWTCKIAKIGAVKIYRGHNKKIDHIHSYTIEVKPTLDRYFISILYEDHAGRRTTPDETTHCGIDVGIKTFATLSNGEVFENQKYLKANLRKLRVLQRSAARKYKRGVKTEEQSNNWRKVQKAIAKLHLHVANQRQDYNHKVSRYIADNFYHVSVEDLSVRNMQKNHKLAQAISDVAWSQFMTMLQYKCCVLQKVDRFYASSQTCSTCGHKNEEVKDLKLRHWTCPVCGASHDRDINAAKNIDREGLSLLSEK

SEQ ID NO: 9736 - protein, 415 aa, Clostridiaceae sp.
VYITYRYRFYPSKWQAEYIDQKMEMARKTYNQLIHWYLQQTTDVQNSMRRAHSSVSGSFSDDEDASIADSSNEVPIIRNVNQHLIDHFLTEDTRCSLVDRTIVLHAIKTFDRNRIATQEHQGIMRFKSIDRKQSCTIYARELSLSIDGPKLHTTLLGTCSITMTRKPIGRLLLATFSRATSGKYYISLLMKKRDTQKNIRKTLSKQSIRIVGIDVGLSHYLTLSSGFHVKNPRFMDRQLKAIKRDHHRFSRAQPGSRNQRKKKRRLGVRYEHLNNQRKSFLHRLSTQLIKDYDVICIETLDIEGMKRQRRRSRQISDASWGQFIEMLTYKAKWNGKVIMKVPHHLPSSKQCCRCRYIKRDLTLSDRHWRCPQCQTEHDRDTNAAINVLIAGTKQLLRTYPSTDPKALKPALSDQR

SEQ ID NO: 9737 - protein, 278 aa, unknown
  TnpB Polypeptide
VKQGQKLGYPKFKSRHHSKESYKSKCVGTNIKVLDRAVQLPKLGLVKCRISKEVKGRILSATISQNPSGKYFVALCCTDVEMEPLPTTGAVIGIDMGLKAFAITSDGVEYPNHKYLTRSQKKLAKLQRQLSRKSKGSNRREKARIQVARLHEHVANQRQDMLHKLSTSLVRTYDLIAIEDLTPSNMVKNHKLARTISDASWGEFRRQLEYKAAWYGKQVVTVDRFFPSSQLCSACGAQWPGTKDLSVREWTCPKCGAVHDRDVNAAKNILNEGLRLLA

SEQ ID NO: 9738 - protein, 152 aa, unknown
  TnpB Polypeptide
MGGKNREKARKRLAKLHRRVARVRADFQHKTSRRLVDENQALIFETLRIKNMMKNHHLAGAIADVGWGEFMRQCEYKAKQKGKVFVKIGTFFASSKTCSACGHRLQTLSLATRDWTCPHCGAHHDRDVNASLNIKQEGIRMLKAAGLTVLRS

SEQ ID NO: 9739 - protein, 528 aa, unknown
  TnpB Polypeptide
MQMKEKSVTSKTKQVNASMTLNPIDVMEQPLQSSAIAELVAPSKKTTLQDKSNLCKSDTQKLKQSKTSAVDSTSKGKDCKPYWSDLCAVISSRLLLPVETDCADSDLSYSSLWQNKTVEQSWFLTSLFTAQKPNSQPIFLPSFTSSVAECTDLEATARKSRKIRLFLNPDQKALLKQWFGVSRFVYNTTIKYLQEPKTKANWKAIKTGILQSLPDWAKPVPYQIKSIAIKDACQAVQKAKKDFGKDGKIKKCKFRSRKDTKQSLYIPKTAIKDCGIYYTILGQSKLKEALPKDFSDGRLTLAYGEYYVIISEEVQPSLADNQGRVVALDPGVRTFMTFFSEQSYGWLGNDSNLRIQKICFKLDKLISKMSKAPSAQKRRFRKAADRLKAKIQHMVKELHHKTAKFLVNQFDVILLPSFETSQMVSKSRRKIRSKTVRQMLTLSHYQFKKHLEWKAWESGKVALTMVNEAYTSKTVSWTGEVKKIGGSRIIKDADGNRMNRDLNGARGIFLRALVDTPWLREHLDLCVC

SEQ ID NO: 9740 - protein, 279 aa, Streptomyces sp.
VSTHVKRAYRYRFCPTDAQAAELSRTFGCVRKVYNMALAARTEAWARQERVNYNATSAMLTVWKKTGELAYLNEVSSVPLQQTLRHLQTAFTNFFGKRANYPRFKSRKKSRGSANRARARLKVAKIHARIADRRRDTLHKLTTRLVRENQTIVIEDLTVRNMVKNHRLARAISDAAWSEFRSMLEYKAQWYGREVIAVDRWFPSSRLCSACGTLQDTMPLNVRTWTCDCATTHDRDVNAANNLLAAGLAVTVCGAGVRPQRSTPDGQSATKQKPSRREP

SEQ ID NO: 9741 - protein, 608 aa, unknown
  TnpB Polypeptide
MYTDGTPLTAEQVEYPDVVAVDLRKLPSGTKQALWRALQLQSRAYNWGVEHALGLHNAGEKIPSPRVDSGHLTLLRRHPENRKGGLRLQRGGFYQGVNAAKKWSKHRRSLTRGFAISVERVEITAKRLAETENSLPSDARDVLARLVETASEYASASSALVSELEGHPDLSHASDTVNAEPVESICEKFHARSEALVEEHKTLVPEARQQVTAHARNGACPKEVKALRSAVTKNANAVKKHDRSIKPVERHLVKGVKRLFRSRKDTERASGPALVFHDRCRIADGELVLPCGISLRLPRDRDGKPFAVPARMKWGGAVHVVDATDEAGRVTRRTKPRHRKYRVHFLCKSYADAPTEPTDRSQTLGVDWGIRNPLVCSDGTSYPKYASSQQEDQSRKRHHRSKQLQKSMSQKQEGSRRYRKQKRQRNKLIVKNTAVKVNQQFHNAKHVATKPGVRSVAAEDTKAKNMTKSATGSKAFPARSAGKRGLNRVLAETAPARMLRFLARAMVKHSVGYVPVYPAYTSLTCFVCGKKGTRETQARFVCSCGNRAHADLQASLNINARGHPNLYPPTGGGRDSRRKILDDAMGIFERSLASTEVSRTNTPVNPGI

SEQ ID NO: 9742 - protein, 398 aa, unknown
  TnpB Polypeptide
MANSEDTTIKTFEFKLRANKLFVEASERELEHSRQIYNAALAERISCYQVTGASLSYNEQSRHLTEARALPEVKSHLRTIQQDALERVDEAFKGFFRRVQNGEKPGFPRFKGKDRYHTFSQKYEKVRPCPIKGDKLTVPGVGTCRVRLSRPIEGQCKQLRITRRVDGWYALLVCEAPKPEPMPPTGQTVGVDVGVTSFATLSNGEEIENPRHLKSALENLQRQQRRLSRRQKGSRRRAKQRIKVAKAHLKVSRCRKDFHHKVSTDLVRRFDAISVEDLNIRGMVKNRRLARAISDVAWGSFFTMTKSKAENAGRTFERVDPRYTSQRCSNCGHKQKMPLAVRVYECGKCGFVIGRDHNSAITIDRAGQARIYARGERQRSMKRERVSRTQLEPQRGGN

SEQ ID NO: 9743 - protein, 400 aa, unknown
  TnpB Polypeptide
MKLTDVVLVEGDYKTLEELAKITNGLWNKAVHLEKERLKEGKFAFYAELCNRLKEDPLYRLLPSQTAQAVLQKVDGALRSYIKLRKKDPRARIPGYHRPKTAWIVPYKAQQIKCEDDALKLTLSETYRQEKGLRWLTLKTYGRRHDGETKYLELYPRNGVWFASVVSEVEEPELTETDGEIGVDPGIINLAATWNGQNSEIYKGGAVSATLRYREKENGYLQAVLATHGERTSKTKKELNRGLTGQARHAIHALTKTLVEKAVREKKGIVAGDLTGILDQKRGRKANQKLHQWMYRLMLSQLGYKCRLAGVPFRIGSERNTSRTCVACRVAHRGGRVHRGLFRCKLGGQYNADCGGAFNIGGNVSPIRRIGVVGKLAGPVVVRWNGHMWLSSDEANSLNP

SEQ ID NO: 9744 - protein, 379 aa, unknown
  TnpB Polypeptide
MILTYKVKHQLDFSVQLKQAKQVAKFAIRNRDKLSSKHVSHIGLKSCISNQILRKYGCNKKCKKVKRVKLIIPNQGIKYSEGVVNIPCLSVVFPFDKQCQKVNQIEIDSTYYYVAVEIKEEPQYQVEGWVGVDRNTNGHCAVAACTKTSKVLKMGKKAKHTHEKYRSIRKKLQRLDKLKKLKTVKRRESNVVRDMNHKVSRKIVNYAKENRCGIKLEDLRGIRKNRKQAKSFKVHLNSWGYYQLGQFIEYKAQLAGVPVQYIEPAYTSQRCHKCGRLGDRNGKAFKCPHCGHASHADVNAAWNIAEKLLAEPKAEHCSKSVSPIAKAMGVYSQRLHQEEDWCNGSTDTPRLALVQMRPTRNPTALAVGGCQLYHAIMGL

SEQ ID NO: 9745 - protein, 413 aa, Geitlerinema sp.
MKARHRHRIYPNIAQRRMLARTFGCVRVVFNDALHLRQEEYQANGQTISSTELQKRLITQAKHTAERWWLADVTSIALQQSVQDACLAFKNFFQSLKGQRTGRKVGFPRFKRKSNAQAFRLTRGGFKLRDNGKLYLAKIGDVKVQWSRELPSEPSSVTVIQDVAGRYFVSFVCEVEPVRQPAPTDGIGIDLGITTFATLSTGEKIANPRILQRQLKKLRRLQQSLSRKVKGSKHYQLARKKVARLHARVKDTRTDFLHKLSTRLVRENQALVLEDLNVSGMVKNRKLARAISDAGWRQFRALLESKSIRYGRDLQVISRWEPTSQRCSCCGQIGGKKPLKVRAWTCLYCGAEHDRDVNAAVNIKACIERSRNAAGGHPEALNARGGLQKTGKPAAADEARTRLEVEQLSLFAC

SEQ ID NO: 9746 - protein, 375 aa, unknown
  TnpB Polypeptide
VAVRSYRYRIEPNKTQAALLSEMLADFCQLYNAALEHRILAYQKGVSIKCNEQITSIPPIRRDLPHQGRWSATAQQQVMRKLDKTFKAFFSRCKRGQTPGFPRFRARDRYHAADFRVGDGMTIRKTGKLGFVGIPGEIKVRWHRDLPSKPASAILSRNAGKWYVIFHVEVAPVERASPESVGIDMGLTYLVALSTGETVKRPNLTKRNARKLRRLQRALSRCQRRSKARRKRKAALSRHQAHIASSRRDFLHKLSRDLVNRFGRIAIEDLNIKGLASGMLAKHVNDASWAQLAAMLAYKAESAGCEFVMVDPRGTSQTCPDCGTITVKTLAEREHRCHCGCYLDRDVASAKVVHQRAFGFCPGTGPGSLSQRVAA

SEQ ID NO: 9747 - protein, 392 aa, Archaeon sp.
LQTTYKFRLYPTHEQEDKLQWVLDKCRYVYNILLSRLNDQKIIDKGQLQGDITDLRRIETELKDVYSKTLQYENCRLFSNLRALSQLKKNGKKVGRMRFKGKGWFKTFTYNQSGFKVIEREVRYDILYLSKIGNIPMVMYRKIQGKIKQVIVKHSASGKWYASIIAETKEEIKPTTNTKKVGIDLGLNSFTYDSDNNKFEHPRCLEKSSHKLSKERRRLSKMKKGSNNRKKQRTRVARIYEKIVNQRNDFLHKISRYYANNYGFVVIEKLQIRNMVRNKHLAKSILDASWSKFIQMLDYKVERTGGQVVKVNPKNTTQKCSHCKRIVKKSLSVRIHKCKCGFVVDRDYNAALNILKKGIGQELSEYTPMETEPMPIMVSSSVKQEVPRVSWE

SEQ ID NO: 9748 - protein, 383 aa, Methylococcaceae sp.
MTEPKPKHIDHIALALGANRFVWNKLLAMNLYRLANGLPILWYFEMAWFIQLWKQSDEYSFLKGAPSQSLQQTAKALDRAFRDAFDKNQPFKRIPTFKKKGRNEAGIRYPQGFSVDENNCVFRLPKLGRVKYRNSRKIEGTIKNVTISKKYGKYIISVQTELEVKQPRHGSTSAVGVDMGIAYFATLSTGEHVIGKNSFKQMPEKLAKQQRKLAKKTKFSANWHKQKAVMTRLHTRIADTRKDFLHKASTRISKNHAMIVVEGLKISDMTKNSKGTADNPGKKVAQKSGLNRSILDQGWGEFRRQLEYKQAWRGGILLAVPPHHTSQTCPCCKHASKENRLTQAEFVCVECGFSENADIVGAINVLARGHVLLAGNEPPGRRG

SEQ ID NO: 9749 - protein, 332 aa, unknown
  TnpB Polypeptide
MFVDFAMKSFFALVKKKKKEEYDKKVRLPKYLDKSKGRMTAHYERGALSFKKRKGYIHLSKTEIFIKMPEDLNENDIKFTRIVPGCGKFTVEIGYEREPEPQVMTGSYASIDPGVNNLVTMVDTVTKNPVIINGRPLKSINQWYNKRIAEMRSETERLHGKYWSHKMSSVTNRRNSKIKDYMHKASAYIVNHLVSNRIGTLIIGEIKEWKQDTNMYKVNNQNFVCIPFEMLKSMLEYKCRIAGIEVVRQDEAYTSKCNFLDNEEIKKHEKYMGSRPKRGCFKTSSGRKVNADVNSVCNIMKKYLLKVAGNCKNLLHELVEVFSTPCLKIKTF

SEQ ID NO: 9750 - protein, 323 aa, unknown
  TnpB Polypeptide
MGKNLSVTPARYKSEFPWLKEVDSLALCNAQMHHFFHDVSVGFPKFRSKKKPVKSYTTNCVNGNTVLQNGRLKLPKAGWVRIRQHRKIDECYQLKGATISQEADERYYVALLYSCEEPVHETRKAETAIGLDFSMKELYVDSNGNHATYPHFFQKARQKLAREQRRLSRCEQGSNRYKKQKKKVARIHTRIAHQRKDFLHKESKKIANSYDIVCIENLNMKEMSQDMHLGKSVHDNSWGMFTDFLTYKMERAGKKLIRIDRWYPSSKTCSCCGKVKEDLQLSDRIYECVCGNRMDRDENAAINICREGIRISGMMLDIEKKIS

SEQ ID NO: 9751 - protein, 421 aa, Marinithermus sp.
MGAKNEKIKASLAETRARRENQRPRTFVLKLQNLSKNKERTLERAFLEAKWLTNWIIADIERLQLPLNKVHEVEAKAGDALEPCKLRVLGAQVKQRIGRRIQEDLRGLHALKQNGHKVGRLGFKRRVDAIPFSNQAFTLRSRGKENRVHLQKLGEFRALGLHQIPQKAEVANAVLVRKPSGHYLHVTVYVPKDEPKPLPDPGNPNQATDFKAVGVDLGLKNQAALSNGFVLRWRVRETDRLKKLQRKLSRKKKGSKNREHVVHRIRREHEKLRWIKQDIRNRVLALLRQYDLVAVQPDRIKGWQALWGGKVQGAALGGLLEALRTRLPTLVATERNAPTTRTCSSCGHLNPKVPLDRRVFTCEACGFRIDRDLNAALNVLTMAWPAARALGLDRPEVTPLEWEAAGRILGPNPRIRLSHAT

SEQ ID NO: 9752 - protein, 394 aa, Marinithermus sp.
MYYTIFVQTLTVRCTLKPAPEQAEALEATVQRFAEGCNHALRVAKRTGAFRRFALHRLVYRDLRAMGLAANLAVQAIARVARRKGERAKHYQPTSVAYDQRTLSLRLADETVSLTTVKGRLRIPLKLGNYQRHLLRKAKSVQGGVLTKGPKGKWYIHLTLRVDDPEVPEGSSRGGRIVGVDLGQKALATLPTGELFSGGFLKSKRLHYLRKRAEVRSKLDRPSERTRGVKRLWARLSGREARFVNSALHALTRRIVDLLEPGDVLALEDLKGLRSRTTQRGKRARHLQNLWPYARFCFFLEYKARLKGVRVVYVDPRHTSRECPRCGHVSKVNRRSQALFRCEACGFQHNADWVASVNIARRALAQGAGSAGPGHSQLALVLGHRLKHLHLPAS

SEQ ID NO: 9753 - protein, 392 aa, Marinithermus sp.
MIRYSGFVQTLTVRCTLKPALEQAEALEATVQLFMEGCNYALRVAKERGEFRRFRLHHLVYKDLRAMGLSANLAVQAIARVGRKKGSRAKFYQPTSVAYDQRTLSLRMADETVSLTTVKGRLRIPLKLGNYQRHLLRKAKSVQGGVLTKGPKGKWYIHLTLRVETPEPPGGGGRVVGVDLGQKALATLSAGHRFSGGRLKSVRLRYLQKRAEVRSKLDRPSERTRGLKRLWARLSGREARFVNSALHALTRRIVDLLEPGDILALEHLTGLRGRTSKRGRKGRHLHNLWPYGRLRFLLEYKARLKGVRVVYVDPRHTSRECPRCGHVSKVNRRSQALFRCEACGFQHNADWVASVNIARRALAQGAGSAGPGHGQLALVLGHRLKHLHLPAS

SEQ ID NO: 9754 - protein, 334 aa, Frankia sp.
LQQQALRDFATAMANLFRGSHRRPSWRKRGRSAGFRIVAVKPTDVHVLNRRWSAVRIPKVGWVRFRRSRAVPEARSYRVTRDRAGRWQVAFAAVPDPIPGTGTGTGTIVGVDRGVTVSAALSTGALLHCPGLRPGEQARLLRLQRRLARAKSGSNRRTRLKAQIGRVKAREVDRRKDRVEKTSTAFARRYDLIRVEDLPIGNMTRSARGTLAEPGRNVRQKAGLNRSILAHGWGLLVRRLEQKAPGRVEKINPAYTSQTCNTCGTRDRQARESQAAFRCRACGQQANADVNAARNIALGHQWATTWVTARGGDADRRPVNREPQRCTPPLPADV

SEQ ID NO: 9755 - protein, 393 aa, unknown
  TnpB Polypeptide
MIKAYKYKLNPTNSQKIFFEKSFGCTRYIYNWALEKKIKAYQNNKERVSWIDLCKEMTWLKKEDDTIWLREVSNQSLQSSIRHLESAFVRFFRDKKGFPKFKSKSSNNHSFQFVEQVSIDFETNRVKLPKIGWVKFFKNRTFTGKIGTVTVSKNATGKYFISILVDDGKELPAKSPVNHATTIGIDVGVKDFAVCSNGDTYANPRFLEKAEKRLKVLQRRLSKKTKGSNRRQRARKALARQHERVSNQRNNFLHQVTSIIVSENQTVVIEDLNVDGMLKNHCLAKAISSVSWNEFFRQLQYKCEWQGKNLIRIGRFEPSSRMCLCGHVNKELKLKDREWDCPSCGRHNDRDLLAAINIKRFGLKKQNTPSVGGEEDVEWSAVADTVKRQYIKV

SEQ ID NO: 9756 - protein, 516 aa, unknown
  TnpB Polypeptide
LKKEADIENQVRATRISVGFSNYSKVLDAKKTDAFVKDLKNKMSAYILENIQFLMDDKKEFIRTYNKFNSSILFAWETQTIFHDIVGFYENRIDQIRSKIDTSVQIGYNKKYYKRQTTLKGGIVAKKGDIKDFSIKKKYSDLGKIVKLLTFLDTENLSKYEGSKFYDSILYFQQNKHWERILKLSKTINNRAFSEIKLIEFETGTYRINLKGNEFILDETNEKFKHWFKYKNVFYPLQINGDYHKLNLLKTSKNKQVTVKVVDNRVDFIFTSDYKPKFKPSKKSVGIDINIKNNFCSTSDRQAFDYDRTYISEFINEIKELDKIGYQNISEAQKKALKKLINKNEWYFKSLISSVIKDLEKQGYTDIVLEDFNNNTFKASLISSEEFKEKYTRLIRLLRLGNIKKWMTEQAEKLGIRVHLTNPAYTSQECPKCHNIDSNNRPTQEKFKCTECKHTDIADFVSPINIKNRFHSNVLREKLHKSDNYGRFSPKKISREKLKESLSSFSTSFSKVKQNK

SEQ ID NO: 9757 - protein, 386 aa, Finegoldia sp.
MLKAFKTEINPTKEQITKIQKTIGVSRFVYNFYIAENKKMYEENKLFLSANDFSKYLNRDFIPNNKEYSWIKDVYSKSTKQSIRNAESAFKRFFKGLSRFPNFKKKNKSDVKMYFVKNNKHDCICERHRIKIPTLGWVRLKEKGYIPTTKDEYTITSGTISHKAGRYYVTCLVDMEEPKKEKLNSTGLGIDLGLSNFAIVSNGKVYKNINKTNKVRKLEKKLKREQHKLSRKYENYKKRKKGESTHKNIDKQILKVQKLHKRIDDTRTDYVNKIISVLVKTKPTYITIEDLNVSGMMKNRHLSKAIASQKFYEFRSKLKTKCEVSGIELRIANRFYPSSKTCHNCGRVNKDLKLSDRTYICECGYKEDRDLNASLNLRDTKSYVLA

SEQ ID NO: 9758 - protein, 173 aa, Lactobacillus sp.
MTKFYLSLQLGSDTAFVKSYPKTNSQIGIDLNLDNFLTDSNGVVVANPRFYRRAKESWQGRKEYLLDAKDELSKKAVIYTKQRTIKNHDLVVAEELRSKNLLKNHALSQAISDVGWRTFLNMLAYKAELYGKQFITIDPKYTTQRYHHCGSIMGQNGYKKLTLKDRKWTCPSM

SEQ ID NO: 9759 - protein, 395 aa, Gluconacetobacter sp.
MFSATRIRLYPTDAQAHCLAVQLGCARWVWNNALALSGDLYRTTGKGLNYHAMAIRLPKLKQEFEWLRDADSQALQASVQNLSRAFDNFFAKRGKYPRFKSKHGRQSIQYPQRVKIDDSRIYLPKVGWVKCVVHRDIVGKVKTVTVSRNACGQFYAAILTDDGEEMPAVSIDGKAIGIDVGLAHLAVTSDGAKFENPRHLRKAEKNLKRKQRKLSRKKKGSRGRAKARKLVARAHERITCARKDHLHKISHRLVSENQVIAVEDLNVKGIMSNHCLAKATGDAGWGMFTGFLEYKAARAGKAFVKCGRWYPSSKTCSTCGSICDKMPLSVRAWTCVQCGTHHDRDINAAINIRDEGVRILAAGAVASASGGNGRPEPRRNPRTRAVPVETGSSAL

SEQ ID NO: 9760 - protein, 414 aa, Ignisphaera sp.
MSLSMRVLATARVEAVAPEGGEALLIQFLKLYRDAVQYVVDGIWGLGDTPSEESLHKMFYSELRRLGFRAHHVSEIYKRGKEVVEGTKRNRGSKPVLKKLTARIHPLDYRIDFSAKTLRIAVLNDEWVELRLKWYKYLDKYLDGSWKPGEILVSYRNGKILVYITFHRDVKPMDSRAVMGIDINFNNITYTVIDLSGNLITIGVIPFKGLERSLHLKKLSEELQKRYPNSWRFIKWVRGVRGRWLSKAKNILMDSAHRTSKRLVEIAKEYRALIVFEDLDKLKENSNNGYKLLWEKSLWCYKRIQMFAEYKAMVYGIKTIYVNPFKTSKRSPNGEKLRFINYRFVELGDVVTSRDVIASWNIALRGLKKLKRVRGSRVLLSPDSPADEGVKTRSNAGNPEARKIYPQIFTTIHK

SEQ ID NO: 9761 - protein, 355 aa, Pseudomonas sp.
MQTTKSTKTLKVRIKDKHAPLLREWARSVNFAWNYINELSSRSIRERGRFLSAYQIQAYTNGASKELGLHSQTIQGITDEYVIRRKQFKKRKLRWRASGGARRSLGWVPFKVGAAKWLDGQVVFNKQHFKVWDSYGLSQYRFRSGSFTEDSRGRWYFNVVVDVDRKLSPGQDNIGIDLGLKTVATCSDAQVLENANFYAGMEKKLGCAQRAGLKARTKAIHAKIANRRKDALHKFSNALVARCGLIVVGDVSSHQLVKTQMAKSVLDAGWGQLKSMLEYKCENAGIHFMVVNENYTTQTCSSCQQLPASRPKGIAGLGIREWICSECGVTHDRDVNAARNILALGHERLAVGIPH

SEQ ID NO: 9762 - protein, 523 aa, unknown
  TnpB Polypeptide
VGSIRNIAHAASGVNYAFAATATWVCRSICCEHGSSIVEVGVYCWLCEPRREYREGDVVETVTQAYRFALDPTPTRRRVLASHCGAARVAYNWGRALVKARLVQRQSDLSIQVPLTLPELRREWNRTKDQVAPWWAENSKEAYNSGLDGLARALKNWSGSQHGRRKGRPVGFPRFKKKLRSRDSCRFTTGAIKVLADRKHVQLPRIGVLKAHESTRKLARRLENGTARILSATISRQADRWFVSFTVEVERSVPSSNGKATVVGVDVGIRHLAVLSTGEPPIPNPRALERSMRKLRKVNRELANRQPDSRRRYRSRLRLARLHARVANVRRDALRKLASSLATEYGTVVVEHLKMAGLSRNHRLARALTDSGMGQLRRLLTYKTRWYGSELVIADSFYPSSKTCSTCGWVKAKLSLGERTFKCEACGISLDRDINAARNLAKLAQHVAQSGWETPNARGVDVRPGLAGRTAVKREAGSGHRPDKTGTAVPARDAYHPGRQRLSGLVTALVFGLRFQPMSHLEA

SEQ ID NO: 9763 - protein, 407 aa, Lyngbya sp.
MLVFEAKLYGTKEQFAILDEVLRTATFIRNKCLRLWEDQQAKSRNDLYRYCKTLAKSFPWAKQLNSQARQAMAERTWAAISRFYDNCKSGKSGLKGYPKYKRYQTRLSVEYKTSGYKLSETKDQITFTDGFKAGTFKMRGGRDLNYYQPSQIKRVRIVRRADGYYCQFVVDQERINTKKPTHRTVGLDVGISHFYTDSDGNQIDYPQYLRQSEKQLKREQRRLFKKQKGSKNREQTRNRLGRKHLKVQRQRKDWAVKLARCVVMSADVVAYEDLKVSNLVKNHCLAKSISDAAWYQFRQWIEYLGKVFGVVTVAVRPQYTSQKCSSCGSVVQKTLSQRTHICQCGCSFCRDHNAALNILELGLRTVGHTGTQACGHDDHCTETGDSFDVSRVDEAGNPVCEDRNPPL

SEQ ID NO: 9764 - protein, 380 aa, unknown
  TnpB Polypeptide
MLVTYRYRLYPTKSQKRLLEATLETCRRWYNACLEERKTAWDDRQESVGKYAQLRKVKDHRRDNPWAAQLHSHILQVTTCDLDKAFQAFFRRIKSGEKAGYPRFRGRDRFDSFGLKEYGNGFRLDGRRLKVTGIGRIAVRWHRPVGGEIKTLRIRRRAGAWYASLSCDTRPEFLPSTGAEVGIDVGIANLLTTSDGEHIENPKWYRSEQARLRILQRRLVRRKLGGLNRRKAVRAVARQHEHVANRRMDFLKKLVYNLVSRYDRIAVEDLQIPNMVRNLHLAKSILDAGWGYFRMHLSFKAAWAGKTVVAVSPAHTSKACSFCGTLFEILTLADRWVRCDCGLSMDRDENAARNLLALGRSAWGITWPMAASVPQEAAGL

SEQ ID NO: 9765 - protein, 401 aa, Fusobacterium sp.
MKQLKAYKFRIYPSDEQKIFFSKTFGCVRLVYNLMLNDRMKAYEESKGNPDKKLKYPTPAKYKKEYEFLKEVDSLALANTQMNLDKAYKNFFRDKSIGFPKFKSKKNPVQSYTTNNQNGTVNIFENWLKLPKLKEFVKIKVHRKINGIVKSATISRNGSGKYFISLLCETEIQEMSKTNSAVGIDLGIKDMAILSTGEKIENLKFRKQLENKLKREQRKLSKRFLVTNKENRKLSESKNYQKQRMKVAKIHEKIMNMRTDFLNKLSTYIIKNHDIICIEDLNIKGLLHNHKLAKSHEDQDLEFDHRTLLHNHKLAKSIAEVSWANFVNKLEYKAKWYGKEIIKIDRLYPSSQICSVCGHRDGKKTLDVREWTCPICHAHHDRDINASKNILAEGLRIRQAV

SEQ ID NO: 9766 - protein, 443 aa, unknown
  TnpB Polypeptide
MASATDPAGTSDELVRDVAFVFVLDPTVSQAAQLARTAGVSRFCFNQGLALARQRQATKRWLGYQFAPSVAKHAPSLNYRNRLLPAFNAWRKAEQARGKYLWLDDVSKFVREEALVDVARAFENRRGSNDGTRKGRKVGPPRFKKKGRSVESFRIRQESKADGITSGIRFADPGDDTRRIYVPSLGWLKIASNPRKVRRMVAKGRFKVSSVTVSLRHGRWQISVAGKATAFHTNRRTATKRHAPRGRATVGVDLGVRTQAVAATADGQVVVEREGVKAYGTQLRKLRRASRAYARTKRGSKGREKAAAKLARIHARVVGLRRNALHQLTTELATSHDVLVVEDLDVAAMLRSGRGARGVADQTFGEFRRQLTYKADWYGTELVVADRWYASSKTCSACGQRNGELGRGRTAWVCPDCGVKHDRDVNAAVNLARWPTLELTTAT

SEQ ID NO: 9767 - protein, 367 aa, unknown
  TnpB Polypeptide
MNVLRAVTFKLKLADQDCRSLLDTMRAYTKAFSISAKWGFENRSWNKVDNHNATYKHVRQNIPELPSSLVQGARDCACEALKAVKLETHPERKPLSAMRYNQRVITVNLVRGIATISSVKGRIKATFFVPSHYRDYLTWVIKSSAISYDRRNNGFYLHVSLEHNDPEKVNNFEVLGIDRGIVNIAVCSDNRFFNSKKIKNRRAQYAYLRKELQSKGTKPAKRKLKRMSGRERRFATDVNHCISKQIVNSKHTVFALEDLSKIRVQKRRGKAFSRKLNSWPFYQLEQFISYKAEALGKHLLLVDARYTSQKCSNCGHVYKGNREGSNFRCRKCGFELHADLNASRNIAQAGISCLGRLSCQPAKCSPT

SEQ ID NO: 9768 - protein, 369 aa, unknown
  TnpB Polypeptide
VIANQLLPSFLQPRELLQLTGPIRKIGSKTKGNNNVVYSCKYHVVWCPKYRRKVLVNGVDVRLKALIEEVCNDYHIDIIEMEIMPDHVHLLMEVDPQFGYPRFKSKHDHRQSYKSKCVGTNIKVLDKAVQLPKLGRVKCRISKEVKGRVLSATVSRNPSGKYFVALCCTGVEIEPLPSTGAAVGLDMGVKSFAVTSNGMEYPNHKYLSRSEKKLARLQRQLSRKSKGSNRWDKARFQVARLHEHIANQRQDTLHKLSSEIIRQNDIICIEDLAPKNMVKNHRLAKSISDASWGEFRRQLEYKAEWYGKQVVTIDRFYPSSQLCSTCGAQWPGTKDLAVREWVCLACGTTHDRDTNAAKNILNEGLRLLA

SEQ ID NO: 9769 - protein, 374 aa, Clostridia sp.
MTENTAYVYRIYPTDAQVVLFRKTFGCCRKVWNLMLEDRQKQYALTGKSSQPTPAKYKKDYPYLKEVDSLALCNVQMDQKAAFTSFFDGRTGFPKFRSRKRGPHAYTTNCVNGNIAVYADSIRLPKAGIVKGVIHRTVPADWKLKSATVRENADGTWQVSVLYEHAPIHDPSPAASGSHIGLDYKSDGLYTDNTGHCANMPHYYRKSQKKLAKEQRRLSRKKGAKKGETPSKNYLKQKKKMAKIHRHTANQRKDFLHKVSAAITKQYELISVETLNMRGMAHGLRLGKSVHDNGWGMFVNMLEYKQNRLGHQLVKVDRFFPSSQLCSVCGIKNPAVKNLSVREWDCPSCGAHHDRDVNAAVNIDNEGLKLSLTP

SEQ ID NO: 9770 - protein, 426 aa, Natrialba sp.
MAKQVVTRTYTASIRNQQQVSDDLDSLGFSASKLWNVGRWTISRIWDEIGYIPEHDELTAYLKSHERYDDLHSQSSQRVLQELAEAFNGWYGKRRNGDVSANPPGYRKHGDDHPRSTVTFKAAGFKLDTQYERVRLSKGSNLKEYWSDFTLCEYQTCPDVDLSSVESVQQVRAVWTGDEWELHFVCKVEVDVADTPGEKTVGVDLGINNFAALAYEDGHSELYPLNCLKQDDYYFSKRIARCDDSDSEQATRLNQKKSRRRTHYFHTLSKHIVRRCVAEGVGTIVVGDLSGIREDEENGEAKNWGTHGNLDLHSWAFDRFTDLLEYKAEMEGISIEEVSEQDTSKSCSCCGRKRDANRVERGLYVCDQCGMTANADVNGAENIRQKVSPSPATDGGDRSNGWLAQPSTFLFDKETGVFAPQEQVTS

SEQ ID NO: 9771 - protein, 394 aa, Natrialba sp.
MDDLTETLTLKLVNPNTHKERKLRETRDEYQLALRDAFTQDCDTQSKANDVVVNYDLSGYAKNALKQYVPNLLDDDTYGAEELREGDHPIRFTNEGPKLDHKPQNAIEWYVKIPHHEDYHLWLPAQPKSNQREWLEALCRGDAEMGECQLIERGGEWYFHVSATMIVEQSSSVSVEEQTPIGVDIGEAALATVCHRTECGSPANPTLWSSEGREVRRLRETYFKAVKRLQERDSERLAEEYGDELWARIDDILHTVSRGIVESAQQVDNPVLIIEDLTHIREGMDYGQFMNRRLHGWAFAKLHAQISYKAKEHGIPVETVDPEYTSKECHACGEHGYRLRQAVFKCSNAECWVGEYQADINAALNSINRYYASCESHVRTDSEFSSDEKEVAVT

SEQ ID NO: 9772 - protein, 422 aa, Natrialba sp.
LDASASLWNETNYTRRQNFLEDDESIWDADTGSLEGKYKGVLSSSVAQQIIRKNSEAWRSFLSLNEKYHAGKLNEKPSPPGYWGSKDDGRVLRTYVRNDQYTIEYGERSRLEVPIGSELKDELGLNRNQRLRVEVAGEPKWSGEQNRLEIVYDETADTFRAFQPVTVPDSRLDSPLASHEAALDVGVNNLVACTTTTGFQFLFEGRNLFEQFRKTTERIAHYQSLLENQRESSKRIDRLYRKRTNRRNHAQDTLVRELTERLYDEGVSTLYVGDIKGVLSTHWSPCVNEKTHNFWAYRRFINRLEDVCEEYGITVNEVSEAWTTQMCPECGEHKGTIRHEDSLACPCGFEGHADLVASESFLRRQNTEVGSMARPVYLKWNNHNWREHHNPPSLVETTANEAYTDQSTTVGGNVAVGESQDD

SEQ ID NO: 9773 - protein, 373 aa, unknown
  TnpB Polypeptide
MHKSTFQYRLYPTPAQATALQHALDECRWLYNRLLEERKTAWEETATSVTLYDQINRTVALKAERTTLAAVHSQVLQNVATRIDLAFAAFFRRVKAGETPGYPRFRGRGHYDSFCYPGSGHRVDGNRVFLSKIGHVKAVIHRPLEGKAKTCCVRRTATGKWFVTFSCEVEDAPLPAVDSAIGLDVGLAAFATMSDGATIANPHFFRRDEQALAKAQRRLSTEPRPEKGQRATSERRRRRRVVARIHERIANRRKDFAHQESRKVVNAHGAIAVEDLSVNRMVHNHCLAKSISDAAWSMFSQCLSYKAANAGRQFIAVNPAYTSQDCSRCGHRQKLTLADRVCRCPCCGLEIGRDHNAAINIVTLGLQSLGARP

SEQ ID NO: 9774 - protein, 561 aa, Chloroflexi sp.
MARKRPSKGKHPKEKTPTFLLELPLVVEQGQTARLRAHLEAGRQLYNAILSVGNKRLRQMRADPAWQAARAIARLHKQERAAAFSALRQQYGFSEASLHEAVKALRVGWIADHIEAVLAQTLATRAYRALNRVCLGQARRVRFKSRGRGLGSLENKRNDTGLRFVLQKSEEGQHGYLLWKQDRLPALIDWKDPVVTHGLAQRMKYARLIRRPASSSQARGADASGSRYFVQLALEGKPYHKAKHPVGTDVVGLDIGPSTIAIVARQAPARLEIFAEALAPKAQQLRRLQRQMDRQRRAANPEHYDEQGRPKKRGKGSPSWKQSKSYQATRRRKATRERKLKAHRKSLHGRMVHEIVAVGNSIVTEKLSYKGWQKQYGKSVGLRAPGMFMDHLRRTVASTGGILTEVSTRRTKLSQFCHGCGQMVKKPLSQRMHQCACGVGLVQRNLYAAFLAAYLDPANPIPSCAQYQPYWEGAGVGGEARLRTAHERLVQRAKEGQVLPQSFGLPRAGARLSKSQSGPTPEPIFLLRHGRLEAWKESCEPPVLQPGELSAGHEMIRTLGS

SEQ ID NO: 9775 - protein, 489 aa, Moorea sp.
MSKKVDEAKKRSTQIVPVIGMTESVGAELLSTMKKLGIVRSESYNKLGSINHWSLDWKKAYPEVRSFRTPESLGLPSKLMEWTVSDVAKAITAQQAACTEAVIKKIYKRFSGKDNQKRRKELCKQLKTLAFLDNPLLHRLVRKEFQRGHSWVKNQIVYQQGGYSCKRLSRNTYQLELAGLRRGKRNRIIVKSNRKIKGQIRLIYNKLLQRFEIQFLVNHGTAEIPSERRSIGVDKGYTEAFYDSDGQAHGKGLGYATTAKSDRICSKNRKRGKLWALHKKLEKLDPAKSTRILKNNLTRKTENKRYKQDQSKLAAIIGAASKSLFNGESLKVFSEDLTRQFTNKRQSKAASRKLNSWIKGKMRDSLQKWANWTGSVVTEVQPSYTSQVDSRNGTLLGKRTGDNFTGFDGVVLQADHNAAKNVLDRGTDKDITRYMSKAEVQAVLLRRTARFLKGMGLSLLDAVELGWLDSKHELCSGFQATPGRDAKNV

SEQ ID NO: 9776 - protein, 243 aa, Microcoleus sp.
VIVKEAKLKHGTAEQYSAIDDAIRTAQFIRNKAVRYWMDNQGTSKADLYSICKDLAKEFDFAKKLNSAARQASAERAWAAISSFYTRCKKGEGKKGFPKFKKHYRSVEYKVSGWKLSDDCKSIAFTDGFEIGTLSIFCNNETQEDLHRLKINRVRIVRRADGYYAQFCFDADRKEQGEYSGNVVGLDLGLKFFTKDQNDNATIYPQFLRKAEKRLKKAQRRLSKKFVKGAKPQSKTITKRRND

SEQ ID NO: 9777 - protein, 358 aa, unknown
  TnpB Polypeptide
MYPTKEQEKFFAQTFGCCRFIYNKMLEDRIKHYELTGETLKNYPSQYKETYPFLKDVDVFALVGAQNALQTAYKNFFEKRTSFPKFKSKKNNKQSYTTYNNLRWNGIRIENNHIRLPKIGFIKIKYHRPIPEEYKIKNATITKNPSGKYYVSVCVEYEYEFPTPILNKDNSIGLDYSSPDFYVDSQGKKPNYPKYFRQAEEKLAREQRKLDKMVYGSHNYEKQRIKVARYHEKIVNQRKDWLHKLSYYFAETYDYVFVEDIDLRVMAGTLKLGKSTNDNGFGYFRTFVEYKMKDRGKIFYKIDKWYPSSKTCHYCNYIKEDLTLNDREWICPNCGELIYRDWNSAINILNQGFKGLKI

SEQ ID NO: 9778 - protein, 434 aa, unknown
  TnpB Polypeptide
MRRNCTVELVVDEEAEKRLRQLCDLSSKLWNEVNYVRLRMWLEKKFIDFDGTYKEFYEKYKPLIGAVTAQTILLRNGKAWKAFFRLLELKREGRLPPFMTKVSPPGFGKRNGSRALWTVIRKDQYKMDGDRIVLQGLGAVGWIEVRYEGPIYLRGKRGELKIRYDADRGKWYAHIAFEVSEKMVRSKWRQVPQQPKGNLTAGIDIGINNLMAIYVENGLAKLVNGKPLKSISYYWGKKISEYQSMLNGYGLKTSRRLRRMYAKWRGQIKNYINAKVREAVEWLYDIGVSTVKVGYPKYIAQENGDFDNNHVWTYGLLLRRIREVAEEYGIKVIYVDERGTSSRCPWHGDGCGVRMSRGLFKCTTMNKVFNADLVAAYNILLTPVTLSPERGRGNGRRPGQGLNLQEEGCSPNLPILSREGVVLEKYAGGLVELG

SEQ ID NO: 9779 - protein, 313 aa, unknown
  TnpB Polypeptide
LKEAKKTDERLREIHSQVAQEVLFRVERAFAAFFRRVKKGETPGYPRFKGKGHYKSLTFPQFGRGKGASFQDGKLKLSKIGPIKIKLHREIPGTVKTVIVKRDATGRWWAILAIEIELFQQERHIGPAVGVDAGLEKFAALSDGNIIENPRYLRKTEERLKCAQRELSRKEKGSRNREKTRRKLAKLHAKVYSQRMDFLHKQSQKLVSTCSMIAVEELNIKGMVKNHHLAKSISDASWSEFVAMLGYKAEEAGTKLVKVNASGTSQECSRCRAIVPKGLSERMHCCPHCGLTLDRDVNTARNILKRALAVGAA

SEQ ID NO: 9780 - protein, 367 aa, unknown
  TnpB Polypeptide
MLKAYKYRIYPNNEQKIQIAKTFGCCRFVYNQTLAYRKETYEKEKKSVSKTDCNNFCNRELKKEYGWLKEVDKFALTNAIYNMDSAYRKFFKEHAGYPKFKSKHESHKSYTTNFTNGNIAMDFEKGKVKLPKLKTVKAKLHRGFMGEIKSATISQVPSGKYFVSVLVETEYAEMPHKNKSIGLDLGIKDLCITSDGKKYENPKTTRKYERKLVKLQRQLAHKEKGSGNYYKKKRQIALCHEKITNTRKDYLHKVSQEIISENQVIVSENLQIKNMVKNHHLAKSISDVSWYELTRQLEYKVAWNGKQYIRINTFYASSQICSDCGYQNVDTKDLSVREWICPICGAKHDRDINAARNILAEGLRQIA

SEQ ID NO: 9781 - protein, 406 aa, Cyanobacteria sp.
MLLYEAKLEGTIDQYSRLDDAIRTGRFVRNSIIRAWLDGQVKSRNEAYKYCKILAENPEFPWARLLNSQARQAHAERAWASIERFYRNCRAQVKGKKGFPKFKKSQVRASVEYKVSGWKLSQDRRYIEFTDGFKAGIFKLWGTRDLHFYQIELIKRVRVVRRYDGYYAQFLIDHNREESKELTGRQIGLDVGLNHFYTDSFGEQVDNPRFLRKDEQKIKRLQRRLSKTQPKSKNRAKARNKLGFAHLVVSRRRNDWVCKLAQRVIQSNDLVAIENLKVRNMVKNHCLAKSISDAAWYRFREWLEYFGVVYGVPVIAVNPSYTSQKCSHCGQIVLKTLSTRTHKCPHCGFIADRDENAALNILKLALKQWANTVGRTEFQVSGEIPLCLSMETSSSKGTQRKRKSSQ

SEQ ID NO: 9782 - protein, 162 aa, Moorea sp.
VFAVREAWPTASDLTQPIRNKRQSKAVSRKLNSWMKGVMRDSLQKWADWTGSVVTEVQPSYTSQIDSRNGTLLGNRTGDNFTGFDGVVLQADCNAAKNILARGTDKGISRYMNKTELQAVLLRRTARFLKGMGLSLLDAVELGWLDSKHTKTKAFKELLNGI

SEQ ID NO: 9783 - protein, 372 aa, unknown
  TnpB Polypeptide
MLKSIKYELKPTEAQKQAFRKACGCARYVYNKALAYKKEQYETNGVSLSKYDIDKMITVWKKTDTFLSDCPIHALQQKVHDMCDAFYNMKKTKAGYPKFKKKGKCRETFRIPDPCKIDYGNWTCRIAKIGVVKIYKGHNKEINNIHSYTVEVKPSIDRYFISILYEDHTERRATPNESTHCGIDVGIKTFATLSTGKIFENQKYLKGNLRKLRVLQRSAARKYQKGVKTEAQSNNWRKVQKAIAKLHLHVANQRQDYNHKVSRYIADHFYHVSVEDLSVKNMQRNHHLAQAIADVAWSQFISMLQYKCCVLHKIDRFYASSQTCSVCGYKNEEVKDLRLRHWTCPVCGTSHDRDLNAAKNIDREGLSLLSEK

SEQ ID NO: 9784 - protein, 394 aa, unknown
  TnpB Polypeptide
MSRFRLLPTPAQQVVLLEHCRHARFVWNLAVEQQQFWQPGRRVPRYAEQCAQLTEVRAEHQWLTAGSATVQQQALRDFAQAMQYFFAGTHGRPSWRKAGRNEGFRQVGLKPNQVETINGRYGRVWVPKVGWVRFRRSRAVPSGVKSYRITRDRGGRWHVAFAHIPDPIPPPKNGSVVGVDRGVVVSAALSTGELLHAPDLTQGERIRLRRLQQRLARAERGSNRRQRTKVAIAKLKAREADRRRDWVEKTSTDLARRFDTIRVENLDVRAMTRSGRGTVEQPGVGVAQKRGLNRAIRRQAWGRLITRLDHKAAGRLERVAAAYTSQRCSACGHVAPENRKSQAVFECVACNAGPCNADVNAARNIAAGRAVPAQGDLAVRRSMNCEPQLSSPAA

SEQ ID NO: 9785 - protein, 390 aa, unknown
  TnpB Polypeptide
MSTEMALRSYKFRLYPDKKTETTLIRTLESCRWLFNHFLERRNEGWNKGKIQSEIPELVEQYPFLAEVHSKTRQYVLWQQSANLKALKSLKAKGRKTGTLRFRGKGRFKTFVYNQSGFEIWENKLHLSKIGDISMRQHREIEGDIKQVSIKRTPTNKWYAILTAECAQPTPSHKTGAVGIDLGITKFVTDSNGNSVEHPHSLRKRLDNLRKEQRRLSRKKKGSKNRKRQRLKVARVHEKVENSRNDFLHKLSRQYVNSYGLIAVEDLDVKGLVEMQYNSLNALDSSWSTFIHMLDYKAESAGVWLVKVDPKNTTQECSVCSTYVYKPLWERTHSCSQCGVVIDRDYNAAKNILTKALECIGQELPEFTPVEIGPLPLGASPVVEAGRSGL

SEQ ID NO: 9786 - protein, 224 aa, Moorea sp.
SSIVRFYDNCKKKVPGKKGFPKFQKRARSVEYKKSGWKLSPDKKSITFTDKKGIGKLRLKGNWDLWRFDKKQINRVRIVKRADGYYVQFCVAVNVKEETEHTGEMVGLDVGLKEFYTDSNGHSEPNPRFYRKGEKRLKFYQRRVSRKKKGKAVGHASRTSNRKKAVNRLGRQHLKISRQRQEHAKRLARCVIRSRSVGYAESNDLVAYVRVACRKARFKNQKLS

SEQ ID NO: 9787 - protein, 308 aa, Moorea sp.
MGFYNSRPIPEGFTLKSVTVRRKARGWFVSLQIEDKSVPTTPVKDKSEIKPQRVKGCDLGINKLISISNGRTIANPAKQKSFRCRERRLKLRQKAASRKRKGSNNRGKSYARVASLHERITNKRSAYHWDVANQLVDGTDALVFEDLNIKAMKSRCKPRPNENGGYDRNGQSRKRGLNRSISNAAWGELVKKIEVVAAKSGVPVVKINPKHTSVGCPKCHHTSKENRKKEKFVCTNCGHYDDADINGAVNIKLRGLKKLGIDPIQLPPVRGKVTPMEITATNVVVPGNPHPCDGWGGSTSFLFHPKAH

SEQ ID NO: 9788 - protein, 512 aa, unknown
  TnpB Polypeptide
MHIIYVEKQISVKGGPVSMKRSTTPSYIAQYRLLCTPDDGKFIGHCLFLGCKTYNIMVGEANKRLNSYYRDKEVNAIRMKQRKKGYELSDAEKDILKAKRKQYGLSEYAFQVYLKVHGKQISNFLDANTVQKIASQAWKGVSSVLFGKGKRLHYKKVEEFRSLEGKTNRQGIRYDTKKGCLIWGSRRIPIQVRGNDKWAQRALSDRVKYCRVVAKWHKTHWEYYLQLVLEGTSPTMAKPMSPNAEVGIDLGTSTVAITYDKKLDLRELGGEVNDIEAEIARLDRKLDRQRRASNPQNYDKLGRIKRLKKGERREWHYSQGYYKTFYLRRTLYAKRQAKLKQFHERLAEEVLSMGNQINVERMSMAGLSKRSKKTKINPKMGRPYSKKRFGKSIANHAPSMFIEALTRKGKARGATVTRYDPKPIKASQYDHTDGSNKKAPLSQREKTLSNGDKVQRDLYSAFLMKCLNADGTISQYKCNRFYPEFKRMHDELLAELRRQKAGGKKFPSCMGV

SEQ ID NO: 9789 - protein, 418 aa, unknown
  TnpB Polypeptide
MGRKPPNVNEENLVGVRIKLYPTEEQAKQLMRQIQLARAIYNLGLEIQNNNHADGNPYISYYDLITKFANMRNHDSRYKWLKESTVGCMRETLDHLDKAFQGFFDKSNPNRYPKFKSRKNEYKSRSFSPRHDRTRVIGDYISISGIKDLKVLAKDHQIPKGTKFYRCSVHYDGLNFWFGASYENYDKTHISMEDKPKTEPVGIDVGLINMITTSYGKFYKFTDTSKLEQRRRKLDRRLSKDYEKYNKIRLATRTKYEDVPKSINHYKRKNKRLKLIKKMVNIRKNDINKATKEIVDRNPEAIVIESISVNEQLHNNYALRSYNDQMMYCEIHRQLKYKARWRNIPVITANKYFPSSKQCSHCGSKGYYINGYRTFVCPICGYTEDRDLNAAYNLRNLAYQQPLVTSEGRETLLLKDIA

SEQ ID NO: 9790 - protein, 413 aa, unknown
  TnpB Polypeptide
MLNLTYEYQIQPNRQQVEQMEFYLESCRKVYNYALAERKAWINSRKCAINACSIRHEYIMPADAPKPNYARQCKSLAAAKKNIPELAIPHTHVLQQALRTLEGSFVAMWERGFGFPRFKKPGRMRSFLFPQMGVNPVQGNRLKLPKIGTVKMRLSRPIPEGFELKQVRIVRRASGWYAMLSLQCDVSIPDAMPHGHSLGIDLGLLSFLATSDSETIARPKFFVDAQRKLKLLQKRVSCKKLGSNNWRKAQAKVARLHEHISNTRKDFHFKTAHHLCNQAGMIFVEDLNLKAMSRGMLCKHTLDAGFGQFLDILKWVCSKKDVYFAKVDPNGTSQTCPNCQTHTGKKDLIQRIHECPNCQYITDRDVAAATVVMQRGLVAVGHTASMLSEGKVVGLPVKKESPDLNNSSLARIV

SEQ ID NO: 9791 - protein, 496 aa, unknown
  TnpB Polypeptide
MISTIIFRLVPTPYQEKRLYEIFTIYNRTKRKGYRLLVKNEANLQQQLMAYCHNNPYVNSILLENQQKFHQQMTWLEKHRSYLQAKGEILHDKIAAIKHIYKGDRRLRGLYARLSAIQNRLRTLQFKPLVFGGKRVLRDRIRHKMTHHEFQIHRDASFTCVGKRQGVNLNIKVLTTKEVRIRTFSKAKDKKWLIIPFSVNEKQELLLQTLFQAEKYTATVKRLLVKQGLRYYVHFSYELPEPEKRYDFENGAIGLDLNYQVLGLTHVDQTGHLLSYQTIRLRNLYSLRRNQGANYLSFKLDKVLNYCVNKGKGLILEDLSFAQYFSYNKSLNRKLNHFKTSALKLIKRKCLKRGVAYREVYPGYTSQIAKYKYSQLHNLSGHILASYVIARRGLGFQEDLPPLYQRLLAQVGGALKPRLNPSSPYYKWAKIHDLFKHSGITSFKTSKILPKVVLMQYVLNPATGAQPDNLKAGFSLAGKIEDYHKFWNFVENYRFL

SEQ ID NO: 9792 - protein, 370 aa, Trichococcus sp.
LVTVTAKIQIYISKTDEESLRITTNAYRKSCNWLSERVFQTEELNQRNLNTLYYSELRDRFGLKSQMAQSVMKTVIARYKSARSNGHEWRKVVFKRPEYDLVWNRDYSLNQNLFSVNTLDGRLKFKFEKKAMERYFDGSWKLGTAKLVHKLGKWFLHIPMTKELPELDLAGVTHVVGVDLGINFLATTYDSQGETFFFNGRTVKHKRGQCKALCKQLQQKQTSSSRKRIKTTGSRENRYVTDMNHQITKALVERNPKGTCFVLEDLTGVRNATEKVRTKQKYISVSWAFYQFRHMLEYKARLNGQTVIVTDPKHTSQTCPKCGHVERGNRNKKTHTFCCKNCRYTSNDDRIGAMNLHRKGIEAISGATPA

SEQ ID NO: 9793 - protein, 349 aa, Photorhabdus sp.
MQTKTLSVRVKDKHVKLLRQMAYEVNQVFNLANEITRKAYSHAGEFGAQKPQWLSAFDVQKQTAGIQKEKGWIIGSATVQEVIAEHGKARKQFKRAKLRWRVSGGAKRSLGWIPFKSRAATWHNGQIKFAGHFFNVWDSYGLSGYKFRAGNFSEDARGRWYFNICVQVECEATKGTGAVGIDLGLKETAMPTEGEPLAAGRFYRELSAPLGKAQRANKKSRVKAIHAKIKNRRKDAIHKYTTALVNTHAAIFVGNVSSSQLAKTRMAKSVLDAGWAMLKTQLKYKAIARSVMFDVVNENYSTQTCSCCGAISDSSPKGRAGLRIREWTCVECGATHNRDRNAAMNILLD

SEQ ID NO: 9794 - protein, 384 aa, unknown
  TnpB Polypeptide
VPVVCYQFRLYPTAPQERALLATLETCRRFYNDLLAERKSAYETEKRTVTKFEQLRRVKEVKATNPFAAGVHSHVLQVVVADLDRAFQAFFRRVKAGETPGYPRFKGRDRLDSFGLKEVGNGFKVDGRRLKLSGVGRVAVRWHREMVGKVKTLRVCRKAGHWYACFACEVEGAPRPETGAVVGVDVGVASLLTTSDGEKVENPRWYRKAQDKLRRLQRAVARKKLGGRNRRKSVRALQTHHLRVQNRRKDFLNKVAHGLITRYDGIALEDLRVRNMVRNTRLAKSILDAGWNYLLTRLQAKAEGAARVVELVEPAYTSKTCSDCGALFAGLTLSDRWVSCGCGLSLDRDENAARNILKRSRLGHSRWASTSPAGVCVAQEAAGL

SEQ ID NO: 9795 - protein, 402 aa, unknown
  TnpB Polypeptide
MCRVKGGVIMPTVNRAIKYRIHPSEEQGIQIRQTFGCVRKVFNAAIELQDGLHAAKMGAMSKMDLNNHINRTMKEDMPYLRDVDKFALTNAAYNAIAGYKNFFEGRAKHPRFKSRKDSKQAYTTNWTHGNIAVIPPEKKDSVRGKVKLPKLGLVDAVIHRVPPEDWVIKSATVSMNNSGEYFVSVLFVYEQEPAPYIPIPNKNRAIGLDYSSPDFYVDSDGNDAGVPHFYRTMEAKLAREQRRLSKMTKGSNNYAKQKIKVDKLHRKIANQRKDFCHKLSRKIANFYDAVCVEDIDLRPMSRSLNLGKSTMDNGFGMFRVFLQYKLERQGKYFVVIDRWFPSSKTCNHCGYINHELQLSDRVWVCPHCGEVILRDPNAAKISCDLLKRRSCGRRALACSMTC

SEQ ID NO: 9796 - protein, 404 aa, unknown
  TnpB Polypeptide
MVSGDEGVLTISIGVMVSPEPEAIDLLKRYNVALNYAINKILRLNLEKIGEIHNALYRELREWFGLPSRLAIDCYRDALANANAWRNNPKKGRKPRVRKLSMLLHQGSGYRIKDGYVEIIGGIRMKIIGWDRRYDQYENGEARLVYRDGKMMLWISKKIPKPEPYQPRDVIAIDVNEKKIVYGDHVINEEKDTKIDTAHRWKKLAEDLQKRYSSTRYPAWRRRRGILNRIRSYHRKARDILENWARKTSLKIVRFAKRLGYAVAREDLKGLINSLRKIESKDHRKKLIIMGYRRLGKWIDWQAEKQGVPLAIVNPSGTSSKCPKCDSKGLKEVSYRRLRCPRCEFEADRDVIGKLNIRKRALKKLRINPPGGSLTTPSAPQMTDVAPNRWGEPMIRPKGMMIKR

SEQ ID NO: 9797 - protein, 426 aa, unknown
  TnpB Polypeptide
MQRLQAFKYELMPNGEQQRSMRRYAGARRFVFNKALALQKERYEIGEKKLGYAGLCKMLTDWRNSTETPWLADSPVHTLQQGLKDLDRAYQNFFAKRAAFPTFKKKGLGDSFRYPDPKKIKLDQANSRIFLPKLGWLRYRNSRDVLGAVRNVTVSGAGGKWFVSIQTAREVDVAVPDATTAVGIDVGINRFATFSDASFLAPLNSFRKHEQRLAKYQRRMSRMVKFSNNWKKSKARVQRIHSRIANCRRDYLHKASHSISQNHALVCIEDLKVRNMSRSAAGTAQAPGTNVRAKASLNKSILDQGWAEFRRQLEYKLAWNGAWLIAVPPQYTSQTCPCCGHVSADNRKTQAQFLCVACGYENHADVVGAINILSRGMESLVRDEGQDTGDASPGRETAARIACGEVVLSGLSKKQEPAEATLVNLP

SEQ ID NO: 9798 - protein, 367 aa, unknown
  TnpB Polypeptide
VTKNYKFRVYPTEQQIDLLFKTAGCCRLVWNMFLNQHEEDYKINGKSLCQYDAVKLLSPLKKCEDYSFLNAVDYSALRITVENLYKAYNKFFKKKGGKPHFKSKKNEYVQSYTTQMVNNNIKIGKNYIILPKMGKVKAKLHTFACGAIKRATFKRTKSDKYFITVTCETEVQSKLVNENQVGIDLGLKNFITTSEGDKYNLTIPRTLEKKLIREQKRLSRKKHGSENYKRQQIKLARMYERIANTRKYQQDKLSALLINKYGTICVEDLNVKNMVRNHNLAKSISDASWSQFVEMLKYKAEWYERKFVKVDTFYPSSQLCHCCGYQNRAAKTLTVRDWVCPECHTHHDRDTNAAMNILSEGLKILSA

SEQ ID NO: 9799 - protein, 435 aa, Mycobacterium sp.
  misc_feature (322)..(420): Xaa can be any naturally occurring amino acid
MARFEVPEGWCVQAFRFTLDPTEDQARALARHFGARRKAYNWAVATLKADIEAWRVTGIGTVKPSLRVLRKRWNTVKDEVCVNAETGAVWWPECSKEAYADGIGGAVDAYWNWQNSRSGKREGKTMGFPRFKKKGRDQDRVTFTTGAMRVEPDRRHLTLPVVGTVRTHENTRRIERLIATGRARVLAISVRRNGTRLDASVRVLVQRPQQPNVAQPGSRVGVDVGVRRLATVANEAGAVLEEVPNPRPLDAALKELRYASRARSRCTKGSRRYRERTTEISRLHRRVNDVRTHHLHVLTTRLAQTHGHIVVEGLDAAGMLRXXXXXXXXXXXXXXXXXXXXXXXXXXXXXXXXXXXXXXXXXXXXXXXXXXXXXXXXXXXXXXXXXXXXXXXXXXXXXXXXXXXXXXXXXXXXXXXXXXXPDPTRSIHARWISPR

SEQ ID NO: 9800 - protein, 412 aa, unknown
  TnpB Polypeptide
VILRAYRVELDPNNVQRTAMIRHAGAVRFIYNWGLAAITQSYQERKAATPEGERVKGTINPMGLMVQLPALKGTHPWLAEVTAQALQASLRNLDKAFQSFFRRVKAGQTPGYPKFKKRGASRNSFQFPQITGISTTHIRLPKIGAVRLKQQGYVPVGLPLKTVTVSEQAGRWFATVLVEGPDPAKVNPTGETLGVDLGIKTLAVLSDGTAYPNPKHLEHTQGRLKHLQRQLARQQKGSHRQTKTKARIAKVHARIAAQRSDSLHKMTTEIVKTKRPSVVVLEDLNVSGMVQNHKLARAVCSAAFGETRRQLTYKCEWYGVRLVLADRFYPSSKTCSECGSVKGDLTLGDRVYVCDACGHTQDRDLNAALNLRAWGMKFLTGGAPVTARGGDVRPGPKLADPCEARTDLGTAP

SEQ ID NO: 9801 - protein, 369 aa, unknown
  TnpB Polypeptide
MQILKAYKYRIYPTTDQEVLLNKTFGCCRVVWNACTESFNSPVDAKIEFPKSSTEIKKKFDWMSEVSTAALQSAFNNFFEFKQQFFSKNRKKKVGKPKFKSKGLRQSYRLPSQRFNLGNNFIRLEKIGRVKVVIAGNRPPKGGDFRSVTVSKEVTGKFFVSVLVKELKPKPLPITDAVVGVDVGIKTFAVLSDGTEISNPEFFSESQAELRKAQKSLSRKKKGSTRRKKARLKVALIHEKIRNQRKHFHYEVSRMIVNAYSVIGLEDLTVSGMVKNRKLSKAISDVGWSQFVSFLSYKAEWSGRTIQKIGKFFPSSKLCSNYGVIKKDLTLKDREWICDCGVEIFRDLNAAINIKNEALRLLAQGVACA

SEQ ID NO: 9802 - protein, 424 aa, unknown
  TnpB Polypeptide
MQYVERHVITRTHPVFREIDRASFASKGLYNKTLYITREMFETTGKVCGYNKLDKIMQTHDVYHSLPAKVAQKVVKQVSEAWKAFFVAIREYKKCPEKFCGKPEPPKYKRKNGRNLVQYTNQAIHKGTSSRKQIIHPADLQPITTTKQNPDKIQQVRIVPRSSHYIVDVVYEVNDPPAENAELDYSLYAAVDIGIDNLATIVFNRPGMTPFAISGRELKSINQFYNKRKAYFKSMLPAGRHTSRRIEAMGDKRYWRVQDYFHKATRFIVDELVRLKVGNLVIGKNREWKQEVNIGRKNNQNFCSIPHDRFIWMLTYKAEAVGIKVTCQEEAYTSKTSFLDNEPICAHEKYLGRRIKRGLFRSDTGTLINADCNGAYNVLRKFAPEAIQVSIASVSYVLHPVRITFNQLNMKKVDPNPSRDDVRE

SEQ ID NO: 9803 - protein, 364 aa, Psychrobacillus sp.
VNNLQTITLKLELQKPTQAKMSMYRKMTEVNTAFSNWLLHFDELKTATSKVFGLYSDERLPSAIVNQTIRTVKSKKKNQKAKTFRRLWCSFNNQNFKVERENGLFKVSFPTFEKRIGVPIISKDHQKRWLDKLLSGNVKQGTTELYEKRGRWFVAITLSFVVEQKQARQGEPKTMGIDIGLRQLAVATAGTTSIFFPGNEMAYRRRRFASRRRKLGEAKKLHTIRKSKNKESEWMKDANHKISRHIVDFALENGVHLIRMEDLTGIRHSKKSRKEAGRNLHSWSHYQLQLFIEYKAKMAGLSIEYVNPKHTSVTCKCGHIDKRSRKTDTFCCTQCGYLSHADVNASINIAKAVSGLSTRKTINN

SEQ ID NO: 9804 - protein, 390 aa, Streptomyces sp.
VLCVKIVTRVKLLPVSAHDADALAATLRACNRAANHASEVAFVKDLKRRNVLQKEVYFALKAEYDLGAQPAVRVVKKVCDAYATLKGNIKAGNLGREGSKRRLRAESKPIRFREDAAQPFDDRILTWNLDARTVSIWTVAGRIKRIPFVCSPEALKLLASRKGESDPVMRDGMFFLIATIDIPEPPVSEPSGFLGVDLGIVNIATTSDGEIMSGRRLDRYRGRMVNLRAKLQKKRTKSAKRALKRIRRRESRHAANTNHIIAKRLVATAERTSRGIALEDLGGIRQRVTAEKDQRARLHSWAFAQLGAFVEYKARRAGVPVVFVDPRNTSRQCSECRRTHRTNRVSQARFVCRSCGAVPHADHNCSRNIAHRGDAVWKRGAVNRPGTTAR

SEQ ID NO: 9805 - protein, 102 aa, unknown
  TnpB Polypeptide
LEDLNIKGMLKNHKLAKSVSFQSWYKFKTILTYKAEWNGKRVISIGRFEPSTKTCSKCGYVNNDLTLNDRAWACPECGSNHDRDVNAAINIKNFGLKQLATG

SEQ ID NO: 9806 - protein, 450 aa, unknown
  TnpB Polypeptide
MGTLQGLQQIQSEIEEISGNFEKNCEYVSIGGLHMSKKLKPFDELSHRAVKPLSSGTGIQGTITVSGGEGGMKGFKFRIYPTADQIRQIQVNCSCSRFVYNRMLDLHEQAYREDGRSLSYGMMANMLPSLKKEEATSFLKEADSMCLQEAVRDLDRAFQNFFARRAKYPRFKKRKTMYGMTYRTRNQSNGIRITDRNHIHLPVLGSVKIRLSREPEGRILNATVSATPTGKYFVSLCVSEWHPDKKDAPHTEIGIDVGLTEFYTDSSGRSVYAPKPVAKYQKRLARAQRRLSRMKEHARRENIPLWQCRNYQKQKAVVAGIHEKIASIRNDFLHKTSTQLCDENQIICAEHLNVRGMKKNHHLAKAISDAAWSKFFTMLEYKQNERHGYLVKVDTFYPSSQTCHCCGCINPKVKDLRIREWDCPECGTHNDRDHNAAVNILNEGLRLLAS

SEQ ID NO: 9807 - protein, 202 aa, unknown
  TnpB Polypeptide
METTPVKKSKNQALVVGVDLGIKKLATLSNGETVAGRKPLKKLSRRLARLQRHLAKCTKGSKRYNRQKMKITRLHYRIRCIRQDGLHKLTHHLCQDFKVICLEDLNVKGMMKNHKLALAISDMGFYEFKRQLEYKATLFRNFIVSVDRWFPSSKKCSMCDHKKEELKLSQRTYHCDECGFSICRDLNAAINIEREGIRVLAY

SEQ ID NO: 9808 - protein, 261 aa, unknown
  TnpB Polypeptide
LHRKSIGNIKSISITKTPSGKYYLNVLVEREMNKLSSNKNAVALDMGLMTFAKLSNGEEIKNLRFYKKAEKRVKKIQKKLSKKQKGSNNRKKAIIKVAKVHEKIKNKRNDFLHKESLKVIRDNQTIIMEDLKVKNMIRNKKLSKSIQDASWSEFNRMIKYKARWYGREYIELDAFYPSTKKCSICGYKNQKLDIHTRKWICPKCRTFHDRDYNATINQLKIGLGQSKLTPVDYAMAAEQKYIFWSTSYHKRKQEACHFNGE

SEQ ID NO: 9809 - protein, 165 aa, Nostoc sp.
MRRLSGRERRFQEWLNHNISQQLVQEAKKLNAALAFEDLTNIRQSLNTKPRSKIERRRTNNWAFYQLRLFVGYKANIAGVPVVFVPPAYTSQTCSRCRHIHPIKGKSYRNGKVFKCGHCGFEHDADINAAKNIAALALPVSQPESPGMTCQLLGQMSLFGMFDLG

SEQ ID NO: 9810 - protein, 367 aa, unknown
  TnpB Polypeptide
MIVIRTIKLKLNVSSDAGESIMKTMRDYSVAFNVCSDWGYESHSTSKIGCHNATYYKVRKLVPNLPSSLVQGARDCACESLKSIKCRSKPISKEYSAMRYNSRVIRIYLESGYVTIATSDGRIKALFGIPEYYKRYLTWKIKSSDLSLHKNDNIFYLHCQVETDTPKITSEQNVLGIDRGIVNIAVCSDNTFFNSSAVKNTRAQCAYLRAKLQSKGTRSAKRKLRRLSGRERRFVTDVNHCISKQIVQLPYTVFALENLKKIRVKKRRGKTFNRKLSNWSFYELEQFIRYKAENLGKRVITVDARFTSQKCSACGHTYKGNRNGSQYLCRNCGFELHADLNASRNIAHDGISVLGRLPVNQPNVACL

SEQ ID NO: 9811 - protein, 576 aa, unknown
  TnpB Polypeptide
MNYTIAMSKANPKTLKETYGDADNISSSCKFRAYVNEQQFNTIGHYLYWVQKFRNQCVEFCQDRRKARAVWLHKHPVLVRLWKACEMDADKDSISLLPEEIAGNDVSAASRWLTQRLEAARYQLETSDFWYLLDGGKDRRAVIFNAWVNMSDEQKADIPDAWLLTLPRTILDQCLQDMSKTYVKALKDRKSQVRNPAGFPQFQKHSYPYSVRFQISTKQNKTYVEAWNTAYAEQRKEIYIPSLGVVKFRDKQNVPAIPPEMITISRNSSGQFHMTFVNKDPASRVNTKFTSMHDAVLPCEEMYDPIAKSVVMVPTSRGGDVGLKVLCTYSQALAAQQKDKQKKEAERKRYLKHQEQRLAWANKSLSRKTKGSKRWLKAKIKQGKVHTKTTNCRDDYLKKEAQIFVKATAIACLEDLNLRFMLQNRNLSKSAADASLGKFKQYVLWEAQKMGHLVLQCNRFDATSKTCHACKSYYKDLTLKERTWVCSGCGTTLDRDENAAINIRVMALQKAITLLASGSGATKMLSPYPLHRDLTSFIERGGLTSLLMLNCISESQVGENPSCPVKRLSHQHSVTA

SEQ ID NO: 9812 - protein, 323 aa, Okeania sp.
MVKKAYKFRFYPTPEQENLLLRTLGCVRFIYKKALAARTQAWYENKERVGYAQTSAMLTSWKKQDDLHFLTEVSCVPLQQGLRHLQTAFPAECCANTNFFSGGTKYPKFKKKLNGGSAEFTKSAFKWRNGQIYLAKCAQPLPIRWSRQLPQNCVPSTITVKLNPSGRWSVSLRVNDTRDLKLKPVKKQVGIDLGITSLLTTSDGKKIANPKNLNKLHKKLRLAQKSISRKTLGSNNYQKARLKVAKIHARIKDSRGDYTHKLTYVANPTAPLQLIRENQTIVVEDLAVKNMIKNHKLARAISDANWGELELIYKENLKKVGTA

SEQ ID NO: 9813 - protein, 385 aa, unknown
  TnpB Polypeptide
MYDGLISSRSVVYQEAEQRMSRKPKGLQHTYQVRLYPTPDQGRLLMAHALDYIGTVNVLSHALDADLIPHDDTFSTKDFVAALPSCVKNQALRDAHSVFKRSLDLHVLPVLTKPICQWNNQNWRIEDGTLTVPISLDGKTQQLHVRCADAVLDGLPGLLRIKKKRGKWIADVTMTLPKPQPVQAERVMGIDLGIKVPAVAHVGGRGTRFFGNGRYQRMMRRRFYARRKTLQKAKKTRAVRKSQGKEARWMKNINHQLSRQIVNHAREQGVGTMKVEALQGIRKGTTRTSRGAKARKNNRMKNSWSFYQLTMFLTYEAERLGIKVEQVDPAYTSQECPACSARNKAQDRTYVCADCGWMGHRDKVGVINISRRAGLSDKRVGATGA

SEQ ID NO: 9814 - protein, 373 aa, unknown
  TnpB Polypeptide
MITYCFKAYNSKKNKNLHNLINIACLIYNHCIALHKRYYRRYKKCLNIYQLQKHLTKIKKTSKFSHFSLLGSQSIQDITQRIDRAYKLFFENRKNKKRCSPPSFKKVKKYKSFTLKQAGYKILENNYLRIDDKIYRYFKSRDIIGKIKTLTIKRNSLGDIYFYFVCESNNSQIEARTGKSVDIDLGFKTFITLSTGEKIESPEFFKRLIHKIQQLNRNLSRKVKGSNNYKRAKLCLARFHKKISDKRNNFHWETARNLALKYPLISCEDLCIKSYQRRYGRKTSDLAMSDFLKILNYSCEKLGSHLVQVDRFYASSQLCNNCGYKNPLLKDVRIREWTCPVCGVHHDRDINAGINIDREGNRLFSMLKSKQET

SEQ ID NO: 9815 - protein, 402 aa, Streptomyces sp.
VIRAYKFLLRPTARQAVTLSEMLRDHCSLYNGALQERRGAYRHTSKTSVRYGDQSAQLKDIRAFDPEHQGRWSFSSQQATLRRLDKAFQAFFRRVKAGQTPGYPRFKGVGHFDTVTFPKDGDGCRWDSTPHAPRTRVRLQGVGHIRVHQHRPVQGRVKTISVKHEGSRWYVVLSCDNVPAEELPPTGGNVGIDMGVAHFLTTSDGEHVANPRFLQAMADELAEAQRHLATFPKRTRQRTKKHRAAVRKVAKLHGKIRRQRADFHHKTARALVVDHDVIAHERLNTAGMTKSPTPKADPARPGSFLPNGAAAKAGLNRSILDAGWAQFLGILANKAESAGRLTVPVDARNTSCTCPDCGHVAKENRATQSKFACVTCGFTANADHVGATNVLNRAGLALCAAA

SEQ ID NO: 9816 - protein, 399 aa, Bifidobacterium sp.
MTESVNEGYMAVKVALDPTPRQERLLRSHAGAARFAYNKAIEHAREVIRAGGGCPVSYYALRRWWNASKVKLAPWWRECSKEAFNSGLEAAATALSNWLASCHHWRKGPKVGFPRFKDAESRPYFAYTTGTFGPIAGDPKGLALPRIGRVHCFENVAQRVGDRRVIRMAVTRSDEHWTTSLLVVTRRTDTPPRDARIVGVDLGLKTLATLSDGTVVPNPRNHNRDAARQRRADEAVARAMPGSKRQARAIRHAGRIRRHTANRRRDGLEKLVSALVRRYDVIAIETLNVKGMAANPALRTQVLDAGFATFARLLEARAPLHGAVVHRVDRWYPSSKRCSACGHVRRHLELDERTYICPECGLSIDRDLNAAINLRLVAVGATETKNAREGANQAAAKAA

SEQ ID NO: 9817 - protein, 486 aa, Bifidobacterium sp.
MSQKVRIDGVKHVGASVFLGVDHCGNPCWTRNPERVMVWLCDGWRTRFNQRREQRPHNIPVKDDATGEVVDWVKEPLGGPDVADLLSDREARLQCSWMAGIPASILSSTDRIEGVEWSAGLKRKKTIGGRIPGFKSRHRGLGFVCWRNASRSGNAIFHKTGRKSGVVVITGMNPPRWRKPGEKLHWRIVIHVRASQPIRPYTSVHVDWTHRTLVFVNMPLPLPRTGNGEVGIDRGCVHTLALSDGTFMDMPKPSKAELKRLEYLRRKMARQDRVNEARGGRTAKFESKRRRKTLSEFNALQGRIVRRRNDWIEKTATTLAKANILIAMEDLDVQAMTKHPKPKPDPDKPGQYLHNGAKAKAGLDRSILSNCWGRISKRLQDKMGANGGRLVIVPAAYTSQTCHKCGHVAKRNRESQAVFKCVECGYMANADTNAAINILDRALSETGGGTASDVEDPQERSGEASTPPTQAGSSFGVRAVKGIPRL

SEQ ID NO: 9818 - protein, 439 aa, unknown
  TnpB Polypeptide
MASVTKTVKLKLYRRPETDMYFSTTKELFNRVVSFYFGVIQTHEKILEYPNKHALTILEKLTHRTRQNPEPIISLEQVSGYIPAMFRRAAINAALGTARSFYSRLEKWRREKAKFEAKSKKYTHRPPVPPRKFNFNPVFYAGQYRWVQNGVILRLYDGNNWRWVKYRYSGPAWNEEWKPESPSAVIGSNHISLHVPIVKELEAPPPVKKQLRSSARICAVDLNINDSLAVCVILESDGTAAAVKFIRGGRKLHDRRKRLLGKIAVKRSQTGILSACEKDNKHLWNKIQNIDDYEAHRISRRIVDFSIEHGAKVIVFEHLKKFASQKGRYSAKANQRRSYWLRGRIQKYARYKAWQKGILTCLVSPYNTSRLCHVCGSEIVRYDKEPEGYCPGAPLYSCSCGKRGNADFNAAANIGKKLLSRYLKPSGKPEGVSVVQEAS

SEQ ID NO: 9819 - protein, 480 aa, Caldivirga sp.
VPSPGELALDGEWGSTSPAIPGGGIHEVKYTNVRTNVVRLLLNGFQGRRLRRLADACARLYNEVNYERRQQYFSGNGVDFRGTWVKYYEKYKGILGVNAQAVLQKSNEAWNSFFHLLRLKKEGKLPPYMNHISPPGYWKDRESKKRKLLLVVRQDRYIVDEQNHKLILKDFNLEVKFTGRLRWFGRQGRLEMHYDESKGAWYACIPVEVGVEEAKTGRRSKFIVHGERKVIQVESPKGSKVASIDLGISNLASVVVSDGTWLLYKGVRAKEDYFYLQRLISRIQSLRDTLKGKLLSDAVDELNHEVRRLHGRLRRRLVHLYRNFASHLLKQLHELGVSTIYLGYPFNIAQERGSKFTVNMWSYRKLMEAIELKTQEYGIKVYEVVEYNTSKYCAYHGVEVKRQPRGVVSCPMGHKLHSDLNGALNIMRRAIEKIPPVIKKPLSFIVEHNKVAPIKGCNPQDLREPSPLKGGEEVSYFLIS

SEQ ID NO: 9820 - protein, 194 aa, Chloroflexaceae sp.
VRRAQRRLSRRHKGSKNREKAQRQLATAHYRVANIRRDALHKATATLVQTKAKSAEQVPTVVVIEDLHVTGMVKNRRLARAISDAGFGEFRRQLTYKAAQRGIDIVVADRFYPSSKTFHACGAVNHDLTLDQREWECPTCGAALDRDLNAAQNLAALATNNVPSVRRERNACGDSVSPGMTGQPSVKQESITML

SEQ ID NO: 9821 - protein, 432 aa, unknown
  TnpB Polypeptide
MWLIVDIYLILNRDMILSSRHSFKEANIGKHNTINDFINEYRRVCSLILDVIWLGYKDFNPSLNQLELPKYLDYNDFGIETCLSARAMSSLVTQLSGVIRSSTEKQRKRIYMLDKKKNEGISKNKMKPLILKLKQNIPQKPNVSNINPELSSKCIEFIHDDRYFDSFIKLKAVIKNQAPIYIPIKNHRHSNSLKAKGVLMGSISLSKKGINLRYDIDEPVKKDIGRIIGADQGMVDVLTMSDAQVTLQTDIHGHSLKSILNRLVNKKKGSKSFKRTQDQRTNFINWSINRLDFSGIKQINLERIVNIGYKNGSSRLLSHWTNTVIRDKIEKRTMLEGVLLIEQDSTYRSQRCHCCSMVRKANRKGKTYSCNSCGFIGDADLNAAMNHEINIPEIPYTLRIAKYNRAGFYWTKDGFYDLAGTSLESVPPVEDV

SEQ ID NO: 9822 - protein, 402 aa, Shigella sp.
VKRLQAFKFQLRPGGQQEREMRRFAGACRFVFNRALALQNENHEAGNKYIPYGKMASWLVEWKNATETQWLKDSPSQPLQQSLKDLERAYKNFFQKRAAFPRFKKRGQNAAFRYPQDVKLDQENSRIFLPKLGWMRYRNSRQVTGVVKNVTVSQSCGTWYISIQTESEVSTPVHPSASMIGLDAGVAKLATLSDGTVFEPVNSFQKNQKTLARLQRQLSRKVKFSNNWQKQKRKIQRLHSCIANIRRDYLHKVTTTVSKNHAMIVIEDLKVSNMSKSAAGTVSQPGRNVRAKSGLNRSILDQGWYEMRRQLEYKQLWRGGQVLAVPPAYTSQRCACCGHTAKENRLSQSKFRCQVCGYTANADVNGARNILAAGHAVLACGEMVQSGRSLKQEPTEMIQATA

SEQ ID NO: 9823 - protein, 407 aa, unknown
  TnpB Polypeptide
MLLTYRFKLRPTRAQYALLVGVLEQQRQLYNAALQERIEAWRKANVPVTKLDQFKALTQIRAFDDTYASLPVAMSRWSIARVDDAFKGFFGRVKRGVKAGFPRFRSFHRWRSFGFDEWNGIRIRGDRLLFKPFQNGLRMKMHRPIPDGAVFKSCTFTKVGRHWYVSLAVDVAAAAEHPMPDTVIGLDFGLEYLLTTSDGVHVENSRPGKKRQKQLRKAQRALARCRRGSNRRRKARERLARLQRRTANARSTYLHQVAAPLARRYALIAVEKLRVKNMVRSARGTADEPGRNVRQKAGLNRSMHDASAARLFDYLSYKAERAGGTLVRVDARNTSQDCSSCGERVPKDLSQRMHRCGCGAELHRDHNAALNILQRALQAHGRARPPGDANVGQWPVRRLGNAEVQAA

SEQ ID NO: 9824 - protein, 418 aa, Cyanobacteria sp.
MIKAFKYRIYPTQEQQVLLAKSFGSCRFFYNYALNLTSQTYKETGKGLSRNDIINLLPDLKKEYEWLKEPPSQALQQVALNLSSAFLNFFAGRGRYPRFKKKQNRQSIRLPQGCKLEDDHLKLPKFGKVYCKVSRQPTGKLKSVTVSQTPSSQYYASCLFDDGTEKPEQSSEGKAVGVDLGISHFAITSDGSKHGSPKYYRQYEQKLARNQKELSRKQKGSNNRNQARTKVARVHEKITRCREDFLHKLSRNLVDGAYKPWRKPPGTAPHENQVIVVENLAVMNMVRNSKLAKSISDAGWGQFCTLLKYKCEWEGKTYIEVDRFFPSSKTCNHCLHQVDSLPLEIRNWECPSCGTEHDRDVNAAKNIRDEGLRVLRVRNFEVSSKCKTHSRQAAGRVAAASGQRVRPAKGTAFSGIAG

SEQ ID NO: 9825 - protein, 540 aa, Sulfurihydrogenibium sp.
MQLNKTAKRILSIRISGKQRKEKISNLLYSLAQFRNLLIIFNKIYQQNYGRWILNESYLYALVNNKGYKPRESKENFIEKLKEFKTITDNIEKVNQLKDFQDKLIKQKQKIKNNYTVQTLIRQLIKDYKSFFKSIQKYKENSNSFNAIPRPPKAKKLKDIPSFTAELNVNTFKVLEEEKGKHLLITLTNNKEEKQYLKVKLPKDFNYEIKSARIKFIASDIYVDIVYTIPETQINSNQEKTHIAGIDLGLDNLITLFSTNKELQTIIVSGKEIKSINQWYNKEKAKLQSKIDNIQNQINKLQKDNLDTTALEKEKKLLIKKQKELSAYRNRWITDTFHKITRKITDFLNETGHKEVYIGKGATESKNGINLSTKTNQNFVNIPFRKLINQLKYKLEEYGVKLTEVAEEFTSKTSPFADLHKVLETGKEYLKAKTEGNEGILKQLKEKLNQLYNGIRIKRGLYKDNITNKVFNANAVGSYNILRKEAKPLIDEETLIDKLSRPIRLTLNLISKVTCESLLEIAGRRPLRVHCKRTLVNNFL

SEQ ID NO: 9826 - protein, 217 aa, Nostoc sp.
MVVVVDEGNKLEVEVKTGKIAGFDFGLKIFLTCSDGTKIESPQFFKQSLNAIKIYSRQHSKKLKGSSNRERARKNLVRRYEDVSHRRLDWFWKLTHHLTDKFDVLCFETLNLKGMQRLWGRKISDLAFGEFLQILEWVAKKKKKRVVFIDQWYPSTKTCSCCGHVLESLDLSTREWCCPSCQSLNGRDENASQVICAVGASTVGLGDVSRFETAIAV

SEQ ID NO: 9827 - protein, 396 aa, Nostoc sp.
MLVFEFKAYGKSTQLAAIDDAIRTAKFIRNSCIRLWMDVQGTSKNDLQKYCAVLAANFPFANELNSMARQASAERAWSSISRFYENCKKGISGKKGFPQFQKDCRSVEYKSTGWKLADNRKSITFTDKKGIGRLKLKGTRDLHFYQPNQIKRVRLVKRADGVYVQFCVDANRSENIEATGKTVGLDVGLKEYYTDSNGLVVENPKFLRKGEKVLKRSQRRVSRKVKGSKNRGKARQLLGNRHLKISRQRKDHAVKLARCVVQSNDLIAYEDLRIKNMVKNHCLAKSINDASWYQFRVWVEYFGKVFKRVTVAVNPQYTSQECSNCGEIVKKTLSTRTHVCKCGCSMDRDENAARIILSRGLGTVGHTGTFALDASNAWGDATSTLVGESLYEQVMS

SEQ ID NO: 9828 - protein, 538 aa, Nostoc sp.
LSDAECNKASESSNDKTNYLSGNERMNSRITSVWDLPTVLQYRSNISFSCFGSRMFTDSLLVMIVTYCRLRYNDSMKYTYQYKAIPTTDQKLELNHWLRICQYWYNRQLGDRFDWWEMNRSRVDACPLVTVLPQLRDKPNYYSQKKYLPDLKKEPVTVEWSGEVLDLSRVPANTLQEVCKRVDKAFERFIAGDSNGNRSGKPRFKSHSRYRSLVIEGAGLELHSCSIAGKYLYVKVPKIGLIKIRSHRHLPDGAILKQLQFVKKNDGWFVNLRLEDPTIPTITPDSILPTWDNSLGVDAVLHEDDYLATSEGVKLPSLKVLRKNQRRLTRISQKKNARKRGSKARRKLAKREGRQHQKIARCRKDFQYKTAYELVRTGKKVFFHEDLNLKGLTKRNAPKQDQTGAYLPNGQRAKSGLNLSWADAAFGQFFQLLGHIAGKAGAIVIAKNPAYTSQLLSYRDEVIFTDTSIREYWDETELLRVDRDINAAIKLKRVGLDVFPTIKRRKGGIVIDDSITEDTSKEVLRILSGLARPLQRSA

SEQ ID NO: 9829 - protein, 324 aa, Coriobacteriaceae sp.
  misc_feature (241)..(276): Xaa can be any naturally occurring amino acid
MGVSMAYEIRIYPNAAQRELAERTFGCCRWVYNRCLETRKAEYEKTGKSPSVYQLQKLVTAWKRTDAPWLAEVDSHALQQAAVNLGRAFDGFFRRCRAGGKPGYPRFKSKRDTRQSYRTNWGISVPDARNIKLPKLGLVKARISRPVKGRIVSATIKRVPSGKYFCVLGVEDAPVEEWPEARTPVMGVDAGVKDLATRSDGIKIANPKALAKGERKLAREQRRLSRKQKGSKRREKQKRKXXXXXXXXXXXXXXXXXXXXXXXXXXXXXXXXXXXXLSVRAWTCPVCGASHDRDLNAAVNIAREGARLLNEADGTAGLAGTGDA

SEQ ID NO: 9830 - protein, 421 aa, unknown
  TnpB Polypeptide
VWCLLLLDVLAYTFFMQRLQAFKYELMPTGGHQRDMRRFAGSCRYVFNKALALQKARYEQGEKRLGYAGLCKLLTEWRNGPETPWLKDAPTHPLQQALKDLERAYTNFFAKRADFPRFKKKGQGDSFRYPDPKQIKLDQANSRIFLPKLGWLRYRNSHDVLGEIKQATVSASGGKWFVSIQTEREIEQPLPQGSAVGIDMGIARFAPLSDGTFYAPLNSFKRHEARLRKAQQAMSRKTKFSNNWKKAKARVQRIHARIGNARRDFLHKATTTISQNHAMVCIEDLQVRNMSRSAAGTTEHPGKNVRAKSGLNKSILDQGWFEFRRQLAYKLAWNGGHLIAVPPQNTSRTCPCCGHVSKDNRQTQERFECVECGFEENADLVGAINVLRAGHARLACEVSGAVMPPAAGTHRSDSGAAQCRA

SEQ ID NO: 9831 - protein, 654 aa, unknown
  TnpB Polypeptide
VSRKLPLAEGETVRTACARAVLRAGVDEKSGELLSAAVLAERVGWAADLVSGMVADLLAEHWNTVDVGVLACGVDAGGRRLPSNAWMALRRLGWTVAPPQDVTVNDRIVRMAQEQAGRALRSATWRAGVTAAVLATWPADPAKRTPREWDDVRKAIAGGQHLPCTVITSRTRQAAAFARIHGRLPVDVFESEPAPRVTRMLLLSACDRQQATIERADEPGRALLRLQLPTRPDPRSYRDWTWVAAPIRLPPTVPAGAILHLPTLRIHQDRVRVDLAYTHPVPKTRRIGHRVALGVDWGLNTLLSAGAVRLHDDGRITALGAGGMFRAGGVLAKQHRLRRHSERLHAKADRYQWLIDGREDHTLEARHAAVRDEIRHVSARRSNLNDALAWSAARWSVDQAIAATATVIHVEDLRSMEARGMGRTMNTRLSQQVRGRIVDRMRHLAAEAGIAVVTVPAQNTSKHCPRCLTVLRHRKAPDRPATPGWKWAVCGSCGYQGDRDTGAWQRIAARGLTHQATTVTDRTSSAMVIRAVVDTLEAGAVITPTPTSRDRSKTGPTQHKPTRPAPRRRGAPSPARPHGRAGQRPEGHAHTDRTRLPRAAYRHQDVTTISTPTTSRHRPRGAALGAGFHLHAHATPPRWAYPMPDTPSGMGSLS

SEQ ID NO: 9832 - protein, 540 aa, unknown
  TnpB Polypeptide
MKIQSRYSKSFYSDRLSDTKYQEIYVFAVYLNKIKNEISKEVNSNLLFYLDMSKFEFQKYLLQEIKNKVHSNFVKQLLDDIYIAYQNKFDGINRKLKFEQICDYQILLYKRKTKNHKIGDFKGISKKTKTTELSATLTYLARYGNENIIPYLLEKFVKETDEKKEKFYATILDHIYKYGFGRLMKLALSRRERVIKHYSKYPINFTSLTFRGRSRLTSDIVSYNENFNSCIKAFINVSWSINNRKKLTIPVKYSKDFYKDMKRYTNSTDTSYTLCLEENNQIRMILSYADNREMPENKSNFVGIDINSKHNLFQCNNGDTIDYDRKLVETLSKELLKIDKCKKRNKDYEIGKRRSHKIKHLERELHSKIREEIVKLCKRFNSQGIDHAIFENLTGFEEKCFCKDENDLNYNRRIKLLKLSSLKDEFEHIARKYVIAVSLVHSCYTSQTCPKCGCIDSENRKSQEEFECIECGYIANADINASENIKERVVSTVLRNELLKNSKLDNGTFEPKKLKREKVKEVLLSFRYNLEKDKEINPST

SEQ ID NO: 9833 - protein, 406 aa, unknown
  TnpB Polypeptide
MKRRVSCSLNNFTKAKQNKLDEFFTEYQRVVNCFIDLYFEQDKLPSKISSAEYHKVNSWLLGKAMKCAGNQAIKIIKSIRDKNKQLVYKQYKRVFAKCKKSNRNRFGILDKVYSEWIKDKRINRKVKKPGFEKFVIDLNSDLISIKDSKKAKSFDLWIRIGSVFGGRYSLILPTKKHKQFNKMIANGFELAKSASLRKVENQYFVDLFFEKQDTPIKSGKSSIGIDLGINKLLTLSDGRKLGSDIKRLIKKLHRRKVGSRNYNQTLAEIKCYIGNAVNQIGIENYDLIVMENLKNITKNTKGRVNKTTRKLLGNWNINLVYRRILDKCEENRVCLTFVSPSYTSQMCSQCGEIHKESRNGEIYKCIKCSTILDADVNGAINILNRFKNEALTVPHNTEIQNLIDSV

SEQ ID NO: 9834 - protein, 368 aa, Proteobacteria sp.
MLKAMEYRLKPTKKQAHLLQSQLEECRCLYNHFLAERQRGWEERQESLTYDGQKATLPQLKAYCPELSTVHSHVLQDVAMRIDLAFKAYFRRGKARDGKPGYPRFRGHGRYDSMTFPQYGNGCKLVDGVPKLSKVGALRVVQHRPLEGTPKTCTIRRSSTGKWYVTIICDVEAHPLPVTGETVGIDVGLISFATLSTGESTACPKFLRTDEKDLKRTQRKLSAATRGTPERRKRRKVVARVYERISNRRTNFTHQESRRLVNRFDVIAVEDLSVHWMVHNHCLAKSIHEAAWSQFATFLSYKAAWAGRAFVAVNPAYTSQDCSGCGHRQKKTLAERVHRCVCCGLTLDRDHNAAFNIKRRGLQSLGFP

SEQ ID NO: 9835 - protein, 405 aa, Proteobacteria sp.
MGIEGALPYKGNRFSQRYSHFNCTSLSNYAILLLMCKTMKHRMYPTTHQQHLLDETLDTCRQVYNQTLAHRKEAWEQRQDTLSLYETNAMLTQWKQERPALAAVHSQVLQNAQERVDLAYKAFFRRVKAGETPGFSRFCGLGFYDSFTFKQSGFRVQDSLVSLSKIGSIRMVLHRPIEGTIKTVTVRRTPTHKWYVCFSVECEPLTLDLSTLAVGVDVGLSHFATLSTGEHLANPRFFRTDAKALAKAQRRLSKAEKGTPARRKCRTAVAHIHERITNRRYDFCHQSARRLVNTYGVLAFEALQIAHMMQNHSLAKSIADVAWGQFVRITTDKAACAGRRVAHVDPRYTSQDCSRCGQRVPKTLSQRVHQCPTCQLIMDRDQNAAINILRRGLASLGLAPRNPRL

SEQ ID NO: 9836 - protein, 429 aa, unknown
  TnpB Polypeptide
LRRVIEVTRTVIVKSTPLPRKLFRVFVELEGMYRNIVEQLVLYAVKNGITSFTRLKALKYRELRSLYPQLLSHYVYTVCQDVSTRVKSFLRLKRRGLAKSDYPAVNRVSIWLDDHLWRVRSLTSIEIATHRGWVTIELELHKQYWRYLNSSWRLASEAKVKLDKRNRQLIIYLTFKKSVEAYKPRGFTVADINENHVVVLVDDKVYLFETGFRDVVLGYYYRRKRIQERYDKLYGVNCRVKRRIFRKLKERRKKSDLKWKLANIIVRVAKEKQYAIVLEKLGMNPAKEMISRVKDDQLRHRIYQASFKGVQKAIEEKAREYGVPVIYVNPRNTSKICPIHNAKIIYSNGSRVGRCSEGGELWHRDIVACYNLLLRAHLGDGSVAPSLGGFTLDGSSIPLGSTATHDPTGIWESLWMRWKSLDETLKNLK

SEQ ID NO: 9837 - protein, 420 aa, unknown
  TnpB Polypeptide
MKRTSIVELIVDKSSEEKLKLLCSLSSKLWNEVNYARRRMFFEKRGVDLKATYKEFYEKYKILIGSATTQQILNKNDEAWKSFFKMLKLKKEGELPPFVTRVNPPGYKKKNNKRSLWTVLRKDQYKIEGDRIVLKGLGAIGWIEVRYKGLIHLRGEQGRLEIRYDQDRRKWYAHISFDASEKAIRGVWASVPRSPRGNLVAGIDIGINNLMAIYVENNLTKLVNGRPLKAISHYWRMRIAEYQSMLNKYGLKTSRTLRAMYSKWRRQVKSYVDSRVRQAVEWLYDMGVSIIKIGYPKNIAQENGDFNNVHVWTYGYLLRRIYEVAEEYGIAVVYVNEAYTSSKCPIHKEKCGKRVKRGLFKCTRLNKIFNADLVGAFNILITPSPERDRGNGLETRPGIEPSRRGDVTPNLPALTGTPAL

SEQ ID NO: 9838 - protein, 548 aa, unknown
  TnpB Polypeptide
MRTVRRQVIELNQGKAQALQCLVGAFADEKRFWLDQFARRDHRDLIARQRQVRDAALKAKYTPKSGLQARMWKLALADAAQTWDMFWQALFVEVRRRIGGRTDFDAADRHYAFWLLSSYEPFFGCLDGVAAPPKFAIDEVRRVKVAAFIRRRVKRMRGRNPMLRTAHSAVFDANCYSVFEEGGTQYVKLMGLEPGKRIVLPLLGRTAITGNIRLVLGADGTAHIHVGFDLVPAANAEDGPIVALDTGYTEAFVDTKGNAYGAGLGAVLSKASDERNASGKARNRLRALAEKAVRHGNPAKARRINRNNLGSVKWDRRERKARASIGRIINTAINEFVAGRPGAIVVTEDLRHTFTFDKSRAVNRRLSAWVRGALQDRVQFKALAEGFRHEQVSAAYSSQTCPICGFVDSGNRKGDRFVCIKCGTEDHADRVGALNIESRLTDPQITRFTPYPEVKAILLDRFHRRLEATETAVTSSDVKAVSSATVPGRTPDTAPSALPRAGFETSVLTGEDTAQAVSATTPAVTRRANPTKPSTMPPTNTGCICSRF

SEQ ID NO: 9839 - protein, 548 aa, unknown; identical to SEQ ID NO: 9838
  TnpB Polypeptide

SEQ ID NO: 9840 - protein, 389 aa, unknown
  TnpB Polypeptide
MQINKTYKYKLKLTKRQTEQIDYWLHTCRAIYNLALETKIHAYKSGQVNLSKFDLQKQLTELKREDGYEWIGEVSSQSLQDVIERMDKAYQTFFRGEGFPRFSKKDNYKSITFKSVKWNGHNRFKLPKFGSVKFHWSKDLQGVLKRAIIIKEINGYYINILTQQEIDTRQPIIHSDNQAVGIDVGVNFFAVSSDDEFVDNPRFLKANAKQMRILQRKLARQVKQSNNWRKTKHKIVKLHLKTKNQRKDFLHKTANNWVYNNSYDFIFAEKLQLKNMTKSTKGTTENPGKNVVQKSKLNHSIIDLGAGMFFEYMRYKSVWNNKVFIQINPAYTSQTCSKCGYVDAKNRKSQAIFLCIKCGHRENADRNASNNIKREGISLFRQREALACA

SEQ ID NO: 9841 - protein, 334 aa, Escherichia sp.
MIKQQAFKFALKLNEQQKANMLLFAGACRFVYNKGLALLKESYESGQKHMHYNQLAPLLVEWKSDPALSWLKQAPSQSLQQSLRDLDKAFSNFFYGNAEHPRFKKKGQHDAFRFPSQRVKVDQEKQLVLLPKLGWVKYRKSRDITGDIKNVSISGKLGKWYISFNTQTDIEEPVHPAISKIGVYVDAKKNITLSDGTQYIPPQSLITLPKQIQRLTNCLRKKNRYSNNWLKSKHRINRLSSRLNQVKVDYLHKASTAISKNHAMIVIADIEKKSFSADKQQKNITTCEKSTSIHYELIRQLTYKQEWLGGLVIKLPAEEQKLQRKTRHHEQNVR

SEQ ID NO: 9842 - protein, 423 aa, Microcoleus sp.
MQLTERHIIKSTEHRFTEIDELAFKSKNLYNAANYVIRQSFVYGWGYVNYNEMNRLMKSHPAYKALPAKVSQQILMRLDKNWKSFFEAVKADKTDSSKFTGRPNLPKYKDKIKGRNILVYTIQAISSKQLKKGIIKLSGTEILIKTKVKPDQLCQVRLVPKCNYYVIEVIYEEPESTVSNDNSVASSIDLGLNNLVALTSNQPGFVPLLINGRPLKSINQFYNKRKAQLQSQLKGSRQTSPRIQRLTRCRHQKVDNYLHHTSRLIVDILVAKQIGTLVVGKNAQWKTESGLGKQTNQNFVNIPHARLIEMLEYKARLVGIKVIVQEESYTSGANFLGLDPIPVYGTTDKDAVFTGKRIKRGLYKTSVGQLINSDVNGSYNILRKAIPNAFSNGIGSCVVQPRRVNPLKVKVKGEGLNASHVMS

SEQ ID NO: 9843 - protein, 447 aa, unknown
  TnpB Polypeptide
MKRKFTVVTELRRSQNMKLIVYLDLCFADYGKAKRETFHRIKNSNCFDKSKHNTFLQTKYDVLKRTANSIISDAQMTLEGVKELTKTRKKSLERKIPVIEKKIEKLEGKLEEKKVLLRQGKHVPLRSYTNMKKQLVRMKKNLNKWKQKAGYLGYQIEINKFKVCFGTKDLLKKDKKAFVTQRDSQLSFIGCKTESACNNLFQLTYNNRVNQFQIKLRKDWGGYKNSKDKYVYGKCYFSYHKNKIIEILKNHTSPLSYKVVRKNGRYFLHCTFEMDVKSEEILTRKNNGVIGLDFNKGFVTLSETNEYGHLIRMDKFVYRFGQNQKTRSDLEQIASKVKNLALETGKDVVIEGLDFQSTKAKTIAKQGKRGRKYNHMLHTLAYSKFVTTIDNCCYRNFVHLIKVNPAWTSWIASHKYCQPMKLNVHTGASYVIARRGQGFYDQVNTAA

SEQ ID NO: 9844 - protein, 358 aa, unknown
  TnpB Polypeptide
VKKTLKVKLITDDFHHRALLGTMSVFNQICNEFSEIAFEHKEFRKNQLQKIVYHASREKYENFSSQLTIRAIDCVCCSYAIRKHPKYANNFKRNSAVVYDDRVISFHENYVNIWTVNGRLKIPIHIHNTELFKYRKGQVDLVCRSGKWFLLCTIDIPNSEQYVPKNCIGVDLGVKRIATTSENESYLSDTIEKKRVQYSEHRKRLQKRGTRSAKRRIKNIGNKEARFRKDVNHCISKQLVEKAKGTICALALEELKGINTRVTVRKSQRNQRLSWSFYQLRSFIEYKALEQGVPIVIVPAPYTSQTCSACGHCERKNRKNQSEFICLDCGFAANADYNASLNIKSLGLQSISLLFGSN

SEQ ID NO: 9845 - protein, 526 aa, unknown
  TnpB Polypeptide
VCYNTHIHCKSTQGGESVKYYDTVTRYRFTTDGGVDVEQVSRDLAQMVAWMAKAEQEVLASSEFHDLALKALRGDRPTGSLNSWGRKRLSRYDFSFQKHNMNEMLVSNVVGTLELYAMSVGLFQVMSTHPKETSPEKILSYYRGTYPDASQPTSGMVRAHLRRYHLKGDRKASLPGVSAKLNLAVCDTHFAPKVFRDDSDPLDVAVQVKTPTYGLTRLYFRLPENESRFGDGKVCRPTIRLNNKGQVVFDVTIEHEAQQRDTNKVIGVDLGKVEPFIATVIDPRVKHRSAPFRANYKRHLGSLVKKEQHRRDLVNHLYERADLCEKHSRDQHAQVLRTEAKRVSAKATRIKHEISRCIASQIVSVADRNDAHVSLENLSWLDAQGGRWPHAEIQHRIENTAKRYGLKVVKVSAKNTSRTCSRCGGKVSNNSKTRVSTCSICGFLLDRDVSASREIGLRAVSNTRNRDRMRCLLRQRREMRSSAVTRQSKPVNALGGIQGHTGTSNNRLEATLMMVRETLDSRGSPT

SEQ ID NO: 9846 - protein, 718 aa, unknown
  TnpB Polypeptide
MAAQGILDSMFPVACAGVQNINKNKDLTEQEVNILYSVVDDFDNQKEKYDWKSAVQTISGVASRFVAKSNSKNNQIAMPLLIQQTIFFMAVRGEDYKLYKQTELMYEFTGNKEYNPKGKYICNNNTTLNIGKVFSKLPYDYKYYRSCRDYKFEYKSLSGVAYSQPAILFNYNGQKDKELGIAVKNLVYQAGKYTKFVDVFGGTGSASLAFPKRGYGEGKRGYVPYKYNDLDADLCNLYTVIKSEDYKVLIEELYKLKSALEGGEQLEGIDFNNEMIKFFNRATSASQKTRDTQQSESGETAILDFSGAETRVDFADVVKYINDICENVNFMQGNFEYSGVVYTKAELLEKLGSLKSDSYYADLMYNQAIDWNNELYDSEGIFYSKFDLINMLPAFKEEHPEFASVDSFVLKTAVTDFRTALNRMKHGAKYPRYKKIGKQLSFGTRNDRLKVFENKVQISSIGIVKCKHCHWLTKTKTDEELACMSWHNPRVKFDGKYWFLSVGVEVDLTSDEVTDEIIGVDLGVRKTIYTSNGITKPNINNSRKVVNLEKRKKRLQKKVSRKYELNKHGKKYIKTKNIKKTERQIRLIDRKLSCIRENYNQTITNELIALHPKRIMIEDLNVSGMLKNKHLSRSIQQQCFYRLRQLLIEKALNTTTTQIGVVDRFYPSSKTCSRCGYINRQLKSEEIYKCPKCGLIIDRDYNASINIRDCKDYKIVAN

SEQ ID NO: 9847 - protein, 397 aa, unknown
  TnpB Polypeptide
MYLVERHVIKEKNPLHKELDNICFLTKNLYNKGLYLVRKHYFETKKYLDYLKLSRILRDSKDVDYYSINTKVSSETLRVLDRNFKSFFSLIKKKKNNDYDKPVKIPKYLDKDNRFIATFNKEAISKKYLKEGTIKLSGISNIISTEKATVDNIVEVRVLPRNNHHVVEVVDKVEDKENKVDNERYASVDLGINNLMTVSSNVTKPFIINGRPLKSINQYWNKELARLKSLLKGNKQTSKRIQSITNKRNNKVNDYLHKSSRKLVNFLVSNNISTLVVGYNEEWKQEVNLGKRNNQSFVYIPFCTLIKQLEYKCKLEGINFILTEESYTSKCSFLDNEEVCKHENYLGKRIKRGLFKSKEGKLINADLNGSLNILKKVVGEFQYPIEVCSTPLKINVK

SEQ ID NO: 9848 - protein, 391 aa, unknown
  TnpB Polypeptide
MYLTERHIIKNSKELDEVCFKSKNLYNKALYLVRQHYFNTKEYLDYFKVYHILSDSKDEDYYSLPTRVSDQTLRLLDKNFRAFFSLIKKKKEGSYDKPVKIPKYLEKDGRTIAIFTKWSVSKVYLRKGLVKLSKLDILIPTKVKESELVEVRILPRNNHHIVEVVYEVENKETKIDNNRYASVDLGINNLMTVSSNVTKPFIINGRPLKSINQYWNKEKARLQSLLKGNKQTSKRIQSITNKRNNKVNDYLHKSSRKLVNFLVSNNISTLVVGYNEEWKQEVNLGKRNNQSFVYIPFCTLIKQLEYKCKLEGINFILTEESYTSKCSFLDNEEVCKHENYLGKRIKRGLFKSKEGKLINADLNGSLNILKKVVGEFQYPIEVCSTPLKINV

SEQ ID NO: 9849 - protein, 345 aa, unknown
  TnpB Polypeptide
VSRKFYNEALVIYKNGSKKFWDKVYKDIAEQNKDKDYIKSVPYQIKKVSVKDYTKALSINKKKAKISGKPFEMKFKSKKNPKQSCYIPKTAISSSGIYYTIAGKLKMKERQWFENEDINDCRLVLEHGKWFIVIPKEIKTTPIDNQEGVVAIDPGVRTFATYFSTEGYFGKLGKGAFERILKLNLKIDKLLSKISLEKDRNKKANLKRKVLNLRFKIRNLIDELHWKAIKFFTSRFKVIIFPPFNVSEMVKKSKRKLSKKVVRAMYCFRFFEFKERLKLKCKENGVTFIESSEAFTSRINSFTGELIKNLGGKKSFEFDNISVDRDINGARNILIRAMRDASAYS

SEQ ID NO: 9850 - protein, 362 aa, unknown
  TnpB Polypeptide
MEKAYKYRIYPNKKQKEQLAKTFGCCRYVYNHYLAKRIEKYEADKSTFNYYDCCKDLTQLKKEYDWLKEADSTALQSSLRDLDTAYQKFFKEHTGYPKFKSRKTHQFSYTSKGNVQYLYEYIKLPKLGMVKTKNTIVPQGRILNATVSQEPSGKYYVSLCCTDVEMQPLPETGKSIGIDLGVKNFAVTSDGDVIENPKYLKKSLNKLAKLQKELSRKSKGGSNYNKARIKVARQYERIANQRKDFLQKLSTRLIRENDTICIEDLQIKNMLKNQHLAQAIFDVSWSEFVRQLEYKAKWYGRKVVKVDKFFASSQTCHNCGYINKDVKDLHIRGWICPCCNTYHDRDLNAAQNILDEGLRVAI

SEQ ID NO: 9851 - protein, 352 aa, Acinetobacter sp.
MKTLKLRIKDKHCKVLNQLASEVNFVWNYVNDLCFKHLQKQQQFFSAYNIAKYTKGTSKECNLHSQTIQAVTEELVTRRKQFKKAKLKWRVSNKKSARRSLGWIPFKKVAIKYDDGYVQYGKHRLNLWDSYGLSKYTVRTGSFVEDSRGRWYVCLVVDTPKAEKANTTKAIGIDLGLKDIATCSDGTVISNPKYYRHYEQKLGVAQRARNKKRVRALHAKIANSRKDHLHKASTALVKNNALIIVGDLSARKLVKTKMAKSVLDTGFSALKTMLRYKCENAGVLFEEVNEAYTTQTCSCCGSRSSSPKGRAGLGIREWQCGECGSSWDRDVNSALNILALGHERLAVGIPLL

SEQ ID NO: 9852 - protein, 365 aa, unknown
  TnpB Polypeptide
MRKAFKYRIYLTNGQRRILERQLEECRWVYNETLATRKNAWEQEQRSVDWYETKRALPRLKDVRPSLKRVHSQVLQNVTERVEVAFKAFFRRVSAGEPEPGFPRFKGNGRYDSLTYPQYGNGVRLDGDRLILSKIGAVHVVLHRPLEGTPKTVTLRRSRTGKWYACFSCEVEAEPLPLTDAVVGVDVGLASFATLSDGEEIANPRFYRRDEADLKRVQKLKDAAKNGQRWEENRRRGTALAHIHERIANRRADFAHQRSRELVNSYQLIVFEALAPMEMGRSRGMRKSILDVAWSQFISLTVAKAEEAGRRVVLVNPRDTSKMCSSCGELVQKPLSDRTHTCPKCGLVLGRDHNAALNRHYPDLW

SEQ ID NO: 9853 - protein, 327 aa, Desulfobacter sp.
MKLLIKKSFKYRIYPTRAQVSNLENQFSMCRHLYNWNLKERIEAYEKDETTISYNQQQNQLPQLKIERPWYKGVYSQVLQDVLRRLDNGYQAFFRRVENGDTPGFRNFKKHIEPEQDLQNSIGIDLGLNDFLYASDGSHVSTPKFLRKSLDKLARLQRRFAKAKKRSARWYKLLKAIRKCHYKIRCQRHDFLHKTANALLKLGNVICHEDLNIQGMSRRPKPVQDKDGKYLPNRGSIKAGLNKSINDAGWYQFLLYLKYKAVEQGKQIISVPPQYTSQKCSACGQIVKKSLSVRTHRCSCGFVADRDHNATINILRVGLDTLATSVA

SEQ ID NO: 9854 - protein, 375 aa, unknown
  TnpB Polypeptide
VKLIAQLKLRPTPEQSDALRATLVTANAACDYVSRVAWDSKTFREYALRKLVYGELRASYGLGAQITQHCVAKVADAYAHDQDTPRTFKPRGSIAFDDRNLSYALPDASVSIWTLRGRLRIPFVCGERQWQLLQTRRGESDLVYRNAQWYLLATCDVEEPAPGDLDADDALGVDLGLVNLATDSDGEVHAGRTVTNVRARHRRLRTKLQAKGTKGSRRRLKHLAGKERRFARHTNHVISKGIVAKAERTTRVVALEDLTGIRARARARRPQRATLHSWAFAQLRAFIAYKARRAGVRVVLVDPRHTSRACPACGCVDKGNRPSQSVFCCVRCGFAGHADTIAAENIRRAAVSRPDCSDLTGGESARAKPTSFCGG

SEQ ID NO: 9855 - protein, 335 aa, unknown
  TnpB Polypeptide
MKPTIKGKLLFDSLEDRALLLYAMRNFKDAVEYAHSLMRKGVRDGEIVKLLTSRILNNKWYSVSALKRAKLYRDQPYLKLRRPQLFSVGSRDEGGNRNIKLDATDTVRIKIPSASGRHRWITAKAQFSKKHLPIIQELVNVRTSYGAGIYLKNGRFEIHVNVPLELYVKHMRKKTRAKVADHFAGFDFNPDRICMVIIDRKGIIRDIKSERFPEVTSHGYPRDKAGAVRQEALAKLVKYARDHGARYYVIERLSRPKPKGSKSARRKISKMALRQFTQQMEVLVPKVGGVLVKVNPAYSSVSAKIVAEDLGLDVHMASAYIIALRGMKKIQKDTE

SEQ ID NO: 9856 - protein, 367 aa, unknown
  TnpB Polypeptide
LNIAYRFRIYPTEEQKIFLGKTFGCCRFLYNQMLNDKIREYEKTKKMLKHTPAMYKKEYPFLKEVDSLALANVQLHLEKAYKNFFRDSKIGFPRFKSKHHSRNSYTTNVVNGNILVESKRIRLPKLKWIAMKKHREPAEGLCLKSVTVSMEPSGKYFASLLYEGYSCENQAAEPDYSTARILGIDYAMQGMAVFSEKIETEEAGFFRKNEKRLAREQRKLSRCVRGSHNYELQKKKVAKCHEKIRNQRRDYLHKLSRKIADGYDAVAVEDIDMKAMGQCLHFGKSVQDNGYGMFREMLDYKLVWKGKKMVKVDRFFPSSKKCCKCGRIKKELKLSERVYHCECGNEMDRDCNAAINIREEARRMLTA

SEQ ID NO: 9857 - protein, 392 aa, unknown
  TnpB Polypeptide
MRAYKTEIQPNKEQIELIHQTFGNTRYVYNQYIKLNLDRLKEHQDIISGYDYSKMLNNDAERPAWLLKSPSKAIKQAIMYAHQAFWGYLNGNQGKPNFKKKGKHNSFYLIGTIKVERHRIFLPKLKWVRLKEFRYIPNNVKSVTLSMKNGRYYVSCLTNETIDERIVTSKQGLGIDFGLKDQFITKDMIIPSVNKSNKIKRLEKKLKREQRSLSRKYENNITDKVYYKAGKKKGQLKSFKMKRPLYECKNINKQRLVVGKLYERITRIRTDYNQKAIQLILKQKPSFIVIEDLNVKGLMKNKHLSKSISKAQWYTSRLFLTNQCNKLGIELRLAPRFYPSSKICSDCGYKNKDLKLKERSWVCPKCKVVHDRDVNAAKNLEQCKNYTVLTAV

SEQ ID NO: 9858 - protein, 429 aa, unknown
  TnpB Polypeptide
MEYTHRYCARPSSEVAAEITRHINIHRQAYNHTQYEYENLPSDTDTIGSAYKHHKRLTSWKDRFPVFGEVHSKALQCTVKRFYDNLSNLKDRKDAGYTVGRLKWKPPREYRSMTYSQSGFELKNTSGRTATLWLSKIGDMPIRYHRPIPAEAVIKEVTIKHESTGEWFVSFALEVDDDHLSEKRPVDELEAADCVGVDLGIRNYIHTSDGLSVGKLDVEMEYERLRKAQRTLSRREHGSENWEKQRQRVASIKRRIRRKVLDFQHKLTTWLVTEYDAVFVEDLDMKRMLEDSQNARNKQDAAWRQFITLLEYKADLYGCHVRQIKPEDTTKLCSECGVKTDKPLWVREHSCPACGFELGRDWNAALNVLERGLRKLGLGQPEVQRLLETGAAVGDDHSWSVSASTVVEAGSPTREQGSPDLNEAAVAAE

SEQ ID NO: 9859 - protein, 273 aa, unknown
  TnpB Polypeptide
MFRHREYGGELRNITISQEPSGKYYASILVLEPDPNVQQMPKADESAIGIDVGLTSFATLSDGTKIEKEKHLVQSEKKLKKAQRRLSRKEKDSNNRKKQRVRVARIQDHIANQRKDFLNKVSDALTRTYDTIGVEDLGIQHMMKGNNLRAKAIADAGWYTFKEMLKTKASRRGKNYIEIGRFEPSTKMCSNCGHARPEMKLSQRRFVCDECGYREDRDVNAAINIKRFALISEGVPTESGELTPVDRCTTALELLEREGIRASALVEAGSPVR

SEQ ID NO: 9860 - protein, 399 aa, unknown
  TnpB Polypeptide
MKKKRKKKQRRRTYKYQIREHPQNMRLGNMLDDLCDVHNHFLKLENRYYRRYGKYAGRYRLQPHLTKLLERTHKHWTWIPRDTLDAVIIRIHLSFENFFDVPKFGRPKHKKRGKYRSAKFQSAYLLEEGGVRISFKEWDEPSQSFKFNKRWFSFHQHRDWKGNVCYIQILRDAVGTYWLYVVIDDVSKEVLPATGESVGADNVIQGMDLVYSQTKSGMKAAFLTLSTGEKIQSPEFLKQSLKALRSLNKAFSRKVVGSNNWWRCLRQLTRLYRHISNQRKDWHWKLATDLCRRFDAIATEKLNLRGMKRLWGRKVSDLSFGQFVEILKYKCFKHKREFLQAGQWTPTTKPCSDCGYHNKDLSLSDREWTCPECGSHHDRDINAAINILRAARGPSVEQM

SEQ ID NO: 9861 - protein, 580 aa, unknown
  TnpB Polypeptide
MSRKKIEVPGEPLTITRMRERHSHVLTDQAKVEQVKALAIGYQELVRETAHRYWPTERMPQVLGYPQGVITARRKNGEAQRCPLPSHYQAQAVLDGLDVIRASWKQTFAAVRSKAARRFPDTIETTKDEKVQSQDKPVQNQTRHEINWFLCWPELLVRIMAGEVVSPLDKEGKMRPEFASNDHAMVCRWLNRALHSLRAGQPQIKKRLSLEAETSMLRIYKTPAPPKKRLPGKGQIKARHFEVFVSLQGPTPRQRLLIPMSGHDLSVLDQPGNVRIDVEADTRGRERIVFRKAIKTEVVARTGTDEVGLDKGAGIAIAATDSDAEHAQHFGTESGAVLLKRTDNQYRRRRSKFNSQADNLNGRWTARGRFHGNSKPTAAQKRTARHIRRNNLGSERKDAELRRAQAEVSNINGRAVREMAEAYPNAGVFREEKLNFTSANKQHKEKGVGRFLNGWAKRDLSKKLELHISASGARREFVNAAYTSQECPACHWTHGGNRSGPSFVCSRCGYTGHADSVASSNVRSRGSDGDITTFTPVKKVKEILLARHAESDARYASRGPDHQPAPAVPGTGLLDSVESF

SEQ ID NO: 9862 - protein, 580 aa, unknown; identical to SEQ ID NO: 9861
  TnpB Polypeptide

SEQ ID NO: 9863 - protein, 323 aa, Clostridium sp.
MGSNTLLDNYSNTNKPLSIYANPFLHYFFQQTFVVRSYIVYVHYTFSSLFYSIPLPAKLLTPAALPILFRQKRTILANALNGRVKLSYFTEGMSQYFDQTIYKFGTAKLTKKLGKYYLHIPVTYDVEESNISDICNVVGIDRGINFVVATYDSKHKSGFVSGKAIKQRRTSYSKLRKELQMRQTPSARRRLKAIGQRENRWMQDVNHCVSKALVESNPKHTLFVLEDLTGVRNATERVRTENRYVSVSWAFYDLEQKLIYKAKQNQSSVIKVDPLVISVFSIYLVYTLSILYGQNIEILLLLSFLSIILWFSPFIFYIISSNK

SEQ ID NO: 9864 - protein, 528 aa, unknown
  TnpB Polypeptide
MPMKGKSKVSKTKQGNDCTMSSLTSMVQLELPLFATAESVQSSNEMTLRDKSALCADSIQRQKSSKTSVVGLTSKEKDLEPYWTDYCGEINSQLLCPHWTDYADLDSSLYSIWSNKTVAKSWFSTKLFTVPNQNLQQTCYKYFTSSLAECPDSGSTLKKSKKVRIYPTTEQKKLMKHWWGVSRFVFNQTIKYLQEPDRKANWKAIKTGIINDLPEWAKEVPYQIKSIAVKDACEAVKNAQRKYQKTGEIQKIKFRSRKDKQQSCYIPKSAISEKGIYHTKLGQIRFTESLPDNFGDSRLVSRNGQYYLAIPHEVQRCESDNQGRIVALDPGVRDFLALFSPNSFGSIGSQDIGKIQRLCYHLDDLISRSTKVNAKTRNRYRKAASRLRNKIRNLVDELHHQVARFLVDNFDVILLPTFEVSEMVLKNSRKIRSKSVRQMLNWSHYRFKQFLKHKAFEMGKLVIDCCEAYTSKTVSWTGELIHNLGGKKVIKSKIDGKTMDRDINGARGIFLRALGDTPSLRDSLRVHC

SEQ ID NO: 9865 - protein, 442 aa, unknown
  TnpB Polypeptide
MRTVSSYGVELRKQNIPIRQTLDIYRSAVSCLIEIYARTWDELAVITEPKKRFNTAEHLVHTTKKNEARFDFDLRFPKMPSYLRRAAIQHALGSVSSYKTRLKLWEKMDQKGGTPKLVCGNHAMPVFYRDVMYREDTEEKDGAYLKLYDGHDWKWFRVSLSHTDMEYLRKNWAGKRAAAPVLEKRYRKYFLCFSYTEEVPLTKAPVKEQIICSVDLGINTDAVCTIMRPDGTVLGRKFIDFPSEKDRMYRVLGRIRRFQREHGSRQVQGKWAYAKRLNTELGRKIAREIVLYASEKKADVIVFEYLEMKGKLSGKKKQKLQMWRKRDIQKRCGQQAHRKGIRISRICAWNTSRLAFDGSGEIARDIRDHRLCTFQTGKRYNCDLSASYNIGARYFIRENLKPLPETERSLLEAKVPAVKRRTSCVYADLRELISEMELRKAA

SEQ ID NO: 9866 - protein, 411 aa, unknown
  TnpB Polypeptide
MSEFIRFLLLDYAKNDSIYAITVSVNKDKFMLVLEAKLKGKTEQYNLIDEAIRTALFVRNKALRYWMDNRGTNKYDLSAQCAVLAKEFDFARKLNSQARQSSAERSWSAISRFFDNCKKKVSGKKGYPKFKKRGHSVEYKQTGWKLSEDRKYLTLTDGFKIGRLKLVGSRDLNFYQIEQIKRFRLVKRADGYYAQFCVDVDRREEMQPTQTTIGLDVGLNHFYTDSKGEVVENPRFLRKSERQLKKLQRKVSKRKKGSANRRKAIKRLARKHLQVSRQRKDFAVKNARCVVRSNDLIAYEDLQVRNMVKNHKLAKSISDASWSMFRDWVEYFGKAFGKVTVAVPPHYTSQNCSNCGTTVKKSLSERTHQCSHCGTVLDRDHNAALNILAIGLNRVGHTQISTPVESSTSAS

SEQ ID NO: 9867 - protein, 468 aa, unknown
  TnpB Polypeptide
MGQAKRTTKLLFDLGKRTQGGANTGKRAYLDETAQVLNQGRGFYIEFFLAHAEKFQETVVYYSNKHLEMRERPISPNELLTWAEAGTCETREHPHPWTGWNFSQQFPEMPFVYRRSLIKDAIGKVRSYLSNLKNWEKTGKKKSKPGQPGAANHPTLYQGSLTFDLETFNAQHRFVQLKVYTGSRWEWHTYPVQASRFFEQRIKEASWEQESPKLVLRKRSAELHFPQTKTIEAKKVVESKQDPDLVTIGVDLNVKNLAVITVRQHGTSIETVFVRDHGLDRARYLHLKKISKKQYLSGKPVKGEHSNQQLWTHVRRMNEDAAHKVSRIIASVCRKYPGCILLFERLRKIKRGGGSTSRRMNRRQSNQLRGKINQYAKDKNYAQGLVTIEVNPHGTSQYCSRCGAKGERFSYRNGVWVKEKWGKIFRCPVCHYQANADHNASVNMHHSFYNEWHWQRKLKSSPQAAPSG

SEQ ID NO: 9868 - protein, 403 aa, Cyanobacteria sp.
MKARYKYRIYPNQPQKTAFSQLFGCVRVVWNDALAFCIEQHKKGEKKPKNGELQKQFITQAKKTEEKEWLGEVSAIPLQQSLNDLNQAYSNFFKSCQGERKGQKIRPPRFKKRKSKQSARFTRGGFKVHQHNVYLAKIGKVKIVWSQELPSEPSSVTMVKDSPDRYFLSFVVEIVPDPLPKTEKSCGIDLGITDFATFDNGEKVKAPKPLKKNLKRLRKLQRQLSRKQKGSKRREAARRKVAKLHAKIKDVRTDFLHKLSTRIIRENQSVALEDLNVSGMVKNRKLSRAISDLGWREFRTMLDNKADKYGREFRVIDRWEPTSQTCSCCGEKGGKKELSIREWTCLWCGETHDRDVNAAKNIKVAGGHPETVNGRGGKGKTVSKTALSREASTAPRYEQLSLF

SEQ ID NO: 9869 - protein, 657 aa, unknown
  TnpB Polypeptide
MTEEEKEEKKQQRNLLLLEKHLSCQGLKFKRFVDLLILRKSQALQHHLVTEELTEKVFNQCLIMVILMIKSKLARKRIFSTLVFQPKNKWMTFLDKLSLSKDQNILPILLFQILVQELISKEKACKHYWTPVYKKESEKWSLPIVTDCAGLDLNLLKVSSKKQVEKSQSLVLKTMKLTNQKNLQMTCSQLLPSLVADKWEEEVIKTEKAKQKTIKIKIYPSNQQKTALNEIFSVYNYVYNKTNELIKNKNCSYLKWMDLRDRLVTCDTKKNDLEYIKNSELKALVKKQFDLIYEMEEEKEIDSLALPSFMKREIIESIEANIRQSNKSVVSKENMEIKDFEKKIHKNIRADAVKVCCEMYKSAVSNLRNGSIKYFNIAYKKKSSPSKCFGGIDTNMIKFKNQGISLMPKKLGKDLCDFKISKKSWSKYSKKDISGECKVFYQKGNYFIGLTLLTKEKNTGKTDKVCGIDPGLRSFCTIYDKQNILEINQNRAYLKALNNKIQILKAKRLRPRNEIDVLKKRRQKRHFNKIEKKKIDYTNSVHWATINFLLKNYDTILLGDIKSHDIVKKGFNKSNNQEFNDLKFYVFKQRLIYKAGLANKFIKLVNEFNTTKCCSNCGNLNHCVGSSEIYNCNKCNLTCGRDSNAAKNILLKGILCK

SEQ ID NO: 9870 - protein, 391 aa, Oscillibacter sp.
MYGKGAARKGGKTQYTTIKVRLEPTAEQAELFEKTFGCCRYIWNQMLADQQRFYAETDAHFIPTPAKYKKEAPFLKEVDNQALIQEHNKLSQAFRVFFKNPESFGYPHFKRKKNDRDSFTACNHVFESGPTIYLTKNGIRMTKAGIVRARFHRRPQNGWDLKRITVEKTRAGKYYCCILYAYAAEEPEPVVPAPETTVGLNYSVSHFYAADDGSTADPPRWMKQSQEKLVRLQRRLSRMQPGSQNYREAVRKYRLLHEHIANQRLDFVHKESRRIANAWEAVCVRGDDLGDIARKLVYGNALESGYGMFRECLRYKLERQGKPLIVVDRYAPTARTCSACGLVRDAVGLKEDLWTCPKCGAAHRREVNAAKNIKAQGLARYFGSQERRVSA

SEQ ID NO: 9871 - protein, 387 aa, Clostridiales sp.
LSILTIEGGEKMIKSVKIRLIPTKEQELLMYKSCGVARFAYNWALAKWEQEYKQGLKPSKYSLKKEFNNTIKKDLNYSWLYEVSGQITVQAFEDLNTAYTNFFKGLSKYPRFKTKKSFRKSFYVRYDRMKFKDGIVNIEKVGKVKYKTNYDIPNLDKYYNPRCSFDGKYWYLIFGYEQSENQAELNNDLSVGIDLGVKDLAAVSCMDKPIKNINKSKKVRKLKKKLKRLQRKLSRKYEANKQGNKFVKTNNIIKLEKTIKLIHRKLTNIRNNHIHQATASIVNLKPYRVVMEDLNISAMMKNKYLAEKIAEQKFYEFIRQMKYKCEFNNIEFIQADRFYPSSKLCSYCGEKKESLKLKERVFTCENCCLTMDRDKNASLNLSRYKSA

SEQ ID NO: 9872 - protein, 386 aa, Solobacterium sp.
MKGYKFRLEPNETQKKQIQETLDSARFVYNRFLDLNEYAYQTEGIHLSYVMMCSLLTDLKQDPEYPWLKQADSMALQTALKDLDEAFQNFFAGRAKYPKFKTKKHAYKSAYRTRNQKNCIQIIDKHHVKLPKLGVVRARISRVPHGVIKNAAISRTATGKYEVSFCVDEIAVPKTSAGGEIAIDVGLAEFYTDSQGRIVENPRILAKLSKKLAREQRKLSRMYESARKAGRQLNSCMNYQKQRIKVAKIHERIVNTRTDFLQKQSTALADENQIIYAEHLNIRGMVRNHKLAKAISDVSWSAFFQMLEYKVKERNGFLIKVDTFYPSSQICHECRYKNPAVKDLKVRKWNCPQCGAVHDRDQNAARNILAEGIRILNEPQTAVSVV

SEQ ID NO: 9873 - protein, 468 aa, Massilia sp.
VDSSPASERRRPRDSTNSASKCSQTLVKMAERSSGDPGDELHGGTFVKYHVHMHQQVAMTSASSIVVSAHGPNYPIHMQCLQAFKYELMPNGAQACAMQRFAGSCRFIYNKALALQQDNYAQGNPFIGYVAMAKLLTAWRNSPETPWLKEAPCHALQQALKNLDHAYKNFFEKRAGFPVFKRKGRGERFRYPDPKQIKLDQANGRLFLPKLGWLRYRNSREVLGEVRNVTVSQKGGKWFTSIQTQREIESPLPTATTAIGIDVGIARFATLSDGSFVAALNSFRKHQQRLARYQRRMSRKLRFSNNWKKAKARVQKTHNRIANVRKDFLHKTSTTISQHHALVCIEDLQVKNMSRSARGTAEQPGRKVKQKSGLNRSILDQGWGEFRRQLAYKLAWRGGMLLAVPPHHTSQTCPCCGHVSQDNRRTQAQFLCVGCGYEQHADVVGAINILERGQRLLACGEPVLQAAR

SEQ ID NO: 9874 - protein, 668 aa, unknown
  TnpB Polypeptide
MKKSKKKKSISKVKEKVKSQKHTDYIEKYNKSLNIYKTIKTSLKSIIQDKTDKNTLELAILNINQIIIHTYQFLKLYCIHIYDTTTKLPNINGQLINMIMKVLCIREGKSNSGKKLNADKLILKNDLKTFYTDYYSKTLSGPLKLSYTNLNTVLDYETVDIITNINNHIKEHFITFLNRYINVSVNKQINETYIKTFIPKELQKISLKYYRKEIGLIKTDILNDENKCNIKYNLLKTKLRTILLPNNLSKNIYRDINDNPLNYLQCMIKMSREIENKGEALFGCFPLKSSLAPKYIKLDTTTIIHLLLPKHLNKTYYLTNGNTKLLQDDIWNMLFKTNKKVFKDKKYTFNNSILTDGIGCSLLFIRNDKYDPLKVVKIHSIQKPFNYREFKYVDELTSEEKESIKNLHLVGIDPGKIRLISATDGIDKGIDKHKMNLFTYSHNQRKHETKVNKYKHIIEYLRKQSTINNLSIEEIESSLSIYSSKTCIFSKCIDSITTKNKINTLIHEFYEKEIFRKLKWYSYINKQCSENKMINNFQKIFGDPKDTVLLYGDFSENSPMKNCEPTKGKSMRKLFKRHGYKVYLVNEYNTSKKDFLTGKDTETFLERTDKNNNKRLVHGLLRLKGVPNNKSCNSILLNRDLNGSMNILIKGKCILNNINIPKYLRRSH

SEQ ID NO: 9875 - protein, 218 aa, unknown
  TnpB Polypeptide
MLLHQGSGYRVKEGYVEIIGGVKLKIIGLDRRYDDYENGEARLVYRDGKMILWISKKMPKLKPYQPRDVIAVDANERKMVYGDHVINKERDTGVDRAHRFKLHAESLQEKYSSPRYPAWRRRKGILRRIRSYHRKARDIPEDWARKTTLEIVELAKKLRYAVAREDLTGLINTLRRIENKDHRTGLIIMGYRRIGKWIDWQAWKQGVPLAIVSPNGVS

SEQ ID NO: 9876 - protein, 395 aa, Oscillatoriales sp.
MTLKAFSYRFYPTPEQESLLRRTMGCARLVYNLALAVRTEAWYKDQKRVGYAETSSMLTEWKKTEELDFLSEVSCVPLQQCLRHLQTAYTNFFDGRAKYPNFKKKRNGGSAEFTKSAFKFKDGQVYLAKCADPLPIRWSRMLPVGCRPSTITVKLSPSGRWSVSLLVNVEIEALPQSGSQVGIDLGITTLLALSTGEKIANPKGFKAKYRKFRRAQKALSRKQKGSNNRYKARLKVAKVHQEIADARKDNLHKLTTRLVRENQTIAVENLAVKNMIKNPKLALAISDASWGELVRQLEYKCEWYGRTLIKIDRWFPSSKRCGNCGHIVDKMPLNIREWDCPNCGTHHDRDINAAKNILAAGLAVSVCGATVRPEQSKSVKAGAKPRKGQKQKPKS

SEQ ID NO: 9877 - protein, 392 aa, Oscillatoriales sp.
VLVLEYKAVVKPSQSKFIDEAIRTSQFVRNKVLRYWMDNRGVGKKELYQYNTQLRAEFDFVKDLNSHACQASVENVERAINRFLDNCKKKKPGKKGYPRFKKNCRSVEYKQSGWKLNPSKRRINFIDKKGIGEVKLLGKWDIHTYPVELIKRVRIVRRADGYYVQFCVKVDNQQSCPVTTSKVGIDVGLEYFYSDSNGNHEENPRYLRSSEKDIKRVQRKIYKKKKGSSGRKKARGIYARKHLKVTRQRNEHAKRLARNLCLANALVVLEDLNISGLVRNHKLAKSISDASWYNFRQWLEYFGAKFGREIIAVPPHFTSQECSNCGVRVQKSLSTRTHSCPHCGHIEQRDVNAAKVILSRANATGGHPGSNASGVVASTSVGRKTCKGKQRL

SEQ ID NO: 9878 - protein, 225 aa, Cylindrospermum sp.
MVIVVDSCAESEVKSTTGKIAGFDFGLKTFLTCSDETLIESPQFLKQSLNAIKKASKNHSEKLKGSNNRERARKNLVRQHEDVSHRRCDWFWKLAHKLTDQFDILCFETLNLKGMQRLWGRKISDLAFGEFLQILEWVAKKKGKQVVYIEQWYPSSKTCFNCGHILEDLHLSVREWRCPSCQSINGRDENAAKNIQAVGASTVGLGDVRRAGARNCCLTPESPPF

SEQ ID NO: 9879 - protein, 387 aa, Cylindrospermum sp.
MEQVLTVVCKLNPTPKQSEEIELVLKAFADACNHANQQVKPQITSKTTIQNMVYKDLRALFGLSANLAVRACARVGANRKTAKQKDQQVLTFKPTSADYDARIFSFREKDWTVSLTLMNGREHIKIDAGNYQRGKLKGGKPTSAQLCKHRDGNYYIHIQIKEVATALIKSNNVIGVDFGRRDIAVTSNGDKWDGQQINDVRDKFFRVRSSLQKKATKGTRSTRRRARKILQRLSGSERRFQQWLNHKISKSIIQDALKIDAVVAIENLTGIRERTNQQPRNKTERRRSNSWSFYQLRSFLEYKGIQFGVEVIAVPPAYTSQTCHCCLHIGLRSDKRFKCGNCGWSGDADLNGAKNIAALGAAFVNQPGGTNRLYCNLSTDSSGLLKA

SEQ ID NO: 9880 - protein, 408 aa, Cylindrospermum sp.
MQRAFKVTLIPNHNQSVLINKTIGCARFVYNRFLAIRKELYSTEQKTLNYNACSQQLTLLKKELAWLKIVDKFALQNSLKNLEIAYKNFFADLKKAKKKKSVGFPKFKKKYGCKQSYKTNFTNGNIQIIENRLKLPKLGWVKFHKSEQITGKLVNVTVTLTSSGSYTASILCETEIEKYPQATQNIGLDLGIKSYLVTSSGEVVDNPKYYQSQKRKLRKAHKKLARSAKGSKNRVKAKIKLARIYQCITNLRDDFLHKLSTRLIKENSIICIEDLRVANMMRNHKLALSLNDASWSKFVTMLEYKALWHDRIVQKVGTFYPSSQTCNHCGFINPLVKELKLREWSCPSCSSYNLRDHNAALNILGEGLRIFTAAVGMPDAINACGELVNPEVIQVEIVEAGITRLMVV

SEQ ID NO: 9881 - protein, 396 aa, Cylindrospermum sp.
VIKLLVLEYKVKAKKLQYLAIEEAIKTTQFIRNKCLPYWIDAPKDAKIDRFALNKYSTELRNEFKFVANLNSMAVQASAERAWLAISRFYNNCQQKIAGKKGYPRFQHDNRSVEYKTSGWQLNSTKRRITMTDKKGIGELKLLGKWDIQTYPVKSIKRVRLVRRADGYYCQFCIDVEVKDIQPLTGNEIGLDVGLESFYTDSNGHQEANPKFLRKVEKSVKHAQRSIYKKEKGSSGRKKASAIFARKHLRISRQRNEHALGIARHVCKSNDLVAYENLQVRNLLRNHCLAKSIADASWYLFRQWIEYFAGKFGRLAVAVAPHYTSQKCSSCGAVVKKSLSTRTHVCSCGCKLHRDENAAINILNLAKARDGQSQSHAVGVGVTTLVGENLLAQILT

SEQ ID NO: 9882 - protein, 404 aa, Cylindrospermum sp.
MLVFEFKAYGKVKQFAAVDDAIRTAQFVRNSCIRLWMDNQNTGKNDLQKYCAVLAKTFAFASELNSMARQASAERAWSSISRFYDNCQKKIPGKKGFPQFQKDCRSVEYKTSGWRLAEDRKSITFTDKKGIGKLKLKGTRNLHFYQISQIKRVRLVKRADGVYVQFCINVNRNDNIQPSGNTIGLDVGLKDFYTDSDGNTYANPRFLRIGEQVLKRSQKRISRKIKGSKNRGKARQILGRRHLKISRQRKDHAVKLARCVVQSNDLIAYEDLRIKNMVKNHCLAKSINDASWYQFRVWLEYFGKVWKKVTVAVNPQYTSLECSSCGEIVKKTLSTRTHVCQCGCVMDRDENAARNILSRGLSTVGHTGTFALDASNALGDSSSTRSGASLTEQVMSLIKESQCL

SEQ ID NO: 9883 - protein, 399 aa, Cylindrospermum sp.
MRTSYQYKIKPTKEQAQKIDKTLEMLRYQYNYLLAQRFDWYEQNRSSIDRCPLICHLPELKDQPNYYNQKASLTQLKIDRPWYKEIHSQVLQEVPKKVEITFNRWLKGFRRERQPNGDANGKKSGRPRFKGKGQYKTFTYPQFNRHHFVNDKITLSKIGDVKVIVHRQIPDAFDIKTVSVTKKADGYYVSLSLDDKTIPGIKPDFNPDNIVGIDVGLIDFIVTSDNKRIVAPKFLRKAERKLKSAQRRISRRKKGSSRRKKAIKKLAIQHQKIADTRKDFHFKTANALLKKYDVVAVEKLNIKGLAKTKLSKSINDAGWGQFVSILSNKAENAGLKVISINPNGTSLECSSCGHKVKKPLSQRMHNCPVCHTSLCRDLNAAINIKNRGAHGLKAQLMSS

SEQ ID NO: 9884 - protein, 414 aa, Cylindrospermum sp.
VIKLLVLEYKIKAKKLQYLAIEEAIKTTQFIRNKCLRYWMDAPREAKIDRFALNKYSTELRNEFKFVSNLNSMAVQSSAERAWLAISRFYENCQKKALGKKAENAFLGSPQVERFSKTGYPRFQHDNRSVEYKTSGWKLNSIKRRITITDKKGIGELKLLGKWDIQTYPVKSIKRVRLVRRADGYYCQFCIDVEASDIQPLTGNEIGLDVGIESFYTDSKGHQEANPKFYQKAETSVKHSQRRIYKKKKGSSGRKKARAIFARKHLRISRQRHEHAKRVARNVCKSNDLVAYENLSVRNLLRNHCLAKSISDASWYLFRQWIEYFAGKFGKLAVAVAPHYTSQKCSNCGAVVKKSLSTRTHVCSCGCKLHRDENAAINILNLARLARTGHVQSNAVGVGITTLVGASLLEQILT

SEQ ID NO: 9885 - protein, 437 aa, unknown
  TnpB Polypeptide
MSILTYCKGLPTPIEELNPIGFTDLEIFLTSFSQISHSATCETVNHLLNLTDQFDQSKWNTYLQTKYRINKRQAGGVIALAQGKVESAKKCRKNHIKQLEAKLKSAKKWISKATKKLKLGQKFYAKKDWIDSKTGCNFPLSSSIFSRVTNWQCEWFKIHHKQRYIHTLANRIKHLKLAPVRVKVQHGEVFIVGSKNESYGNQSCQWDGDKLTMRVPYCLEDSFGKTVSSIIGNFHRNIDRLPNTGAKTWHFYRQDGRWVVAVQFTATPVPKVSRQIQYGCIGIDMNPGSIGWAYIDTCGNLKAHGTIPLQTGLPTVKQDAQIVDACLQLAILATTYACPVVCESLDFSTKKTLLRERGRKYARMLSGWAYSRFYQLLESILSNRGISLFTRNPAYSSLIGLVKYARMYGLSSDVAAAIAMARRGMNLSERLPRSVSI

SEQ ID NO: 9886 - protein, 410 aa, Microbispora sp.
VQLRYNFRLHPTPGQRAALARAFGCARVVFNDGLRARQDAREHGLPYICDGELSTRVITDAKKTPERSWLGEVSAVVLQQALADLNKAYRNFFDSITGKRKGPKVAPPRFRSKRDNRQAIRFTKNARFSITAGGRLRLPKIGDVRVRWSRTLPAGPSSVTVVKDAAGRYFASFVVDVAEQPLPPVGPEAGIDLGLTAFAVLSDGRKIDAPRFLRRAEKKLTRLQRALSRKAKRSNNRAKARQKVARRHAQVADARREFHHQLSTRIVRDNQAIYVEDLAVKGLARTRLSKSVHDAGWSSFVGMLEYKAALYGRAFHRVDRWFPSSKRCSACGVVAGSMPLNVRSWRCPCGAAHDRDVNAAKNILTAGRAERLNASHTRGRDGTRRPGGGQVRPPHQVAQPGEAGSLRGAA

SEQ ID NO: 9887 - protein, 430 aa, Streptomyces sp.
MVSIVSQDTLAKRQFGHRARLALSPAGVRAADDQAHAARTLWNLLHAWWRMMPKEKRTLQQADAAIRQAREDIDFLAVLPAQAAQAVLKTYVRAWKNCWEGRADAPNFKGRFRTVLSVDIPQGRDLNIARVHRRWGMASIPKVGRVRFRWTKDLPVGKRADAENRITGARLIKDTLGWHIAFRVQTLEVKPGPHQGAEVGIDMGVTVPIACSDGETYGHGEWLTEKEKARLLHLEQRAARRKRHQRPGERTSRRLHRTYDRIAGLRAKAKRRALDWQHKTTTVIARTYGAVVVEALTIPNMVKSARGTIEEPGRNVAQKSGLNRSISGEAWGRTVTLLTYKTARHGGTLHKVPAPGTSRRCSACGVTTPGSRESQAVFVCKNPDCGWSGNADHNAARNVLHLYRTGLALVPAAGRAVVRRAKRVKPAAAR

SEQ ID NO: 9888 - protein, 405 aa, Microcoleus sp.
MQLVERHVIKPNHRFYREADRLSWLCKNLYNSANYIYRQNFFASQQTNALAVYHTLKTSPDYKALPAKVAQSTLGLVLKAWTSYYLAVRNYQEDPTKFKAAPKIPHYKGSRERKREDGRYVVVFNCQAVSKRALKKGYARPSGTNIWLPSKVTSILEIRIVPKVGCYVVEVLYEKLEQPLQVNQRVAAIDLGLNNLATLTYNVPGLVPTIFDGRALKSTNQYCNQVSSALKSLLPAAQKNSKKLAKLWHKRNCKVDYYLHTTSSAIIKELVNHQIGLLVIGWNQDFKDGIKTGKVNNQNFACIPHRRFVQMLHYKGQIAGIKVVLVEENYTSKCSALDWEPIQQHSDYIGSRVKRGLFRTKTGRFINADVNGSLNIGRKAVGDGFIPNSIEGFVVNPVRLKAYKH

SEQ ID NO: 9889 - protein, 382 aa, Carboxydothermus sp.
MLKAYKYRIYPTKEQEEFFARTFGCCRFVWNRMLEENLEVLRQGKKIPRITPAKYKKEYSFLKEVDSLALANVQLQQEKAFRDYFSNPKHFRLPKFKKKKDKQSYTTNNQRLKNGKESVKIDFENGLIFLPKLKSGIRAVFHRRFEGRIKSVTITKSKAGRYYVSVLVDAEEPRNRAREANNLVCGIDLGLKHFATVVNDSGVFKIGYPKYLIKAEKRLKRLQKALSRKQKNSKNYEKARIKLAKKHEYVKNAREDFLHKLSKTIIDDNQVVVVESLNVKGLIRTRLAKHIADSSWSKFLEYLNYKAKWYGREIIFANRTFPSSQICSNCGYKNEAVRSLKIREWNCPMCGAVHDRDVNSGANLRNYGIAHLMSSRVGTTRT

SEQ ID NO: 9890 - protein, 384 aa, unknown
  TnpB Polypeptide
LLKSFKTEIHPTEEQKVRIHKTIGTCRFIYNFYLSHNKELYQNGEKFMSSSKFRVWLNHEYLPQHPEYLWIKEAYSKAVTQAVNHGQTAFKKFFDHESAFPKFKKKGRSDVKMYFVKNNPKDCRCERHRVNIPSLGWVRIKEKGYIPTTKEGYTIKSGHVSMKAGRYYVSALIEIPDNKTADLSNEGIGIDLGLKDFAIVSNGKTYKNINKSARLKKLEKRLVREQRCLSRKYENLKKGESTQRANIQKQKLKVQKLHHKIDNIRTDYINKTIAEIVKTKPSYITIEDLNVSGMMKNKHLSRAVASQKFYEFRIKLKAKSKENGIELRVADRWYPSSKICHCCGTIKKDLKLSDRTFRCHCGYVEDRDFNAALNLRDVKTYKIA

SEQ ID NO: 9891 - protein, 500 aa, Mycobacteroides sp.
MVTANPGKVAALHALFPEFRSAMGHLAARSHRELLAGDQLVHWRVMPNNQVWFPTRLSARQLKSAQNMVHANVSGWLVRLQDRVRELVTGSHLSEHQKTVLYRINARKAWWARTLELPWVIDGEHLVPVEHGRLAKTPAVVVWIAVGPETLKLARRLAKHAAHKQIRFPNLSRVTTVTLDGIVATTAAARTATHGGRVSHWVKVATLVRGKPVQIPLTTNARFVGELNQVRARGGKLCAAIQLHRAGDGVAVSLITDQPDAAPRPSGTVIGVDFGFSSALFATSAGQLLGRAMLARLRELDAVLEPLAADLQRRGVALKTDAGYRKLQRRIADYVANEIGRLLNRLANKDIRELVVERLDFRGGGLSRRMNRLCTRTGRGVLKARLTRLTERHGITVTVVPAPYSSQQCSGCGYVHKTNRKTQSRFRCGFCGKKLHADVNASRTVASRRSRPLPDGTGPRARENTRRLLDSDHRKRWNLPTQGAVHGITGARGRSHSRAA

SEQ ID NO: 9892 - protein, 427 aa, Escherichia sp.
MHQENTMLPRRISVSLFIDQSIIWPVKRLQAFKFQLRPGGQQEREMRRFAGACRFVFNRALALQNENHEAGNKYIPYGKMASWLVEWKNATETQWLKDSPSQPLQQSLKGLKRAYKNFFQKRAAFPRFKKRGQNDAFRYPQGVKLDQENSRIFLPKLGWMRYRNSRQVTGVVKNVTVSQSCGKWYISIQTESEVSTPVHPSASMIGLDAGVAKLATLSDGTVFEPVNSFQKNQKTLARLQRQLSRKVKFSNNWQKQKRKIQRLHSCIANIRRDYLHKVTTTVSKNHAMIVIEDLKVSNMSKSAAGTVSLPGRNVRAKSGLNRSILDQGWYEIRRQLAYKQLWRGGQVLAVPPAYTSQRCVCCGHTAKENRLSQSKFRCQVCGYTANADVNGARNILAAGHAVLACGEMVQSGRSLKQEPTEMIQATA

SEQ ID NO: 9893 - protein, 372 aa, Enterococcus sp.
MKKAHKIRIYPNCRQEIQFQKTFGCVRFYWNFLLDQRITNYKKKKENADYKEDKTTYASLKKMEEYAWLKEVEAQPLSQVAMDLNKAFKNTFNSTFGFPKFKSKKYSKKSYRTAMGIKVNRNYFYVSKVGWVKMAETLRFNGKLMNVTISQSKTEKYFATFLVDTENFQKDPVTESIGLDLGLTHFCITSAGEKIGNERFYRSLEKRLVVEQRKLSRRLEVAKKHNRKLEECKNYQKQRVKVARIHEKIFNQRNDFLHKLSSRITDENQIICIEDLNVTGMVRNHKLAKSIADVSWSEFVRQLTYKCEWKGRMLVKIDRFYPSSQICSSCGHNDGKKELDIREWTCSNCGTNHDRDINASINIRTEGLSGIA

SEQ ID NO: 9894 - protein, 418 aa, unknown
  TnpB Polypeptide
MLLTRKIIYNPTELEFNILNSMAFSSAKLWNIANYEKRNYKELGFSNFPNWYEQKRRLKDNFWYKNLPSQTSQDVLNRLQKSWKSFFALNKSKGIKNPKPPRFKENLFNFTYLNNGFKRVLPDTINFSISKQQKEYLKNKYSFDSKYLCLKIKNFSTIKGNIKTIEFKPIENRKYEINVVYEIEDTPIKADNGNYLSIDIGISNLFTCYDNKGKSFIISGSKYLEISHYFNKKISHFQKITSKQQLANGEKYVSSTKRINNLYKKKQLQLNHYFHCATKEIVKYCIKNNINKVVIGDIKGIRINAKLGKKNNQKLHSLPYDKLYELLFYKLLREGIEFIKIKESYSSQVSPFAPQVNEKYATKNKRIERGLYMDNLKVFNADSVGAFNILRLYEQNKKIGIKIPLKGLSNPLKIKVAV

SEQ ID NO: 9895 - protein, 410 aa, unknown
  TnpB Polypeptide
MLVTRGYKTELDLNQEQITACKQHAGAARFAYNWGLRTRQERYKATGKSPSAIDLHRELNALKKSDLPWMYDVSKCAPQEALRNLDNAFRHFFRRCQLKKEGKLKGKVGYPQFKSKKQGLGSFRLTGSIVIFPTAIQLPRLGRLRLKEKNYLPTKDVKMLSATVSEQAGHWYVSVQVQQEQAVPANTGPVVGVDLGVQALATFSDGTVVPNPKPLKSQLRKIKRFHRAVSRKVKGSKNRKKAARRLGRLYRKVANQRQNTLHQLTTMLAKTKQVIVIENLNVSGMLKNHHLAQAIADGGFFEFKRQLLYKARWYGSRVILADRWEPSSKTCSGCGWVKEDLTLADRTFHCQQCGLVRDRDLNAAINLARLAGSSPDTVNACGGASAGRRRKATVKLAPVKQELNALDASA

SEQ ID NO: 9896 - protein, 371 aa, Nitrospira sp.
MLLSRAFNLKIYGNKTKADTARYTSEKHLMYVRHWVNQLYFRHDGKAFSTDGMGMLANQAQHLARAIVGAERASTKATGNKSNVPQIRQIGCPARVEVSGTKHFDYWLSVENEFTRRGRIFLPCKSHVRLNRFLKEGWILNEASAELFYGRDGLAYARVFVQKEVAKALPVPEVLGCDVGYRNGVARSDGYIGKNIGKVIKTQKKKDQERRRQASLARKPFVARLKQDQIWFTGGGLPAKKVKTVVKQYLDIEARRAVGRSKRAGQSLCVESPKVIANLRSGSLQGWARNYFSARCRVIGAEEGVFVWEVNPAYTSITCNRCGKTDAKSRSGASFVCVACGHVAHADVNAGKNIAVKGRRSLSALLKRRVA

SEQ ID NO: 9897 - protein, 287 aa, Okeania sp.
MKSIRTKLKLNNKQKTMMAQHAGYSRWCYNWGLSLWKAAYKDGYKPNARKLREVFTNHTKPLSPWMKNLSSRVDQYAFPTECCANINLGEAFKRFFSCGMLPYGMLRKRKQGLGKHPKFKKKGRSDSFPSECYANTIDSCGKPIELNGWSHKLPFIGIVRTYEPIEATTKKITISRQAGDWYLSCSYEFHAITTPKTTDVIGVDLGVKTLATLSDGKVFEGVKSYHKFEAKLSRLQYLNRHKEVGSANWKKAQLKIAKLHGRIANIRHDALHKLTTYASQKPRHGLN

SEQ ID NO: 9898 - protein, 259 aa, Okeania sp.
INTHTILAKHAGVARHAYNWGLATCIAEYEETKKRSSSVTLHKRLVAEVKSENSWYYEVSKCAPQQALRDLERAFKNFLTIPKCGFPKFKKKGKKDSFYLEGSIHILRGNYIKLPRIGIVKTYEILPSVPVKNVRISKRAGEWYISFKYDEQKPKPLTKKQAIIGVDVGINALATCSDGTIYPNVKAYRQAKKRLTRYQRRVQKKEPGSKKKAKAVKKLAKIHKKVADIRADALHKLTTWLAKNQPTPIPSWEGSKRGG

SEQ ID NO: 9899 - protein, 412 aa, Acidimicrobiaceae sp.
MSIRQRLCPDPESATWLAKHCSDSRFVYNLGLEQRNLWCRYRVARITTVSQQKELAEARRETWLGNGSSSVQQAALRDLDRAFQNWWMSPHHFAHPTWRRAGHHEGFCIRDLSVRRLNRKWGEIQVPKAGWVRFRISRQWTDIAAATSARVTLDRAGRWHASFTTPAPAFERQSTGAAVGLDMGVAQSVTTSDGEHLRMPPLLSPDEAQRKRRLQAKMARQQKGSGRRCRTKVSFPRLAARETDRRKDWIEKTTTQLVRDFDLIVIEDLRVKNMVRSAKGTVANPGRNVRQKSGLNRSIHAQSWALFRQRLTDKATHATDLVELVAVNPAYTSQRCSDCGYPAKDNRESQAIFRCRVCGFTANADVNAAINILAAGGQPVTGRGGTSHAPPIGVDQAQRPDEASTTRKPLAA

SEQ ID NO: 9900 - protein, 372 aa, Blautia sp.
MYKFYKYRIYPNKIQEEVIQKTFGCVRFVYNQTLSYRKEKYNKDKVSVGRIDCNNWKNQYLKKKYPWLSEVDKFALDNAVINMDMAYQRFFKLNKGFPRFKTKKDFRKTYKTNCNHINTRPTIRLDFEHKKIKLPKLGWVNVKNHRNFLGIIKSAVVSQNPSGKYFVSVLIETEHHPLDSTGSVIGIDLGIKDLLITSDGEKFENIQTTKKYADKLAKEQRKLAHKVKGSSNYNKQRIKVARIYEKIHNTRIDNLHKISHKLISENQVIVSEDLNVNDMVKNHSLAKSIYDCSWYELTRQLSYKANWNNRQYVKVDRYFPSSQLCHVCGYQNSDTKDLTVRDWICPKCDTHHDRDINAAINIRNEGLKILNM

SEQ ID NO: 9901 - protein, 363 aa, unknown
  TnpB Polypeptide
MLKAYRYKLEPNKSQRYALARTLDVCRELYNDCLSQRKLQPISRYEHSAQLTQLKAEFPVYKNVYSQVLQDVLGRLDKAFKNFFRSGFGFPRFKGANRFDSFTYPQSGFCLGGRRLSLAKIGNVKVRLSRPLPRGAVVKTCTMKRSVNGWFATLVFEHQPVPLPANDLAVGIDVGVTAFATLTDGTAIQNPRIYQNTQAELRRAQRRIARRKKGSKRRRRAVVLLQKVHQRITNRRSDFLHKHSTAVIIKYGTVKVEALNVSAVSRGNLAKQILDCSWSEWFRQLQYKAEEAGRRLVAVDPKYTSQTCAKCGFKHRDNRKTQADFQCLSCGHQDHADHNAAVNILARNEPLDANVSGVTLCVI

SEQ ID NO: 9902 - protein, 444 aa, unknown
  TnpB Polypeptide
MEIIRSDRIALKTDSAEQREALQATLDVYRALVRDLMSVIATHWPRLGPCSDNQIVAPVEALIHPTKQRPDVRYPYFARRYYKFPSYLRRAAINDAAGQVRSFMTRYERWQSGDRNRRTAQPPRLTCSTGTFPTLYPGQCFQFDSDRHQCRIKVRHHGDWVWMDFKLQGKPRYMPEGTMQSPALTVRGKRWSLSIPVKTHVTLPEKSSVNRVLSVDVGINTAATWAVIDASGTGLDRGFLDRCDKDRTHRIMARIRSAAASHTRHGNRLPPGFKAADHRRLKHLSHNEAHQISRQLINKAIAHDCQAIVVENLKGWRPRGGRKRSTLKQRFHRWFHRQLVACIESKAIEAGIRFKSVYARGTSRQAFDGTGEVRRDSSNVSLCTFTTGKRYNTDLNAAYNIAARGLLSYRRRREAPAGAYRRKPGATPRNPATLSTLWHNAIAG

SEQ ID NO: 9903 - protein, 428 aa, unknown
  TnpB Polypeptide
MQLVEQHQIKINHKFYKEIDGLSFKSKNLYNQANYIIRQSFIKENKYLNYNFLSKKLQKEDSYTSLPSKVSQQILKVLDKNWISFFKSIKEWSKNKDKYKGKPNLPKYKNKTKGRNVLIYTNQCLSKRTYKKEKLIHLSGTNIKINSKVSLSTIKQVRIIPRINMYLIEIIYEKEENTNGDLDKNKFISIDLGVNNLATITSNKEGFIPLIINGRVLKSINQYYNKKKAKLQSYVGTKGTSNKIRKLTLKRNNKIKDYLHKTTKYLIDVCLKENIGTIVVGKNIYWKNELKMKHDNDRQNFVNIPYNDFISMLEYKCKLNGLNFILNEESYTSKSSFIDNDEIPTYKKGKVNLYKFSGSRTKRGQYKTKEGFKINADVNGSLNIARKVFPEFNINNIEKGIKAVVVSPIKINIYLLDRDFYKHRLRVS

SEQ ID NO: 9904 - protein, 364 aa, Burkholderia sp.
MEYVKTLKLRIKDKHARSMLAMSRDVNMVWNFCAETQFRSLKRYTSKPKVWLSGFDLCGLTAGFSKCEGVTVGSGTVQQVCKEYATRLKQFKRQRLNWRVSSRKSPKYSLGWVPFKGDHIKYRNGQLHFNGLKIGLWDSYGLSKYEFGSGSFGEDSRGRWYVNIAVKVKVEEKRVPDGTTAIGIDLGLKTLATYSDGTSFNPKRFYRESEAALGIAQRARKKRRVKAIHAKIANQRKDAIHKETTALAKQHAAILVGNVNAKALARTSMAKSVHDAAWTTFRTQLKYKAIRQCVVFAEVNEAFSSQTCSCCGVIPPSSPKGRAGLGIRQWTCCSCGSVHDRDTNAARNIVRLGHQALEVGISGV

SEQ ID NO: 9905 - protein, 564 aa, unknown
  TnpB Polypeptide
VSLSLRPVAAPFVAAAPAGARVRTRLRVSGQDEAVLRAAGRHLGSLAGRDLAARCAEGRLDAKGRAVSRARRKRALTAESSSRWAGAITRTSEDQVRLAGQNLRAEASGLRTRIRRIQARLPVPAGGKAGRVRGYATGAERHAKMVRLQVLRARQAGVQQRMETGSVRVVRGGRALLRKRGNLAAAGLTQAQWRAEWEAARLFLTADGEKDKAWGNETIRWNPGEGWLEIRLPAPLAHLANRPHGRYRLSAPVGFSYRGGEVAAQAATGAIRYDISCDPVRGRWYVDASWKAAPAPAPAPCLAELRAHPVLAVDLNHGHLAVWAVTPDGNPAGPPVTVSLALSGLPASQRDGRLRRAISAVIGLARERACRAIVIEDLDFADAREQGRERHGSRPSRGRRGRRYRALVSGLPTARLRDRLVQMAANAGLAVIAVDPAYTSRWRAEHWLGPLRERVSPVPASGHHAAAVVIGRRALGHRARRRAGVTGGGQRTSRRRAAPRAPAATRATRDGRPRQAHRQPHPRRKTATARRTRPPDQAAQDRPGPPASQDYLLLVQQERLEYRG

SEQ ID NO: 9906 - protein, 521 aa, unknown
  TnpB Polypeptide
MARKTTPTFIVELPLSVARADAREMGVRLELGRQLYNACLGEGLRRLERMREQRTWAQACAMPRMKDRKPNKERAAAFAAARAAAGFTSAAISAFGTRCKNEAKWNDGRARTDARVGAHECQLIAQQAFSALDLYAFGKRGRPRFKGKGRPLHSLQGKSADSGIYWNPSTGCLEWGALRLRAKLPQLRKDPWLERALARRTKFARIVWRQVKGRRRWFVQLAQEGFSPQKYHTVKDATVGLDVGPSTLAVVSDRAAALLPLAPEVQQPWAATRRLRRAMDRSRRATNPHCYTADGTFKCGAKITVRSRGYLKLKARLSETERVLEKRRARSHGRLSNCILGLGNRIQTEKLNYTAFQKRFGRSTKVKAVGSLMLKLRRKAERAGGEFRELNTRALKLSQYDHCTGTCTKKRLSERWHVLGDGSGVVQRDVYSAFLAAIADQNLIHPSRAAAAWPAAQSLLARAGWVREQPVSVAGLLAATSEADRLPAPEPVARERAPVQGDTSRRVGVNRTSKKVLEAEA

SEQ ID NO: 9907 - protein, 348 aa, Escherichia sp.
MASWLVEWKNATETQWLKDSPSQPLQQSLKDLERAYKNFFQKRAAFPRFKKRGQNDAFRYPQGVKLDQENSRIFLPKLGWMRYRNSRQVTGVVKNVTVSQSCGKWYISIQTESEVSTPVHPSASMVGLDAGVAKLATLSDGTVFEPVNSFQKNQKTLARLQRQLSRKVKFSNNWQKQKRKIQRLHSCIANIRRDYLHKVTTTVSKNHAMIVIEDLKVSNMSKSAAGTVSQPGRNVRAKSGLNRTILDQGWYEMRRQLEYKQLWRGGQVLAVPPAYTSQRCACCGHTAKENRLSQSQFRCQVCGYTANADVNGARNILAAGHAVLACGEMVQSGRPLKQEPTEMIQATA

SEQ ID NO: 9908 - protein, 376 aa, Moorea sp.
MSANELMTPSSAMYQVTVTASVAVSHGSRIRPVIGRWHLRWVLPKWIHLVRKNWLYIRLPKLGMIKVRMHRPIPDGAVLKRVSLTKKIDGWYINLIVEDSTVPEFTPDQIIPTWENSMGLDAVLRGDDYIATSQNTKYKSAKPLRKSLPKLKTVSAKKSSKRKGSKSRRKLAKRESRIHQRIARQRKDHRYNLAHQLIRTEKKVFFPENLNIKGLTKRNKPKQAADGTYLPNGQSAKSGINKSWLDAAFGEFLTTLDYIASKAGAVVIKQKPAYSSMILSYRNEVIFTDCSIREYYDSVERVLVDRDVNAAINLKRLGLGVFPSIKRRSGKLVISGDMDDSTTKQIVSILRDGTDTFASSFLAFGVAIGQKRRSPR

SEQ ID NO: 9909 - protein, 321 aa, Okeania sp.
MVVVQNLQSPHLSGKMVKSQIAKCSEPLPIRWSRQLPENSVPTTITVKLDPSGRWSVSLRVNDIRDLRLKPIKKQVGIDLGITSLVSTSDGEKVTNPKNLNKLHKKLRLVQKSLKRKTKGSNNYQKARLKVARIHAKIKDSRLDYTHKLTTQLIRENQTVVVEDLAVKNMVKNHKLARAISDANWGELVRQLEYKAEWYGRKLVKIDRYFPSSKRCSNCGHTVEKLPLNIREWDCPECAAHHDRDINASINILRMGTRGVRKTQGNAHQEGCGTRSVSLWSALLDLLGLNPGRRVLRNRKSLTVMLGNPALSRRAASGGCQ

SEQ ID NO: 9910 - protein, 251 aa, Clostridioides sp.
MYCGQHIKLPKLGMVKIRDKQVPQGRILNATISKEPSGRYYVSLCCTDVDIEVFENTNNHIGLDLGIKEFCISSCGEFIENPKYLKKSLNKLAKLQRELSRKTIGSLNRNKARLKVARLQEHIANQRNDFLQKLSTKLIKENDIICIEDLQVKNMIRNRKLSRLISDVSWSEFIRQLEYKANWHGRQIVKVGKFFASSQICNKCGYKNEEIKNLNIREWICPSCNETHDRDINASINILKEGLRLITIQNK

SEQ ID NO: 9911 - protein, 367 aa, unknown
  TnpB Polypeptide
LYPNEEQQVLLAKTFGSVRFIYNRMLSDKIKHYEKTKENLRTTPAKYKDDFPWLKEVDSLALANAQLHLETAYKNFFRDNSVGFPKFKSKHKNQNSYTTNLVNGNITLSDAGLKLPKLGLVKIKQHRQIPDGYSLKSVTVSLSPSGKYFASILYYYDTDIQPVEHVNDVLGLDFSMSELYVDNNGDTPAYPHPYRQTQDKLAREQRKLSRRKKGGRNREKQKRKVACLHEHVANQRKDFLHKQSRQITNVYDAVCIEDLNMKGMSRALNFGKSVSDNGWGTFRQMLDYKLTEQGKHFIQIDKWFPSSKMCSNCGAVKKELSLSERVYRCDCGFVCDRDLNAAINIRNAGILLLAQKNITVGRTELAR

SEQ ID NO: 9912 - protein, 399 aa, unknown
  TnpB Polypeptide
MQLVERHIIKRSHPLYKECDLLCFSSKNIYNRTLYLIRKEYEESKTYDILNDSYFFMKNEECFKQLPQKVAQATLRSVHATCNSFFGMLRSKNIDNKNVKFPKFLHKEDGRYVATFNNQTISKKVFEKSHKIKLSKVDIEFYTKINNFKSINCIRIVPKTEQYVIEVIYTIEDVEKVKFNKNIAAIDLGVSNLATVTYSSGEQPTIINGKPLKSINQFYNKELAKYKSKLEKVNKKKHSHRTRRLTNKRNNKVDNYLHRASKRIVNDLKDKSISVLVIGKNDGWKQDCNAGSRNNQNFIQIPHSRFVEMVSYKCEKVGIKVITNEESYTSKCSFLDLEEIGKHDVYKGKRVHRGLFVSENGNKINADVNGSYNIMRKAFPKVFFDGIEGVVVHPVIVKL

SEQ ID NO: 9913 - protein, 410 aa, unknown
  TnpB Polypeptide
MLKGIQIRLYPNDEQMHYIACLLGCCRKTYNMCLNYKKTSYEKDKTNISWIDLGKYLTEKKNEFAYMKDVHSKVLQQSIIDLNTAFNNFFRGILKGQNIGYPEFKSKSNHNDSCRFPKDAFIGINGNRISLIKPLSNIHFKCSRRDESWLNHNQDKIKYVTLRRNKANQIYCSILVDYPIELVSNNINGEVGIDLGLKDFCITSDTEKYNLDDCSHLEKKLKKQQRKFSKTANGSKRHEKQRIRVAKTYQKISNKRKYNHQVISSKLVKENSVISIEDLNVSGMLKNHKLAKNIQSKGWSQFVNMLEYKSNWYGSNLVKISRWFPSSKTCSSCGWIYKDLNLSIREWTCPCCGTHHDRDINAAINILSEGKRIIGLSSAEFTHGEYPTMDDRHIDLKSSGTLNREQNVKP

SEQ ID NO: 9914 - protein, 368 aa, Methanomassiliicoccaceae sp.
MTKMIRTVRYELPYDQALVDTVLMGVNVFRFWSDLAFEHGTSGKIDLHHLGYYVARELFPSFQSMLILTVRDSVSEARKAIRTRTGDKNPILKAHKGRGLRYNNCCFGMKNDGTISISTVEGRKRYKITPAPGYENWSCEAATLKLSKGRCFLHCQYETGSPPIKEWKNSDVLGVDRGIKNIIACSDNTIMNSKRLRNVKGRYQHVKASLRSKGTRSAVRRLNAIGGRENRFVRDVNHCISKHLINTKYGVFVLEELKNIKKSSVKGKLGKTIRKLIGGWSFRQLQTFLEYKAEAAGKLVVYVDPKHTSQRCSYCGHTEKDNRKGHSFRCVNCGFSLNADLNASRNIAELGISVFGRVASQKPVCSQQ

SEQ ID NO: 9915 - protein, 461 aa, Deinococcus sp.
MENTLIYAPTTLRPTSTQQATLEALYDVAEQLHFTVRGWLRTVGTGVHLNLVEALEQVAGGHPLPRVDDHHCIHLSPDAVAQVRTLTHADLPEPWRIALPAGVMQRLIRIETRRLKRAAPRARAETLLPLRPLDRVALDEAAVPVDDYHVMICGVPEPVVADLWALPSDLTRALLTEADDRARDVAAEWAAGLERLLQGDTAAAEVLYRLGRDTWPWRERQPTLTLDRAMPHRYQHVSLVRTTDERGTPRLVLHWTIRIPGGYLPKANRSGGFGIDLGYRHVATGAGDQGVTAVPRRISVRRGLPEPADDRHAIHAHARMRRSCLEAHREGLEDLLRLALQHWQVNVEATDWAGILDHGRAPWSVEAMGLIGSALLVSWLQTLAPASGTQVSLIEPAGTSRICHRCGEPGERPWPYLEFFCPLCGTCIDADHNSAAVLRQGTTLRHAGNRRPSADRSDRRS

SEQ ID NO: 9916 - protein, 477 aa, Deinococcus sp.
MPASTHLRVRHALHPDPDQTAALDTLWHLGHHLWTILALHARLEAIGQPQPMQRVAALAASPPPTSRAPVRLPRRSAAERRRELEVLARERGWRAHLGSATLGGLVSDFGRILKSLGPVAPPNAIPLTPPPDFALALGGLARPVGELHAEIVGVPGLVRTPLFLLPGPAAAAVQTWRQTFSGHLSTLREALETRLLAGDPGADVGYLAHVARYGRIESHLGARPSDPPATPPALTLVLAEAAQLHRSDAGDYEIAWAFRVASLTPPLYQDLVALDPGVRSLWAWVSGRHSHGRSPMPVSLQRPWAPAMPGPPTGLLTPPQDLTYARLRRHQLLHRTRLRPVLEAGLARFLQFAAVAVEQTDFRGMWRRGEDYPEAADFLGTRLYEEFLVNCAQLDPDHRMAVWVRPAWTSADCSVCGARGAVRYRGRTGRCQVCGLCLDRDHNGARNVYQRGAAQLVARGLPWTPVPLPIPPRRRRP

SEQ ID NO: 9917 - protein, 251 aa, Deinococcus sp.
VDEGRRINIPKIGSVKCKFHRPLEGTPKTLQIVHDCSEWYAVYTCEVHVNPLPQAGSTVGVDVGTRYFAITSDGEFVHNPRHLGSALGKLRIQQRTVSRRKKGGNRRRNAVQQVAKTHRKIRRSRQDFHHKTARKLVSEHDLIAHEDLKVSNMVQSNLARTISDVGWSAFFDILRGKAESAGRVVVRVPPQDTSQRCNACGHTCRENRDNEVFRCVSCGHEDHADWNAAENILGRAVPLGVNGSGVSHTVV

SEQ ID NO: 9918 - protein, 390 aa, Deinococcus sp.
MQQNTTVRVFRYRLYPTKPQEAAMFETLRLTRTLYNAGLEQRREAYRKHGKTLSAYDQQRELTALKEACPEYGDVYSHVLQDVFDRLDRAYKAFFSRVKKGAKRAGFPRFKPRQRWDSFKFKQCWNNKKGDWTACGKPVDEGRRINIPKIGAVKIKLHRPLEGKPKSLQIVLDVDQWYAVYTCEVPLSPLPATCCSVGIDLGTTWFAVTSDGEFIKNPRHLGRSLKKLRVQQRTVARRKKGGKRRRKAVQMVARTHRKVRRQRLDFQHKTARKLVDEHDVIAHENLQVGSMAQSNLARSILDAGWAGFLFQLSSKAESAGRRVIAVDPRYTSQRCNACGHTGKENRVNQANFRCVQCGHRANADHNAAKNILGRAVPSALNGSGVSHAVV

SEQ ID NO: 9919 - protein, 355 aa, Deinococcus sp.
MTQDTTHHVIRVDRSAYWQLKQAVASGQLQPSAEQLDVMTHGQIYRPAAQLLNAQQLVHDRELQLGALVITGEFYRLPEQEYTSIITASLGVYRQYPAVYPLLTALLAPMTPAAETAWLAGVRLAAAQGRQLASGADMVDDLWTPTAWLRDRTRLIELGGEWFVVLYVAQPSRRPVLAGRAVIGVDIGLAPLATAAWGQQHAVTWRLAEPAVTAGEPAEVRTLVEILTYAAARAALEDLTRQVLRQANTLVLETIGYARFQGNFTAVARRRAVADWHQSWGPQRAYARGIRVVRVPAAFTSQICSACQTHTLGTRQGPNFTCPRGHVLNAHINAARNLVRRYWGLQARARRRRVA

SEQ ID NO: 9920 - protein, 379 aa, Bacillus sp.
MATTKEVDAAMKADVNYWGVQSNSVQAIRRTLFSEAKSFFEALKKWKKNPENFTGRPQFPKYSSTTEKRIIEIYQVPKVDKDGYWSIPMNVEFRKRLGSIKIRMPKNLLNKKISYIEIVPKQKGRFFEVHYTYEMQVAQMKKQPTITMNALSCDLGVDYLMSCATNHGDTFLMDGKKIKSINQYFNKTISELQEKNIENGISKRVVTNRMATLWNKRSSQINGYISQAVGLLFKKVKQLNIDTIVVGYNVGWKQESDMGKKNKQQFVQIPFHKLISAIENKCLKEGIRFKKQEESYTSKASFLDRDTTPVWSKDDKTNYSFSGKRIHRGQYQSKTGPCIHADINGALNILRKSEVVELDENLKVKTPIKLEVQKRKTVA

SEQ ID NO: 9921 - protein, 312 aa, Bacillus sp.
MKKAFKTEIRLTDEQQTKIHQTIGVCRFLYNRFLAYNRDHYEQYKQGKLEYGYVSGMDFDKYVNNDLSKQEGFKWIKQVGSKAGRYYVSVLCEVEVSTKEEQLTQEGVGIDLGIKTFAVCSNDATFPNINKTVHVRKLEKKLRREQRSLSRKYEFFYKETKTKGGEPATKRTNLQKNLLRVQRFHQRLAKIRQEYVKSVVNQVVKTKLSFITIEYLNIKGMMKNKHLSKAIAKQCFYEFTKWLEAKCRENGIELRQVGRFYPSSKTCSQCGQVKKDLRLKDRVFTCSCGHRTDRDKNASLNLVQAKEYTILT

SEQ ID NO: 9922 - protein, 371 aa, Bacillus sp.
MTTYKTMQIWVKNGHRIHPYFTEMCQNAKKLYNSTHFYIRQIFTGLTQEKELHSLQTGVLDTLQKHFPRMNDNQLLAYQKKLAKEKAKPVEKQKEIKCNLFKGPSKEKPCVDYNLLDALFKSMALHDYRSMPTQSSQGIMKIVFQNWKSFYASLKEYKMNPTKFKARPRIPGYSRAKEKEVSFSNQDCVIKENKFLKFPKTKERLNIGKLGFTEGKLKQVRVIPKYGHYVVELIFEVRTEQGMKPTKKRFMSVDFGIDNVATIVTNTGRIPVLVKGKNIKSVNQRYNQLKAHFIGILRQGKNPNEGPFTSKQLEQINKKRFNQIKDLFHCLAPAPSDYRDFPHLRTISQHRLTSVLRVSFISYGLVQSVRR

SEQ ID NO: 9923 - protein, 279 aa, Salmonella sp.
MAISTRSILAARDAGTRSTWSSWPGARFLLQAGGLPTLQEERPVRQFLLPRPETDQARPGEQSYFSAKTWLDTLPEQPSGHGHCKNVTVSQSCGKWYISIQTESEVSTPVHSSASMVGLDVGVAKLATLSDGTVFEPVNSFQKNQKKLAVLQRQLSRRVKFSNNWQKQKHKIQRLHSRIANIRRDYLHKVTTTISKNHAMIVIEDLKVSNMSRSAAGTVSQPGHNVRAKSGLNRSILNQGWYEMRRQLEYKQFWRGGQVLAVPPAYTSQRCACCGHTEK

SEQ ID NO: 9924 - protein, 402 aa, Escherichia sp.
VKRLQAFKFQLRPGGQQEREMRRFAGACRFVFNRALALQNENHEVGNKYIPYGKMASWLVEWKNATETQWLKDSPSQPLQQSLKDLERAYKNFFRKRAAFPRFKKRGQNDVFRYPQGVKLDQENSRIFLPKLGWMRYRNSRQVTGVVKNVTVSQSCGKWYISIQTESEVSTPVHPSASMVGLDAGVAKLATLSDGTVFEPVNSFQKNQKTPARLQRQLSRKVKFSNNWQKQKRKIQRLHSCIANIRRDYLHKVTTTVSKNHAMIVIEDLKVSNMSKSAAGTVSQPGRNVRAKSGLNRSILDQGWYEMRRQLEYKQLWSGGQVLAVPPAYTSQRCACCGHTAKENRLSQSKFRCQVCGYTANADVNGARNILAAGHAVLACGEMVQSGRPLKQEPTEMIQATA

SEQ ID NO: 9925 - protein, 848 aa, unknown
  TnpB Polypeptide
MKTFAEATEVTDIAPRKRKRPDRAVKIEESKKTHKLTVKCFLGGYQTPGKKKSRSNNPTWKGLCKQPVMAAAIDRAVQYISSVTIMASRLLVYHTLRALQANRPIQSSTDVYNDLISKVFIAAGNIVKRQGGAGTYHKDNDIQESAAAFANLLRTSTIDGEHIQYPVYESWMADVQSEAARQFAVNVKNHLLLNTSGFVRRFIAARISGLLPDSTMSTRKVIKSATAAAYKSLTEQTRFSETIQAFRRLKNLPQAELNIVQNIIDDIEPVYAPIRAGDKTLWFWNHTRLFHFILAEIEAINEDSLNRRMVHDFMQSIVDRICEVDTLMDQMLSEMEINQDHTMSSDAIELDNAQPLNIMQYKVFDILPISKLRAKYIRLTNTSLAALVHQLAQLSKTGAPLQRKTRGHGVPCDDSDIAHFRAIVEEANAQANDPSASKEDRMNLYWSKCFEIRRHERSNKLKFANVLETDGIGVSLTMSKQKTDAELAIIEKKAIVAADKKRHKDENAARRAAGQQPINRKKNAEEIALQQIEEDAKEASLKEAAQLLGFSKDEDGVWKIKDGAFAPVGIDPGKKKPFTCATWSAAAEQSLWKQDGDKIGSPSDENERFSMAEMSKSEYYYLSGFNQRAAITNNHIEACPRVKEYNQGGALSTKSASLHQYEAAMIPFARIYNTAMELYSTSRWWRRLKMGTYIKGQKTMEIILERITKQRDPELQKKVVVAFGDASIGQVKGCAPVGNKKIRSFIKERTCCIYTSEFRTSKCCSCCHKPLGGALYKVRRCRNNVCHRTLWGRDSNAAINILFRLLWEIRDEEIPGVFCRGTVLEEAEEDPVEEEDNTRVEEIILLHA

SEQ ID NO: 9926 - protein, 642 aa, Nitriliruptoraceae sp.
VDTDGDVSVVRLPLDVSDPVQRRRVERLFVDCYQLRRTLQRQARARVDAYWRDRTNRKADPKAARERYGLTRKQIEAAAKQHLDAAPHLMRGCTKALGLHLADTVWTQVERHLFADVSGRRHGRPKTSRWFDFVRVPGRAKSHTRPRKWETFRLHGSVDAHRAAFARGDGGFYQPRRMPKPRPDGSWWGYDGPLTVVATGLGVGELVLPVRLPAAPCNQAHLDHHLSDPSRWHKIDLVRHRDPQAAGGWRYEAHLMVLVAPYVAPATVTRRQAAPTDRRGGVDVNVSNVTIASHHDGDHLKIDRVARDAGQRQATTREAKKTRDRQKALDRSRRASNPDQYQPSKAQKREQRRRADTGLPAREFTPAGPRKARTDGRPVRAYRHDALSRTYRKGRAQAAEGAAGVARARRDRARKVAADLIVVHGPNLVIEDGNLTTWARQWGRSLHAFAPGTLIAALDREARATADQNGVDGGVERASTRTTALSQRCPCGHRAKKSLGQRTHACSACGLTGDRDAVSATLAAFVDVAPGKPATARLDRRSARKALQHPATWHTLNQTSQRKKGRQDGPSASTAHPPPHQPKAGRAVERPPATAGSARRTPARHPHQPSTSPTQAAGARTGLRTGRSRRDGAKAPPLRDIS

SEQ ID NO: 9927 - protein, 198 aa, Lactobacillus sp.
MKSMAQLEYHYGLKVRIYPSDYQKQIIKVNSDASRFVYNEMVAIGKELWQLNRVKLSIDTVQDRIQQLKLRQNAKQMSNHFQFLEDKRIDSLAKANAIQNYHKAWNAFRKVHEAGVPKFHRKSYAWRYQTNCQYPKQKTARLDNGTVCFEDRKHIVVPKLGRLWIKGAQQRLLDHQGETRIGTVTISKDAADRFFLSL

SEQ ID NO: 9928 - protein, 204 aa, Erysipelotrichaceae sp.
  misc_feature (167)..(204): Xaa can be any naturally occurring amino acid
VGTDRKYYRESHDKLVKAQRKLSRMQGSKKYEVKSNNYMKQLRKVNIIHRHIANQRLDNLHKISTEIANQYDVVCVGSINMRSMANRSFGNGKATLDNGYGMLLTLLEYKLSDRNKYLIKVDKWFPSSQICSCCNTLHPDMRDLSKRKMICDYGLTISLTITQPSIXXXXXXXXXXXXXXXXXXXXXXXXXXXXXXXXXXXXXX

SEQ ID NO: 9929 - protein, 511 aa, Ferroplasma sp.
MIETKRNKIKNSLRITRERRKTQNVIVLKLKIDNDKLNNKSIKTLNTIFLEAKWLYNYVINKEFNNDIFNIDPKIKNVNVYVKDHYETRELTYLSSQMKEEIINRAMDNIRGLHKLKEKGSKVGKLKFKSFITSIPLNQYTITYKIINNNYIKIQGIKQLLKVNGLDNLECYYEPASALLINNNNNNYYINITAYKNKYILEKPVNNQKILSFDLGIKNQLTCSNGSILNYNIPKSKREIRLQRSLSRKARYVEGTNSKNKLSREQSKNYYKNKNKLNREQTKTTNKRKDTINKITHYLTFNYDIVVTQNDNISGWQHLFGKKIESTGIGGIIDALKHKASTLILIDRFIPTTKECSNCHNKYNIKLDERIYKCTNCGFIIDRDYNSALNMIYYGIIKLNELLKIKNKKLNNYFKKYNINLNVPMERRELTPVEIIASGFEGLSISPYVKLSMVNEAGSLYALHEVVHLLIVTPDACQDNGRSQPTKLGAKVYWVSDYYSEIIYPHEIKIY

SEQ ID NO: 9930 - protein, 335 aa, Ferroplasma sp.
LKFKSFITSIPLNQYTITYKIINNNYIKIQNIKQLLKVNGLDNLECYYEPASALLINNNNNYYINITAYKNKYILEKPVNNQKIISFDLGIKNQLTCSNGSILNYNIPKSKKEIRLQRSLSRKARYAEGTKKLSRGQSRNYYKNKNKLNKEQNKTMNRRKDTINKITHYLTSNYDIVITQNDNIRGWKHLFGRKIESTGIGGIIDALKHKASTLILLDKFIPTTKECSNCHNKYDIKLDERIYQCHNCGFIIDRDYNSALNDMYYGIKKLNELLKIKNKKLNNYFKKYNINLNVPMERRELTPVEIIASGFEGLNISPYVKLSMVSEAGSLYALA

SEQ ID NO: 9931 - protein, 462 aa, Ferroplasma sp.
MRKRAMMSEERRNKIKNSLKLTKEKRKTQDVIILKLKIDNDKLNNNTIKALNTMFLETKWLYNYILDKEFNNDIFKFDYKTNYANVYVKDHYERRKINYLSAQMKQDLLKRTENNISGLHELKENGFKTGKLKFKKEINSIPLRQFGKGKTYNIINNFNYIKIQRIEQPLKVNGFYETFTDNENIKHKELKYDFNNLDFGNAMLIHKNNNYYINITAYTKKEERNNNRIIGIDSGIKTQLTLSNGLKLEYNIPKSKREIRLQRELSRKAKYAEGSKKKLSGEQSKNYNKNKNRLNREQQKRNNKKRDVKNKIVHYITSNYNIIITQNDNISGWQKLFGKKIENTGIGSIIEALKSKASNLIPVGRFIPTTKECNNCHNKYDIKLNERIYKCSNCGYIIDRDYNSSLNMIYYGMKTKKFKNTVPEDSREFTPGETLTDTFEGLNTPYVKASYVDEPGSFNALA

SEQ ID NO: 9932 - protein, 442 aa, Blautia sp.
MRTVSSYGVELRKQNIPIRQTLDIYRSAVSCLIEIYAQTWDELAVITEPKKRFNTAEHLVHTTKKNQARFDFDLRFPKMPSYLRRAAIQHALGSISSYKTRLELWEKTDQKGGRPKLVCGNHAMPVFYRDVMYREDTEEKDRACLKLYDGHDWKWFRVSLSHTDMEYLRKNWAGKRATAPVLEKRHRKYFLRFSYTEEVLFTKTSVKEQVICSVDLGLNTDAVCTIMRSDGTVLGRKFIDFPSEKDRMYRVLGRISRFQREHGSAQVKSRWAYAKRLNTELGRKIAGAVTGYAEENHADVIVFEYLEIKGKISGRKKQKLHLWRKRDIQKRCEHQAHRRGMRISRICAWNTSRLACDGSGTVARDPGNHSLCTFQNGKRYNCDLSASYNIGARYFIREFLKPLPVTERSLLEAKVPSVKRRISCVYADLRELFSEMELLRAA

SEQ ID NO: 9933 - protein, 527 aa, Thiothrix sp.
MQMMDGLNTSGHQADNGVTTSMPTLGVLLTDSLSAIAACPVTSNGMTSQAKLSICKANTPKPKSSKTSGVDSTISVKGLNPYWDGVCEVRSSLLWLPTKTDLPVSDLNLLSELSANSVQNSWFSVTVKENPNKNLPKIYSPSFMSSLADFTECEITRARKIKMLPTRQQEKLLNAWMGIYRFIYNETVWMLNGRYVAPNWMAITKWLIPELVYLYPWTEQLPRAMRDGAVQEAVQAVLNAIAKFKRTNEVQRVSYKSRKDAQQSFFLRNDKWSKDRRGFSVRELGKIRFAESLPDSLRDGRVVKDGIYWYVALPETKKRDLAENQGRLCALDPGVRTFQTFFSDHHCGHLGEQDVQRITRLAFHLDDLTSRRDKATNKRKKSALTKAMARIGNAVSNLIDELHWKTARFLTDNFDVILLPTFESSQMVIKADRKIRSKTVRSMLTLKHYTFSQRLEQKCFERGKVLIRVCEAYTSKTASWTGEIIHNLGGRKTIKSGGFVVDRDENGARGIFLRALVDSPILIESAC

SEQ ID NO: 9934 - protein, 490 aa, Mycobacterium sp.
VLGSTANALLPTVLSVPSLRRLTPGNLRRPEVAKFEIPEGWAVQAFKFTLDPTEDQARALARHFGARRKAYNWSVATLKADIEAWHATGIETAKPSLRVLRKRWNQVKDDVCVNAETGVVWWPECSKEAYADGIDGAVDAYWNWQTSRSGKRDGKRVGFPQFKKKGRDADRVSFTTGAMRVEPDRRHLTVPVIGTVRTHENTRRLERLIRSDRARVLAISVRRNGTRLDASMRVLVQRPQQPSVALPDSRVGVDVVVRRLATVAAADGSVIEQVENPRPLDAALKELRHVSRARSRCTKGSRQYRERTTEMSRLHRRVNDVRTHHLHCLTTRLAKTHGRIVVEGLDAAGMLRQKGLPGARARRRGLSDAALGTPRRHLSYKTGWYGSQLVVADRWFPSSKTCHACGHVQAIGWDEHWQCDGCSASHQRDDNAAITLARYEDTTSVVGPVGAAVKRGADRKTGHRPAGGCEARKGRSRTAAEQPRDGVRVA

SEQ ID NO: 9935 - protein, 385 aa, unknown
  TnpB Polypeptide
MTTTYKFRMYPKKAEADKLETAREVCRQTYNYLLAELNEGFTKNEIQNYLLDLKVAYPEMNNVHSKVLQMENQRLFGNLSALSQLKKHGKKVGALRYKGKNWFKTFTYNQSGFSLKHIRAKKGILWLSKIGDIPIKMHRKVEGDIKNITIKKSNERWYAFVVTDAIIKRVCGEKEIGIDVGIENYIYDSEGNVYENPKHFDKYHQELKIAQKDLSRKIKGSNSRKKARFRVAKIHEKIANARDDFIHKLSTKLIRESKFIAIEKLNIKNLMGISYNAKNIADASWGKLSMYLHYKAENAGCVVQDVDPAYSTRDCNFCGYRNRKLFLWQRQFCCERCGKELPRDYNSARNILARGKELASVEKAPSTEQLVQQEASVKPEAITSK

SEQ ID NO: 9936 - protein, 392 aa, Archaeoglobus sp.
VKVQKVIKCKVVHLTRVKRELLTQEYENLQKFLQGDNSVKLYSANKQQAKRYYKKVKPDKEYPLSIRKDLIKVERKNTKIAKYWARIPVAGRRGGIWVAIKPHRDIPEDVEICESKLFRRNGEFYLHLTIQREIGFVKVETSDCVLYIPPSFTVNERTVVIAIDIGEANPIASVELWGFGMQRRNVKFLGKEIRAIRTHYNWVRKSVGRKKIKHAVKWIKQLGNKESRKVADVLHKATRSIVDRAIELKQQGFEPIIVFGDLKNVRKPHIKGKPRCRKNNRKVHTMPSFKVKHMLLYKALWAGIPVAIVNEAWTSKQCWRCGSTNTVVRKRMFKCKDCGLEYNRDLNGSVNIGNRLLGYMLRSRADVNQPETPPVYSVLVSDSACEGRSHRL

SEQ ID NO: 9937 - protein, 462 aa, Archaeoglobus sp.
MRCILIQPRLTREQEIVLGNLTYNAGKMWNAANYLLMNGKASFNVFDLYNKLKDDFFVKNVQSRSAQILMGQLIEAWKTFFDYLKNPEKYRFPIRKPHFVDRKKPHHTVVYDKTGFKVFGTKLRLSIPKQLREYLKEYGYSKKYLWIDTGIDLTRYDVRNVQITPLKYSGRIFYQIGIVYSKPEQSEVEGKERLMGIDLNKANFAVIVVENHPTAYIIDGRGLMSLLRKYLKKIAKLQSLKDNLKNKGLPYNRVDERIAKLWKRVRNLLRDFSHKASNLIAGLARKLKVTKIIVGNIYSSKNEENDLPDLVNQMFSLLPHGKVVDHLRYKFGEVVEIDERYTSGVDSVKHEYPSEDNYEPWRRIKRSLFKSVIGLINADVNAARNIIKKCLFETGRTDHPFLKDTASGLKQVVRLRVFRKLKGSSESAVLEQIGVARGCVPLGAVRLSAEQTRPEAPCASEG

SEQ ID NO: 9938 - protein, 461 aa, Archaeoglobus sp.
VTVTTTIQKTVKLPVSHEITKRKLDRIERLSARLTYAISLYLDIVIEKGITTRKEANAYQKTIAERTGLTSAFIQCARDRALEMYRSYKRLHEKWKKRVEELKKSLERARAKENKNGIRKLERKLKRMMDREPSPPSVNRKQPIFFDRRIGEIVFSTCKKFRVWAKISTLRRHETIYIPLLTYPYANRHLKWKIKGFKLIYNYNLRRWEVHVTIEKEVEVHVKGYAGIDLGMKRLAYVKQVSEGENRVLSIPKEDHHHFFRRMHELNNRIARLQRLKKIKVLKKLKNKRRNIARDFRRKLAKDVASHITNTIVFVGYPKNIRDEYYRGNGNKLARKRLNRWAFKEFGDILILKLKENENHAIFVGEVYSTKTCCVCGSTNTIVEDRSFYCKNCDTKLDRDENASTNILLKGLKKTGLDEAMLRAGAAVTQPLSVDDGGEELPEHTTSLQRATPVVKGRPPF

SEQ ID NO: 9939 - protein, 392 aa, Archaeoglobus sp.
MGQLVEGWMTYFDYLKNPENYSSPVRRPGFMDKKRPHHTIIYDKTGFKVLGSKIRLSIPKQLKAYLRGEYGFDKKYLWIDTGIDLTQYDVRNIQITPLKYSGRIFYQMGIIYSVEQEQTQQPEKERLMSIDFNTSNFAVIVIEDHPTSYIIDGRGLMSLLRKYLKKISRLQSRRDNLKEGLPHHKLNERIAKLWKRVRNLLRDFSHRVSNLIVELARRQVTRIVIGNVHTSKNKESKLPDLVNQMFSLLPHGKVVKHLQYKFGNVIEISEEYTSGVDSVKHEHPSKEHYEPRKRVKRGLFKSVIGIINADVNSARNILKKYLYEIGQTNHVLRDTASGLKQIIRLRVFHRLRGSSESAVLGQIGVVRGCVPLGMVRNLTVQTHPEAPCASEG

SEQ ID NO: 9940 - protein, 324 aa, Archaeoglobus sp.
LKEEYGFDKKYLWIDTGIDLTQYDVRNIQITPLKYSGRIFYQMGIIYSVEQEQTQQPEKERLMSIDFNTSNFAVIVIEDHPTSYIIDGRGLMSLLRKYLKKISRLQSRRDNLKEGLPHHKLNERIAKLWKRVRNLLRDFSHRVSNLIVELARRQVTRIIVGNVHSSKNKESKLPDLVNQMFSLLPHGKVVRHLKYKFGDVVEVSEEYTSGVDSVKYEYPSREYYEPRKRVKRFKSVIGIINADVNSARNILKKYLYEIGQTDHVLKDMASGLKQIIRLRVFHRLRGSSESAVLGQIGVVRGCVPLGVVRGLAQTHPETPCVSEG

SEQ ID NO: 9941 - protein, 423 aa, Archaeoglobus sp.
MQIINWIDKTQNSSQVKIMLISYRFRIYPSKTVQAKLNEQLELCRWLYNRLLSEVNKARKEGRRIRREDTQSLIVRIKREEKPELSKVYSKVLQMVNYQLRSNISSLNELRKKGVKVGWLRYKTSPNSFKTLNFNQSGFKIDFDRKKLSLSKVGDIPIRLHRSIGGKIKGVIIKRTKSGKWYAIVQAEVDKQPLPPTGRAIGIDVGITHFCVDSDGNYFEHPKYLDRTLEKIKKVQKQLSRKQKGSKNREKVRIGLAKLYEKLENQRNDFLHKLSRYYVNNYDIMVVEDLNVKEMAENGSSTTLNRHITDSAWSKFVRLLCEKAERAARTVVKVNPKNTSKRCAMCGYIVNNLKLHDRTFTCPICGWEADRDYNASLNILDVGMGRSRTPVEGEPLPCVISYREVIAGQVLSMKQEVPSVRAE

SEQ ID NO: 9942 - protein, 442 aa, Archaeoglobus sp.
MKVQKTIKIPVSDKITQEKLEKLDRLTARLTYGVHIFLDKIIENDITSLKEAEQFRKEIQQITGLPSAFAQACRDKALWMYKSYKKLHREWQKEVVKLERKIERCMDKHKRKKLEHKLYRLKKREPSLPTIMGKIPVMFDYRVGSIEFSYSAKEFKLWMRISTLEKGKRIDVPLHSYAYAEKHLKSWSIKSFQIVWRSKLKRYEVHVVVEKEVVVKPKRLVGIDLGLKRIITAYETNGEENRVLLFSKEEYKEFFIRMRRLNNRIGKLQRLRKYRILKKLRHKRRNYARDFRRKLAVELVRQFSNCLIFIGHPSHVRDKHYKGSGHRKNRKRINHWAFREFAEILKTKLMENNNIAIIVNEWMSTKQCSECGSKKTEVNDRHFRCLECGYEDDRDVNAAKNILKFGLTKALRKGAGAAVNQPELPMIGQKPLKVEAPSVRAE

SEQ ID NO: 9943 - protein, 383 aa, Archaeoglobus sp.
VEHTKTVVCKLETTEEEFNKLMDTVKAFRSACNYISEVAWNQRCFNPVALHHLTYYETREKFNLPANLAVRARDRVAKSYKNNRKKRHKFTALSMDLDKRLFTLLRNGEFRASISTVYGRVRPGLAIGEYQKELLKNPVRDAKLVCRRDDRHFYLHITVLVEAPEPSGSNPVGVDIGVNNLVAASNGFKVNGKPVESRRRHFRKLRSSLQKKGTSSAKRKLKQLSGRERRWVNTILHQISRAFVDTLSEGDYVVLEKLNGIRDRCNVRKEYRATFHNWAFRRLQEMIEYKCLERGVPVVYVEPKYSSQRCPRCGTIDKRNRKSQALFQCVSCGFQHNADYVASLNLSELARGGWAAVNQPNVGADDRLCETTYKPLPSSWRGS

SEQ ID NO: 9944 - protein, 468 aa, Archaeoglobus sp.
MYVQENRCIVIQPRLTREQEIVIGNLCYNAGKVWNVVNHHLINGNLKFNVYDIYNKLKDNFFVRNIHSRSAQILMGQLVEGWEKYFDYLKNPENYSSPVRRPGFMDKKKPHRTIVYDKTGFKVLGSKIRLSIPKQLREYLKEEYGYDKKYLWIDTGIDLTGYDVRNIQITPLKYSGRIFYQIGIVYSVEQEQTQQPEKEMLMSIDFNTSNFAVIVIEGHPVSYIIDGRGLMSLLRKYLKKISRLQSKRDNLNEGLPHHKLDERIAKLWKRVRNLLRDFSHRVSNLIVELAKKFRVTRIVVGNVHSSKNKESKLPDLVNQMFSLLPHGKVVKHLKYKFGDIVEVSEEYTSGVDSVKHEYPSREYYEPRKRVKRGLFKSVIGIINADVNSARNILKKYLYEIGQTDHGFLRDMASGLKQIIRLRVFHRLRGSSESVPVLGQIGVARGCVPLGMVRGLAQTHPEAPCVSEG

SEQ ID NO: 9945 - protein, 417 aa, Archaeoglobus sp.
MRRTNVFKLKPTKEQEKRLFELANNCSRLWNEINYKRRQSFFSGEIDWNTDEEYHKYKKIIGSAMVQQIIRKNNEAWKSFFALLKKKSKGKLPPNIRKVSPPRYWKDRKAGKRKLRILVRNDCYKLGGDVLKFGKMRIKWKGKNRWKGKQGRLEIVYDEPSKSWYAFQPVEVEPLHQPIGYKKAYCDLGVRVLIMAAIDNEVFGYSSNRLLSDWWYWSKKIAKYQSKLKRVNNKHTSKRLRQLYRKRKRRFRHFVNTIVNRFIRLCYERGVSEIVIGDLKGIRNNNNGIKKFNSMIHNFWSHDYLIQRIKEKAEEYGMKVTQVDESYTSSRCPRCGSVKVYKHKRLFKCLNCGLEAHRDAVGCVNIGVAQGNNPGELINGAVACPVFLRVEEGAEVKADVAPMSVKLSEARTSHALA

SEQ ID NO: 9946 - protein, 308 aa, Archaeoglobus sp.
MVNYQLWSNIKALKELRKRGKKVGWLRYKTGNSFKTLNFNQSGFKIDFERKKLILSKVGEIPIRIHRCIEGKVKGVIIKRTKSGKWFAIVQAEVGAKPLAPTGKVVGIDVGVRYFLADTDGRQVENPCFYEKTLKRIKRLQRDLSRKQKGSKNWEKCRIKLAKAYEKLVNQRNDFLHKLSRFYVDNYDVIAVEDLRIQNMVRAGKTLAQRILDASWGKFIQLLSYKAERAGRRVVRVSPKGTSEGLSFDDPLRDYISACRILSRGLGRPCQPVERGPLLLVTAKAVIEGQVSSVKQEAPSEDGVVHLL

SEQ ID NO: 9947 - protein, 453 aa, Archaeoglobus sp.
MIEILAAIKTAIGKAIIEEGDPAKVDEALLESRRVFNEVLIKLLDGEKVSDKDIQSFLVDNTKQRIIAKAKETFKSFKELEEKGEAEELRIYENKPLPLRMNFGEGYNLWINDGRIWFRVTLIPRKEYVKGYLQFSKEQEEIVRKAIEEKKKAIKLRKQGIDYTPEYDVTIAELVKRKGEYYLHITITRNVPVSSIRYAAGIDVNEDNVAITVYDLTTREVVDSFIVDYAVIKFIRHYWFAIRKRLQEHGAKSKRKLGFTGKEHRQIEYLLHLVSRRVADYLSKYQGLIVFMEDLNSIRNGNKGKRMNRRLHSWPFRKLQLFLKYKLEWLGVPVKFVPPEDTSRRCPLCGVLGIRHKKLFTCPNGHKGHADRNASVNILIRGCVLYLHVPYSAFRSMKLPNFRMWKLRRDECGVWGCVNQPLPAGVESHTAAQRQEAEKLRFQQEEAASFSLR

SEQ ID NO: 9948 - protein, 362 aa, Archaeoglobus sp.
VISVKLKPVGEQAEKIDGLFSEYRRLAMFLIECCKKTGIRDYYRLHNFAYNFCKENYRLPSEVIQQGMKLVTNTFKGSYKARHIPKIDVNDFPIRLTYGEKHLFYFVFDGGLKARISLPNGRSFKKEEILIHNGELNDKLSELTKHKISDSLLFPDYRLLITLTKEVEIDYVPENAIGVDIGIINLITAYCNGKVLQISGEQILEAHKKGVEHRRLKQKLGSRKFTYNESKFVRDYVYHAANQVIEFAKQFEKPVIVLEDLKWLKRKLKRLPHIYTIAPYELIHSAIVEKALWEEIAVQTRKAYYSSQKCPVCKYVSSKNRKGRRFKCLKCGFEEDVDVVAGMNLSFFAIPPPIKMGGTLAR

SEQ ID NO: 9949 - protein, 425 aa, Archaeoglobus sp.
MLMKVRRVNKFRLRPTKKQEKVLFSLCEMSAVLWNRVNYKRRQSFFAGEIDWNTEEEYNEFKRILGSATTQQIIRKNDEAWRSFLKLLRLKQQDKLPKHVHKVSPPRYWKNRRTGKKKLMTIIRNDCYRIEEVRGKKWLILPKGLKIRITGCVKWRGKQGRLEIHYDDLTGRWYALQSVEVEVEEVRSTKRAYADLGVINIITACIEGERQPIAFSGKPLLADWWYWSKKIARCQSHLKQVNNKNTSKRLKRLYRKRKRRFRHNINTIVYRFVRLCHAKSVGEIVIGDITHIRDNNDNGSKVNSMIHNFWSFGYIMERLRTTAENFGIKVKPVDEAYTSSECPWCHSKNVKKHKRLFKCLNCGVKAHRDVVGVLNIALLHGEGFNGVLAHPLLLRVDDAPESKSSMWVRMSVRPSEARITPLLVR

SEQ ID NO: 9950 - protein, 268 aa, unknown
  TnpB Polypeptide
VAITDSTVKLPKIGHIIAKFPSKVHGLIKSATISKTPSGKYYVSLLVETIATTLPKTHSNIGIDLGLTDFIVLSDGRKVANPTFLSKLQHKLAREQKILAKRRAVAKADQRKLSDSRNYQKQKVKVAKVYEKITNIRKDFLHKLSFNLIKNHDVIAIEDLNVKGMVKNRKLSKAISDSSWSTFTTMLNYKAEWYGKALIKVDRWYPSSKTCSGCGHLLTKAELPLQVRSWNCPSCLQSNDRDINASINILNEGLKLATIKTVGTTGLA

SEQ ID NO: 9951 - protein, 314 aa, Bacillus sp.
  misc_feature (57)..(60): Xaa can be any naturally occurring amino acid
  misc_feature (300)..(303): Xaa can be any naturally occurring amino acid
MGVKRMMINKAYKFRIYPNKAQATLINKTIGCSRFVFNHFLSLWDNAYKETGKGLTXXXXEFVWLKEVDSIAIQSSVRNLADAYTRLFKKQNNAPRFKSKKNNVQSYTTKQTNENIAVVGNKIKLPKLGLVRFAKSREVKGRILNATVRRNTSGRYFVSLLVETEVQELPKTNSYIGMDVGLKDFAILSDGTIYKNPKFFRSLEEKLVKAQRVLSRRMKGSSRWNKQRIKVARIHEYMANARKDYLDKISTEIIKNHDVIGIEDLQVSNMLKNHKLAKAISEVSWSQFRTMLEYKAKWYXXXXCGLFMFQSHVL

SEQ ID NO: 9952 - protein, 487 aa, unknown
  TnpB Polypeptide
MEYKSNNNVVYSCKYHVVFCPKYRRSVLINGVDVRLKELIQQTCEQLNVEIIEMEIMPDHVHLLMEVDPQFGIHKAVKQIKGYSSRVLREEFPCLKSRLPSLWTNSYFVSTVGGASETVKVYPTEYQKTLITQTMTEYIDTVNSLVSEAVSGHSIAKTTTADVSADLPSALLNQCIRDAKSIVKKHYKYCRKAVLKNRSLAKRGSAIRTKAPNLPILKKHCCYINNQNYKVKNNCIEFPVMIDGKSKRISVFVKLTDRQKALFSDAKFGTMRIVIKNHTLVAQIVYEVAEPELKLDGNVMGIDLGIKCPAVSYCSEGSVKFYGNGRKNKYMRRHYAYLRKKLQTSKKINAVKRINDKEQRIMRDIDHKISHDIVETAVAHNVKVIKLEHLQNIRSTTRKSRKNNHSLHTWSFYRLAQFIEYKAKLAGISVEYVDSAYTSQRCPICGSVHHADDRNYTCECGFHIHRDLLGAMNICNSTEFVGNRQTA

SEQ ID NO: 9953 - protein, 417 aa, Saccharomonospora sp.
MLAGRKYRSKLTTEQAAQCEEFGNVCRAVWNTALDQRRQYRTRGAWMNYNEQAGQLADAKTEHEWLKVAPSHILQQTLKDLDRACKDHGTFRVKWRGKSRWNPSFRFPMGKLIEVERLSKRWGRAKLPKLGWVRFRMTRQIGGVVRSATVSHDGRDWFVSFLVDDGEKTPEQHAMPDTGVGVDRGVVAAVATSDGKLIDRGFTSPGEAERYRRLQQELARQKRGSRNRKKTLRAMRGWKRREGDRRADFCSQVAAELTDRNALVALEDLRTRNMTRSASGTSEEPGRSVARKSGLNRAILDKGWHKLELALLNAARHTGSEIVKVPAAYTSQACSVCRNVDPDNRNSQAVFRCTGCGHTAHADVNAAINVLAAGRAVTACGDLGAGRSVKQEPQPALALVGIPRLQPWGGRQATMTL

SEQ ID NO: 9954 - protein, 393 aa, Thermococcus sp.
MSSETIKLTAKFKLKETSEGLDDLFSTYREIVNYLINYAFENSITSFYRLKKETYKSLRKEYSELPSHYHYTACQMATAIFKSYRKRKKKGKAKGKPVFKKEVIMLDDHLFKLDLEAGIIKLSTPSRRVRLEFYPAKYHEKFKGWKIGQAWLVRTPKGVFINVVFSREVEVREPKTFVGVDLNENNVTLSLPNGEFIQIITHERKIRTGYFVKRRKIQKKLRAGKNRKELLEKYGQRERNRLNDLYHKLANKIVELAEKYGGIALEDLTEIRNSIRYSAEMNGRLHRWSFRKLQSIIEYKAKLKGVRVVFVNPAFTSSLCPICGEKLSPKGHRVLKCPKCGFEADRDVVGSWNIRLRALKMWGVTVPPESPTMKMGVGKVSRNDVYELYKSYG

SEQ ID NO: 9955 - protein, 434 aa, Thermococcus sp.
MKRSVTVKLQPSTEQEKALFELAHASAIIWNKLNYQRLKQFKEFGKIDFNGTEKEAYHEFKNWIGGSTVQQLARKNAESWRSFFALNKKKKSGELPEWFKPKPPGFVREENGRKIFIILLRNDQYKIDGNVIELRRLGKFGRLRIQFKGKIHLKGKQGRLEITYDNVRKKWYAHVSFTVEEKLINGEWVRVPRQPSGNLSAGIDLGVNNLMAIYVENGENFLVNGRPLKSIDFYWRRRIAEYQSKLNRSGSKKSRKLKRMHENAKLQAKHYINTAVRQTLEKLYQLSVSRIVVGYPKGIARNSEKGRRQNFILSHVWRFNYVIKRLKEVAEEYGITVIVVNEAFTSQSCPLCGQRHSNGRIFRGLFKCRREGVVMNADLVGAFNILKKAVKTITPSLPGLTVGRGNWLKAEPEGLKTRFLVGLNETPQTSPPLG

SEQ ID NO: 9956 - protein, 576 aa, Scytonema sp.
VAELIKTEQTKTYTDQIDFWHWGELFAISNLIDSARHHCLEMILAEKSQLDCNKELQRLFNINKRYSNSIYTEVQGIVTNANKNRANHIKILEGQIKSIKSDIKKRSKQIKDFAKQEHMLTSKSRSAKKGFKTSKTKIKKACSIYAKSRQTTQLQDAKFGWHQKKRRLHLLQSQLAHLKATKPKYALPDIANSFVLVGSKDESSGNQLAQFDYIENPDSFVLSIRTPYALEERLGGDYIRIDGLNFKHGFHEIVESISERCYQVKTKDGTEKWAIGYNAVTLRFYWQDNCWYVAATTDINLPEITSEYLSGYVGIDLNADSIGWAVCDTQGNLLEYGDYKLDLHSKTSNQRAAIFSDAATFIALKAKQYNFPVASEKLDFSEKKKQIKEKGKKSARMLSSFAYSQWHEALDSACSKYGIYHKKVNPAFSSTIAMLKFMSMYGMNSASAAAFVIARHGRRFSERLPKLHHLLHSKSAYPIGKHVWSQWSRVSRSVKGTPRHKYFTSRFNRARKVTPFCQLTCFVGQHGQLVNPIQLELFEVGAIPTGNDTVTVAVSRSRKPRKRSQSTHMQISLDFN

SEQ ID NO: 9957 - protein, 382 aa, Lactobacillus sp.
MSREYQRLANIVSQWIFDHEFQLSWLKINHWLYKQFRQESPLNSQMIQSVFRTVVARYKTVREQMKQHPYRYKNEEKQWIQTPRDLAWLVKPIQFRRPQADLVRQSNYSFVDKMRQISITTLGKRTKLGFTDRGFEKYFTADWKLGTAKLVHNRGKWFLHIGITKEVPDFDQQGNPQIVGIDRGLRFLATTFDSEGKTLFFDGQKILRKRKIFLEIRRQLQSKGTTSAKKKLKQLAQRENRWMTDVNHRIAKTLVTIYGSHTLFVLEDLTNVTFNTDDLPKALRNSHRSWSFFQLESFLMYKAQAIQSNVVKVNSAFTSQHCPKCGLVEKTNSHHETHEYWCQQCQYRCNDDRLGAMNIEMLGQNWLSGVKYPKIKKLTTAG

SEQ ID NO: 9958 - protein, 417 aa, unknown
  TnpB Polypeptide
MIRRFSSMKSNIQVKLYPTKQMRTYLDSQCDYRRYCWNKGLQLWNDRYDQRIISLPTELKLKIKKSLKDKKIKFTKEETALRRSFPSPTEYLVRDELVLNKDDWEYQNSSRVLQLAIKDLSDAWSRFFEKSQDNTGKPKFKSRKTPKQGFKTDRARIKNNRLRLDKPRDYKGHWEPIRFKGYTIPDGPVKLCAITRLKNHYITTIAIETETTPLKKTNNVTAVDANVDHFDYTDGTCTLRPDKLNYLYGKVQHYQRLLARKRNVNGKKGIHSKSYQKTRTKLQMTYLKIKQIQNDLLHKFTTMLYTNYDTIVIEDLSVKTMQMSKKAKGLHRSLFGRFRQFMDYKAEKFEKTLIIADKYYPSTQRCSSCGYVKTGDEKITLTGNKKHGTRHDQYHCYQCGYKADRDYNAVLNLLALI

SEQ ID NO: 9959 - protein, 378 aa, unknown
  TnpB Polypeptide
MPKVFRYRLRPTKAQIAILNRHLDLCRWIYNETLALRKNAWEQEDRSMSYFESKRMLPIWKDAKPELKEVHSQVLQEAVQRVDLALKAFFRRVKNGEVPGYPRFKGKGWYDSITYPQSGFSLKGNILHLSKIGDIKVRLHRPIEGTIKRLTIRRSSTKKWYVSFLVEDGPREALPESEKAIGIDVGISNFAVFSDGTFIENQRHLAECESRLSEAQSKKDKLSKGSPERRKANRKVSHIYEKLCNLRDNFAHQLSRDIVDDYGIICMEDIDITNMIEKKPYMAKSVLDASWNRFRTYVMYKAASAGRKMVLVSPAYTSQICSGCGTIVKKDLSERVHNCPRCSLTLDRDLNAAKNILRLGLQSLVGIQPRCPRINSGE

SEQ ID NO: 9960 - protein, 407 aa, unknown
  TnpB Polypeptide
VKAVKGVKFAYQATQQTRELLSTFRDMVNDAIRICLAENIKGRLKVRNRIYREFQDRYSVVFCFPYSVAEVAWSIVKKHKRWQRKPHAKRFMFKMDAASFSLNYSVLSLPFRKGERVLIPLQYGEYQRSFLTDKTLKRGSVTVTESSIIIAFTKEAPMETPSKRLGYDLNEKSIVGSDGTTHDLSEVARLHTLYGIRRSIFYERHPHDGRLKKKFAGSRREKERVRQALHRVSKLIVEKARANNEAIVLERLKGIRYAHQRGNGEGKERRRRIAMWPFRLLQSYIDYKARWAGVPLEYVSPAYTSKTCHVCGHINRKLKVTDRSWRCPNCGAKLDRDPNSAMNIERRGKIRCLGEVHPGARGTDEAVKGNETTTPILRAEAPKSSLQELAPLDWTEPKSDICPERVP

SEQ ID NO: 9961 - protein, 386 aa, unknown
  TnpB Polypeptide
MYEVDIMEKILKGYVFRMYPTEEQKILIEKSIGTSRFIYNYFLNVSKKTKINAYEYIKQLPKLIEQYNWLKEVDSCLLRTSIFDLENAYQKHFKENKGLPKFKSKIKSKKSYRTNNITSTYKGKTYNSIELNLNKRIIKLPKLKNVEIKGYRNLNRINGRIINATIYKEVNKYYVSVCVEEYKEVTKVIPKTIIGLDLGIKNLVITSDGKIYDNKKYIEKYERKIKGLQKWLARSQKGSKNREKIKLKIQRAYQKLRNARKYLIHKISKEITEENDIIVTGKLNIEKMVKKSNLAKKIYDASWYELIRCIEYKSKWKNKKFYQVETNYPSSQICSHCSYQNKKVKDLSVRSWECPKCGCINDRDINASINIMGEGIKKYMDELQFN

SEQ ID NO: 9962 - protein, 228 aa, Bacillus sp.
LSATVRRNPSGTDFVSILAEIEVQELPKTDSAVGMDVGVKNVAILSTREVFGNPKWFRILEKKLAHAQRVLSRRTKGGANWHKQRIKVARIYERITNARTDYLQKLSTMIIKNHDMIGIEDLQVSNMLQNHKLAKAIQEVSWSQFRAMLVYKAEWYGKQVVVVSKTFASSQLCPHCGNKNKDVKNLEFREWKCLSCGMYHDRDGNAGQNLRKEALRLLTVGTTGIAYS

SEQ ID NO: 9963 - protein, 275 aa, unknown
  TnpB Polypeptide
MFDFPVKYKYLIYEEVKHMKKMSSLAYHFGVKLRFYPSSKQKKIIKLNYDAQRFVYNSYVGRNRSNYHAKGYLAVRQYQAMPFAFSILNNYETRLAEEVVTNSELLAKPKNIRDTYSFLRVKEIDSLAIANAIQNYQKAWNNYRKIGHGIPTFHKKRSDWSYQTNCQYPKQPEAFLDNGTARFIDAQHVKLPKLGVVRIAGFRKLIKERLLNHISTRIGTVTIKKTADEQFYLSMQLGSDIAFVKELAKTQNQIGIDLNLDNFLTESNGAMVANP

SEQ ID NO: 9964 - protein, 397 aa, unknown
  TnpB Polypeptide
VLKAIKVRLYPNKEQQNLLNNHFGACRFIYNAALNYKKTMYSDYKIKLSKFDIINELIDVKHDSNFQWLNEVKAECLQNTIDSLDSAFKGFYRGNGYPKFKSKRSKQSFLQKQCFRICENTNKIIFLGSKIKFRCSEINTQELQTSKIKRITYSKDNLNHYYASILIENNKDLTLPKLSNEVGIDLGLKYFLITSDGEFVENPKFFRKSEKQLAKQQRFLSRKVKGSSNRNKQRIKIAKIHKKISNQRNYFLHEVSNKIIDENQVIHLETLAVKNMIKNHKLAKSIADASWSTFVNMLKYKSQWYGRELHQINRFSPSSKTCSECGWINVDLTLADRIFKCEDCGHVQDRDLNAAINIKNFSNQINNNNRDELTRINASGEQTVVTQRKKKNQVQTL

SEQ ID NO: 9965 - protein, 439 aa, unknown
  TnpB Polypeptide
MKIYSTYSVKIKHYNHIFKDSISIYRKAVDFLIDVCFNEWDNISAIKGNLLQQQYVERCIHSTKNNLVPIYDFDTKFYKMPSYMRRGAINEAIGKVSSYKSNLVNWQNNPIGKKPSYPKAGYVFPSMYHTVMYNQTGDYTAQIKVYIRNTWDWINIDLKKSDMDYIYRRCNGRKQCAPTLQKRGKEWFLDFPFEEKVKLADTPVCEQTIVAVDLGINSAATISVMRSDGTILGRYFCKLPKETDHLMHSINRIKKAQQHGNYKTPRLWAKAKGINHDISTKTANYIMDIAVLYNADTIVFEHLDKNGKVRGSKKQKLKLWRSQEVQSIVTNKAHRLGMRISHICAWNTSRLAYDGSGFVLRGKNGGLNTYELCRFQNSKTYNCDLSASYNIGARYFIREILKSLDESSRMLIEAKVPQCSKRSTCTFSTLINLNAALIA

SEQ ID NO: 9966 - protein, 432 aa, unknown
  TnpB Polypeptide
LEKLSKTLTRTVVLECYANKYARRALREIESAYREMLVEMVNYAVEHKASQSTLHKVFYEKFRERYPWLPTRVIKGAYRDAARRAKSFRERKKKGKAYKDKPEVKRVTITYSDSQDWRLEDGFVKIRVRSGWVELHYRNHKQFHRYLCSGWRLASELRFKILGRKVVMYLSFTREFEIGYDLRNVVAVDVNENNVTVAAFKDGSLTDVYRVETGLGRIVIAYSERRKNITRGSSTKVREVRRKLRKLHEKERKLDVLRKTAKFVEKLTVESRAVVVVGDIDEKAKEKMERDASNKLRHRIHQWSVKKLIEILDEKPIHIVEVSERGTSSRDPLTGKRIRRFEPLMIRTAVKGLKRVKAVKTVLRVAKVGERALERDVVGAINIGLKYLNTDGSPVALGSTGTHEVRVKLVSPHRGATPLTEIQVFTNTIKYR

SEQ ID NO: 9967 - protein, 428 aa, unknown
  TnpB Polypeptide
MKILKAYKYRLKTDSEFEDKLLKTSGCTRFVWNRALSLNKERLEHKVPLIWYNDMAGFLKLWKQSEEYGFLKEAHSQVLQQTLKDLEEAFRKFFTHKAGFPNFKKKNTYNSFRYSQGFKIQGNRIFLPKIGWVGFFKSRDIQGTPKNMTVSKENDHWYASIQTEEEISEPVRPALDSIIGTDVGIVHFASIADGTLNEEFIDFPTPLKRYSTKLARAQRKLSRKKRFSKNWMKQKKRTTKIHEDISNIRKDYLHKVSTAIAKNHGIVGVEDLKIKNMTKSARGTKENPGHNVRAKSGLNKAILNQGWGKFIEMLEYKLRYSGGMLVKVPPKGTSITCPECGYESKENRKSQAVFVCKSCGFTHNADWVGAEIVRQRAVKQLGLVDLLNYPAVGHTVEACGGKGHKPPFEAGTSRKEQLSTAPMGISNL

SEQ ID NO: 9968 - protein, 412 aa, unknown
  TnpB Polypeptide
MPVIVQDEMLVKGIVFYLESGLPAEAKLLLEDFRLAVNNAIRAGLQARVTSRNALCKIAYRDFREQHPRMYAQHLVSAFEVAGSILKNHRRRVGKSVASRTPYAKRLMMKAENQAYKLDRESGVIDLPIRAGCHVELRLVVSQFHRKYLDDMALTLGSLTVLPDRVIVVFRKAAPRPYAPDSVLSLDTNERSLDGLFVEGDVAKAVKAEFPEVAIIQQRHHDRRKRLQKKKAHDRRTTRNLCRREGRREHHRIDYRLHQVANSILKFAEERRSAIVLEDLKGMRTKRSKELNRRLSMWPRRKLHQIIEYKAQWKGVPVIKVDPRNSSRTCPICGRIQDSRMGTEFICECGWHLDRHINASINLLQTAISKGMAGGLRFNPGAFQHDVMMILYEPAMAARSEPNGTSGIAGVT

SEQ ID NO: 9969 - protein, 376 aa, unknown
  TnpB Polypeptide
LLAKKLNGILLTTVYNYSMSESTPIVIRTLRLRVKDKHAKMLCAQAREVNFVWNFINELSEKHTRRTAKFFSAYDLNAYTTGASKEGLSLHSQTVQAINEEFVARRIQFRKLRLSWRKSGGTRRSLGWIPIKKSVIRYRNGQLHYQGYAMGLWDSYGLADYELGSGTFSEDSRGRWYFNTTVKVEKKPNAATQSIGIDLGLKECAVTSDGQRLVGRHYRKLESKLGIAQRANKKLEVKNLHAKIKNRRKDGLHKFSTMLTQEYGAIFVGNVSSSKLIKTKMAKSTLDAGWSSLKTMLEYKSDHAGVVYEVIDEAFTTQTCSCCGSIAVSSPKGRAGLGIREWTCSDCGSVNDRDLNAARNILARGHSRLAVGILRL

SEQ ID NO: 9970 - protein, 434 aa, Ktedonobacteraceae sp.
MRLTGMGTLFQNIKAQASTHEGRDKDMLIYEYKLDGKKPQYQAIEEAIRIVQFIRNKCLRKWMDGHGVSKNDLQCYCAVLAQEYSFAARLNSQARQTSADRAWTSISRFYKNCREKKPGKKGYPRFQHDNRSVEYKQTGWKIEPDGKHITFTDGCGIGTLRLVGNKKQEVETFPVKQIKRVRIVRRADGYYCQFGVQSVRKVEHTATGKAVGIDLGLKVYYTDSDGNTIENPRHYRKAEKRLKRLHRQLSRKQKGSANRRRARKQLAKASLSVQRQREDFARKQASALVSSHDFIAYEDLKIRNMVRNRHLSKSISDASWGKFLQWVRYYGTMHEIPVIAVPPQFTSQDCSGCGTRVKKSLSVRTHICPTCGLVLDRDENAAVNILHAGLLILLLMAFAGTVGHTGTSSEEENASGQPAATRPSRKGKTGKRAG

SEQ ID NO: 9971 - protein, 500 aa, Thiothrix sp.
MKVESNTSEQPVGNDATTSMLTLAVLPKFSKTSVVDSTISVKGLNPYWDDACAERSSQLWLPNKTDLPVSDLSLLSGLSANSVQNSWFSVRVKENSNKNLPKIYSPSFMLSLADSFGCAQDKSTDLEMTRVRKIKMLPTRQQERSLNVWMGIYRFIYNETVWILNGRYVAPVWMAIKKWLIPELVYLYPWTESLPRAMRDGAVQEAVQAVLNAIAKFKRIGDIQRVSYKSRKDTRQSFFLRNDKWSKDRRGFSVRELGALRLTESLPDSLRDGRVIKDGIYWYVALPETKKRDLAENQGRLCALDPGVRTFQTFFSDYHCGHLGEQDVQRITRLAFALDELTSRRDKAINKRQQSALTKAMTRLRNLISNLIDELHWKTVRFLTDNFDVILLPTFETSNMVIKACRKIKSKTVRGMLTLKHYTFSQRLEQKCFERGKVLVRVCEAYTSKTASWTGEVIRNLGGRKTIKSGGFVVDRDENGARGIFLRALVDSPILIEGAC

SEQ ID NO: 9972 - protein, 397 aa, Geitlerinema sp.
MIVLEFKLKGKLNQYHAIDEAIQTAQFVRNKCLRYWMDNQGISRAELYRYNTQLRSEFPFVEALNSHACQASVERCWSAISRFYDNCKKQIPGKKGYPKFKKHSRSVEYKTSGWKLSEDRKRITFTDGKQIGKLKLIGSRDLNFYQSDRIKRVRLVRRADGYYCQFCLQVEVTVKSAPTQKAVGIDLGLKYFIADSQGLTEPAPQFYRTAEKQLNRANRKKSKKYRKGVKPQSRNYHKARVRYARKHLRVSRQREEYCKRLAYSVIQSNDLVAYEDLNVKGLVRNPHLAKSISDAGWSTFRRWLEYFGRKYGKATVAVPPHYTSQNCSNCGKVVKKALSVRTHVCPHCGYVADRDVNAARNILQRGLTTVGHTGSSYAWGDLPSSSVGENLLGYGES

SEQ ID NO: 9973 - protein, 282 aa, Gloeocapsa sp.
MFVVESKARTPKPYQILAINEAIRTLQFVRNKTLRYWINNKDNGKAALFRYSTALRKEFDFVEHLNSTACQVAVERVLIAVNKFFDNCKNKVKGKKGYPKFQKNNRSVEYKQSGWKLSEDRKRITFTDKKGIGTLKLICSPDLNYYQPEQIKRVRIVKRSDGYYIQFCLKLDPRDTVKQLEPTKKTIGLDVGLKYFYADSNGDIVENPRFSRQAEKQLNRLNRKKSKKLRKGKLQSQNYLKARKRYARKHLNISRQREEFAVRFVPVERGYNLIKQGKVNQY

SEQ ID NO: 9974 - protein, 360 aa, unknown
  TnpB Polypeptide
MWLRYKDVFNLVKNGDDYKNLGSNLGQQTLRALDKAWVSFIFSINDWKKNPQKYLGRPKLPKYKNKERGRYLLGVDNIKFSITDGYIRFSYKPFHCMNNIFRTKIPQTAKLMQCRFIPHANYYTMEIVYQIEVPNTITESEHIAAIDLGVDNFATITNNIGLTPIAVKGGVIKSINQYYNKKKAKMQSELMVLNKKHNSKRLAKLVNKRNNKVKDWMNKASKFIIDYCVMYEIDTLVCGYNVGWKQDSDMSKKTNQNFVGIPFDMFVNQLAYKCQNNGIRFITTDESYTSGTSFLDYEEPIKANYNKSRRIHRGMFKSNTGTLINADVNGSYQIMKKVFPNAFADGIEGVGLHPLSMRIA

SEQ ID NO: 9975 - protein, 405 aa, unknown
  TnpB Polypeptide
MRAIKRTFKYKLNPTAKQEVCLYKFLGACRQLYNVCLEHRILAYRTDRSTVSDFEQMKQLIELKEEFQFFKEVHSQVLQDVVRRLGKSFKNFFRRVKRGEAHGFPRFKGRYRYKSFTFPQSGFEIDDSILKMSKIGNVKIVLHREIPENAIIKCLTMKCDDCGDWFACFSTEELIDINKKEIVKVVGVDVGIEKLATLSTGEFFENKKYIKDSEKKLKRLHRRLSRKKRGSSNRKKARLELVKGYRKLKRQRDDYLHKVSCRLVNNFDLMAFEDLRIKNMVINKYLSKHIYDSSWGKLIDYTIYKAEEAGKKVVLVDPRNTSQLCSGCGKMVNKSLSQRLHICPYCSLSVDRDLNASFNILDRGFEKIGLGQAELTPMENGVHLSREGLGQPFGEVGSSLKMCSI

SEQ ID NO: 9976 - protein, 358 aa, Pelistega sp.
VLQQSLKDLESAFKNFFQQCADFPKFKKKGLKESFRFPQGCKLEQQNNRLYLPKIGWVRYRNSRDVVGEIKNVTVSQKCGRFFVSIQTEFEYKIPTHKGGEIGIDMGIIRFATLSSGEFFEPLNAFKTYKGKLAKLQRQLKNKVKFSRNWQKLKAKIANLHHKIANCRKDFLHQTSSKISKNHAMIYVEDLQVSTMSTSAKGDAEQPGKNVKQKSGLNRAILDQSWFEFRRQLDYKTQWQGGFLVAVPPQNTSRTCPCCGHIAKENRQTQASFECVECGYTENVDVVGALNVLERGRAIVHASTIRAGHVRRACEVNFIGGQQQEPTESSSLLAMGASRNPRPLVRGGCQPISRLLLV

SEQ ID NO: 9977 - protein, 435 aa, Fictibacillus sp.
MFVTHSFRIPYDPLIYKQLRTMQREAASVWNDIVREATSYFFTYKKWLNKFDIQAVRKGSYNLHSQTVQAIVDKYDANRQTTRKLRKTDKKIKYPWKEKDYYCIPLKQASMDISDETIGIKRANYSLSLVDIVTKKKKKNWNEKFPKRNEQVIIPNLAKEPLTDCKYAEIVWKNGSYWFHYSVKVQEKDLSSLPLCPAGADSGEIHAVTVATENKALVVSGRAPRSISQFRAKVLADLQKKMSRCKKGSRQWKKYNTAKKRICQKSNNQLEDLEHKTTKEVILFLEKENVTNLDIGRVAGIEKNTKKDQKKKSKTTKIRRQQLSLWNQGKIKQKLTYKAQLKGIKVEETEESYTSQTCPFCHGRHKINGRPFKSSVRQTEIHRDVNGAQNIARKKYPMEVSHLLGVIFKQPVWYKRYVNENPCFFNKTRSGSIRV

SEQ ID NO: 9978 - protein, 333 aa, Streptomyces sp.
VIVMQLRYAFRLYPDAAQQAALARAFGCARVVFNDAVRAREVAREAGQPFPTAGQLSTSLITEAKRTPERSWLGEVSAVVLQQSLRDAETAYRNFFASFVIDSDPAADATRMPETDRTLGIDLGLTHFAVLSDGTKIDSPRFLRRAEKKLKKAQQELSRKRKGSKNRAKARLKVARAHAKVADARREFHHQLSTKLISGNQGIAVEDLSVAGLARTKPAKSVLDAGWASFISMLAYKAERYGRTLVKIGRFEPTSQTCSTCGVKDGPKPLDVREWTCTACGTVHDRDTTAAINVKTAAGLAVSACGAPVRPGAIPAQREETGSHGLPTGPRAG

SEQ ID NO: 9979 - protein, 355 aa, unknown
  TnpB Polypeptide
LKTYRFRIYPSKKQEMQMKEHLWIEKNLWNMLLEANQKKYSEEKKFLTRNEMQKLVKNTGLFSQVAQTLSHRLQKALWHMVKLRKQGKECGYPRFKNIDRMKSLNYPQAGFRLDKKLKVTPFGEISIKKHREIDGKVKTLTLKRESSGKWFATFCVEQESQAPRINNGEKVGIDLGLMKFAVLSNGKVIKNPRHLKQHEEKLAQLQRLLSNKKRGSKNRKKAKLKIARLHEKVSNTRADFLHKTSTGLVNDHSLIALEKLATQEMSEQNFGKSINDAGWNMFANMLRYKAEEAGCNVVFVDPKNTTKMCSDCGTLVDKELCERIHNCPECSLSIDRDLNAAKNILIKSYAGTLRK

SEQ ID NO: 9980 - protein, 419 aa, Helicobacter sp.
MSAISITHKIALKPNNKHTTYFKKAFGCARFAYNWGLAKWKENYQLGIKTNHLQLKKEFNALKKSQFNFVYEVTKYATQQPFIHLNLAFNKFFRDLKKGLVSYPKFKKKREFQGSFYIGGDQIKIIQTANTDYLKIPNLPPIKLTEKLRFQGKINNATITQKGDHFYVSISCGVDESEYKRTHKLQESHNKLGIDIGINSFVSLSNGLNIYAPKPLDKLTRKLVRISRQLSKKIHPKTKGDKTKKSNNYLKHSKKLTHLHEKIANIRLDFLHKLTSSLIRHSNSFCLESLKVKNMFKNHRLAKSLSDVSMSVFNTLLGYKAKYSNKEILRADTYYPSSKTCSNCQKVKQDLKLKDRIYQCLECGFELDRDINAAINLLKHLVGRVTAEFTPMDLTALLNDLSKNRLATSKVELGMQQKS

SEQ ID NO: 9981 - protein, 399 aa, unknown
  TnpB Polypeptide
MRLTFKYPVYPTKTQETTLLAWFDHLCELQNSARNNRKFAHEEEDRFVSRYDQEHLLKVAREKYDDFRSVPQDFQVSILKRVDKAFDAFRRRCKAGAEKKGYPRFKTRVRSLTWCLRKHTLRTGERVRQNPIIETEFRHNRLKVPKLGDVKIRMHRPLQGDPKEVTIVKKASGWYAHIVCELPDTPKVEPTAAVAVDVGTTHYLTTSEGETEDNPRWYRQAEGLTRKHSKDLSRKKKGSQRWQKQQHKLALHHERTVNRRKDFIGKLVYKLYHHQKNNVLVAENLNTSNMVKNKHLSKSISDASWTTFFEWCVSIAERDGLHFHQVDPKNTSQTCSVCGEKSQKKLSLAIRTFDCQFCGTSLDRDHNAALNILFRAACARRGERWVTNLYETRNLSVDR

SEQ ID NO: 9982 - protein, 412 aa, unknown
  TnpB Polypeptide
MRSQKIRLKLTKEQESLAWWYSKVSRNFWNLLVDIDKRNNNGEFDEILNKNGKNTYFSKFHNREVYKLNQSDYLNLAKMVVAKNSEEDGEKWSWYYQPNQSFIYVFLSRELVKIRRLNKGKLNFRNIDKIQPNFNVTCCVSSDKKRPSRIYLKDNGKLQIPTIGDVEFGSVRKGFDLSCKKQVANISFDGKYWYLSYTENIKTSVENLPDYTDGIGIDLGIKTLATVSDGTSVPNIKTFRRVRILNKRLKRLQRKVSRKYLINKCNKYNKTKNIIKLERQIKLIHRSLRNIRINHIRKFVSELVKKQPQYIAIEDLNVKGMTRNKYLAKDIVNCSFYTIREHLIRKATERFIAVRLVDKFYPSSKTCSNCGSYKKNLKLSQRVYHCNSCQVKIDRDFNASLNIAKTDKYELA

SEQ ID NO: 9983 - protein, 410 aa, Escherichia sp.
MMMLILKAYKFRLEPTHEQSQRLRQLCGCARFVWNLGLAETKRLLGSGEKLPSAFELNRMITVWKKMPEYIFLQDAYTDNLQQKLKDLHTAWKRCFDKKIAAKAPVWKRKNEGRDSIRFVNFEKYCCLENRRVKLPSGLGWVKFRQSQRVNGKIKNATINQLAGQWYISFQVEIETAEPNHTSTTIVGLDAGVAKLATLSDGTVFKPVNSFQKNQKKLARLQRQLSRKVKFSNNWQKQKRKIQRLHSRIANIRRDYLHKVTTTVSKNHAMIVIEDLKVSNMSKSAAGTVSQPGRNVRAKSGLNRSILDQGWYEMRRQLEYKQLWRGGQVLAVPPAYTSQRCACCGHTTKENRLTQSKFVCRACGYTANADVNGARNILAAGHAVLACGGTVQSDRPLKQEPDAEQSAVTH

SEQ ID NO: 9984 - protein, 391 aa, unknown
  TnpB Polypeptide
MLKGLKYRLYPNNSQKELIAKHIGSSRFLYNLALETKKTAYTSTKHNYSSFDLAKQLPELKKELPWLKEVNSQSLQQAIQNMDIAFKKFFKGAGFPKFKSKNKGKQSFSIPQNVIVENGKLFIPKFNKGINIVLHREIKGTIKSATVSRTPTGKYFVSILCDTKEELPTKAPITENTTIGIDLGIKDFAITSDGEVFKNPKYLRKAQSKLKYVQRKYSKHKGKRTKKKLSKLHEDVANKRRDFLHKVSTKIIRENQTIALETLAVKNMVKNHKLAQAIQDVSWSTFVSMLEYKADWYGKNILRIGQFEPSSKTCSNCGNINKELQLKDRKWTCSGCYKTLDRDVNAAINIKSFALKNNLSEEHRLKNQDELPRLLGVLTPEAQPISSAVGG

SEQ ID NO: 9985 - protein, 234 aa, unknown
  TnpB Polypeptide
LEKFFDKSQPDWDKPKFKSKKAPRQGLKTDRAKIINGKLRLDKPMNISKDNWFDLASYEALKMNQVKVISIFKENETYYAALSYEEKVTAKTKTHQKTAVDVNVGHFNYTKGQINVLPAKLQKLYKRIKHYQRMLARKREINGKLAIKSNNYLAVRIKLQRDYRKIANIQNDLLQKFTTKLVNNYDQIVIEDLAIKKMMMTHVASKGMQRSLFSRFRQILTYKCEWYSKKINLS

SEQ ID NO: 9986 - protein, 443 aa, Lachnospiraceae sp.
MILTEEHRISRSRHKELFRKMDRYCYLAKNLSNSVNYLLKQCYRIHRKLKEGEVLESWEKGMIYRANCAIRRYNLARPGKEPLRYIDRDSSLTADAYFLSWYMKTWEVYRAMPYATCSQICIQERCREWKAFFRGLQGYRKDPRRFYGRPKAPGYLDPVRGRGRIVITSQNFSIDDKGHVRMPGFLSDLHIKARHRDVRQIRIQTGPGGIRVQLMYERKEAAPADRPHAMGIDIGVDNLMAVSFSSGREPVLINGRPLKSINQFYNKRRASLQGTAVKSNRRRRTSAMERLAQRRGRKIRDYMHKASRKVIDLAVREKAGTIVIGRNDGWKQRSSMGKRTNQNFVSIPYHILIEMIQYKAALEGITVKLTSESYTSGTSYLDGEYPDKEHYKKSRRIKRGLFRSNAGICINADVNAAYQIMKAGGVRDLPIKAGEQVRRINAA

SEQ ID NO: 9987 - protein, 484 aa, Moraxella sp.
MTTVMRGYNFVASDYLDEGAVNKITALILSLSKEIQCILSDKELVNKLLQTRIRSGGHFRNDFLKIRPQPTWTNVYGNKAKYYRIIIEQVRRNLLSLKQRQQIAEICAKYNYEFSQDLRDALCDHNLYPTNATVKNICKAKAMPVQEVELAQLDYTTEDKQISVVGFENGVIHSKFQVNGEWLSMDVGMPSHVAFIPEGVTRPCFYLKDDTLLVRFTVKKTIPLVETGICIGVDLGLVKPFSGAVRFADASHSNELYCSNEANRVNQKIQRLQVHKDALFQKKSHIAKLLVNNNCEKLLDKYQTLDEQYTAVRHKISNQKAHLARLVGRDVLAHAVHNNTDVVKLEQLSWIRDKEHTTWNFAKTQQAIEEKAELCGVSVVKVSAKNTSRTDPFTKQGIKANSKRQQKSSIGTQDRDYLASLEIATRQKKKPSLPLSSILRCVKSKPPIRELPSRYCATVAAMQVVTFNEVQRDFQSNAKYHELQ

SEQ ID NO: 9988 - protein, 486 aa, unknown
  TnpB Polypeptide
MASVRPRTERRQHCQQLRNRPMPRSYVPPEGHIIQAFTFALDPTREQAAQIARFFGARRFAFNWTLAQITADLVRYRETGESGIPPSFYGLRKRWNAEKDTVCVNADTGDVWWSEISKEVFADGVRGATDAYWRWQRSRSGKIVGRRVGFPRFKKRGQDRDRLSFTTGPMRLEPDRRHLTLPVLGTLRTHENTRRLERLIALKRAKVLGVTVSRRGDRNVAAVRVCVTRRQVSVAPPDSVVGVDVGVRRLATVATTNEVIGELANPQALERRLSELRRFQRQRGRRTRGSRRYRETAAKIRRLHSEVANQRQHTIHVFTTTLAKTHGVIVVEALDVASLLQQKGQPGARSRRRSLSDAALGEIRRQFRYKCSWYGSTLIEADRFFPSSKTCHGCGHVQQIGRSEHWTCDECSSSHQRDDNAAINLARWASLGSVGAPVKRGAGHQTESHSAAGDDTRKGGPESSDPNNSVRGQTSGLTKVRSVATA

SEQ ID NO: 9989 - protein, 401 aa, unknown
  TnpB Polypeptide
MYHKAYKYRLMPNKLQEELLQKHFGSCRFVYNHFLDVKIKHYKETKKTITWIGLANQLPKLKEEYDWLSEIGSQSLQQSILNLDRAYTAFFRSGAGFPKFKSRKYSRKSFIVPITNGNIKLNYKTKRLVIPKFREGIKCIFDREADGILKQAIVSQNRDGKYHVSILVEVNKDFPTKPEPKKDKAIGIDFGVKMFLTLNDGTKIENPKVLKQSADKLAKHQQDLEFLTKGSTSQISKQEQVTKLHSKITRQRKDFLDKLSYKLTRDNQVDSVCIEDLSIKNMQADNERPTNRIISDYAWSKFVGMLQYKSDWYGKNFRKIGRFDPSSKMCNECGHINHNLRRDDYEWNCSSCNTHHDRDVNAARNILDFSFPKMEYKMGRNYPIETHTLISGGNPLALAGG

SEQ ID NO: 9990 - protein, 409 aa, Richelia sp.
VRTAYQYKLRPTKQQVTEFDRWLSMLCAQYNYLLADRFNWYEQNRCAIDACSFVCHLPELRDCPDYFSQKKTLPQLKKTHPWYRDIYSQVLQDLVKRVKITFDRFLRGSRNGKRSGRPRFKSRSSYKTFTYPQMKDGCLQGNLINLPMLGKVKVILHRPLPDGFKVKTASVTKKADGYYLTLSLEDATVPTIGPDFNPDSIVGIDVGLKEFLTTSEGETVAIPQHYRKAQKRLRVIQKRVSRRKSGSKRRLKAVKQLGRQHKKVADKRRDFHFKTANNLLKQYDIIAVEDLNVKGLGRTRLAKSVLDAGWSSFLSILTNKAENAGLLVIPVKASGTSQDCSNCGVKVPKKLHERWHDCPNCGCSLDRDLNAAINIKNRAVGHSVLKAQLTSEAVAGVTEKPTLYCNQSV

SEQ ID NO: 9991 - protein, 432 aa, unknown
  TnpB Polypeptide
MVVLAHKIRIYPTNEDIVNFKKYIGYKRYLYNKAIVVQKELYLKYKEEKAKYKDFDLLDDKEKKIFYNKYYPHMNLVRKKMVRTKEKWEYNYASKMIAAAASDVTGAVRNALNPKMSNHKMPKFKKKKNQKMSFSLDGIKINDNNELIIPKATKSTLYGVTPESPIKFSKIKLGEKLRFQGKITGATISCNINGKWFVSLSVKLDEKGEKKHSSKFDRNRTNKPECGIDANIRGFHYNELDGSYADWKTTSEELMKQYRLIKYYSRVLSKKRLSNKDWKKSKTYAKMRTKLSKSYARAYNLQEENLNKFIQYLNNNYSSVTIEDLDVNSMKMNRRMCKSLHRAMFGRFKQKIEAKFNQTNIEFIKADRFYPSTQRCSNCGMVKTGEDKLGLSGDKHGNKHNEYKCFHCNIELDRDDNAVENLIQYKKYYAKL

SEQ ID NO: 9992 - protein, 421 aa, unknown
  TnpB Polypeptide
MSKKSLPTTYIRCSKITTKFANQSKLDMVSTFLEEYKRLTQWFVDILWLMDSETLKKFLGPDITSIPQTWLSERMRQAAVKQAKGIVVGTRKKEKERIKKIEKLNEEGKFKQARKLQAKHDKIKVSKPVIKNINAELDERFIKVDLSPDNSFDGWVTITSIGRKMKIQIPFKRTAHFNEMFSQGRLKNGVRLGLKSMDFNFEFETPLKPEGEVIGIDIGKTNLFSLSNGVQIVKDNHGHTMESIMDKLARKKRGSKGYKRAAKHRDNFTAWSLNQINWNGVKEVRKENIKHIFRGKKTARSLSNWNYRVILDKVSERCQKEGVLSVDVNPAYTSQRCSACGWVQKSNRLSQSKFCCKQCSYTANADMNAAINISLPLSPIGYNVKSKRPNLQGFYWDRVSLGQEPIVPDNSQNNALELHGL

SEQ ID NO: 9993 - protein, 395 aa, Gammaproteobacteria sp.
MMLRAHKIELRINNKQATYFAKASGAARKAYNWALDEWQKQYQAGGHPTEAALRRQLNSIKRTEFPWMLEVTKNAPQMAIMQLGDAFKNFFAKRAKYPTFRKKWRDDRFTLTNDQFAVNESRIRIPHLGWVRMRESLRYTGKIVSATISRCAHKWFVSITVEMKKTATSIANENQVAVGVDLGLHHFATLSTGETITGPKPQKALMSRLRRLSRRLSRKLKGSNNRNKAKLKLARLHYRIGNIRCDAQHKITTRLVNDFNTIGIEDLHVKGMMRNRKLSRSIADMGFHEFRRQLEYKAPSAGVKLVVANRWYASSKTCSHCGEKIKSLSLSEREWTCGICFTRHDRDINAAKNLEHLAVSSTVSACGASSDGAITSVIASHGALKQESNVIAIYG

SEQ ID NO: 9994 - protein, 393 aa, unknown
  TnpB Polypeptide
  misc_feature (269)..(280): Xaa can be any naturally occurring amino acid
MTEEQRLAKNASIKEAMKATHEKRKSQVCRVYMLKLQRNKLSARQKEDLKMLFVEAKWLYNDILNYGSVKGQSIFDYELGNVVEVKLPDGSFNGRNLDHIGSQMKQSVYTDLKSSIKALSKLKKKGFKVGRLKFKSEIGAVSLKQYGTTYKFHTDHLVKIQNINGLVRVTGLDQIKDNVEFANAKLLNRPDGYYLAVTTYTERKPYSSRPRADVGIDMGCHTSFTLSTGEEVDVKVKEPEHLKPQQRKLARQKKGSNSRRRTIHKIQKXXXXXXXXXXXXHGKAVQHSCLGRVKTKLKAQDNAYVVNRWEPTTQKCINCGKMHPMPQNERTFRCDCGLCMPRDLHSANRMVQEGRKLVPPEQREFMSADWQTSILPYLGQGKSAGLKPEAHAL

SEQ ID NO: 9995 - protein, 358 aa, Enterococcus sp.
MPQAMTVKIKLNPTKTQIKLIQTSSLTYIEVVNLLVSEMVIAEKVTKKTSKDVPAPLNSAVKNQAIRDAKSVFQKVKKSHFKKILVLKKPVIIWNNQNFTICPSSIKMPFVIDGKSKKVEIFADIPKYELSLLKKANKIGTLRVTKKRNHYIAQIGIEISEKVNTSTKIMGVDLGIKIPAVCCTAENEVKFSGNGRMNKYVRRYHNSRRKELGNAKKLNAIKKSKDKEQRWMKDQDHKISREIVDFASKHNVGIIRLEKLANIRKQTRKSRKNNHSLSNWSFYCLASFIEYKANLVGIKVEYVNPAYTSQRCPNCGHQHHAKDRRYYCSDCGYIGHRDIVGAKNIIYAPILDGKNQVA

SEQ ID NO: 9996 - protein, 304 aa, unknown
  TnpB Polypeptide
LKEVDSLALANEQLHLEQAYRKFFKESKIGFPKFKSKHGSRKSYTTNVVNGNIRIAEGKLRLPKVGTVKIRLHRELPAGWTLKSVTVSMDPSGKYYASLLFAFESCENQAGTVREEKVLGIDYAMHGMAVLSTGEKCENPGYYRQAQKRLTREQRKLSHCRKGSRNYQKQKRKVARCHEKVRNQRKDYHHKLSFRLAEEYDAVAVEDLDLKAMSRGLNFGKSVMDNGYGKFLHMLSYKLEQRGKVLVKIDRFYPSSKKCSKCGKVKETLALSERTYHCSCGNHMDRDVNAAINIREEGKRLLCA

SEQ ID NO: 9997 - protein, 383 aa, unknown
  TnpB Polypeptide
MTKQIRKAYRVRLYPNDEQQIFLAKSFGCTRFIWNKMLADKISHYQETNTELKNTPAQYKKEFEWLKEVDSLALANVQQNLMAAYSKFFKGAGFPKFKKKGQRDSYITNNQKGTVAITDSTVKLPKIGHISAKFPDKINGLIKSATVSKSPSGKYYVTLLVETIVSELPKTGLRIGIDLGLTDFIVLSDGCSVANPKFLSRLQGKLTREQKILARRREVAQAQQRKLSDSRNYQKQKVKVAKVYEKITNSRKDFLHKLSYKIIKNHDVIAIENLNVKGMVKNKKLSKAISDSSWSPFTTMLAYKAEWYGKTLVKIDRWYPSSKTCSGCGHLLTKAELPLSVRSWDCPSCLQKNNRDINASINILNQGLMLVEQSKTVGAAGLA

SEQ ID NO: 9998 - protein, 512 aa, Hyellaceae sp.
MPTYITLLPESIYSFLDTTSELYSAVEKDMHVALMRGEKISAIEKSLQSKYQIDSTTTRNVDHDLKGKHKGITKLRNSQAKNLKSTIRGIQSAIQKRLKKKVVTRKDRFVVHQKRRRLAIKQQKLDKLLNGRLSLCFGTKKLFHTQFNLKENGYSSHDEWLVDWRAARQSNFMMVGAKTYASGNQLCRLTSDGELKITVPICLVKEFSSHVSCDGVKFRYGQTFIDIALTPTRHKRGSNYRNGTERAVTHRFVKRSGRWYLHTTVELPDIPWVSHKQNGAIGVDLNVDSVAWTHCDQEGNLVSHGQVAIDLKDKSSGQTTHLLSQAIGQVVDIAVEKQCPIVIEKLDFSSKKNTLREHGKRYAKMLSQFAYAKFADLVQSKGRLKAIQVISVNPAYSSLIGMIKYMSLYGLNSGTAASLVLARRSFRLSERMPRVLYALLSPVDDNKHIWSYWARISKLVKGCRRHSYFKMKVRVGVKLNNQSSEMKSKLSGKSKDTPLIPSTASALGCMSD

SEQ ID NO: 9999 - protein, 400 aa, Thermoactinospora sp.
LIGMSRYRLQPTPAQEQALLEHCGHARFVWNLAVEQHQHWKPGRKSAPGFAEQCRQLTEARAEFDWLRAGSIIVQQQALKDFAQAMANFFNGTHRRPTWRKAGRGEGFRIVAVKPADVRRLSRNVGEVKVPKVGWVRFRWSRAVPEGVKSYRITRDRAGRWHVAFAAAPAPIGAPGTGESVGVDRGVAVSAALSTGELLSVPGLRETEAVRLARLQRKLARAQRGSNRRAKVKAAIAKLKAREADRRKDWIEKTSTRLASQFDVIAVEDLNIPAMTRSAKGTMDAPGRSVRAKAGLNRGILAAGWGRLVERLEHKAPGRIVKINPRFTSQRCSACGTVDRQARESQMRFRCRSCGYAGNADVNAARNIRMAAAGHAVDARGGDRVAGPVNREPQPVLLPA

SEQ ID NO: 10000 - protein, 389 aa, Thermoactinospora sp.
MAYGPHACSISDKLHSVKFVVQVRLFPTPAQEAALADTLRLCNEAANLVSRTAWDTKTFRNYDLRVHTYGELKNMGLSAQPAQHVIKKVADAYTTVRAQVKANLRKPLTKPIGFRKDAAQPFDDRCLSWQVEARTVSIWTTGGRMKGIRFGCSEEQARALAAYRKGESDLVHRDGRWLLIATCDVPDTDVTEPDTFLGVDFGIANIATTSDGVKHAGKALNAVRHRNRELRRRLQAKQTKSAKRLLKRRRRKESRFARDVNHVISKSIVTEAERTGRGIALEDLQGIRDRVRLRKPQRVTLHSWSFHQLGSFIAYKAVRAGVALVYVDPAYTSQGCSACGHIDRKNRPDQETFACTSCGFAEHADVNAARNIAMRGVAGWAAVMQPDAA

SEQ ID NO: 10001 - protein, 207 aa, Paraburkholderia sp.
MDTVGRFHVSILCDDVVSPKKKVKSQVGISVGLTHFALLLTVEKIDAPDTFRKNESKLAMAQRRLAKKQIGFANRRKARLKVAKLHARVAGTRRDLLTKLSILLINGNQVITIESLVISNMQKHRALVKSISDANWSEFVRQPTYKAERYGRTLIGINSWYPSSKRCGDRGQTVARMPLSVRGRYLTFLMAFHCEHFEKPEDFSNPV

SEQ ID NO: 10002 - protein, 396 aa, Ferrimicrobium sp.
MIANPVSKGGIERPRLHPKVKSVRPSTNTISMSIRERLYPREQELPVLARHCSDARSVWNIALEQRNSWRRERSQKITYHTQAHELAEARKETWLKEGSAAVQQQALRDLNQAFQNWWKRPDHFGRPTWRKAGVNEGFAVRDLSVRRINRKWGQVFVPKCGWVKFRVTREWSDIETASSARVTSDRSGRWFVSFTRLAPQMERQSTGSVVGIDMGIAITVATSEGKSLKAPKLLTKGQRQRRRRLQRKLARQVKGSNRYKATKLAIAKLAAKEVDRRKDWIEKTTTDLVRDYDLISLEALKIKNMTKSAKGTKDKPGKNVKAKSGLNRSILEQGWGLFRQRLTDKAINAITPVEIIAINPAYTSLRCSKCGHTEQKNRKNQASSVAKRVATPITQT

SEQ ID NO: 10003 - protein, 401 aa, Ferrimicrobium sp.
VSACTQENRNYLFLRVTRYVWNIALEQRNLRRRERLQKITYNTQAHELSEARKESWLKEGSAAVQQQALRDLNQAFQNWCNRPDHFGRPTWHKAGINEGFAVRDLSVRRINRKWGQVFVPKCGWVKFRVTREWSDIETASSARVTLDRSGRWFVSFTRLAPQMERKSTGAIVGIDMGVTHTVATSNGEFLDMPELLTKGEHQRKRRLQRRLARQVKGSNRYKATKLAIAKLAAKEVDRRKDWIEWTTTDLVRDYDLISLETLKIKNMTKSAKGTKDKPGKNVKAKSGLNRSILEQGWGLFCQRLTDKATNAVTPVEIIAINPAYTSLHCSECGYTDKKNRDSQARFHCLSRGYTDNADVNAAKNIIAAGLVVQERGGQSHIVSTKTQHSDPAKRTTTPKAA

SEQ ID NO: 10004 - protein, 438 aa, unknown
  TnpB Polypeptide
MHYAYRFRLKPTAEQRELLDYHRDTCRQLCNHALGEFNEIPESAGTLNQRVRQVRDQLTDLKDWWDELNDLYSTVAQAAVMRIEDSIKALSELKEKGYNVGSLNWKAPSDFRSFTYVQSGFEFDKKNSQTVLSLSKLADIPIECHRDIPDEETVKEITLKKEPTGEWYASFAVDDKEEPAKPSVAEIDAGEMVGIDVGILKYAHDTDGTAVGSLDLADERDRLEQEQRNLSRKEHGSNNWEKQRQTVAECHQQIKRKRRDFLHKLSNYYAREYELVAVEDLDVRGMLESPGNSRNTASAAWDTFTDLLEYKSKREGTHFVEVDPDGTTKECAQCGVETDKPLWVRDHSCPACGFEADRDANAAWNVLSRGLTDLGVGHSEETSSESQSDSDVRTRALLSLTPVETALPVGTAVVSAKRVVEAGSPCLKEPPKAASRQG

SEQ ID NO: 10005 - protein, 158 aa, unknown
  TnpB Polypeptide
MIIKNTGNKVDNAFIIFLLVFQEYCKKEDIRCVVVGDIRNIRKEKDMGHKTNQKFHGLPYNKLYIMLEYKLKLYGIQLIKQEESYTSQCSPFSPEVSKRHAEASNRKERGMYITDGVRFNADAVGAFNILRKYLSVSGKQKELSVTGLKTPEIIKVAA

SEQ ID NO: 10006 - protein, 424 aa, unknown
  TnpB Polypeptide
MLIHKSLKVRIYPNQIQQTQINKTLGCCRAIYNMMLYERKEVYELLKNTKRKLYEYKYKTELQYKSEFEWMKEADSQALQQSRINLQNAYSNFFKSLKGKRKVVCGFPKFKKKKNGSNYKTTMTNEKSIEVNFSNRKIKLPRLGWVKFRDSRNIFDGKIKSATVSRTSTGKYFVSVLYEQEFESKGLVLNSNTKIKGLDMNLNSFYVDELGNSPEYERIYRKYESKLKHYQRQMSRKKLGSTNWKKASLKVNIVHKKISNCRSDFTHKLSSKLVTENDVIVVENLSLQGMSQALKLGKSIMDLGYSEFVKQLQYKSLWNNKLLIEADKWFASSKTCSFCGYKKSDLKLSDREWICPNCNTHHFRDMNAGQNLVNYGLNILDLVGKEIPEFKLVEKISSVQNVNFDQEISVKQEYRKINLGQLSI

SEQ ID NO: 10007 - protein, 409 aa, unknown
  TnpB Polypeptide
MKIIRSSKCSLKFATNKKQEELQTVLKEYGKVVNCFIDIFWDNPVEKRELLKPVVDIPQTWFSARLRKVAAREAIDMVSSVKEVFNWNKQQIQSRIDVLENKIKNTKPDTKENRRNINYWYKKMKIKNMKLNMVQIHKPKHNGKHMNFSSNIANLQTSKTNRFDSWLHLASIGNKIILDLPIKQHKHFNRLNKEGKRLNSYIINKDSVQFCFEIETGSKKEVNRIIGVDTGINALASTSDNRQYGKDIKGCIERSKRCKPGSKGKQKAIRALKQRIDEVAKEVVQEVDLVVVEKLKGLNESSKLKGRLSQNMRSSIGSWNYSYWLMRVQQNCERNRVSFRTVASYNTSRTCPTCGHVDRMNRVGEIFRCQACDYTDNADLVAARNIKNRFITGKYGSCYKLLNDSILQV

SEQ ID NO: 10008 - protein, 488 aa, Caldivirga sp.
VPGVVPPRGGLGFLDEPVGRYPTVSTNPGTPYPPKSKGRGGKSRSEEMRTVRLRLLPNGAQERKLRKLADAAARLWNELNYARLVQFRASGRVDFKGTGHELYHKYKSVLGVNAGQVINLNNWMWNSFFKLSRLYKQGKLPKFMGKPSPPGFWRDKVLGRRLLRILVRNDRYYIEPVNGGEGYLVLKDWGLRIRYAGRVKWSGKQGMLVIKLEDNRWFAYVPIEVGGKPAKTNPRGYVKGVYDRVQVEKPKGSNKAFIDVGLNNLFAVVFSHTDTAILIKGSTIKSEYYWWKREIKTYQSIRDWLRNRGFNAWRKYHAFYLHAIYKRRERLRHYYRTAIRFLARTLWQMGINEVFIGYPYLVSQGNGNEYNTNVWWFNKIVNWLKDVLQEYGIKLNIVNEYGTSKQCSICSMKHENGRVKRGLYVCPVTSIKINADLNAARNIAKRVGYNTPMPRRILSYMVTTNGVKPLTPKEGETTKTPTVKTPPL

SEQ ID NO: 10009 - protein, 410 aa, Hydrogenimonas sp.
MLKAYKYCIYPTKSQIELIEKHFGCARFVYNYFLDFRQKEYAKGKKVGYSVTQAELTKLKKLDEYKWLNEVGSQSLQMALRSLDNAFTRFFKKKSDYPKYKSKKHFFQSFTAPQNIKIANNRVYLPKFTKDGIKLKYHREIPKNATLKQATISRHNNQYFVSILVDDNIPIPKPIKAKNAVGLDMGIENFIITSDGVLYPNQKHFIKSQKRLKRLQRRFSKKQKGSKNSQKAKLRVQKLHTKVSNQRRDYLHKISDEITNQYDIICVETLNVKGMIRNRHLSKSIADVAWSEFIRQLEYKTKWRGKTLLKIDKWFPSSQICSNCGANSGKKPLNIRKWTCKECGITHQRDINASINIRNYGLGQIDNRNTAGTVVIQACGVPSGGVTTSYGVVASYGSMKQEAQSSLAIG

SEQ ID NO: 10010 - protein, 268 aa, unknown
  TnpB Polypeptide
LAASRKKNKQKINWIRLCERERIPYGEDIKYINPRVSFDGVNWWISACIEYPDSTEIPINEGIGIDLGIEKLAVVSDGNIYKNINRTKEVKRLEKKKKRLQRKVSKKYEINKTKTKGGENRYKKTNNIIKLENQLKKLNQRLTNIHHNYLHQTTTEIIKRKPSFIVVEDLNITGMMKNKHLSKAIQKQRFYKFYRQIQYKSEWNNIKFIVADRFFPSSKTCSHCGSYNKDLKLSDRKYICECCGSVLDRDYNASLNLKNYGQEIEAWD

SEQ ID NO: 10011 - protein, 441 aa, unknown
  TnpB Polypeptide
MQVTSSYGVEIRKQNIPIRHTLRIYRSAVSYLIQVYTEAWGELSEISNAKKRFNEAEHLVHGTKKNQARYDFDLHFPKLPSYLRRSAIQHALGSVASYETRRELWKNGKLTGKPKLTQENHAMPVFYREVMYREAGETEDAAYLKLYDGHDWKWFRVRLLHTDMEYLRKHWAGKKASAPTLEKRHHKYFLRFSYTEEKNLSKTAVKAQTICSVDLGINTDAVCTIMRADGTVLGRKFIDFPSEKDRMYRTLGRIRRFQREHGSAQAGERWAYTRRLNIELSRKIAGAVAEYAWENHADVIVFEYLEMNGKISGSKRQKLQLWRKRDIQKRCEHQAHRKGMRISRICAWNTSRLAYDGSGMVLRDWRNHSLCAFQTGKRYNCDLSASYNIGARYFIRELLKPLPATERSLLEAKVPPVKRRTSCVYADLRKLHSEMELLKAA

SEQ ID NO: 10012 - protein, 347 aa, unknown
  TnpB Polypeptide
MAPIFRWGLTPVLVRAAGFLVAAKPNALPRAEPVVGIDLGLKHFAVLSDGRKIPSPRFLRRAEKKLRRAQRALSRTEKGSRNRDKATVKAARTHAQVADSSAAKQEPIRSHAGKQRARRESPPFKAEWKSKGDPAGHDRRAVGHLAVQPERGGRNRAHGEAAHLVDGDAGDVAGPRLELDRSLVGRHELAEQGVLVDLDLDAQVSGGEGQGADRRGLGPHAAGLVDQRVKGEPGQFRVDVMPGERVPARFGEFGRYFLLSAQRLLQHGQQLLIVPDVRHHTVLPSCRPRRCGPRRPAAWAARAARAGCPAHRAAGHSRRPARENGAAGPGSVPAAARCSRCAPTTWR

SEQ ID NO: 10013 - protein, 414 aa, Glycomyces sp.
MQIRNHMPAKAVPVIISYKADSRIFLMRLRYNYRAYPDGGQRRALAQAFGCARVVWNDCLSARRAAHEAGKTYVSSAVLSKTYITAAKQTPERAWLAEVSAVVLQQSLRDLDTAYKAFFDSVKGQRKGPKVAPPRYKSRKDTRQSIRLGTNAFAIRDNGRVYLAKIGEVKVAWSRQMPAAPSSVTVVKDAAGRYFLSFVVETGPEPLPETGEETGIDLGLTAFAVTSSGKKIDNPRFLRRSERKLKRLQRALSRKQQGSANRAKARAALARQHAKVADTRRDWHHQVSTQIIRDSQAVYVEDLAVNGLARTRLAKSIHDAGWSAFVNMLEYKAALYGRHFAKVDRWLPTSQTCSACGVKDGPKPLSVREWTCAACGAVHDRDINAARNILAAGQADRLNACGPLIRPGKPGAAG

SEQ ID NO: 10014 - protein, 460 aa, unknown
  TnpB Polypeptide
MRSFRFMCITLLPFYYIYILLVRQSHMLYNRSRKEANKMEHKKMADYAYHYGLKVRIYPSRQQKEMIRRNADAARCVYNEHVAVNKEIARFGRRSIYIDFIEKRIEALRERIRTVTALKDRYPWLRHPDIDAQSIANARQNYQHAWKQFRAVHHAGVPNFHKKTSVESYQTNPHYSKGTEISLFTSNARFLDKHHLMLPKLKRIRFQGSRKMLDRLFAMKEVRIGTITITKDSLHRYFASFQLGSDEPFVKASPKTKAEIGIDLNIENFYADSNGEIVANPRYYRRQKRRLANAQRKLSRRIVRAKKEHRPLREAKNVEKQRLLVARLTAQVMQRRKDFLHRTSATLIKNHDLVVAEELRSRNLLKNHALAMSIQDNGWRMFLSMLTYKAALYGKNFVTVDPRNTTQTCHACGHIMSGKEKLTLKDREWICPKCGIHHSRDVNAAKNILARAKAKFVSMH

SEQ ID NO: 10015 - protein, 349 aa, Fischerella sp.
LINNLSAYCKVLAANFEWAEKLNSMARQASADRAWAAISRFYSNCKKKIPGKKGFPKFKKRVHSVEYKTTGWKLSEDRKYLTLTDGFDIGRLKLVGTYDLHFYQIKDIKRVRLVKRADGYYAQFCIAVDREIKVEPTKRVIGLDVGLNHFYTDSDGNKVENPRFLRKSQKALKRLQRRVSRKFRTRTTQSNNYKKSRNKLARKHLKVSRQRKDFAVKLAKCVIQSNDVVAYENLQVRNMVKNHKLAKSISDASWYLFQCWLEYFGRVYAKITIAVPPQWTSQNCSKCGEIVTKTLSTRTHQCPHCGIVLDRDENAALNILTKGLSTAGHVGISAWGENDLWKESGNRFR

SEQ ID NO: 10016 - protein, 393 aa, Chloroflexi sp.
LKLLCVNLLEKVLMIRSYKYRLYPNRKQTEYLGEMFDLFRELYNAALQERRDAYQKCGITIRYTDQAKQLKEIRRDIPELANYSYSATQQVLRRLDKAFAAFFRRVKNGETPGYPRFKSRSRFKSVPFVFGDGAGIRNNRLHIKGIGQIKVKWHRPIPNDAKIKQVIVKCSNNKWYAVFQIELPDPELVEHPGPAVGIDLGLSSLIATSDGHTVEAPRHFRKTEAKLRRQQRRMSRRRIGSKRWRKAVRQVTKTHAKIANQRRDLAHKISKVLVSAYSLIVFEDLNINGMAKSRLSKSILDAGWNQLITFTLYKAEEAGSTIVMVDPYNTSQACSGCGSIVKKSLSVRVHHCPDCGLIIDRDVNAAINILHRALNPPGRGGQAPTWPVGAYVA

SEQ ID NO: 10017 - protein, 390 aa, unknown
  TnpB Polypeptide
MIKSSKHIIKYCNQGKQSFLDNLFVDYKLDLITYINYIIDGILPLKINLSSKDLPTEIIKHSKYKREIYKQASSIIRSQLDKANKKRYNKYKLMYSYMINNHPDSLFVKTKYSDLNLKSIIKTKYFTIPNLNNLSINLTDEFFNMQSGNHFDSFINLKLPYFNDKGTRALQINIPLNNHKHSNKLISEGYKLRSNIQIKKINNNYYITLIYYKENINKRTEGSSIGFDMGYNKLLCDNNGNKYNGNLNEIYNKISRKKQGSKSFKKSLSYRDNEINRICNELPLKNVKDLIIEDLKSVKTNKKYYNNKIQRWSYPKTINKLERICDEYGINMVKVSPSYTSQTCSACGHIDKDNRKGETFHCLVCGYEDDADINASINIHNRGIYSFSNQ

SEQ ID NO: 10018 - protein, 147 aa, unknown
  TnpB Polypeptide
MQKGSKNRNKQRIKVAKLHEKISNQRKDFLHKQARKISSAYDCVCIEDLDMKSMSQSLHFGKSVSDNGWGMFTVFLKYKLEEQGKRLIKVDKFFASSQICSCCGYKNPDTKDLAVREWDCPVCGTHHDRDVNAAINIRNEGMRLVTA

SEQ ID NO: 10019 - protein, 367 aa, unknown
  TnpB Polypeptide
MKRSLKFNLNLANVRKRIELDKLSQEYKRAVNYFLKRLFKKRGLSEEFLKSYQSPLSYRYKQCAKRQTFKMFKSWCRNKKKGEKPKLGKLGNLSLILDYRFIELQENKNSNSFDYWLKIASLNKGKPILIPIKSYNYAKPYFKSWQLLKGGRLLFREGQRFLELTFQKEAPIKKEKGKAIGIDIGIKKLMVTSENNAYGKDIENLMNKIQRKEQGSKAFKKALKERDYYINRIVKELCWNKLKAIIMENIKNIKQNTAKEKRLRKSFRTKFQRWTYAQLLNRIKLTAEATGVHLQLVNPAHTSQTCSQCGFVHKQNRIGEIFKCKCRNCGYTQDADYNASLNILNLGLAQQPMVAGNIKALNGIFVH

SEQ ID NO: 10020 - protein, 394 aa, Virgibacillus sp.
VSIPLLVKKAYKFRIYPTKKQEVLIAKTIGCCRFVYNFFVGKQKEQDAYWHTVHEMVQKGQLPQNNWRGKFFDKNKSIKAIRDLKAHYAFLKEVDSIALQKSVEIVNDAYKRYYKKQNNEPCFKSKKNPVQSYTTKHVNGNIAIRDKHLKLPKLGLVRFAKSREVHGRIINATIRRNPSGKYFVSILAEVDVLPLPKTGSSVGVDVGLKDFATLSDGTVYENPTFFRRLEEKLARAQRVLSRRKVDSSNWHKQRVKIAKTHEKITNARKDMLHKISTHLVKNHDIIGMEDLAVKNMLQNGRLAKAISEVSWAQFRVMVEYKATWYGKQVVTVAKNFASSQLCSNCGHQHKDVKDLALREWTCPICKCHHHRDLNASINLRNEALRLTAGTAGIA

SEQ ID NO: 10021 - protein, 352 aa, Acinetobacter sp.
MKTLKLRIKDKNLKVLDQLASEVNFVWNYANDLGFKYLERTGEFLSSYDIDKYTKGASKECGLHSQTIQAISAELVTRRKQFKKAKLKWRVSNKKSARRSLGWIPFKKVAIKYADGYVQYGKHQFKLWDSYGLSKYNVKTGSFVEDSRGRWYVCLVVDNATTIKSKGKTSIGIDLGLKDLATCSDGLKLKAPKIYRQYEQKLGIAQRAKNKNRVRSVHAKIKNIRQNMLHQFTRKLVNEHAMIIVGNVNAKALAQTKLAKSVLDASWTTLRTMLKYKCENARVLFEEVNEAYTTQTCSCCGSRLSSPKGRAGLGIREWQCMECGTLHDRDINSALNILALGHERLAVGIPVL

SEQ ID NO: 10022 - protein, 382 aa, Archaeon sp.
LHPDHNQQKNLHGTLGACRRVYNKLVEKIQNEGFQSRNDFNYFLTELKESEPWLYQYHSKMLQMISTQVDGAQKAPVQLRKNGHRTGTLKFVKFSEYNTCVYNQSGFHIKDGFLQILRIGKIRIIHRQIPEDSTIRQIIISKSKSGKWHACVVDMDAVIPKILLKKSVGIDVGIKNFAYDSDGFQTPNQLNLQKMLKPLIRVQRKISRRQKGSKNHKKAVRWYQIIYERIKNKRKDFLHKLSTQYAKKYDAVFVGRLAKLNRVKNHTLARSILDSRWGIFANMLDYKTMLFEVPAKNTTINCSGCGSMVPKTLAARIHRCDVCGLVLDRDHNAAINVLKKGLDIFGVLNHSREAAVPQELREVTHVEIMRSRNQEEATGFVR

SEQ ID NO: 10023 - protein, 421 aa, Erysipelotrichaceae sp.
MADTVKTMKLHIHMDDSDISSVEYMTEQYRLACNFVSQYIFDHDFPMSSVTLSNRLYQTIRSEFGLKSQMAQSAIRTVTARYDGIRTQMREKPYKFKDIYTNKWHCIYRNLNWLQKPVLFSRPQADLVRNRDYSFVTDQKTNTTYLSLNTLDGRIKVTFDVPACFSDYFDGTWSFGTGKIVSLKDEWYFHIPVTRKNDIEFDKDQVKHVVGIDRGLRYLMTTYNEKDQTSFYSGEAVCRKKDTFNKVRAELQSKGTKSAKRALKRISGRENRWMSDVNHCLSKTLVDTYGSNTLFVMEDLTDVSFDENLRSRNSKQRNELRSWSFYQLEQFLTYKTEEVGSKVIQVSPEYTSQRCPKCGRIHKANRDHDSHLYTCDCCGYQANDDQVGAMNIQLLGTLWISGNENPKFRISEQGKAIRPTS

SEQ ID NO: 10024 - protein, 275 aa, unknown
  TnpB Polypeptide
VARKAGQAGDTPRWGEGAWHASIPVEVGVETTRNGNRSKHVVRGERRSIRIAGPRGDGAAGVDLGINMLASAVTSTGAWLLYRGSRAKEDFFYFSRRIARVQSEADSARKGGDEAKSLRLNREKRRLFRKLVGRIAHLYWNLANHLVRGLWELGVSRIYLGYPHDIARERGNKLTVNLWTYRKLMDAIELKAQEYGIRVYEVLEHNTSNHCAVHGTKVARGPRGVVTCPLGHKLHSDLNGALNILRRGVGSMPAAVGRPLSFLVDHGGVAPAKGA

SEQ ID NO: 10025 - protein, 457 aa, unknown
  TnpB Polypeptide
MLASGQLPGDEGREPIPPAIPEASIQEVKYTDRRANVVRLLPNGSQERKLRRLASTSAKLFNEVNYERRQQFFRGEKVDLEGTWDRYYERYKGALGVNAQAVLQKNNETWSSFFSLLKRKKEGKLPPHMMRVGPPKYWKDRGSKERKLILVVRQDRYIVDEMNHRLVLKDFGLEIEFAGRLRWHGKQGRLEIRHDGARRTWHASIPVEVGVETARNGNESKHIVRGKRKSIRMAGPRGDGAAGVDLGINILASAVTSDGTWLLYRGSRAKEDFFYLSRRIARIQSEADEARKGSDEEKFRRLNRRRRRLFRKLVGRMAHLYRNLANHLVRGLWELGVSRIYLGYPHDIAQDRGNKLTSNLWTYRKLMDAIELKAQEYGIRVYEVLEYNTSNHCAMHGVEVARGPRGVVTCPLGHKLHSDLNGALNILRRGAGSIPATLRRPLSFLVDHSGVAPAKGA

SEQ ID NO: 10026 - protein, 368 aa, unknown
  TnpB Polypeptide
MHKKTFAYRLYPTNAHVTAMERTLDECRWLYNHFLEERKTAWESAQRSVSLYDQHRCLPALKAERESLKTVHSQVLQNVAVRLDLAFQSFFRRVKAGGKEPGFPRFRGRNRYDSFCYPQSGFEMLGDRVRLSKIGAVRVVKHRSLEGKVKTCCIRRSATGKWYVTIVCEVEDAPLPPCPDAVGVDVGLTTFATLSNGETIANPRFFRTDEPALARAQRNKDKLPKGTKERRRKAQVVTRVHERIGFRRHDFTHQTARKIVNRYGFIAVEDLALNTMVTNHHLAKSILDAAWGMFAKVLVEKAEGAARKVVRVNPAYTSQDCSQCHARQVMPLSERVYRCPECGLIVGRDVNAARNILAVGMHSMGVVP

SEQ ID NO: 10027 - protein, 370 aa, Scytonema sp.
MLLGFKTELKLNNQQRTNLAKHCGVARHAWNWGLGLTKQILDWNKANPTEKIKFPTAIDLHKWLVALVKPECPWYYECSKSTPQMALRALRVAWKDFFEKKKGVPKFQKKGRQDSFTLEGSIKIKGVKKIQVPVIGVLKTYEKLPQEDEIKTCTISREADRWFISFRFDQSPEDLKLEETWFFPTVGVDLGILNLATLSTGEIIEGAKSYKKFKDKLSRMQWLNRHKVIGSANWNSAQMQIAKLHKKIANIRKDTLHKLTTLLAKNHGVVAIEDLNVSGMMANHKLAASIADMGFFEFRRQLTYKCEFYGTKLVIADRWFPSSKTCSNCGTLKKELSLKERTFNCECGLSVNRDLNAAINLKNYSSITAS

SEQ ID NO: 10028 - protein, 372 aa, Oscillochloris sp.
MSRKSFKYRIYLSNGQRRILEQQLELSRWAYNETLAERKRAYEERGESLRLYDTQALLPVWKLTKPALKLVHSQVLQNISVRVDLAFQAFFRRVKGGAAEVGFPRFKGFGRYDSLTYPQYGNGVRLEGERLILSKMVGAVHVVLHRPLKGTPKTVTLTRSRTGKWFACFSCETEAEPLPPTDAAVGVDVGLSSFATLSDGGKKIDNPRFYRRDEADLKRVQQRKDAAKNAQNWPENVKQKGILARIHERIANRRSDFAHKESRTLVNRYQVIVCEDLAPMEMGRSRGMRKSIMDVAWTQFIRMTVAKAAEAGRRVILVNPRNTTKMCSTCGEIVSKALSVRVHTCPHCGLVMDRDENAAINILQRGLLSLQT

SEQ ID NO: 10029 - protein, 530 aa, unknown
  TnpB Polypeptide
MLDSERLERILNYGHNQGFLNVEDQVTFGFFKEREVVYTVRVDNLIFQEDRQVDLESFLVCVKVLIANKVAVLLTINPICIKSYLPVAYCCTFSPCGTMLLYERRNLMQLVERHLIKPNHELYPTLDDLTFKAKNLYNHGLYLYRQSYFEHKENPETPILSWMAIDKSLRTQGHKDVRALPSKVANAVLKNLGESISSFWKLVRLKNKGGLRQKPKLPHYLHKTEGRYPLSFNYQTFGNKRGSNNELFLCPKGINLPIPTKVADPKQVRIVPNHNNFIIEVIYNAEERAPKSTSKYAGIDLGVDNFATITFSTENNPLIIKGLELKSINQGYNRLISKAQSLLPENLKTSKSIHRLWSRRSWILKTRIHQMTAFLATLFDEMQIEKVFIGKNINWKQNLPFGKAVKQHFTYLPYETFIEQLQYKCHLRGITVVVQEESYTSKASFLDGDDIPVYSEVENPKFSGRRIKRGLYKSGNGQLINADVNGSYNILRKGLANNQLSFNVDNPLIHPLVVKGIGEEPNDKLVRLYM

SEQ ID NO: 10030 - protein, 545 aa, unknown
  TnpB Polypeptide
MAKNQTYKAFTACPTHVMDLNGELLDSAPLMDELAAEVRGISAYATFIARNDTELEVGLARATAVQAATAGRQAGITMPEFLAADKKDENGEPLEDEHGKPIKSKTGRSRKEWLVRHNAVTAFRSWQERVKAVNGESSKHVSQGWKRTVDASPPSYGEDFINLGITDQQYAVIENDPFVDGEIVLKMVIQGVRYRLIFPFDNTRFTEGKVTLPLVKIENNQPVFIFTVVTDNPVVQFSGDYVLGVDVGINNYASVTVINSTTGRIVYETTLSQRVHSLWNSVHASERQVRALREKAKPILYDRPARRAALEEAQLHREAASRKKRELAIVAAQEIAYLSHFFDNAVVAVEDLSWIRNTMQTGRWNRGAFMQWVTHYVAQNGGWVVAVNAANTSQLCHLCGADVYHPKYKLSICPEHGEMDRDVNAAANIAARAVKKVATAREKRGNNSKLQSQAPLKTPIARASLKYPGQDRTKSVPTPKRKKKGVKTSSSPARVQQISTPVTTTPVVTSMTTVLADCLTHGVAGTSAAIKQGTITNKYRLCSPI

SEQ ID NO: 10031 - protein, 401 aa, unknown
  TnpB Polypeptide
MQRRFNAIADKEDRIIRMNTNKSSIKLGIRGINVRLEAVSPKTHNTLIRYYRAYIALCNLISEAAHTHNTVDLNQILPRIRNEAEPYAKKYPGLLFRAFNTVTREYANHVAGTHRLPEPRKYTLNNIPLTLDDDYTVILYGNNQYGLELLLAHRTNIFSKGEQFYAEWLNLPVGYSHTAVAPTGTLSYDDTNGWVFKYDLPVIQNKVVGVDMGTRFFAVTYDGEYTKFHHGAGTPLQHEMVTYSNLRKKLKGKGTRSARKRLKIISESWRDQLDARIRETVDAVFKEAEPDTVFVLERLSVPYNLKERLATADLGRMVTAIFALFNKALREEAKKRGCSVLYVSASGTSSQCPACGIFRKRNRKQRSQFYECQCGFRSNDDRVAAMNIRERGITQLTERLT

SEQ ID NO: 10032 - protein, 532 aa, unknown
  TnpB Polypeptide
MASNQTYKAFSARPTHIMDLNGELLDSATLMAELAVEVQGISAYATYVARNDTELGTRLAQAGAVQPAEAGRRAGVDIPAELVVKGKLRKNKAGELVEEKVSGRSRKERLFRHRVVTEYRAWEERIKAANDESDKHVSQGWKRTVNVSPPSYGGDTINLGAVDSLYAVIENDPFVDGEIVLKMVIQGKWYRLIFKFDNTRFPEGKVTLPLIKIQDNQPVFIFTVATDNPVVQFSGDYVLGVDVGINNYASIAVIDSATGRIVYETTLSQRVHSLWNSVRASERQVKQLREKAKPIIYDRQGKMAALDEAQLHREAASRKKRELAILAAQEIAYLSHLWDNAVVAVEDLSWIRNTMQNGRWNRGELIKWVTHYVDQNGGWVVSVNAANTSQVCHKCGSKVTHPEHNVSVCKEHGKMDRDVNAAANIAARAVPKVEKAREKRGNNSKLQEQAPLKTPVARSSLKYPGQDRTKSAPTPKRKRKGVKPHLSPARVQASRVDTSVLADCLTYGVAGTPKAAIKQGTITNKYRLCSPI

SEQ ID NO: 10033 - protein, 433 aa, unknown
  TnpB Polypeptide
MSIEERRRNLMQLTERHLIKPNHELYKTLDDLTFKAKNLYNHGLYLYRQSYFDHRENPETPILTWVDIDKNLRKQGHADVRALPSKVAGAVLKNLGESITSFWKLVRLKSSGKLAQKPNLPGYLHKTEGRYPLSFNYQTFGKKRGANGELFLCPKGINLPIPTKVDNPKQVRIVPSHNNFIIEVIYDTQERAPKSTSKYAGIDLGVDNFATITFSTENNPLIIKGLELKSINQGYNRLIGKAQELLPESQKTSKPIHRLWSRRSWILKTKIHQMTAFLATLFDEMQIEKVFIGKNTNWKQSLPFGKKVKQRFAYLPYETFIEQLRYKCQLRGIIVITQEESYTSKASFLDGDDIPVYGETENPKFSGRRIKRGLYKTSDGRLINADVNGSYNILRKGLTNNQLSLQVDNPIIHPHVIKGIGEEPNDKLVQLYM

SEQ ID NO: 10034 - protein, 277 aa, unknown
  TnpB Polypeptide
MPKEVGVDPPKSNPKGYVKPNYKDKKGRIVNPRSIKQRDPIGDREAFIDTGLNTLFAVVISNGSVLLVKGGSIKSEYYWWKRGIATYQSVRDMLRRLGISTWIYYHEKYLDAMYKKNERPRHLYITAIRFLADELHRRGVRKLYIGYPITLSQDNGNEYNTNIWWYRRIVLWIVDIFREYGIEVEIAPEDYTSKECSICGNKHKNGRIYRSLYECKKTGKKINADINTALNIARKLGHRIRLTKKIESYHVTHNGIRPLNPLQGANTRDPEIRNPVL

SEQ ID NO: 10035 - protein, 364 aa, Zobellella sp.
MSIQTKTLSVRVKDKHAKLLRQMAFEVNQVFNHANELTMKANRNHSDLGPVKPEWLSAFDVQKLTAGIQKERGYLIGSATVQEVIAVHAKARKQFKRAKLRWRVSSGSKRSLGFIPFKSRAAQWRNGQVKFAGHHFKVWDSYGLSKYQFRAGSFSEDARGRWYFNICVQVAAQPVTAGKSAVGIDLGLKDAATCSDGTKLSAGRFYRDLESALGKAQRANKKQRVKAIHAKIKNRRKDALHKFSTRLVNSHAAIFVGDVSSTKLTQTRMAKSVLDAGWAMLKTQLEYKAIARSVVFEVVNESYSTQTCSSCGTLPDSRPKGIAGLGIREWTCSECGAEHDRDVNAAMNILAAGHCRLAVGIPVL

SEQ ID NO: 10036 - protein, 484 aa, Glycomyces sp.
MSKPFEPREGCVVQAYRFTLDPNAGQIESLASHCGAAREAYNWAVGYVLAAWDQRAAEESYGIPGTERTPWRSWSLASLRREWNRVKKTDPRYAWWAENSKEAYNTGLAAAQAAFDNYTKSKHGKRAGKPMGVPRFKSKRRARRSCRFTTGTIRIEPDRRHVTLPRLGAIRTHEKTAKLQRRLAKGTARILSATVSLHRGRWQVAFQIEVERAQTRPARPEATIGIDLGVKHLAVTADTDGAVDYVDNPSHIDQALKQLRRASRKVSRRRGPDRRTRQQASRRWMRANAERDRIHHRVANLRENALHQLTTRIAAEYGTVVVEDLNVAGMLRNRRLARRIADAGFGTIRRHLAYKTGWNAGNLVVADRWFPSSKTCSGCGAVKAKLPLHVRVFECDTCGLLTDRDANAALNLAALAAACSTGTGVAGDQAAQAAKPRGADVRPAQRATGVEAGDRRQDTGQQLGEPVTDLPSGNARNADIRLRN

SEQ ID NO: 10037 - protein, 441 aa, Glycomyces sp.
  misc_feature (388)..(405): Xaa can be any naturally occurring amino acid
VRAPVRPPVGPAPRPGRHESRFGVRVVKVIKAYRYALDPTPVQAEAFGSHCGGKRFAFNHMLGVVRANLDQREAERTYGLAEADLTPYVNWSAYGLRKSWNARKEAATGRGDGTSWWAENSKEVYAAGCADLAMALANWQASKRGKRAGPKMGFPQPKQKHSRPSCRFTTGTIRLEPDRRHLTLPRIGTVRTCENTRKLDRHLRRGTGRLLSATLTQGSGGRWYVSLTCEIEQRERTPARPDSVVGVDLGVKHLAVLSTGEFVPNPKHLDAAQHKLRKANRSLARKQGPAPGKQPSKRWLKAKQRLNRLHGSVADARGDAIHKLTTRLAAEHGTVVVEDLNVTGMLRNRRLARRIADAAFGRIRRRLEYKTAWNGGTLVVADRWLPSXXXXXXXXXXXXXXXXXXESPGHVTNARQKPHKTSPAGSGTAAGRPATAAGQSY

SEQ ID NO: 10038 - protein, 283 aa, unknown
  TnpB Polypeptide
VEPGKSVMGIDEGTSTVAAVSGDAVFLEELAPQCVDYNKEITKLQRQIDVSTRKTNPDKFKEDGTCRKRSGWKEKHWTFSKNCLRKKAKLRELYRRKSAYAKCRHENLLNRMIQSASSFVNEPMEFSALAKRSKKTERQDKLSEVKKKDGSVKIVHKYKRKKRFGKSVNDRSPGLFQTRLKQKCVQYALAYMETDKGKSRASQYDHDLDAYIKVELSRRFKTVAGQVVQRDLYSAFLQSCMGTPEKPDREKCLQLFGQFVRMQVELIMKMKASGQSRPACFGF

SEQ ID NO: 10039 - protein, 553 aa, unknown
  TnpB Polypeptide
MRARISRVSRSRAARRAGGPASNPKRCSSSSTDPQPIPRSRRPSLTTSSVAAIFARTAGWRNGSALTRCPIRIVVVSTASALASVQPSNVSCSSAPGAPRWSISHTESNPAASAIRVRSTIVAYGMRSCGRNRPNHTAGTVVGRFGCSLCHRWCLGFAVMRRCRTFRFLLSPTVRQRAALENLVGLQCELYNAALEERRGAWRWEHRSVSYVEQCRSLTELRACRPEVLAGGVTVCRGTLKRLDWAFAGFFRRCQAGQCPGFPRFRPRSRWDSLQYEDRCGWRLDASSRRLCLHGIGHIRVRLHRPVRGTPKAITVRREGRRWWVSIRCVNVPAEPLAPTGRQVGLDLGVGVLVATSDGVLHTNPRPGPRGARRLAQAQRALATKQRGSQHRRRARERVAAAHRYIRDCRTNSAHQLSRRLVNDYDVIVHEQLAIPNLVRRPAPRPDGSGGHQPNGATAKEALNRCIHDAGWGQLLAMISYKAESAGRVVIAVDPRNTSRTCADCGHVSAGNRRGAVFKCQGCGHEAHADTNAAHNILRAGRAQQHHAAQSRN

SEQ ID NO: 10040 - protein, 392 aa, Lactobacillus sp.
MALILAVMMMTIRTQKVRLYPNHHLAKVLDNLCDYRRYCWNEGLATWNDMYDLYTLDSNNPRPNTYSIRNELVANKADWQYTLSARTLQLAVADLGKAWQNFFDKSQPDWGKPTFKSKNAARQGFKTDRAKIIAGKLRLDKPRGTKGCYNIMLSKHADLSGVLKVVSIYRENGKYWASFSLEVELDAKPRTGNNSAVDVNVGHLTYTAGIVNTLPKRLRQLYQRIKFYQKQLAHKCVMNGNKATKSGRYVAMRAKLQRDYRKVANVQHDIMQKFTTKLVNDYDTIVIENLAVKAMQMSHVASKGLQRSMFGYFRQILTYKCDWYGKKLILADRQYPSTQRCSKCGYTKSGNDKITLQGNSTHQTKHSEYVCYSCGAILDRDENAVANLLALI

SEQ ID NO: 10041 - protein, 405 aa, Trichococcus sp.
VLPQSRDFSHELGITVWLYPFHLANACSLVYNEAKEVSIMLKAYQFRLCPNQEQKIYFANCFGSARFLFNQMLADRKEFYETYKNDKELLRNFKPRTYTSFKEEFPFLKEVDNLALANANQNLNKAYQNFFRDKSVGFPKFKSKHKSKASYTTNNQGGNIRIENGKIKLPKIGFVKIKQHRDFDGLIKSCTISMNKAGNYFISILIEQEIPEWLPAEHKIGIDLGLSDFAVTTNDMGNIEKHPNPKCLRKSEKKVKKAQRALSRKQKGSKNREKARLVLAKKHEKIANQRKDFLHKLSNQITDENQVIVIETLRSSNLMKNHQLAKAIGDVSWFEFSRQLAYKAEWKGRTLIKADRFYPSSQICSACGHRDGNKALHIREWTCPDCGITHDRDINASRNLLALAK

SEQ ID NO: 10042 - protein, 290 aa, unknown
  TnpB Polypeptide
LFIAQNKKQFRGEENADGIQLWCGNTKTEYPNPPDTGNLSSGVSYLTEIYEQVWAELKMIPEAKKRFNAAEHLIHTTKKNHAHFDFDIRFPKMPSYLRRAAIQHALGSVSSYESRMEQWEAAGELSGKPNFTCENHAMPVFYRDVMYREGTEGKDEAYLKLYDGHDWRWFCVCLSHTDMEYLRKNWYGKKASAPTLEKRHHKYFLRFSYIEEVTLTQTPVKGQIICSVDLGINTDAVCTIMRADGTVLGRKFIDFPSEKDRMYAHWDESGDSRGNMDLRRQEKGGHTPDV

SEQ ID NO: 10043 - protein, 156 aa, unknown
  TnpB Polypeptide
LREARQQLAHKEKKSQNYYKTKKKIALCHEKITNTRKDYLHKISHEIISENQVIVSENLQIKNMVKNHHLAKSISDVSWYELTRQLEYKAKWNGREYVKIDTFYASSQLCSVCGYQNTETKNLTVREWICPVCGTNHDRDINAAKNILEEGLRQIA

SEQ ID NO: 10044 - protein, 388 aa, Lentzea sp.
MIVVKIVVRVKLLPDAVQASALAATLHACNQAANEVSRMAFERRVFSRRALQRLAYTSLKARGLSAQPALHVIRKTADACTTLHANIRNGNLGSEGSKRRVKAESTPVGFRPDAAQPFDDRCLSWNHDARTVSIWTTAGRVKNLRFTGSPDQLTMLREHRRGETDLVHQDGMWFLIATCDIAEPETFEPSGWLGIDLGIVNVATTSDGDRAAGRRVNRYRRHLQRLRRKLQRKKTKSAKRTLKRLRRRESRHVADTNHVLSKQYVTAAQRTGRGIGLEDLAGIRDRARLRKPQRVVLNSWAFHQLGAFITYKAQRAGVPVQFVDPRNTSRGCSECGHIDRRNRPSQARFVCRSCRYTANADHNASRNISHKADVAWNAGRQSAAPTAA

SEQ ID NO: 10045 - protein, 388 aa, Lentzea sp.
MAERVVKRAFKYRFYPSAQQAAELSRTFGCVRLVYNRALEARTAAWYGEQRRVSYVQSSAMLTEWKQDPGSAFLTEVSSVPLQQSLRHLQGAFAAFWDKRARYPRFKSKRKSRASAEYTRSAFRWRDGTLILAKMAEPLDIRWSRPLPEGAEPSMVTVSRDAANRWHVSVLVDTTVHDGPTSDQVVGLDAGIASLVTLSTGEKVTNPRHERRDRERLAVAQRRLARKMKGSSNRAKARVKVARVHARIADRRSDNLHKLSTRLVRENQTVVIEDLGVRNMVRNHSLARAISDAAWSELRTMLTYKCQWYGRELVVIDRWYPSSKVCSACGALQGTMPLGIREWTCRCGTVHDRDVNAAINIRAAGLAVLACGDGVRPARAQAREGNCR

SEQ ID NO: 10046 - protein, 374 aa, unknown
  TnpB Polypeptide
VRKTFKFKLFGARRNRKLHKQINAAGLAYNHCIALHKRYYSLYHKHLNLFRLQKHLTKQKRLPRFAYLKEIGSQALQDVAQRIEKGYQLFFLGLQEKRKVHPPKFRKVRKTKSFTLKQAGWKLDEEHGIVYIQGQKYRYNNSRRIEGSVKTVTVKRDKLGDIYIYLSCDVETAEMEARTGKSVGFDFGYKESMLVAEEPEDDVVMPEFFHNALRKIRRANRSFQRKQNRSGNKRRALRELERLHRKVANQRRDYHWRLARELCQRYAVICIETINLNFMKKKHGKKTNDYGYGEFLYILEYVGRQYGTRVVKVDRFFPSTQLCSACGYQNTELRGTEALSIREWDCPSCGAHHDRDRNAATNIHREGLRLLSGT

SEQ ID NO: 10047 - protein, 315 aa, unknown
  TnpB Polypeptide
MEMGRKINLSWRLKNSFACQGLFHFECLLSSQEDPYFQVGDELRLDLNMSCCQQLSNFPFKHYNYLDTWKGEYTNAQLIIRKNRAFLNVQVKLPDSPSKVTGKVLGIDRGILNVAVCSDNTFFNSKRLRAVKGRYRYLKRRLQHVGTRSAHHKLQRVSGRERRFVLDTHHCISKAIVNKPFDVFALEKLEIRKKKKNGKPFNRLLGSWSPTELHRFIAYKAEAEGKATVEVNRRHTSQRCSRCGFVHRWNRHGLRFRCGNCGFELNADLNASRNIEVLGKSEYLRLFVNEPIVASGEASPTGVVDGSYKPYPSSG

SEQ ID NO: 10048 - protein, 374 aa, unknown
  TnpB Polypeptide
VNKAYKYRLYPDKENAVLINKTFGCVRFVYNKMLAERKIIYELYRDEKEALKQQRYLLPAAYKKEYEWLSEVDSLALANAQLNLNAAYQNFFRNPATGFPKFKSKHHDRKSYTTNNQKGSIRIINNNTIRLPKLKDVRIKIHRPLPEDMVIKSATISQTPAGKYYISILVEYEKEINTITPKSEKIIGLDYSSGNLYIDNEGNSAAYPGYYRKAEEKLKREQRKLSGRKKGGKNREKQRQKVAKLHEKVANQRKDFLHKTSRQITNAYEAVAVEDLNMRGMAQGLHLAKSTNDNSFGKLRTLLAYKLAEQGKQLIIIDKWYPSSKRCHVCGNDYKELTLSERSWICKHCRTVHNRDVNAAINIKTEGCRLLGIT

SEQ ID NO: 10049 - protein, 243 aa, unknown
  TnpB Polypeptide
  misc_feature (218)..(237): Xaa can be any naturally occurring amino acid
MRSVVTAKVRVNPTPQVVATIKAYTKSLQFCVDYAWEHEITQNFKLHYAIYHTIRKRFKLPAQIAVACMRQACGMVKKAKSKPTIKRTSVRYNFPRSANIKGNTLVLRLLDCRQESKPNIPICYAKYFSWEVSESLLRMDKRGRCFFLFTFSKEINATEQNNASQNIVLGIDLGINNLAVCSDGRFYNSAQAKQTKRKFKYLRSKLQSKGTRSAKRLXXXXXXXXXXXXXXXXXXXXNELDSE

SEQ ID NO: 10050 - protein, 504 aa, Caldicellulosiruptor sp.
VFDREEDKKAVLDLMRRWSSCMRYAYKRLLERHKRNELKRELQGIFNLNSRYVDDAIMKANSVLNSCKERGENPEKVIFGGRQLFEKLKRRHINGKVYRKLQREWQEKRKGNLYSRGDRSKKGNLNTRIEIDGNFTKLRINVGKREYVYATIQAGWKMKGKTYMDRNLLLQAISSSRGPYSVELKLKNGVVYAYFTVEEVFPKPAITRANGVIGIDTNAYPKNVAWVETDEHGQFLGYGRIPLEKLESGSSSKREYYRWQYAHMIVQMAKEKQKAIVIENLSIQDRGRRGDFSGRKSRRIRHYFGYRSLLEKVKLLAKREGIEVIEVDPAYTSVIGMLKYAPQYMVSKDIAAAYVIARRGLGLRERIPHNYMLLLSRLDVNNLEELKEYVRKVVKNKHLRKKQLKTIDRAIKFLQSSGSEPGRLSVPLDGTSAGSRGKKHNPWQVLRVAVVTPLSPDRVLRDMSVLKSLLISGQVGKTCKGVSSCFLGQGLWLSQIPPAGAGKA

SEQ ID NO: 10051 - protein, 213 aa, Streptomyces sp.
VGRRAQRRAGPAGAAARDRQRLGIDLGIDLGIANFLADSGGDFIPNPRHGRKAATKLEAAQQALSRFPRRKAKERTANHQRTVEKAAELHGKVRRQRLDHAHRTALGPVRAHDVIAHEDLRIRNMSKTPAPPNPDRAGLFLPNGVRREGRAQQVDQRRRLGVFLTILHAKAESAGREAIAWTPATPPAPAPNAGTPPRRTGPHRKQCSFVAQS

SEQ ID NO: 10052 - protein, 392 aa, unknown
  TnpB Polypeptide
MFCEFTHLSKNLYNHANYLVRKDFVETGKWLRYRELDKLLRQDRDHPDYSNMPGAQSAQQTLMLLESNWKSFFRSIKDWSKNKSKYSGKPRLPKYKPKDGKLVLIVTNQQIKLKARLMRFPRSFRGFTVKPRCVDLSNFEKINQIRIIPNNQIFYIEIVYSISVEDDLLPDNGRYMSIDLGLDNLATVVTNTGLNPIIVNGKGLKSNNQYYNKKKAYYQRVSKQMNNQYYTNRLHRLTRKRNAKIDDALHKISRFIVDTAISNDIRTIVIGNNKNWKQSISLGKRVNQSFVSIPHQKLIDKICYKARNCRIKVVLTEESYTSGTSFLDCEFPQKKHYNKERRVHRGLFVSNQGTLINADVNAAYQIMKKVFPNEFSDGIEGAVLHPVRVDIV

SEQ ID NO: 10053 - protein, 409 aa, Desulfurococcaceae sp.
MTLLTRTIVVPSVELTKRKYEAFKELEEIYGKLVEELVDYGFSHRIKSFTGLKKHKYHELRGRYPQLPSHYIHTACQDASTRITSFLELKKAGLAKSEKPVVKKISVWLDDHLWKPLGHTAIKVFTHRGWINIELQPHKQYWEYVNNGWKLRTQPKLKIDHRRYRLLVHFIFEKSVDVTGTGNARQVVSVDINENNVTVKVQDKVFILQTDIKKLTVGYESYREVIQSIKGNRYVKRAIHGRERRRKRDIRCKVASIIVNTAKQLSATIVVENLPKQAPKNMISDVKDEKLRHRIYQAGFRGVLRAIEEKCAERGVPLVKVDPRNTSSTCPFCNSKLMRGIAPRQLKCPKCRVEMGRDVIAVLNIERRALKGPVPLGPMPGEPALEVAVLPMKGWARRKSLDVTMNEYK

SEQ ID NO: 10054 - protein, 393 aa, unknown
  TnpB Polypeptide
MLYAIRVRLYPNAAQREFFARTLGCCRWVYNDALAHCQRLYEAGEKRPSAYDLMKRLVSLKAEYPWLAEADSQALKQACTDLDAAYKNFFRRVKAGETPGFPRFKSKHRGDATYTATAATSIALEPRWLKLPKAGRVRCRGGRAWEGRIKRATVRQTPTGKYYATVLIDDGRELPAQPETGLSPLGIDVGCKTEGFTHQVAALSTGEIITAPSEYKRQMKRLRRAQRRLARKQKGSANRAKQKRRVAQLHERISAVRRDFLHKLTHRLTCENQALAIEDLNVRGMMAKPKAVPDPARPGAFLPNGASRKRGLNRSLASVSLGEFFRQLEYKSAWRGVALLKVSRWEPSSKRCSCCGEINIALTLADRRWQCPACGAELHRDINAAMNIAARAA

SEQ ID NO: 10055 - protein, 415 aa, unknown
  TnpB Polypeptide
MKINRAYKVELKPNNKQRTLLEKSAGTARFAYNWGLNKRINQYKEEKTTASAIDQHKELCTVKKTEFPWMYEVSKMAPQEALRDLDSAFKNFFRGIKKGQKIGFPKFKSRHKSKSSFTISFGFYVTNETINIPKVGRVRLKEKGYIPTKNVKINSMTISKTADRWFISVQVEQDIPDLTNIPESVLGIDVGIKTLATCSDGEVFENNKYLKKSKKRLSHAQKNLSGKKFNKETKKSSRNRDKAKLKVQKIYYRISNQRKDAIHKMTSILAKTKPRYIALEDLNVSGMMKNHKLAGAIADASFFEIRRQLLYKTAWYGGSIVDVDRFYPSSKLCRICGNIKDDLTLLDRIYICNCGHIEDRDLNASINIENIGLSTLSSRGIKACGESIRLQEVRDSEAVSLKQEENKDFCSAKIL

SEQ ID NO: 10056 - protein, 375 aa, Endozoicomonas sp.
MKLKRAYKERFYPTPEQEILLAKSFGCGRFVYNNTLRFRTDAYYKNGQSISHSEAEKRLVSLKTEFPFLADVSSVILQQTLRDQQEAFKNFWAGRAKYPKFKKRHSRQSIRLTKAAFSMKKGQLFIAKSKEPLNIRWSRPLTSEPSSITISKDRAGRYFVSMLCEFESKPMPVSNKTVGIDLGLTDLFITSDGKKSGNPRHTRRYEQKLAYLQRQLAKKQKGSNNRAKARLKVARVHAKIADCRMDATHKASRTLINENQVVCVESLNVKGMIKNPKLAKHIADANWGEFVRQLKYKSEWADRTVVEIDRFFPSSKRCSCCGFVHESLPLSIREWDCPECKTHHDRDINAAKNIRTAGLAGLACGATGSPRLERG

SEQ ID NO: 10057 - protein, 369 aa, unknown
  TnpB Polypeptide
MLRVKLIAQVKLQPTKKQKSALYNTLHEANIACNAVSEIAWETQTFGQYNLHKIAYAKMRERFLLSAQVVVRCIAKVADAYKLDKKTKREFKLDGAIAFDDRILSWKTDKQVVSIWTLDGRQKIPYVCGERQKRLLESRIGETDLVYRKGNFYLLAVCEVPEPTPNDVDNVLGVDFGIIKLATDSDGQSYSGEKVERKREWYANRRATLQKVGTRCAKRKLKKMSGKQRRYQSDTNHCISKQLVSKAKDTNRTIAIEELKHIRSRTTVRRSQRAKHHNWAFAQLRAFLSYKAQLGGVRVIAINPRNTSRTCSACGHCEKANRKSQSEFVCKVCHHSANADLNAALNIRSLGIVKLPMASSSYAIQTQAA

SEQ ID NO: 10058 - protein, 266 aa, unknown
  TnpB Polypeptide
MSSSKFRVWLNHEYLPQYPEYLWIKEAYSKAVTQAVNHGQTAFKKFFDHESAFPKFKKKGRSDVKMYFVKNNPKDCRCERHRVNIPSLGWVRIKEKGYIPTTKEGYIIKSGHVSMKAGRYYVSALIEIPDNKTADLSNEGIGIDLGLKDFAIVSNGKTYKNINKSARLKKLEKRLVREQRCLSRKYENLKKGESTQRANIQKQKLKVQKLHHKIDNIRTDYINKTIAEIVKTKPSYITIEDLNVSGMMKNKHLSRAVASQSFTNSE

SEQ ID NO: 10059 - protein, 359 aa, Herpetosiphon sp.
LSPRGFPNWALHCKQTHYQTTGQRLSYQRLAAMLVDLKRQPKTAFLRDCHSQPLQQALMDLETAFSNFFAKRAKYPRFKSRKVTPHSLRFPQGVTVINDRTISVPKIGLMQAVIHRPLQGIAKSATIKQDATGTWWVVFVCHIDRPDTLLTVDQPVGIDVGLESFTTLSTGEKTAPPKFYRRSQKKLARAQRKLSRAQKGSKNRLKARKRVAKIHQKISNQRADWLHKHALGMVQRFDVVCIEDLTIKGLARTKLAKSFSDAALSTFMQRLQEKAEWHGRRVMKVGRFYASSKTCHSCQTKTALTLADRIWTCHTCGTTHDCDVNAAINIVHEGIRLLAVGTTESQNAAGDGVNPAKCW

SEQ ID NO: 10060 - protein, 291 aa, Proteus sp.
MKRLQAFKFQLRPNGQQEREMRRFAGACRFVFNRALARQNENYEAGNKYIPYTKMASWLIEWKSDTETQWLKEAPSQPLQQSLKDLERAYKNFFQKRTAFPRFKKRGKNDAFRYPQGVKLDQSNSRISLPKLGWMRYRNSREVVGEVRNVTVSQSCGKWYVSIQTEYEATEPQHESTSIVGLDAGVTKLATLSDGTVYPPVSSFKVNQRKLARLQRKLSRKIKFSANWQKQKRKIQRLHSHIANIRKDSLHKVTSEISKNHAMIVIEDLKVSNMSKIGQRYDRTAWTERKS

SEQ ID NO: 10061 - protein, 321 aa, Proteus sp.
MCIRNTQCLPRQILVSFFIDQGIIGNMKRLQAFKFQLRPNGQQEREMRRFAGACRFVFNRALARQNENYEAGNKYIPYTKMASWLIEWKSDTETQWLKEAPSQPLQQSLKDLERAYKNFFQKRTAFPRFKKRGKNDAFRYPQGVKLDQSNSRISLPKLGWMRYRNSREVVGEVRNVTVSQSCGKWYVSIQTEYEATEPQHESTSIVGLDAGVTKLATLSDGTVYPPVSSFKVNQRKLARLQRKLSRKIKFSANWQKQKRKIQRLHSHIANISSIERFKPDLAFTFRPGRSVVPLADLDMLLTFKSSMTIIAWFLLISLVTL

SEQ ID NO: 10062 - protein, 388 aa, unknown
  TnpB Polypeptide
MQLRKSVALSSLCHRGKNLYNAANYAVRQRFFREQKWLRYYDLNRLLKQDPTYRALPIQTSQQILRLIDRNWKSFFRAIKDWQDHPKKYCGKPRIPRYKPKKGESIVVFTNQQCRIKDGFLHFPKKELPPLKIRMTGSFQQVRILPRGNHYVVEIIYKCQPIHLDLAKSRILMIDLGLTNLVTAVNNAGLPPFVIKGGLVKSINQFYNKERAHLSALKDKQGLKGQTKRLMRLTLKRNNKIRDYFHKTSRTIIGYCVDNELGTIVVGYNAGWKQHINIGRRNNQNFVTVPFHQLIQQIQYKAKLVGIEVILEEEGHTSKCSFLDQEPIEHHDMYMGRRINRGLFQASDGTLINADVNGGYNIGRKAVPNAFRADGIEGVGLHPYSIAI

SEQ ID NO: 10063 - protein, 418 aa, unknown
  TnpB Polypeptide
MDRTITVQLNPTPEQARTFKATLEQHTACFNAVAHEGFTTACSNGVELHKRTYYPLRAQYPDLPAQLVCAARVKATEAVKSALTWKVKKEQAYPKKGEKAKKQGEPIPVFKPVRCPHSELACIRYDQRSYWVKWDTMTCSLATVDGRIKLPFTVPAYLMQYVGYHVCSADLCFRKGRYTLHIVVSIPEPAIPPTTTVVGVDLGLNRPAVTSARQFLGEKEWKEQERRTFRLKRKLQAKGTRSAKRHLKKLSGKQFRRRRDHDHVLSKRLVQNTPPGATIVLENLKNIRDTSKTGRGKKESKKRDNKRRLHSWSFAQLYSFVEYKAQARGIRVVKIDPRHTSQTCSKCGYQARNNRCSQSVFHCRSCGYQLNADLNASLNIREKYLTSLAQDGTPILSGSAVKGPIVSTLRGQEQAPAL

SEQ ID NO: 10064 - protein, 412 aa, Acidimicrobiaceae sp.
  misc_feature (397)..(397): Xaa can be any naturally occurring amino acid
MDHPYRTRGVTVPLDPTPAQAQLLRSYCGASRFAYNWTVAVAKENKDKRKIERNAGIDEADLTKSLSWSAWSMTPLWNLVKDEVAPWHRDVTKHAFRSGVTNASIALKNYQESAKGIRRGPLVGFPKFKNRHSKQSFTLIELKRPGHWFSEDSRHVRLILPRFATDPRITRRREHLQWLHTTESLSRLKKKVMSGEWAIQAVTISFVGGRWQASFSVRQLVVDAPRATRPLGALVGVDLGVKNLATLTVPVTGLSDDCGHVANPRHLNAEIVHLDRLDRQLKRCQKGSKNRAKIRLRRQRLYGRIARTRNLYHHRLTTTLAGSFETVVLEDLRVSDMVKRSKKNSTNALSRSILDAGFYELRRQLIYKAEDRGHRVVVVGQYYPSSKMCSHCGETKXRGAPTRDDKRCLEGP

SEQ ID NO: 10065 - protein, 710 aa, unknown
  TnpB Polypeptide
MKRQPRRHPRAPNHETQQARQHTMDDSYMSPSSTYQAEKFSLNSYPRIVDRKGKRRGPDPCFSPTHRPPVEQALRELVSGNKCSNIDIQTLEQHFDKYLNAVNLVLDEVYSAPDRARRIGERLRSSRGQGYVVLREERFLEWEPDNRFGQLVYERMYRNALETAARIVLADYTRRSLVNSLITMLVSDRQQLKSLMALKRIPAPLVRKLRASVGETSGSYYHYALTACKQVQRALDEHLLESFGEPTSIRRLARDRVRDRLDTQSSESIKVLNAALKKVQKWHKTGFPFTAPTFRQTTMDFAASTENTTGQGYWFMVDSDRQDEVILYIKTPPGVTGREATPDSPYKSQTLRFRFLDWLPRKAARAHRKAEESRAQGHFRRAVELEYRAARFDDMSQQLRNNIRLQCLTRQLSSLKSKKDIDVERINELKAQITALRQTRRCAPPILSLRGHTVILIIPFLCPNEQILKRVLPTVPRTGRAGVDRGLRYPVVLCVKNGADSYDETKIGRPESFERRERLRRRTRVLTSQIVRRRNNWDRKRPMLSPPSSILKRERELEAVWAKVRRIDREISHQLAAETVWFCEHRGVKTLCFEDLRYFQPQGGFRTHSWELSTNLWGKIIEGVRYRRQALGHKYGGVWTVNPAMTSQRCSTCGEKGVRVRDTDSTEEEHSGEFFYCPRCDLRLHADVNAARNILMVQQPKPSAVSGRTA

SEQ ID NO: 10066 - protein, 393 aa, Mycolicibacterium sp.
MRRAYVFRLRPTARQHIALNACLDAHRELYNAALQERRDAWAHNITRINYGAQSGQLSEIRRVRPDQGVWSFSSQQATLRRLNKAFDGFFRRVKAGQTPGYPRFKGKARFDSVEWPKDGDGARWHPDQQRVYLQGIGQVKVTVHRQVQGRVKTIAVKRQGRRWMLVLSCDDVPANPLPATGAEVGIDVGVVTYATMSDGTAVDNPRWARQEADRLDAAQRRLARAKRGSNNRRCKRETVAARHRKIANRRKDFHHKQARALVARYDLIAVEDLAIANMVRRPKPKPDPESPGQFLPNGAAAKSGLNRSISDAGWGQFVSILRAKAEDAGRTWIEVDPRHTSDRCEACQHAARENRVSQAAFVCQRCGHTAPADQHAARNILRAGLALHAAPAA

SEQ ID NO: 10067 - protein, 593 aa, Mycolicibacterium sp.
MADSVSGAVVVQSAVPLRIAAAVDEVTGEVIDVDARIGWLLDMVERLSVALMQSCWRPATFTALHAGVDALGRKLPSTAAVVAARLGWVPAPPVGVYVPSRVVRLAQANVVPVLKTMAFRDALIPQVVAALDEQGRLDRHRLGDSQARYVTAAFLRNLSRQLRRAGDKPIASVTEIQDPPTVARIARLGAADRSLAELDTSDRSGVWLRLKLPTCPAPAGRDEWSWCRLWCPIPPHLKGRDIARWHLPTVSTQRGKPLLRFAITETVPEPATAAATAALGIDWSPASLGAATMVADRGGQLVTDAATLVYDDRGLSVRLARLQSEGQALTGKIARLSNLAANAPESTKPQLSAKITVLQENRRALGAKRSRINRDMAFDFAATMTAMATASGAGVIAVEDLRDLEARGRGPVNNNRSAQSARRRAVAALEHTAAKAGLEVVMCPPRGTSANCPSCDQELTRPGGYHTATCTPCGIHRANRDQIAGQNIAKRVLLAKANIKRPKGKPKRITTVEHQPIHKTRHKTTATPKQRRHKRTRNSTPIARTSGQCLPNLPARAASVWDRDQQPTPVASTSAQPIPDTRDTPVSASARDR

SEQ ID NO: 10068 - protein, 277 aa, Moorea sp.
MYKTIPLKATFSDEENAFWLFQCNQANSLWNCAVYYAKQKHYIWLEQQPEAFTTYWREDNLRYGWKTYKCSTKYAELCKELKENPHYKAMAAQSAQQTLKSIAESISSYNQLVGLYYKSQVDRPRLLRYRKKGGLAAVTFPRQALTYKNGLFYPSISKETKPELLTEISLEPPEFIDPDWVKEVTVRPNLGQLWIDWVIDDGKQRIEHNPNLDYAQAWSFDHGGDNWLTGVSTHGKSLIIDGRKLKSMNQGYARLVAKYKAGKPDFYWDSNLDSPFA

SEQ ID NO: 10069 - protein, 526 aa, Glycomyces sp.
MRTAYKCRAYPDSEQAAMLARTFGCVRVVWNKTLGERHRAWHADGRRTTYRETDAALTAWKKTEDLAFLNEVSSVPLQQALRHQHAAFSSFFDGRAKYPRFKNRSSRQSAHYTRSAFRMSDGELRLAKTAAPLEFAWSFDGVDLARLEPTMVVVSREPDGRWFVTFAVETADPEPEPATGRSTGIDLGVKDFAVTSDAERISGPRNLERKARNLARYQRRMARCRKGSANRRKAKQKVARAHRKIRNARADFLHKTTTRIVRANDVIAIEDLNVSGMIKNRALAKRISDAAWGEFRRMLEYKAARAGRTLAVVDRWYPSSKTCSHCGHLLDRLDLSTRAWRCPSCRTRHDRDVNAAKNILAAGRVAAGQPPGEACGADIRRQGSSLPQSAMKQEPPRARAQGTPSPYGRNGSQSQTTPISAAAASAARNAAGAKRAAKRRPNVPACMAASFTSMNGPTTMNASFAVGENWVRDAATNASDSEQIDTSTARTASARTPRTGLSAMGASHVSGTRVFRLAAMAAPMTR

SEQ ID NO: 10070 - protein, 394 aa, Glycomyces sp.
MRTAYKCRAYPDSEQAAMLARTFGCVRVVWNKTLGERHRAWHADGRRTTYRETDAALTAWKKTEDLAFLNEVSSVPLQQALRHQHAAFSSFFDGRAKYPRFKNRSSRQSAHYTRSAFRMSDGELRLAKTAAPLEFAWSFDGVDLARLEPTMVVVSREPDGRWFVTFAVETADPEPEPATGRSTGIDLGVKDFAVTSDAERISGPRNLERKARNLARYQRRMARCRKGSANRRKAKQKVARAHRKIRNARADFLHKTTTRIVRANDVIAIEDLNVSGMIKNRALAKRISDAAWGEFRRMLEYKAARAGRTLAVVDRWYPSSKTCSHCGHLLDRLDLSTRAWRCPSCRTRHDRDVNAAKNILAAGRVAAGQPPGEACGADIRRQGSSLPQSAMKQE

SEQ ID NO: 10071 - protein, 333 aa, Shimazuella sp.
VNHELSLVYSWIKNCGSKARKKSLVNAEKAFRRYLQKIAGKPRFKKKHAQTVKLYFPKNNPKDLEIERHRIKLPTLGWVRLKEKGYLPIQETVSSCTIEQKANRFYVSVLFSSISGKKQKEWKAKRVSDGIGIDLGIKDFAITSQGQVFGNINKTSIIKRTEKRLKRVQRALSRQYEFKKKRGGKPATKNGSNIAKNILRIQKLHQRLARMRDAYRAWVVSVIAKTKPAFITIERLNVQGMKKNRHLSKSISDQGFYDFKRKLGNACRKMGIELREVAMFYPSSKLCSQCGIKKVKLSLSDRVFSCEHCGQNIDRDHNAAINLMQARKYVLLT

SEQ ID NO: 10072 - protein, 387 aa, Escherichia sp.
VKRLQAFKFQLRPGGQQEREMRRFAGACRFVFNRALARQNENHEAGNKYIPYGKMASWLVEWKNATETQWLKDSPSQPLQQSLKDLERAYKNFFRKRAAFPRFKKRGQNDAFRYPQGVKLDQENSRIFLPKLGWMRYRNSRQVTGVVKNVTVSQSCGKWYISIQTESEVSTPVHPSASMVGLDAGVAKLATLSDGTVFEPVNSFQKNQKTLARLQRQLSRKVKFSNNWQKQKRKIQRLHSCIANIRRDYLHKVTTTVSKNHAMIVIEDLKVSNMSKSAAGTVSQPGRNVRAKSGLNRSILDQGWYEMRRQLEYKQLWRGGQVLAVPPAYTSQRCACCGHTAKENRLSQSKFRCQVCGYTANADVNGARNILAAGHAVLACGGCQQTG

SEQ ID NO: 10073 - protein, 427 aa, unknown
  TnpB Polypeptide
MWYHNSMETQRTITMLLPNDDDLRATLAAFRTVQNTVTATAFHDGKPLRAVELQRVVYAEMKGHLSSQMTITALRLVAGAYASAKRNYARRVRAEAKRKARCEAKGWTYKPRQIKAVGICHLERPAAMFLVGVRGRDADIRADGTLSIWTVAGRKRLPYNVPTALRPLFDAAKEIDSVTVIERKGRLYGRVALTLEAPAPKGIMPVGVDLNETNALVAVDADGRELFISGKATKVRNCRTMQATKRVQRKLETKKAEGKETQGVRRVLKRLSGRRRRRTDDFARVAAKQLVAWAPTDAVLVFEDLQIEQPARQLTRGRALRRRLSLWQRGAIRQAVVNKAQLARLALAFVNPAYTSQQCSRCGLLGKRKRHAFTCPQCGHAQHADINAAINIRRRYVQSRLDGELSTSPEALPLVGEGKLLLSSGSR

SEQ ID NO: 10074 - protein, 415 aa, Rhodopila sp.
MMQVERHFTKGNAELIRLCELSKELYNRCNFFMRKAWYTPTPEKYRQLPDLNILINKVRDLECFKNLHNTKTAKQTVRKCLSDWGTYKKSLAAYRQYPHKFVKCPKPPHYKERMAQVIYYNETIKGGQTGKPLTQLTATNDCFSIPCTKAYKQVVITPKHFGFMIEVQYETNEQVASIPATKLDKPKPDKDKVCCIDVGVNTLAAITSDQHKPILVNGRIVKSINQWYNKNPSKNRLRKRYFRLENYFHHVSKLIIDNCQNLGIGRIIIGKNDYWKQELRMRKPQKQMFQQIPFLNLFEKIKYKAAMVGIEVVFTEEAYTSKASFLDHDPLPAYGEVPPEFSGKRKHRGLYLTFKPIHADVNGSLNIGRKVIGDKVYETFLDRRIAAMPVVINPLRKRNGEGFVVDGSNQEIAVF

SEQ ID NO: 10075 - protein, 380 aa, unknown
  TnpB Polypeptide
VRKAFQYRMYPSKAQARKLAATRETCRRWYNDLLAERKTAYEERKETIGKYEQLRRVKDHKASNPWAAEVHSHVLQVVVTDLDNAFQAFFRRVKAGQTAGYPRFRGGNRFDSFGFKEYGNGFKIDGRRLRVSGIGRIAVRWHRPIEGTIKTLRLIKKASGWYACFSVECTPHALPPTGRDVGVDVGITSLITTSDGARVPPQNWYRHEQKKLRVLQRRVSRRTKGGKNRRKAVVQVQRQHERIANQRKDFLNKLAHSLIQQYDRIAVENLRITNMVKNRHLAKSILDAGWGYFVARVHAKAAEAARVVVEVDPANTSKMCSGCGHVFENLRLKDRWIDCGCGLSLDRDHNAAINILKRGGQLRWGISTPLGVLPQEAAPL

SEQ ID NO: 10076 - protein, 500 aa, Hydrococcus sp.
MQVAWKFKLLPNSTQSKTLTLWQQRIRAIVNVCLADRIDSYNQTFVLGEFCDLRSQGIATPLTCSVNKSASLGCPWKINNSELRRGTGAFNPRRSAYEMHSSLSTQWRSDKPWYKEVSADVLQQAIRNLDKAFQNFFSGKTKFPRFKRTNDINIEFKPGTVRIKENRIVFPVLGAMRFFVSRSITENFVVRTVTISSQADGWYVSVLLRDETIPDFPIKSENELQTVVAVDVGVRKIATLSNGETIPNPKIYRQLERRLKIRQRRLSRTKSRSQNRAKQINRVSRTHQQIRRQREDLQWKIAKKIATTADVIAFEALNIKGMKARCKPKRDPVTGKYLRNNQSSKSQLNKAISDAAWHSLKLKTTHQAAKLGNWVIDVNPRCSSQECHQCGYVSPKSRNGEKFICEACSYYEDADVNAAKNLAVRAQNQLGIATLRVVSPKVTPKPELTGEAAARSLNSFKENGGYKETSLTLVGEPGNLVSVKYVQLSLFSLTQEWETG

SEQ ID NO: 10077 - protein, 229 aa, unknown
  TnpB Polypeptide
MILGHTIELAPNNKQATYFNKACGVARLTYNWALAEWQKQYQADKNYRDEYQANGTKTQAPKPLKTKLKQLQRLSKQLSRKQKGSNNREKAKTKLSRLHYKISNIRKDFLHKLTTNLVKQFDVICIENLNVKGMVKNHKLSCAISDLGFYEFKRQLIYKANMQGKTVKEVDRFYPSSKTCSSCGFVMAKENLTLATRLWTCPNCKASHDRDVNASLNILNKADKVLTLS

SEQ ID NO: 10078 - protein, 215 aa, Bartonella sp.
VGTLCFAYNWALREWQQQYEAWKKDSNLPKPNNYTLRRQFNSLKREQFPWIMEVTKNAPQMAIIQLAVAFKNFFSERSRYATFRKKGVHDRFTLTNDQIQLQGSKIRIAKLGWVRLREQLRFQGKLLSAIISRKADRWFVSLSVETDNQVSLSENQAIVGLDLGINALATLSTGETIGSVKPYKTLLNRLRCLSRRLSLKKKSSSNRHKEKQKLG

SEQ ID NO: 10079 - protein, 460 aa, Streptomyces sp.
MADRISGEEARRIKRELLGVGDRAKHRGRAVAPLKGLVREAGTQQRVYRFRFYPTADQAAQLTQTFGACRWVYNEGLALRAKAWEEHRVPLGFAETCRALTGWKRVRETAWLKETSSTVLQQSLRHLDAAFSRFFRGSAKHPQRKSRHRSKDSATYVRTGFRWMEDPQRPGTASVTLAKQTTPLDIRWSRPLPPGRLPVKLNVTRDRAGRFFLSVLVEEVIAPLPEVFLPGGREPRAVGLDLGLAALVTTDDGEKLPHPRLLAKYEKQLASLQRDLHRKKKGSKNREKVRERIARLYASIGDVRRDRLDQFTTRLVRENQVLVVEDLPIANLLRAAKGGGRRRKAALNRSITDAAWGELLRQLRYKCAWYGRTLVIVDRFFPSTRRCSACHAKGPRLDVSVRAWTCAECGAAHDRDENAAVNLRDEGMRLYWAVAVALPPGRVPPSVIKASELLDLVPAA

SEQ ID NO: 10080 - protein, 386 aa, unknown
  TnpB Polypeptide
MAIKIQHSIRTLRLKVKPEGYAWLNKAAIEVNDVWNYANATSYKAARPFAGPPKWLTAYDLDKLTAGATEHFERIGSDTIQRINAEFATRRKQCKKAKLRWRPIRGSRRALGWIPFKATQLKRKGKSLRFSGKAFRVFEQELLENARWKCGCFAQDSVGDWWLCVSVEHAVAQVPASKDAVGLDLCLKDTVATSDGDKLEAGHFYRFSEQRIASAQRRGHKRQAKRLHRSAARRRKDALHKFSRRIVNGYQRIVVGDVSSVKLAKTRMAKSVLDAGWGMLKTQLQYKGQQAGRCVDIVSERNTTRTCSNCKALTGPSGLDMLAVRTWACRECGVTHDRDVNAARNILSAGRLPPSVGGNEPSLSVAEPSQTYSRCEAGISAMKAAA

SEQ ID NO: 10081 - protein, 416 aa, Symploca sp.
MQHQAVKVRLYPTIEQQQILSQHFGCARWWWNHALNTCIETYKATGKGLSQSALNKFLPKLKKQQETEWLSECYSQVLQATTLNLVTAYKNFFEGRARYPRFKAKKNKQSIQYPQSVKVVDNCLKFPGRVGLVKAKLHRLIKGKIKTVTISMTPSGKYYASVLMELEEDKPAPCTDGKVAGIDLGLKDFAIVNDGVKTSKYANPKHLAKHERNLKRKQRKLARKEKGSNSRNKARKLVARVNERVSNVRQDYLHKLSRKLVDDNQVIVVETLNTKGMVCASRMLRKRNHKLAKSISDVGWGIFVNFLSYKLDLEGKVLVEIDRWFPSSKLCSNCHYQVSEMPAYVRIWTCPNCGTHHDRDENAAVNIRAEGIRILSVLGTRTAADGGDVSPKRGRKSKLTQSPTKSEAYADSTSTG

SEQ ID NO: 10082 - protein, 507 aa, unknown
  TnpB Polypeptide
MDEALLNYSYALQYLLDSTHDRIRRIRSEAERAGRGRMRRVAALIDKKELQELNKFGVEPFKDSLKMDYASWVIGYLTIAKRQNNAGYPLLTLNEEQLNDAVFNAIERYDCDEMGRRRLDIFLSRVYGKYNKRKSILFGRYAKTRDYCLLYDRENDRYYAKLYLMNVKSKKRRGNIKRGATQLEYIAPGEREYLPEDNRQERYIIVPLETGKWQRKMLKHCREHPEMLKTARLTAKGKDYYILINIKCCESPQIKPVTTLGVCRSLKGQLRYSIALDQPFSGKLLYPSGGKPDKQLYHALANDICALALRHKAQVVAYKLGEKADNIAFEGKLPLLTAGEYNKVIAMSAYKLELAGLPAPILVSPRGVFHTCPECGRNTQRNRISEKEFMCSSCGYYGCIEEVGSRNLSNILESYRKRKVTFRVRKGKGDTLVFYNEILGIKFETQDTVMAQGQFYQFLQEHISDMREAPLFFRGLTTEQQKKRYSLYQKLFNMEDVRLSVAVVREM

SEQ ID NO: 10083 - protein, 704 aa, unknown
  TnpB Polypeptide
MTFFIIKMSDKKPPDKKDFKGDERVIKTTLNSLVRSDKDLKENFGKSFTKKKFVAYLLGYVKTFSQSVHKGSILFNIFLLKSLKENSANLEHLDTNHVSNTFLSVGITKIKKNFVTDLWNTFFKGHPFQKNTPQEISSRAFDNYGTIYDANFHNSLWMNYKKRQSLYIKKWLKEKKLEYLTYFVQAQINNWPYTPRDDEQAKKEKNLDEDLIEFIDEQRKELGIIDDTRVSEVWLKHQDRKIVLVKYYYKILSYLEQFDDVKLFTLAPITKVTNMYMPINSWTLYHVLQHFLEENKILQKDTKLSVIIQKTVKENQDKMWNYVFDVDKIKKMKKSSNFTFLIDIDGFGTSIHYRKTKKNPSLTEKQLDTIERNKLKTKDMRVIAIDPGRTNLIYGVEMIKKGEVNKYELKKSTYYQSCGMNKEAAWKKRRMDEISKEELIYREHSLKTTNVETYMKFIKNYLKVYNVLWKTKTSKKWLGWKFRTYCLKNKFIDTMINKMVTNDPEVNIGKEKKKVVIAYGAAKFNPTGKGERAGPTSWLSKQFSKKVKTVFIDEFNTTKKCCDCKKTLCAVKDEITKGEIVRRKNIRLIKRKKTQFIVEDEKVDKDKAHKLKKVEIRGLRWCSTCRIYKNRDLNAAMNILKVFNHKVDNLSDLKSRPDYLSRSSKNEKTEDKMFSLLELRKRNAKAKNKKGAEHFLTTYAINIV

SEQ ID NO: 10084 - protein, 471 aa, unknown
  TnpB Polypeptide
VPGVVPFSSLDEPVGRLPTVFTTLGTKSSKSRGKGKHASRDENKRTVRLRLLPNGSQERKLRRIADAVAKLWNGLNYARLVQFRELGRVDFEGTEHEFYHKYKDRLGVNAGQVINLNNWMWDSFFELSRLYRQGKLPRFMGKPSPPGFWKDKLLGKRELRILVRNDRYYLEPINNGEGYLVLKDWGLKIKYAGRIKWSGKQGTLVIKLEGNRWFAYVPITVGEKPAKSNPKGYVRGIYEKIQIENPRGSNKAFIDVGLNNLFAVVFNHTDVAILIKGSTIKSEYYYWKREIKTYQAIRDWLRNHGFESWRKYHTYYLHAIYKQRERLRHYYRTAIRFLAETLHEMGIDEVFVGYPYLVSQDNGNEYNTNIWWYAKVINWLGEVLEEYGIRLNIVNEYGTSRQCSICNMEHEKGRVKRGLYVCETTGIEINADINAARNIAKRAGYEVPMPRKILSYIVTTNGVKPITPKRE

SEQ ID NO: 10085 - protein, 214 aa, Thermococcus sp.
MKRTVTVKLQPSKTQEKALFELSDISAKAWNRANHLRRQEYFQGNPIDFLKTQKTVYEEFKREIGSVTVQQICRKNAEAWRSFFSLLRKKRNGELPNWFKPKPPNYLKEDGRRKALIVLRNDQYRIEGNKLVLKGLGKFKRLEIQFKGRIHLKGKRGRLEITYDEVKRKWYAHISVTVKEKLEGGEWIEFPRTPKGNLSAWGLTPRHWRGGGQP

SEQ ID NO: 10086 - protein, 501 aa, unknown
  TnpB Polypeptide
MERVRRAVAVEIEGPPPELYAVEEPYRKIVEEVAAYVAERGRLEKEKYNELYRRFRKLYLLPSQLIQQAINQGVEIGKSFLKLKKDGRVHKPRPEVRRVSMRFAKNSWSYRKTATSAAPVKIAVSLPGGRREVWIKPHRRFWFYWWRVLRKEAELASTLILKRRRNKWYAVFVFDLAPEREPPAEVVAFDVNENTVAVAKVTLLSTVDAVARWNRQYLDPAVYSIRTDFGRLAKRYEAVRNAKLEELKRKYPYAGRDEDERRQNVTDTREFRKFVRRLREGRRKEGRVRHVAREVAKSPAVIITEELGKNPQEEMIGVEEKRVKKRELRHRIKQTPFRKLIRAVEDKAREVGSAVVYVSSYRNSKVCPIHFAKLEDGGDWHVLRCPHGHAVDRDAAAALNMLWKITPEGVVKTVWWDVKEVRKRLKKGIVPKEAVGKANPIAPRPIIHAAWASLKTLKASPQWPAVLARAAPMTPAREADEGRARAPPHGRPPPGRRSDLC

SEQ ID NO: 10087 - protein, 382 aa, unknown
  TnpB Polypeptide
MLSRATVNLRLPDGKEPLETMDIYQAGLQHCIDVAWDRRIRNNVRLHPFVYRHLRETGLPAQLSVACIKQACGMVKRAKSKPTVSNRSMRVNPPRSFSYKRGILSLSTIAGRKKFNVPFPSYASEYSDWEINESLVWIDRRNRIFFGMCLSKDIPVNMRSAQHKRILGIDVGIKHLAVTSDCRFYGSVVPKMVRHQKLVSALQSKGTKSAKRHLKRLSGRWTRFMQSENHRISREIVDGLKEGDIVSMENLKGIRSDKGRRFNRTLHSWAFSQLQNFIKYKALRAGCPVVYIAPSYTSKSCRRCGEIGTRNQGFFKCDNCGYSCNSDLNAAFNIKLRVKPLALALGLDVNEPIVATDDASFRVLEHCESPDVSYKPTSFIGG

SEQ ID NO: 10088 - protein, 533 aa, unknown
  TnpB Polypeptide
VKATFETRIEDESSYPALEAIAAHLGHVERHLFVDRYVRGRSLAELKREYIARFGITARQFNAVAGDLQNRVRASRNAAEQRIRRLRERISHLRRVIRKLHGRVAKEKNRDRRRRLQFLLHQKKRHLLNVEQRLHSLQKELVRPTPAVCFGSRRMFRKQFHLHANGYRHHDEWLADWRVARSSGFLCLGSKDEKGGNQTATLLPGGVLRLRVPPALEGEYGRWILIPVCFPYGQDTIDRALLVGQPITLRFVRRKRKGKWVWYVQATTERPGKPILTRREFGALGVDYNPGIVAAGRIDRHGNPTATRHVVAETKGKSRAQREAILGDVVADIVAWAKGEGVPIVIEKLDFTRKKAALREMRPELARMLSRFDTRRFYDLLVSRAAREGVEVLEVDPAYTSVIGWVKFGSGYHLSVHAAAAVAIARRGLGFGEALSSREPGRREGSASPLPVRNRGEHVWSAWERVRRRLRACKARGRRPGGGRMRGIPLSAAAPTRSRSEPGGKGLPRDGPPSGPGALTPAQTVGSAVRPAS

SEQ ID NO: 10089 - protein, 400 aa, unknown
  TnpB Polypeptide
MKALSQHMRKLTKEQFLALRELCRHSNSLYNCAVYCIRHHFEQTNSYIGYAKLYHELKTNEHYVAMPSKMAQQTLRLADKDMRSFFALLNRKRKGEYGADVRIPRYKKPNSFFNLILPNDQISLRNGMLKLTRDIKIPFTHDIKGTIKQLVIRPSLNGTHFTMLIQYEEATTSKIDLNKNNFLSIDLGIDNLAACASNVGPSFLLNGKPLKSYNRLYNKKIATMKSELERTAKKKWSKSMERLSLKRNRWINNYFNQSIALLMKYCLKYDIGTVVMGYNAEWKQEVNLGRMKNQKFMSIPHFLFKRKLQHKCESLEIKFIQQEESYTSKASFLDKDLMKNGIEFSGKRIKRGLYCSKDGRVLNADINGALNIARKVFPDFSEKGIEALIVGPMKLSPLTQ

SEQ ID NO: 10090 - protein, 553 aa, unknown
  TnpB Polypeptide
LLFDVLAHGGDGGAAGRSGQVGPGPQPVRTPVVLYQVGELLPQPAGRDALQAVDEAGDRDGGREVHQQVDVAGFAVELDQFGPEAGAYRPHDLLHAVQVPGGEHRVPVLGDENQVRVQEEHAMPASAYVAVSVYETNYNWYVQLRYNYRLYPGPGQRSALARAFGCARVVFNDGLAARQAAYEAGLAYPDDAALSARLTAVKGTPERAWLGEVSAVVLQQSLADLNTAYRRFFESRKALREWKAAGRKGPRPREVGLPRFKSRKDRRQAARFTANSRFRVLPNGRLRLPKIGDVPVRWSRPLPCAPSSVTVIMDCAGRYFASFAVETGHEPLPPAERVAGIDLGLAHFAILSDGTKIASPRFLRRAEKKLRRAQRNLSRKQDGSRNRDQARIKVARAHARVADARREFHHQLSTALIRDNQAVAVEDLCVKGLARTRLARSVHDAGWSAFTGMLEYKARRYGREFHRIGRFEPTSQVCSACGAKDGPKPLHVRTWQCQACGVWLDRDINAAVNVAKAAGLAVTACRAQVRPGPTVPAQRSETGTHPKPRREAA

SEQ ID NO: 10091 - protein, 318 aa, unknown
  TnpB Polypeptide
MCYTHYGEIFKAMEQVLTLVVKLDTSAEQSSQLRETALAFANACTWINENVDSKLANRNSVQAVCYKDVKERFGLVANHVVRACARVAANRQTAKQTSSKVKKCYKPTSFDCDQHTFSFREKDWTVSVSTTGKRLRLPLRASNYHRGKLMGRKPTSAQICQHRDGSWYAHIQLKSTPPAPMETENVIGVDFGRRDIAKTSDNQGWNGDNLQQKRDKYFRTRQSLQKKASQGTRSTRRRCRQILKRLSGREKRFQKWVNHNVSSAIIEQAKQTRSLIAIEDLTGIRESTNRQPRNWRATKSLHYSVSLVWVVYPATLRM

SEQ ID NO: 10092 - protein, 459 aa, unknown
  TnpB Polypeptide
  misc_feature (375)..(459): Xaa can be any naturally occurring amino acid
MRRFSSAMRYAYQRLLEGEKRKDLKKDLPELFNINTRYSDDAILLAQSTITSCKERGQNPKKVIFGSRKVFEQLKKNHLTGKKRRQLKKKWKESRQGNLYSRGDKSKQGNLNLRFEWIDNGLYLRINTGDRQYVYAKVIRDVKREKDKWIEFIFMLENAYRYGAWFPYSVNLKIKNGNVYAFISIEEKHPPITIKRNNGIIGIDVNAYPFHLALAFTNKDGNLEKYQRIDLNELLESNSEKRQYLEWQIAHEIIKIAKEERKAIAIENLQKLPKGKRGDGFPKLRRKLQKWSYKRLLDKIEVLAKRNGIELIKVNPAYTSVIGKLKYAPQYNIDKDIAGAFVIARRGLGFIEKLPKNYKELLNDTDFLSYTIAKXXXXXXXXXXXXXXXXXXXXXXXXXXXXXXXXXXXXXXXXXXXXXXXXXXXXXXXXXXXXXXXXXXXXXXXXXXXXXXXXXXXXX

SEQ ID NO: 10093 - protein, 250 aa, unknown
  TnpB Polypeptide
MVPHATHYTVEVIYERAVTPAKVYPAWVAGIDLGVNNLAALTSNQPGFMPLLVNGRPLKALNQFYNKQRARYQALLPEGQYTSHRLDTLADKRKRQVDSYLHVASRRIVDCLVHRGIGALVIGKNDGWKQEVTLGKRNNQAFVFLPHARFIQMLTYKAQLVGIQVIVTEESYTSKCSFLDSESLEHQEQYAGKRVKRGLFVTATGRQMNADVNGSYNMIVKVVPDAFGKGRVGVVVHPVRLNLANHRLVS

SEQ ID NO: 10094 - protein, 433 aa, unknown
  TnpB Polypeptide
MKRTNAFTLAPTDEHERLLFEVSLGCAKLWNELTYRRRQAYSSYQPIEWYREDLYQKYAPLVGSATAQQIINKNNEAWRSFLALKRLEKEGKLPSHIKSVKPPRYWKDKDGKYKRIIILRNDCYSIQDDKIKMPKGLGVPFKGRLKWFGRQGRAEIVYDDLSGEWRVFQAVEVQPSLKPLGFKTCHIDLGVINLATVWMEGWKQPIAFSGRNLLHDWWYWTRRIAKHQSRTKRVNSKYSSKRLRRLYRIRGRRFRHAINTMIRNMVKDLYELGVSNIVVGNLKHIRENSGENSHRTNFIVHNFWSFNHIVQRIKDVAEEYGIKVKEVSEHKTSTKCVRCGSENTDHAGRLFKCLNCGLEAHRDCVGVLNMANLHNGGTAIGVVTHPILLKWEGMKWEAKRLMNNQLMKTLEVRIPQASTVGVSDGKVNNSPRR

SEQ ID NO: 10095 - protein, 333 aa, Moorea sp.
LAVVSYPARWVKQVKGQLKFTLGKQIKAWFGIDNFMLPMPSNIDFGSIKEYRFVPRNGCLYIEFVYERSTPEQVQKTDKVLGIDPGVNNWLTCVSTTGKSFILDGRKVKSQNQRYNKRVASLKKGKEQSYWDDELASLTEKRNIQMRDNINKGARFIVNWCLRNEVSTIVFGWNQRNKDSINIGKRNNQNFVQIPTAKLKNRIEQLCIEHGIKFVETEESYTSKASFLDRDFLPTLGGKPVREACPSGLGWKETGRRIRRGLYRSGKGELINSDCNGAANILRKVATQLEFSLAEVGRAVLNLPQRYKLDSLSRSYREAASRSAVSTREVISV

SEQ ID NO: 10096 - protein, 389 aa, unknown
  TnpB Polypeptide
VDKLIHTTAGNKARYPEFDKKFKTMPGYTRRMVIADALGMVRSYKENHAKWEALKPAERGAEPTLGIPPRYELTFYDQERRMSRLSKGQIGLKLYDGKKWDWYYFQISASDAAYLSRIGKSRKMLSPTVQKIRGRYEVRFCFEERKELVQNDRKLDYKILAVDLGINAAASWCVMTADGTVHAKGVIHLTCEEDRLNRMINRKRQYQQAGKKSSCVYRWVKEANRQLSIATAKALTSIASEQKVDCIVFEHLDGKGKIHGGRYRERIHMWRKNDVQARVTGMAHRLGMRISRVCAWGTSKLAFDGSGQVDRHSVYHFEHGKKVYNYSLCRFQNGKIYNCDLSAAQNIGARFFLREYERAGAMGMFPGTPQRTLNTLIMFVKNGLPEKAV

SEQ ID NO: 10097 - protein, 418 aa, unknown
  TnpB Polypeptide
IGNALDQDREVIKTIKIRLYPDSESARAFQEMMEAYCDACNAMSEYMFSKDVHMGKLILNTAMYHHVREVYGLKSQMAQSAARTVKARYKAVDEFMKEHPYRFRDKEGVWHTAKRTVEWLKKPIYFSKPQVDLVHRQDYSFTDHGTLLSINTLGKRRKVPFTVPEYFQGFLDDGWKLGTAHILCRDGKWFLHIPATAPACAEAFDPAAVRQVVGIDRGLRFLAVTYDGDGKCLFLDGKAVMDKRDRFRKVRAGLQSKGTKSAKRVLKRISGRENRWMADVNHRVSKTLVQKYGAGTLFVVEDLTDASFDQRSLSKGDARWRDKFRSWAFFQFGQFLTYKADAAGSFVLSVPEDYTSQRCPKCGRIRKENRKHKIHEYICDHCGYRSNDDRIGAMNIHALGMRYAGGDPEPHFTKPEMK

SEQ ID NO: 10098 - protein, 464 aa, unknown
  TnpB Polypeptide
MKSNRVEQHIIKKNNPDWKIIDELCFKSKNIYNYANYIIRQIFIISNLLKDDKEITQEQHDFLSFVNENVDKYNVNKQSNLEKKQLKGKSLDKEHTLLEYFNKDHRSCNYNFIDFITKQSEPFKDLGSNSSQQTLKVLDKNWKSFFVSIRDWSKHPEKYLGRPKLPKYKHKEKGRKELILTNIQSKIVDGYMSFSFNPLKPLNNKYKTNVNGKLMQTRFIPRNDNYVMEIVYEIDLPESNNISSERIVGIDIGVNNFATVSNNIGMQPFIINGKPLKSINQYFNKGKSKMQSDLKLKHDRCWSNKLKNFTDKRNNKIDDYIHKASKKIVDWCALNKIDTVVVGRNKNWKQESIMSKKVNQNFVGIPHYKFIQKLAYKCENVGIKLIETEESYTSGTSFLDGEQPNKDNYNKGRRIYRGLFKSNTGKLINADLNGSYQIMKKVFPDVFVNGIEGAGSHPIRLNVI

SEQ ID NO: 10099 - protein, 414 aa, unknown
  TnpB Polypeptide
MLRSWNIVVRNDIRLLGMMSDSLSIYDQALYFQRQAYFETKEQGKIKTYSYNQLWEKVKTESKVAESKLDINIKQYVVRQVAKNWLSWIKATQSYKQNPSKFNGRPKMPNYLYKTKEYNIIYIDSSRFRKKDPETNSFTIPCSGYKIFVPRQIKLKDVRQVTIQKYYDKIKINIIYEDREVIRNNYDSNSCIGIDLGVNNLCAITSNDKPFSYVVNGRPLKSMNQFYNKRLVEYKSELEKCNNKHTSKRIQRLTKKRNAKVNHYLHCASKQLVDFCVRNGVEKIIIGHNKGWKQEVNIGRRNNQNFVQIPFNTLIEQIKYKALKYTDLVVETVEESYTSKVDHIVLEDMKHHEKYMGKRTKRGLFVSSTGKILNADINGSIGMMRKGNVISDAQLMCLRDRGDVVSPKVFKLNL

SEQ ID NO: 10100 - protein, 486 aa, Escherichia sp.
  misc_feature (92)..(175): Xaa can be any naturally occurring amino acid
VKRLQAFKFQLRPGDQQECEMRRFAGACRFVFNRALALQNENHEAGNKYIPYGKMASWLVEWKNATETQWLKDSPSQPLQQSLKDLERAYKXXXXXXXXXXXXXXXXXXXXXXXXXXXXXXXXXXXXXXXXXXXXXXXXXXXXXXXXXXXXXXXXXXXXXXXXXXXXXXXXXXXXNFFRKRAAFPRFKKRGQNDAFRYPQGVKLDQENSRIFLPKLGWMRYRNSRQVTGVVKNVTVSQSCGKWYISIQTESEVSTPVHPSASMVGLDAGVAKLATLSDGTVFEPVNSFQKNQKTLARLQRQLSRKVKFSNNWQKQKRKIQRLHSRIANIRRDYLHKVTTTVSKNHAMIVIEDLKVSNMSKSAAGTVSQPGRNVRAKSGLNRSILDQGWYEMRRQLEYKQLWRGGQVLAVPPAYTSQRYACCGHTAKENRLSQSQFRCQVCGYTANADVNGARNILAAGHAVLACGEMVQSGRPLKQEPTEMIQATA

SEQ ID NO: 10101 - protein, 300 aa, unknown
  TnpB Polypeptide
VNPARLPKNLLKSQQQVQAEADRVWCGVERCLFGNGKELHFKKLMDFDTIGGKSNKNGARFDLDAMHVNWLGLSLKCYLPKSENSLSYVWESLKGKISYCNIKRLMFSSGWRYYAEIVVSGAAPTRVSIGTSTMGIDPGVSTIAGVSEDACVLEELAPNAIQYEKKIQKISQRMDRSRRISNPNKYNEDGTINRSNRDPWKYSKNYVKMCRLLKSLYRKKHAYIVDSHRELCNKLITIARYFPVEKMHFQALQKRAKETKRQEKKTEVKQKDGTVKVIRKYKRKKRLYTPRMLFLIDYVN

SEQ ID NO: 10102 - protein, 332 aa, unknown
  TnpB Polypeptide
MQIISSYGVELRKQNIPIRQTLEIYRSAVSYLIGIYVQVWEELAEIPDAKRRFNAAEHLVHTTKKNHACFDFDIRFPKMPSYLRRSAIQHALGTVSSYKTRLDLWEKTDGKSGKPKLVYENHAMPVFYRDVMYREGAEGKDEAYLKLYDGHDWKWSCVRLDHTDMEYLRKCWSGKKASAPTLEKRHQKYFLRFSYKEEVTLTKTPVKEQIICSVDLGINTDAVCTIMRADGTVLGRRFIDHPSEKDRMYRTLGRIRRSQREHGSAQTQGRWAYTKRLNTELGKKTAGAIVRYAEENHADVIVFEYLEMQGKISGKKKPETAPVEKAGYPKTL

SEQ ID NO: 10103 - protein, 351 aa, Thiobaca sp.
MIQTQLKLRLNVTQETLLNGWLFMLTGVWNWAIRKIENDAKGEVYYSKQTFQNLLAGHGQKIGIPSHTLQGMLLMAHTAWSRCFKKLGGKPRLKGIRNKLNSIPFPDPLRTIEGNRVKLPGIGSLRFHQQDIPSGKIKCARLVKRASGWYLCLFIDAERAPIVSTGDGAIGIDPGFIDLLTLSDGEKVTHPRELQRSLERLGQAQRGINRKLTARLHERIKNQRKDRNHKLSLRLVQENAVIVFSKDNTQGMARTFGKSVASSAHAQLRAMLAYKSPTGGTQYLEVDSRYSTRICSACGCLSGPTGLAGLSVRKWVCSGCGTPHDRDQNAAINTLMAGVGTTLEWETRHAA

SEQ ID NO: 10104 - protein, 419 aa, unknown
  TnpB Polypeptide
VGGDGSNLTGKLNFSTKNKGKCRIDRETINMLKAYKFLIKPKKEQIEMFEKHFGCIRFVYNWGLNEKTKTYQETGETVSSHKLITTLPILKEENPWLKEINSQCIQMALRSLDNAYTRFFREKKGFPKFKSKYNPKQSFQCPQSCSVDFDKGTLNLPKIKNIKTVFHRRFKGIIKTVTISRVPSGKYYVSILVEDGKKLPTKAKLERLNAVGIDMGLKDFVVTSDGDKIENPKYLRKSEKRLAIRQRKLSRKKKGSNNRNKQRKKVAKLHEKIANQRKDFLHKVSHQIVHKNHGTICVEDLCVKGMVKNKKLAKSISDVGWGMFYGFLKYKSEWYGKNFLDIGRFEPSSKMCSSCGNIKSNLKLSDREWTCVKCETKHDRDINASINIKNMAFTNQNIIRCIGLEQPESTQVDTVAIAT

SEQ ID NO: 10105 - protein, 408 aa, unknown
  TnpB Polypeptide
VDVNVTMQIQRAYKTEIAPNNVQRTLLLKHSGAARFAYNWALGRIKEKVSTPNAMVLHKEWNIWKKENAKWWTCVSKCAAQEALRDLQKAFQNFFDKRAKFPTFKSKHNGIGSFRLTGTIKVEDQRIQLPRLGWLKLKESGYIPQDAHILSATVSESAGRWYVSVLVKEEIAQTELRQDTLGIDLGIKTLATCSDGTSYANPKALAKYEEKLKRLQRKLSRQQKTSNRRKETKNKIATVWAKIRYIRTDVIQKATTDIVKTKQCQTIALEDLHIRGMVKCHNLAKSVSDAAMRQFRTTLEYKQAWAGGDIKLVDRWYPSSKTCSACGYVKSKLNLSERTFACEDCGIVMDRDLNASINLKAYTASSAGINGRGDAKVHKLAIVWVSVSEATTKQKIKINVSKAITRFL

SEQ ID NO: 10106 - protein, 388 aa, unknown
  TnpB Polypeptide
MISRAHKIKLKPNKAQAVMLSKTAGTARYAYNWALAETYKGWKETGKSPSVYELANRWTAEKPEWASETARTSQTRAILNTKSSYKKFIENLKAGVYAGKQVVHPSFKRKGVHDSFYVDNAHAKLCGKHIKLPKVGSVRMRESLRYSDCKIMSYTISCEAGEWYASVQVEMDEEVRSSSNSFVGVDVGCKSLAVASDGTECKTPGMLKDLERQLKRKQRLLARKAKGSKNRVKARFAVARAYQRIRNVKQDAVHKFTAAIAKNHGVVVIEDLDVKSMQENADKRTRKGVHNSCMSEVHRQLMYKCNSYIKVDRYFPSSKTCSNCGFHKADLLLGDRTFVCPSCGLTINRDLNAALNLLHEGIRIYTEGHSGSACGEVDGTSVKQEVLL

SEQ ID NO: 10107 - protein, 456 aa, unknown
  TnpB Polypeptide
LWSAGNVTPSADTGHVTGHSTTTVVVTRAFSYVIDPTPAQISMLRSHVGGSRFAYNTLLALVKDNWDDNRAKKDAGIEVAKEDWIDTGHFGLLYLWSEHRDEAAPWWAENGSSTYNDATLRLAKAFTNFHKGRAKFPNFKRKGQGGSVRIMGPAVHLADSHHVRVARIGEIKTYESTRKLYRHLERGTGKIVAATLTERGGKWTISFTVEITQTIPAPRAPERIIGIDLGITTLYTGATPDGEHVLEVENPRHYVRAEKKLAHAQRITSRRQGPKKGVAPSNRWKKANGRVQQTHAGVANARKNLIHETTTMLAKNYDVIVIEDLNVAGMVKNRALAKHIEDAAWGEFARQLEYKTTWYGSTLVRVDRFYPSSKTCSQCRTVKATLSLDQRTYQCGACGLVLGRDLNAATNLARQGLPGTSSGTGRGGEVRPAQQNLVATAHPDEASTETPTFVGA

SEQ ID NO: 10108 - protein, 373 aa, Sutterella sp.
MIIHRAHKIELIVNDKQELYLKKAVGCARFAFNWALNEWIEEYEAYKKDPTQPKPNQYRIRRKLNAIKREQFPWMMEVTKCAVQMAIIQLGQAFANFWKNPEHFKYPKFKKKYVSDSFTISNDLFEVKGSRIRIPKLGWVRMREPLRFKEAKILWATVSRRGKRWYVSLSCELTDLSHLKPAKNQGTVGVDLGVKSLAVLSNHKKFEALQPLKKSLSKLRRLQRKLARSQKGSKNRIKLVLAIGDLHRKIFNFRQNALHQLTNYLTTHFSRIVIEDLNVSGMLKNGKLARCIADVGFYEFRRQLMYKAEQRGCEVIVADRFYASSKTCGYCGEKNEQLRLSDRRWKCPYCGAEIKDRDFNAAINLKRYTERPG

SEQ ID NO: 10109 - protein, 263 aa, Escherichia sp.
MIVIEDLKVSNMSKSAAGTVSQPGRNVRAKSGLNRSILDQGWYEMPLKDLERAYKNFFRKRAAFPRFKKRGQNDAFRYPQGVKLDQENSRIFLPKLGWMRYRNSRQVTGVVKNVTVSQSCGKWYISIQTESEVSTPVHPSASMIGLDAGVAKLATLSDGTVFGPVNSFQKNQKTLARLQRQLSRKVKFSNNWQKQKRKIQRLHSRIANIRRDYLHKVTTTVSKNHAMIVIEDLKVSNMSKSAAGTVSQPGRTFDASRHNPVAA

SEQ ID NO: 10110 - protein, 475 aa, unknown
  TnpB Polypeptide
MHRNITYRLIPGTRFKARRLSATAGACRWVWNWALAVNRLRYKRFLTEQRLMLRGAQPAGCGTAAMQDAVRKGATHLRPPVTFFSLGKAFTRIRRQVPWLQALPFAPVRHVLKYQADAFKRAFADPNAGFPQFKAQRGDDSFTIPQDVKIRNDSITGIARLWVPKIGWCILKRSGGNPYQGCEPVQAVIKRGLGRSPHRGRWYCTVCYNVGDRPVTDNGLIVGIDRNIGQVAIADGSVLDEHDAGAESPMVRLREQAQAAGIRVMQDREGLILHAPEVERLEARKRHYQRMMARRKKGSNRHAVARHRCARTSRRLAMARDNWHHKVSRAIADGYGTVCVEALNTRAMTSSAKGTAMNHGRKVKAKAGLNRSILATGWAGLREKLAYKVAGVIEVRAAYTSQRCSTCGHVAKENRRTQSRFKCVSCGYQGNADINAALNILALGTGVSGRGARAGPAHSKPSIDRPNLAAAALSR

SEQ ID NO: 10111 - protein, 427 aa, unknown
  TnpB Polypeptide
MLTDKEHKRHLKQFHKLSDRHILAAETDMSSSDIQKVVKLSNKIRKAGNELVGLMRKNYNQLMRTKRYRKLLFLYGNSKDKAKRKTYAKQLNEMQKAYNITWEYCRTSMIPIGKKYGVDAVFALTKAEDIWRGMEKCLYGNGNILHFSKYGDLSCIRAKQMNRGISISVTDNKLHFKLGRMVFGIQINDRFQQDEVDAVLSYLAEFDILDDRAVNTLIKDGYCIDTYRPCYATLVPRMIRGKYRVYLHLTIEGKAKPKYDRFGSPRHKYGKGMIGADIGTQTVAYTSDTEVGLKNLSERGNSIQTSERKERLLHRAMDRSRRATNPQNYNDDGTVKKGRKTWIYSNHYKKLKSKHSELCRINAINRQLAINEDANHLRSLGDVFITEPKNAGKLMKRAKETTVNSKGKFNKKKRFGKSIKNRCPSGF

SEQ ID NO: 10112 - protein, 534 aa, unknown
  TnpB Polypeptide
MDITRKKFDVLYNFAVRIRNHKNKVSQHVNEHLLHYLDCRKFQFLKEIREQFKGVISSSFYDRLYTDVFTCYQNKFDAIQRKLKFEVAEFNGFEFYQRDSKNHKKGELKRVLLKKKQTPLSNCLTYLARYGNEGIINYIKANIDKCDAKKREFYNNILRCCEKFGFERLYNLALSKRNRIVQRYSEFPIEFKSLSFGGRSRKKQIIDFNKRFGLKINSFISLSGFDRKSFDIPVKYHKGYHGNMRDYRKDNPEYEYVITFDEKNHQVKVNLCKDGERYIPEPNGKTIGIDVNCKHNLFSLSNETTYDYDRKLVNDYCKLLRDIDLVKSKDKSYSIGKRKQRKLDKLKEKVIKFEQQTISTMCKDIKAQGFGHVVMENLDNGFGKCYVTDNDNKNINYNRKVSFLGLSSLKQEVEHITRKYDIAVSTVHSSYTSKMCPMCGCINDGNRLTQEEFECVECGHKDNADFNAAKNIRNRVLVTVLRESLLKQLDNGAYEPCSLNRSKVKDVLLSFRRTLQEFVRSECIESGLTTFGYI

SEQ ID NO: 10113 - protein, 489 aa, Okeania sp.
MATITYCQALPEPLDELNALGMTKFQAFLVAYSPIIRKAVCETVQNLLSGSLFNKSTWNTYVQKAYQINKRHANGVIALAKGQVESAKECRQNHIKQLGGKLKSALDWLKKSEKKLKDARKFYQKKNWQNSQTGCGFPLSCSVKYKDTNWQNLRFQIHHKKRYIYHLTKKIEHLKLAKIQVKVPFNQVFIVGSKTESYGNQVCQWDGKTIRFRVPYCLEKRFGKYVETQLGEFKRKINRMPIDGSKTWHFYYKQNKWVAAVQFTPKPVNQSSRPISYGAIGLDINPGSIGWAYCDADGNLREHGQIPLEMGLPKNKQDGQIVKACLQIQELADKYACPVVVENLDFGKKKEQLREEGKKYSRMLSSWGYNQFCQKLEAILSNRGIELIKVNPAYSSLIGLVKYVRMYGLANDEAAALVMARRGMRLSERLPRSLTAYPLVKKGKHVWSAWNQLNKVIKSWDGIKCRHDYYSISVSNWESLVMPQCEPFG

SEQ ID NO: 10114 - protein, 387 aa, Blautia sp.
MNILTRHTDWLVKTQELYNQILEFYYNLYLDTFQDGKPGSMEALRTLEKLTIAGRDRQPVKYPLPWAKVPLYFRRAAINSAIAAANSYLSREKQKIRSGSFTESVTCYKGMYRDFEGDAITLKIWNGDKWIWHRIKLRGNTIPEEGQMLSPSIVLKKTGPELHIPWKICVKDGRTARERMADAEKICAVTFTNQDALAVCCIVNQNGEKEHALFIRGGAAYAHRCRQITDKIRKSEASGSKNSSTIPNSRYWMKLKNLNDFYSHCISRQVINYTVRQGAKIIILPEFEKEYSRILMTKAGNYSPIHLSTAIREKIKYKAWQEGIVVLELQQHKNSSVCAACGAPLHRKGQEFICENRHQGNYYLNASWNLGLKCIRGFQPKESGTSS

SEQ ID NO: 10115 - protein, 438 aa, unknown
  TnpB Polypeptide
MKRTNQFVVRPRSEQDRELLHELLDASASLWNELTYERRQQFFDGESVWDTEDYRKKYVGVLGSATAQQLIRKNKSAWQSFFALKEEGEECSPPGYWGNEDNGREQRTYIRNDQYTLETGDRSRLEIPVGQDLKDEYGLGYHERLRLEVAGEPKWDGEQGRLELYYDERSDQFRAVQPVTVDNSRQDSPLADETAALDIGANNIVACTTTTGTQLLYEGRDLFEQFRETTHRIAELQSQLDDQRRTSKRIDRLYRRRTRRRDHAQNALARDLIERLYDKGVSTVYVGNLTDVLETHWSVRTNEKIHNFWAFRKFTDRLACTAEEYGISVEVRSEAWTSQTCPNCGSTEDTTRHHDTLTCTCGYEGHADLTASETFLRRHQNSESSDWQTRHSVSRQRHEAVARPMARPVCLKWDDHSWSEQSHSHRPNEEHTNRSIHG

SEQ ID NO: 10116 - protein, 397 aa, unknown
  TnpB Polypeptide
MQRAIVLQTDATKHKTEVLNEFIDVAICEYNRLLSERNDCNTFMQFHHKTLSTCKANTSFNVQVRCSLIRDAWKKKTDKVKGLTVKFNIPRNCKTFSTKSKFFIDFGMYPRKRIAVPIKQNRNYQRFQDLIKNGWICKTFGLTSNLQIVAYLSKEKEIRQRKNILGIDVNAKHFAISVVSPQGKVLYQTYFGKRIWAKRKKIMNRRALLQSLNATKKLKTLRNRERDFVKTNLGQIVREIIKIATKYDADISIEKLKRFNPKGKRFNKTVMRIPFYKFKQILEQRCFDNDIRLNVVSSWHTSKWCSHCGAVGNGHNSANYSLFKCKCGQVVNSDRKASLAIAVKSLLERMPISNPDISIQISNRRVPVNGLLRSDDSLSCAVHDSQPLGMPTCFSRG

SEQ ID NO: 10117 - protein, 412 aa, Alcaligenaceae sp.
MKRLQAFKYELMPNGEQQRAMRRFAESCRFVFNKALALQQARYAEGKKTLSYTDLCKQLTEWRKSDETPWLVETHSQPLQQALKDLERAYKNFFEKRADFPRFKKKGQSDRFRYPQGSKLDQGNSRIFLPKLGWVRYRNSREVLGVVKNVTVSSKQGKWFVSIQTEREVETPIHPSTAIVGIDMGITRFATLSDGSYFAPLNRFKRQEKALAKAQRALSRKQKFSNNWKKAKATVQKIHARIGNARRDYLHKATATISQNHAIVCIEDLSVRNMSKSASGTIVTPRKNVKAKSGLNKAILDQGWFEFRRQLDYKLAWLGGELLAVPPRNTSRTCPCCGHIAKENRRSQARFDCVGCGFEENADLVGAINVLRAGHAQLACAETSPAVKGVGPRTHRSESGDGRLNAVGIPVL

SEQ ID NO: 10118 - protein, 396 aa, Microcoleus sp.
MQLVEKHVIKPSYRFYREADRLSWLYKNLYNCANYIYCQNFFANEQTNHWAADRAFKTTSDYKALPAKVAKSTLGLLLKAWTRYHVAVRNYREDPTKFKAAPKIPDYQDSKERKRAGWRYVVVLDSQAACKKVLKKVYAHPSGTNIWLPSKVTSILEIWIVPKVGCYIVEVVYEKLEQPLQVNQRVAAIDLGLNNLATLIYNIAGLVPKIYDGRALKSTNQYCNRVSSILKSLLPATQKNSKKVANLWHKRNCKVDYYLHITSSAIIKELVNHQIGLLVVGGNQDLKDGINPGKVNPQKFACIPHRRLVQMLQYKGQIAEIQVLLVGESYTSKCSALDLEPIQQKSEYIGCRVKRGLFRTQSGQLINAAVSGSLNEDWPKSSRRWIDPKFDRGFCS

SEQ ID NO: 10119 - protein, 404 aa, Microcoleus sp.
MLNLTYEFKLKPTTAQIAIFEDWLEQCRRVYNYALAERKHWFQSRSCQINACSIRSEFIIPAETKRPTYASQCKSLTAARANIPALGSVQVHVLQQTLRRLEKAFVSMWEQKHGFPRFKKAGAMRSFVFPEMGVNPVQGVQVKLPKIGWVKLHQSRPIPDGATIKQARIVRRASGWYVMLTLQWDVSVSAVMPHGEALGIDVGLTNFIATSNGLLVKRHKFFVDAECKLKLLQKRVSRKKLGSNNWKKGQKKVAKLHEYIANCRKDWHWKLAHQLCEDAGMIFVEDLNLVGLSRAMLGKHCLDASWGQFFTILQQVCFKHGVYFQKVSAHKTSQICSSCGVETGKKELSERTHSCSSCGYTTDRDVAAAQVVLIRGLAAVGHTVKMLSEGKLVGVPVKKESSCL

SEQ ID NO: 10120 - protein, 442 aa, Kitasatospora sp.
VIEMQLRYSFRVYPGTGQCMALARAFGCVRVVFNDALRVRETARAAGLPFVSSGELSKQLTAAKKTPERAWLTEVSSVVLQQSLRDLDTAYKNFFDGLKGKRPRMGAPRFKSRKDSRQSIRFTANAGWKITPGGRLRLPKVGDVRVKWSRSLPSVPSTVTIVKDAAGRYFASFVVETETEALPETGSTVGIDLGLTHFAILSDGTKIDSPRFLRRAEKKLKKAQRDLSRKAEGSSNRAKARIKVARCHARTADARRDFHHQLSTKIIRENQAVAVEDLAVKGLARTRMAKSVHDAGWSAFVTMLEYKAAKFGRVFHRIGRFEPTSQVCSVCGVKDGPKPLSVREWTCGACGAVLDRDINAAVNVAKAAGLAASACGARVRPGIVPAQREETGTHPKPQPVTTSGQAGISVLQGGEDVNGTRTVSGPGRRTRTASPTTAWTAA

SEQ ID NO: 10121 - protein, 300 aa, Natrialba sp.
VEVPERVSKYDVLAVWLRTQKHEWPTCDALALQNRRHPDPLPPEIPDEAAIKEVIIKKETTGEWFVSFGLETDEADLPEKPDVDSLDTSNSVGVDLGILNYIHTSDGKIVGWLDLEDEYALLRREQRKLSTWFVREYDAVFVEDLDVKGMLEQSYNARNKQDAAWRQFISLLEYKADLYGCHVVQVEAAGTTKECASCGVETAKPIWIREHSCPSCGFECDRDANAVVRLRLTGSKIACDFATAVNVLQRGFSELGLGWPEDTPVETALPTDTHSVSAKRVIETGSPICSRARSARSHGP

SEQ ID NO: 10122 - protein, 183 aa, Natrialba sp.
MEYSHRYPAYPTQEGAVELQHHIDIHRQAYNYTLYEYENVDADDIGSAYKHHYRLPDWKDEFPVFSEVNSKALQRTVTRFYQNLAGLSEQKQNGRKVGKLKWKSPREFQSMTYSQSGFELKNTSGRRATLWLSKIGDIPIRYHRRFQTKQPSKKSSSRRRQLVSGSSPSASKPMKLIYPRNLT

SEQ ID NO: 10123 - protein, 169 aa, Okeania sp.
MILTGQFIRNSCLRYWMDNKDVKRNDLQKLCSVLAKDSNFPWVKKLNSQARQASAHRTWQSIQRFYKNCRLKLPGKKGDPKFNKFTRSIEYKSTGYKLSPDRKKIEFKDGFQAGVFELWTSRDLVWYSEQQISRVRVVRRADGYYHFLCGFNTPPSTRCSKLLGVRIPM

SEQ ID NO: 10124 - protein, 307 aa, Bacillus sp.
VFHYVLAKQELWMTTSTGKPIMFPVVTFPYGQKIIEKIITTQLQCKNKKKHGKPIAWSVEDYGAYYIVKCLVDVPENPHINYSKSDGVIGVDCNLEHFAWVNVTKDGNYKGSGSLRFSIMGKSTGQITKIIEAEAVRLVDLAGRYNKPIVIEKLDTTQSKTGDRYGNKRVNRMKSMFAYEKMTSALLSRADKRGVAVFQVNPAYTSIAGKMKYMRKFGISIHQSAAFTIGRRGLGYKEKVPQVLHSYIPKKDAHHWSHWHQLNNRLDIRTHHFYQLYDVDLPKEALQTERLHLFENEKKKLAKLFAS

SEQ ID NO: 10125 - protein, 541 aa, unknown
  TnpB Polypeptide
MVEKAYKFRLYPTPQQESLLRKTLGCVRLVYNKALAARTQAWYEHQERVGYKQTSAMLMNWKKQEDLDFLSEVSSVPLQQGLRHLQTAFTNFFGGRTKYPNFKKKRNGGSAEFTRSAFKWKDGQVYLAKCAEPLSIRWNRQLPLGCIPSKITLKFDPSARWFVSLRINDTKNLKLKPITRQVGIDLGINSLVTTIDREEVAYSKNIQKLHKKLRLAQKSLSRKRDTKFNNYQKARLKVVKIHALIKDSKLDYTYKLTTRLIRENQTIVVENLAAGNMVKKHKLARAISDANCGELVRQLEYKAEWYGRTLLYYPLSSQNHRVQGFEVPGDEHPRQQTLDKLPTGIEIDEIIGAAYRQIFNEQQTITAHQQLYLESQLRNGQITIKDFMRGLLLSDSFRRLIYDTNSNYRCVELCIQRVLGRPVYNNKEKLSWSIILATKGLQGFVNALLDSEEYEKHFGYNCVPYQRRRILPQRIKGELPFARMARYDSNYLKQLYRTGQLRKFSEVVDESVYVYRKALIFLSILSLAVLSITLVLVFSAK

SEQ ID NO: 10126 - protein, 460 aa, Mycobacteriaceae sp.
MAKFDVPEGWCVQAFRFTLDPTEDQARALARHFGARRKAYNWTVATLKTDIEAWRATGVATEKPSLRVLRKRWNTVKDEVCVNTETGAMWWPECSKEAYVDGIAGAVDAYWNWQQSRAGTRAGRRVGFPRFKKKGRDADRVCFTTGAMRVERDRRHLTLPVIGTVRTHENTRRIERLIAKGRARVLAISVRRNGTRLDASVRVLVQRPQQAGVALPESRVGVDVGVRRLATVATADGAVIERVENPRPLETALRELRHVSRARSRCVKGSRRHRERSTKLSRLHRRVNDVRTHHLHVLTTRLAKTHGRIVVEGLDAAGMLRQKGLPGARARRRGLSDAALGTPRRHLSYKTRWYGSQLVVADRWFPSSKTCHVCGHVQDIGWAEHWQCDGCSAPAHQRDDNAAINLARYEEPVSVVGPVGAAVKRGADRKTRPSRAGGHEARKGRSRNAAEQPRDGVRVA

SEQ ID NO: 10127 - protein, 268 aa, Thermoactinospora sp.
MTGACPGSSTPRPCPSGPCAGRSGRIPFACSQAQLDMLRRYRQGESDLVYRGGSWYLYATCDIPEPDPIEPDGFLGVDLGIANIATTDDGTVHVGKHLNQVRHRNRRLRRRLQAKGTKSAKRLLRKLSGREARFAADTNHRISKQIVTEAQRTCRGIALEDLGGIRERVRLRKPQRVTLHLWAFHQLGMFLAYKAARAGVPVVYVDPRYTSQRCSACGHIDKKNRPEQATFRCTSCGFAEHADINAARNIASRGAAGWAVSHAADDAA

SEQ ID NO: 10128 - protein, 341 aa, unknown
  TnpB Polypeptide
MTGVAGFYTLIMRTAYQYRLRPTSSQVALMDQWLDLLSKQYNYRLAERFAWWEHNRCDINACPLICHLPELKDNPGFYSQKRDLVKMKALFPQYRAVHSQVLQNCIERVHKAFDRWLKGDGNGKRAGKPRFKGVGRYRSFSFPPMKQDCICGQFIHLPKIGAVRIIQHRPLPDGFVIKTATITRKADGWYVTLSLQDSSVPVFTPDPPTLENTMGIDVGLDSFLVTDAGESVPVPQYYRKAELRLKRLQRALSRKRRGSNRRKKALKRLAKAHLSSQNCSRCGQRVPKAIQDRWHSCSHCGLELGRDHNAAINIKYRAVGHPVLFASAGRSPQAQETSFSR

SEQ ID NO: 10129 - protein, 392 aa, unknown
  TnpB Polypeptide
VNTTIKTYKFKLYRSKRNRKLYKQINAAGLTYNHCIALHKRYYRLYGIGLKKNRLQKHLTKLKKLSKFSYLKEFGSQAVQDVTDRIEFGYQKFFWKENKRPPKFRKVSKTKSFTLKQAGWKLDEENHTIIINEQKYRYHKSREVEGLIKTVTIKRDSLGDIYLFLACEVDQNTVMPRLGKSIGFDFGLKDTLLVAPTPEDDVDMPRFFEQNHRRLRKIQQKLSRKLDSNVERHVVRGKGRFPVYKRPLSECRNIQKGFREVAQLHKRIANQREAYHWHLAHELCSKYALICVENLNMRWMQKGHGRKVNDYGFAAFVKILEYVASRYGTSIVKVDKWFPSSQLCYDCGYQNKEVKNVRVREWVCPNCGEHHDRDRNAAKNILKEGLRIFETA

SEQ ID NO: 10130 - protein, 236 aa, unknown
  TnpB Polypeptide
MILNRAIRMRIYPDDEQRHKIDVTLSHCRYIYNKMLERNTVIYNRRKEHLNYYAMQNLLPEMKNYLPWLKEADSKALQYACRQLNAAFDRFFHKQGSYPRFHSKRGKQSYTTTHASVICVEPHRVKLPCLGWVRTPETRIPDGSICYVTVSLEADNRYYVSITYKKEVPDITPVVLKPENVLGLDYKSDGCIRIQMGIRRIYHISIGRRSASEQSCNAGSRRSRVPVRVNESLRTL

SEQ ID NO: 10131 - protein, 372 aa, unknown
  TnpB Polypeptide
MIRAHLIRYHKKGERKASLPGVSAKLNLAVCDTYFAPKAVRDDSDPLNVVVQVKTPTYGLTKISLRLPENSERFGDGKVCRPTIRLNSKGRVVFDVAIEHEVDTRQTKNVMGVDLGKVEPFVATVVDPRAKYRSAPYHANYKKRIGSLVKKKRQRRTLAAHLYERANLCEKHNRDFHAQVLRTEAKRVSAKATRIKHEISQCIASQVVGIAEKSDAHLSLENLSWLDSQGGRWPHAEIQHRIEKTAKRYGLKVVKVSAKDTSRTCSRCGGRVSNNSKTRVGACTVCGFSLNRDVSASREIALRATSQSSRSRERMRLLLRQRTLERSSAVTRQSKPVTVLGGIQGHTGTSNNCLEATLMMVRDNLDSRGFPT

SEQ ID NO: 10132 - protein, 183 aa, Lachnospiraceae sp.
MEQITVTAKIQISAADNDKVLLNETMSVYRDACNYVSDYVFRTHDLKQFSLNKALYAALRSRFGLKSQMAQSVFKTVIARYKTILENQDEWIRPSFKKPQYDLVWNRDYSLTQNCFSVNTLKGRVKLPYFAKGMSKYFDHAVYKFGTAKLVNKHGKYYLHIPVTYDVEESHISDICNIVCCHL

SEQ ID NO: 10133 - protein, 671 aa, Streptomyces sp.
VTAVQAAQRRKFRGKNKAPKWARPDEGIVSVMVLPLAVTDPADLDRLRKLFDAMWSIKRAVQRDARARIDGYWAARHERDRDGAKAVRQRLGLSREALERCAYKHLQAARHLKHHASKALAMHIADEVWNGVLRHLFADSTGKRHGRPKVGRWHDFTRIPGRARSHTTERKWETFRLVGTLHGHAMAYASGGRQALMQPRRMPKPTLPTGTVLTGKLTASGKPRMRKATWWDHTGPLAVVFASGPDSRRGDLVLPVRVPQGPKRWARVEHFLNSPALWHKVDLVRRRKASAPGGWVYEAHLMVLGPGYASPTVRRMREQAAALGRIGGVDGNVSNLSIVSLPTSLDPTDGAPASSEITLTEVEKARLEKQARNRRGRARALERSRRATNAAQYGLSKKQVRRAERRAAKGLKPKTVMVPGGRRAARSDGVPKQAFHRDQLSGSYRKTRARQTEAAASAVEHRRHRARDVARQIIAIHGPHLTVEDCDIRTWYRLWGKRLSQTTPGMLISALEAECEAAGGRLVRASTWSTALSQHCLCGERVKKSLRDREHKCAACGLVGKRDLVSAVLAAFVRLKDADDPKTAYLDTAQSRHTHIIFGQGLEEALRESTTPCQNTLPGAGRVAVPRQHGTSAHRTAGRRRRATPDETRPVRDHAGKPGHRPARSPQLTPG

SEQ ID NO: 10134 - protein, 523 aa, unknown
  TnpB Polypeptide
MVPGVNQMDVVRQAYRFALDPTPAQERALLRHAGARRWAFNHGVAVYRHIRVEYIRERAEAAAHADGGAAVVVAVRQPSFQDVNAAFNRWKTGRTEDLPEWWSITHPEPAPSWVGENSSQVYLWALYESRDALTRYFSSATGKQSGPRISFPRFASKKLSPVRFKVTGGNTTGARPIDSRHVRLPIIGAVRTHESTRKLLRRTANGTVTIKNATVTQRGGRWSIAFSCEVSRTARVRPAPTPRQRAGGTVGIDVGVKVLAALSTGELVPNPRTANTLRAKVTRIQRGIARCEKGSKRQQALYSRLARTKHAEANMRRANLHELTTRLVHSHAHVVLEDLAVKAMTSTARGSIAQPGKKVRQKAGLNRAILDASFGELRRQLTYKTSWYGAQLTVADRWAPTSKTCSACGWRHPSLTLADRRFHCGACGLQLDRDMNAARNLCQLAAADALPDGEPTAVVASTAGETQNARRANISPPAPPGVGGSRRRREKPAPNHLAGIRRATHDHKVVASTNPHGTPAPSP

SEQ ID NO: 10135 - protein, 243 aa, unknown
  TnpB Polypeptide
MTSITISKTPTGKYFVSVLVETDIHNQEKAVIKEKTTIGIDLGIKSFLVTSDGQTFDNPKYLKKAQSKLKYVQSKYSKKNGKRTKHRLALLHEKVANQRKDFLQKTSTMLIKNHDNIAIEDLNIKGMLKNHCLAGSISDVGWGMFIDMLEYKAEWYGNNILRIGRFDPSSKMCSCCGNVNKELTLADREWTCAKCNTKHDRDKNAAINIKNFALRNHLSVERTLKNQNELPTLLGVMTSEACI

SEQ ID NO: 10136 - protein, 395 aa, Halomonas sp.
MKRQLGLKYRLDPTPQQAARLRVLTGHARFVWNHALAECLAARERGERVPRYATMAGWITAWKRQEATAFLTEAYTDNLQQKLRDLDTAWRRHFTPGLAADAPRFKKKGKSRDAIRFVNFPKYCRLDHRRVKLPAGLGWVRFRQSRPVEGKITSCTVGLDGGHWHISFQVEIAVEAPPRHPATAAVGLDMGVAHFAVDSHGMPHAGRNSFRQLEQRIATAQRRLTHKTRFSQNWKKQKARIARLHQKAANVRRDILHKLSTTICQNHAMVAIEDLRVSNMTASAKGSLAAPGKRVKQKAGLNKAILDQGWFEFRRQITYKQAWRGGLLIAVPPHHTSQTCPECGYVEAANRLSRASFCCQACGHADHADVVGARNILAKAHEQLSGQALPVAPVK

SEQ ID NO: 10137 - protein, 559 aa, Streptomyces sp.
MAGGLRAVAPPFVVPGPAAVSIRTRLRVSSMDAELLTEVGGFLGSLAGGDLAVRSRPGAPSGSAAWAERKRTLTESSSARWAGSITRATEDQWALARRNQAAEMAWLRSQIVRIEARLACPLAPRGDRRTGAPRGYATKAEWHAKSRRLAALRDRLAAVRDDWEAGKVRVVRGGRRLVHLRHHLDDAGLSREQWAERWRAARMFLAADGESGKRCGNETIRVTGAGELSLRLPSRLAHLANAAHCRYVLDASVAFSHRSEEWQDRIAAHRAVAYRIHFDVPRGRWYLTASWKRAQMPAPPIEAATARGVVAVDMNADHLAAWQLDRHGNPVGGPRRYAYDLSGGGRHRDAQIRHALTRLLHHVRVRGATTIAVEDLDFADGKSREHYGRSRKFRALVSRFPTAAFRARLVSMAAEQGVTVIAVDPAYTSRWGAQHWQRSLTTPGRRITRHDAAAVAIGRRALGVPIRRRTAPPPHDRRDRAGHRTDQAGPATRRREGPRPRPPGPRTRSVSPARGAKAGDQRAQHHSGHAAEHALGPQEEGCTLARTGIWVCGSGPGTM

SEQ ID NO: 10138 - protein, 416 aa, Lachnoclostridium sp.
MYLTLKQQVKHLSKEEYNILRELCHTAKNLANEAIYNVRQYYFTEGEYLKYEKNYALLKNSPDYKMLNSNMAQQILKEVDGSFKSFFSLLKLAKKGRYSFKDCKLPHYLPKDGFTTLVIGFVRLDGNKLILPYSNMFRKMHKPVGIRIPPVLLGKKVKEIRIIPKANARFFEIQYIYEAGCIQRNLNKNNALALDLGVDNLVTAVSSGGRSFIIDGKRLKSVNQWFNKENARLQSIKDRQGGKRGTTNRQKILAGKRNRQVNDYMSKTAKKIIGYCITHNIGTLVIGYNETFQHNSGIGKHNNQNFVNIPFGKLRSKLEYLCELNGIVFVKQEESYTSKASFWDKDIIPVYNADNPQEYHFSGKRIKRGLYRTANGKLLNADVNGALNILRKSRVVSLDTLYSSGGVDTPVRIRVA

SEQ ID NO: 10139 - protein, 353 aa, Methanolobus sp.
MQHIGACRFTYNWALELKIKAYETEKKHLSRFELQEILVKDLKATHEWLKDVNSQSLLNSLINLESAFTKIFREKKGFPNFKSRKNPLQSFQIPQHYTVDFETNTIKLPKIKQPIKAKLHRKFEGKLKTVTVSRTPTGKFYISILVDNEEEMPDKQYFDDNSTIGIDVGIKDFAIFSNGEKIDNPKYLRNSMLRLKILQKRLSKKQKGSKNRANARLAVSKLHEKISNQRADFLHKTSSKIISENQAIVIESLNVSGMLKNHCLAQSISDVSWSMFFNQLEYKAEWYGKNLLKIGRFEPSTKICNYCGFHNKDLTLADREWQCPDCITIHDRDINAAINIKKFALQNQNLIII

SEQ ID NO: 10140 - protein, 385 aa, unknown
  TnpB Polypeptide
MSTRTIALTLRPTADERTALVRLQRRYNEACNYISQAAWDAQEFNKVRLQRLIYAEVRARFGLMAQHTIRAIAVVADSYKATREDVHTFRDDAAVCLDTPRLYRIVHNRASITTLDGRFKIQLGIGGHQRRMLKDAMKLAEADLVCDRKGRWRLLVSAHYADPPTMTVDGVLGVDLGRSDIAHTSEGEQWSGAHLTALRDRYARNRRDKQRKASKGTRTTRRRARRVQRRLSGREARFQRQVNHTISKRIVTRAAESAQAIACEDLTGIRARTNTQARGKVERRRSNSWAFAQLRAFLAYKCQAAGVPFILVNPCYTSQMCHRCLHMGDRTGKRFRCPACDWCGDADFNGARNIALLGVNVMRPRGLWLCCTDQPGCRAPESPRL

SEQ ID NO: 10141 - protein, 398 aa, Actinomadura sp.
VSRYRLQLTSAQEAGLLEHCGHARYVWNLAVEQHRHWTPGRKGAPGFAEQCRQLTEARAAFAWLRAGSVIVQQQALKDFAQAMANFFARTHGRPTWRKAGLHEGFRIVAVKPADVRRLSRKTGEVKIPKVGLVRFRWSRPVPDGVKSYRVTRDRAGRWHVAFAHVPAPISAPGNGAVVGVDRGVTVSAALSTGDQLRAPGLTVREAERLRRLQRRLARARRGSTRRVPLKAAIARLKAREADRRRDWVEQTTTRLAAGFDVIAVENLNVRAMTRSARGAVGAPGTGVAQKAGLNRAILANGWGRLVTRLQHKAPGRVVKVDPRYTSQTCHACGHRAPDNRKSQAVFRCVACGHRANADVNAACNIRTTAVGRTVAARGALQPTGGAVNREPQPDPLPA

SEQ ID NO: 10142 - protein, 370 aa, unknown
  TnpB Polypeptide
MKLIAQVKLQPNEEQAQSLKETVERANAAANFVSDIAWQQRTFRQYDLHKIVYYDVRSKFGLSAQMTVRIVAKVADAYKLDKKTKRTFKPLGSIAYDDRILSWNTEKRIVSLWTLGGRVKLTFVAGVRQLELLKTRHGEADLVYRNGEFFLYQTCDGDEPPAGDIDGFLGVDMGVVNIAVDSAGEVYQGKTIKAVRHRHRKLRSKLQAKGTKSSRRRLKKLAGKERRFATWTNHNISKRIVEKAKCTGQGIAIEELGGIRDRIQARRPQRATLHSWAFSQLRGFIEYKSKLAGIPVVAVDPRNTSRLCPCCGCIDKANRKTQASFLCIVCGHSGPADYIAAENIRRAAVTQPYVSDAQTIVQRQGQSPGF

SEQ ID NO: 10143 - protein, 393 aa, Thermococcus sp.
MPSETIKLTAKFKLKNPPEGLDDLFSTYREVVNYLITYAFENNITSFYRLKRETYKSLREEYRELPSHYLYTACQMATSIYKSYRKRKRKGKAKGRPVFKKSVIMLDDHLFKLDLEKGIIKLSTPNGRIPLEFYPAKYHERFREWKVGQAWLIKTPEGIFINVVFSKEVEVREPKAFVGVDLNENNVTLSLPNGEFVQIITHEREVRTAYYLKRRRIQRKIRAGRQRKGLLEKYGERERNRLNDLYHKLANKIVELAEKYGGIALEDLTEIRSSIRYSAEMNGRLHRWSFLKLQSIIEYKAKLKGVRVVFVNPAYTSSMCPVCGEKLSPNGCRVLKCPNCGFEADRDVVGSFNISVRALKMWGVTVPPESHPMKTGGWKPTRYEINTLHTING

SEQ ID NO: 10144 - protein, 401 aa, unknown
  TnpB Polypeptide
MPSNTGYSITTRRLRLCCGHPEWLRKTQDFYNEIESFYYDLLLAHEELGELGSQKTLRALEVLTIMGRDKQVPQNPLPWEKVPLYFRRAAINSAIAAAKSHISRQKSIPGRKAEKLHSAVTYYKGMYRDFSHKEITLKVWTGEQWKWMRCRLYGREFPAEAELMSPSVTFEKKYLMLHVPVKEFTADTATVKQRIQEGRKICAIQFTNGDVFAVGTVCDGMGKETDVKFWGGGKEYTHRCNQIRKKIEKARKSLGREKQPGENRKYWMHLKHLSEHYAHEISSQIIGFCLEKQVSLIVLPKYKKEYTDYVMIGSGNWSTMHLSSGIRSNLPYKAWKNGILVIETYAKGISETCSVCGAPVKTANRKTDEYTCENGHRGSRSLNSARNLSHKCILQFGKQVV

SEQ ID NO: 10145 - protein, 375 aa, unknown
  TnpB Polypeptide
LIERTFGVCRFVYNLALETKIEAYKRAGKNLSAFDLCYQLPGLKNDFPWIGEVDSQAVQAAIRKMETAYKNFFRGSGYPKFKKKSGYQSFSCPHNNRKVDFNAGTITVPKIKDIPAVICRTFEGEIKTVTISRTPTGKYYAAVLVDNKKELPDKPQVNPDKTIGIDLGIKSVAVTSDGRFFEPNRRLKNSLKRLQCLPRRASRKNKGSKNRKKANKRVALLHEKIVNQRTDYIHKVTTGLIRDNQAETFVMEDLNVAGMLKNRKLSQAISDVSFGEFKRQMQYKCDWYGKNLLFIGRFEPSSKTCSCCGAKNETLTLNDREWVCPSCGTLHDRDLNAANNIRQMGLNNYAGVGSPGEPVEKRRLRRSKKQESALV

SEQ ID NO: 10146 - protein, 382 aa, unknown
  TnpB Polypeptide
MESMLRAIKIRLYPNKQQEQALNKVLGCYRFVYNHMLARKQEAYNTDKTILNLCDLSKYFHHELRKDEQFLWLKEQNTQVMGQSIRQMLTAYDNFFKAKKGFPKFKSKKDKQSALFPLNAISKCNAFETRHITLVKSLKDIKFRCSDLYLNRLRKYKDNIKSATLSKTKSGNYFLSILIDIPQDEIVKFKKTNKQVGIDLGVKDFVITSDGKKFENKHFFKSDERKLKKLQLQLSKKKVGSNNFNKQRIKIAKVFELITNKKENYIHYIVNELLSSYDTIYMEDLNTSGMLKNHKLAKVIQEVGFFKFKEILKSKSIANDKKVVLINKFYPSSKTCNNCGYKNQGLKLSDRNWQCPECGEIHDRDLNAARNILREGKRISAA

SEQ ID NO: 10147 - protein, 298 aa, Escherichia sp.
VKRLQAFKFQLRPGGQQEREMRRFAGACRFVFNRALALQNENHEAGNKYIPYGKMASWLVEWKNATETQWLKDSPSQPLQQSLKGLERAYKNFFQKRAAFPRFKKRGQNDAFRYPQGVKLDQENSRIFLPKLGWMRYRNSRQVTGVVKNVTVSQSCGKWYISIQTESEVSTPVHPSASMVGLDAGVAKLATLSDGTVFEPVNSFQKNQKTPARLQRQLSRKVKFSNNWQKQKRKIQRLHSRLSQSKFRCQVCGYTANADVNGARNILAAGHAVLACGEMVQSGRPLKQEPTEMIQATA

SEQ ID NO: 10148 - protein, 408 aa, unknown
  TnpB Polypeptide
VLKAVKVRIYPSKEQQSHLAQAFGCARWVWNQSLATMSQTYKETGKGISALTMKKQIPLWKIEHEWLKECYSQCLQSSVLNLSQAFINFFDGRAAYPTFKKRHDKQSIQFPQNTKVLGNYQIKFPGNLGVVKAKIHRELVGSIKTVTVSKMPDGRYYASLLIDDGIDKPLVNEEGLAIGIDLGLLDFVVTSDGSKYQNPRHIKKHERNLKRKQRKLSRKRDKITNKRRKAKLAVAKVHARIARVREDFRHKLSRKIVDENQIIVVENLAVKNMVKNHNLAKSISDAGWGMFCTMLKYKAEALGKIYLEVGRFFPSSHLCSETLLPLPHMAMSVREFNCPHCGKRHDRDINAATNIKNEGLRILALGTSVTAPGGNVRPKQYGRKSTAVEAVAIELGSLQHIGTPIAGG

SEQ ID NO: 10149 - protein, 457 aa, Bacterium sp.
MMKSYKYRIYPGKSEEGKLENTLSMCRHLYNWSLRERNNNYQLWKQAKTIEKSINVEVDKKVIFSSPMGQFFYKRGNEAISVKTLTRIEGILGIMFSSTWENVPRNINYNYQQDNLSSLKEERPWFKSVHSQVLQDVLGRVDEAYEGFYNEGKGYPKYKKKGQYSSITYPQNIKFPKEDEKTPGKYKINVSKIGETKIVYHRHMPKVATIKTLTIEKDGGKWFACFSCELKHTHIEPEQDLSKSIGIDMGLIDFYYGSDGSHVEVPKYLRKSEKKLQNLQRRFNNEEKRTKRWYKLLKSLQKVHYKVRSQREDFLHKEANRLLKDFDIIIYEDLNIQGLKRRPKPKQDEGGKYLPNGASAKSGLNKSISDVSWGKFFEILKYKALVRGRTLKAIDPKYTSQICSQCGSMVEKSLSMRTHICPVCGLIIPRDYNSALYIKRLGLESLSKVTQEAPAIS

SEQ ID NO: 10150 - protein, 363 aa, unknown
  TnpB Polypeptide
MNTQTKTLSVRVKDRHAALLRQMAFETNQVFNLANEITSKAYHNASEVGPQIPCWLSVFDVQKRTAGIQTERGWHIGSATVQEVIATHGKSRQQFKRAKLRWRASSGLKRALGWIPFKSRAATWKNGQVKFAGHYFKVWDSYGLNKYQFRAGSFSEDARGRWYFNICVMVECQPTQGTTAVGIDLGLKDTATPSTGKKLAAGRFYRDLESKLGKAQRANKKSRTRAIHAKIKHRRKDALHKFSSALVKNHAAIFVGDVSSAKLIKTKMAKSVLDASWAMLKTQLKYKAIARSVVFEIVNEGYSTQMCSCCGTIPVSSPKGRADLGIREWTCVECGATHDRDINAAKNILAAGHRRLAVGIPVL

SEQ ID NO: 10151 - protein, 190 aa, unknown
  TnpB Polypeptide
MDKNFRSCFCCILGILNTSTGNVLKCKKGSNNRKRKKLEFERLCQNIVNKRSDFQWKLAHELCKRYDLICLEDLNLEGMTKRWGRKMSDLAHGDFVLKLEHVAKKYGVKVHKIDRFFPSSRLCTCGYKNDKLSLSDRIWTCPSCGAVHPRDLFAAENILRQGIAELGSGSKSPKHSQGRSHASNPTIPCK

SEQ ID NO: 10152 - protein, 391 aa, unknown
  TnpB Polypeptide
MEHECAYRYRCYPNATQRAILARTFGAARYVYNWALRLRTDAFYERGERIGYVESSARLTALKRTEGQEWMNEVSSVPMQQALRHLDTAYRNFFAGRTAYPTFRRKDGPQSAEYTTSAFKYRDGRITLAKMDAPLHIHWSRPLPVGSTPSTVTVTRDAAGRHFVSLRIKRDAMPLPVTDAAVGVDVGLTSLVTLSTGEKVGNPRFGERDAKRLAKAQRDLSRKTKGSRRREKAKRRVARIHARIADRRLDTLHKLSTRLIRENQTIAVESLAVKNMVKNHSLARAISDAGWGEFVRQLRYKAEWYGRTLVEIDRWYPSSKRCSCCGHVVDSLSLDVRRWSCPACGAEHDRDVNAAVNVAAAGQAVLARGEAVRPKRETVAAGLVEPRIPRF

SEQ ID NO: 10153 - protein, 418 aa, unknown
  TnpB Polypeptide
MITKRIIKGYKFPVLPTEEQKTFFAKSFGCSRFVFNYFLNARKEHYLKNGNGKGIGYNDTAKLLVELKKDKDTEWLNEVNSQSLQQSLRQLDVSYQRFFKKVSKFPSFKSKYDKQSFCVPQHFIFENGLLTIPKLKSIKVNQHRPFGENYEICFLTISKTKTNKYFVSFIVEEDFTSKVKKTNKSVGIDLGLINLMTFSDGKKIANPRISKKYRKKLAYQQRQHSKKTKKGKNRERARIELAKTYEKITNVKMDYAHKLTNDIVKNQDTVVMEDLSISNMMKDHKKARSIQEVSWYEIVRQLKYKSEWNDRKFIQVDRYFPSSKTCYDCGYINQSLKESDREWDCPICNIHHDRDYNASLNILKQGLSGLGTKSDSKQKCGEALRMVSGKTERVIKSTNHKTKNLKFGVGNPPALAGG

SEQ ID NO: 10154 - protein, 311 aa, Moorea sp.
MVRQWFGVSRYVFNKTIKLLQSGEIKANWKAIKTGILNDLPEWCKAVPYQIKSIGIKDACTAVREAKKKYKKTFQINRVRFRSRKNPVQSCYIPKSAVSDQGIYHTKLGKVCFAEPLPASICDCRLVSTNGKIYLSVPHTTAKKETENQGRVVAIDPGVRTFATFFGENSIGKIGTGDFSRIQRLGQHLDNLISKISKAKGRQKRRMKKAARRMVIKIQNLVNELHHKTAKFLTDNFDVILLPTFETSQMSKKASRKIRSKTARNMLTFAHYRFQEFLKHKAIEKNKVVVDVCEAYTSKTVSWTGGAARSY

SEQ ID NO: 10155 - protein, 305 aa, unknown
  TnpB Polypeptide
VLSFQSSNLNILRIVSPYHNLHLLQGGRLFIPKFKEGIKCRVHREIIGKIGKVTITKTSSGKYFVSVFTTEEYITPFEKSGKSVGVDLGLKNLLVTSEGETFKNNRYTKKYEHSLAKAQRHLSRKIKGSKGFENQKLKVALLHEKISNRRADYLHKCSISLIRRYDIICIEDLNVKGMMKNHHLAKSVSDASWSTFVNMLIYKAEWNNKRVVKVDRYFPSSQTCNVCGYVNKQTKDLSVREWECPECYTHHDRDVNAAINILNIGLNNNISAGTVDYTGGEEVRVNLLKDHSSVKPEAHNIKFRA

SEQ ID NO: 10156 - protein, 385 aa, unknown
  TnpB Polypeptide
MIMQRTIRVRLQPTLEQADALLATLRVHTECCNAVCTYGWQHRETNAVRLHHATYYPLREQFPALPAQLVIAAKERAREALRGAFGLAKRGKKASQPTSQLCPVRYDRRSYTPRPARGYVSLASVAGRLNVPYAVGKHAQGLLDQAVGYDSADLIYRKGQFWLHLVVTVPDVEFHPSGEVVGVDMGLARPVVCSHNHFMGKRRWKEIERRYFRLRRSLQRKGTRSAKRHLRKLAGKVNRFRRDCDHVLSRQIVDSVQPGTVIVVENLVGILSRTKQRGRESRRRLHSWSFAQLRGFLAYKAEAKGCIVVGVDPRHTSQACSRCGHTHRSNRRSQSRFLCRACGFELNADLNAARNIALKYLASGGMPVAGGPSSTGLSCRPAQAG

SEQ ID NO: 10157 - protein, 460 aa, Mycobacterium sp.
  misc_feature (366)..(366): Xaa can be any naturally occurring amino acid
MAKFEIPEGWMVQAFRFTLDPTAEQARALARHFGARRKAYNWTVATLKADIDAWQATGIQTAKPSLRVLRKRWNTVKNDVCVNIETGVVWWPECSKEAYADGIDGAVDAYWNWQNSRSGKRDGKRMGFPRFKKKGRDPDRVTFTTGAMRVEPDRRHLTLPVIGTVRTHENTRRVERLIAKGRSRVLAITVRRNGTRIDASVRVLVQRPQQPKVTDPGSRVGVDVGVRRLATVATADGAVLERVPNPRPLDAALNELRHVCRARSRCTKGSRRYRERTTEISRLHRRVNDVRTHHLHCLTTHLAKTHGRIVVEGLDAAGMLRQQGLSGARARRRGLSDAALGTPRRHLSYKTGWYGSQLVVADRWFXQDYPDHRRRQRRRGDQHGARRPVGLACHLRGHLFALIHWRGPLAPAVTQLTAGRARCSKVHRARTGRRRRRGRRRIGGCQLLRVEWSVVVSGVR

SEQ ID NO: 10158 - protein, 558 aa, Mycobacterium sp.
  misc_feature (368)..(478): Xaa can be any naturally occurring amino acid
  misc_feature (490)..(522): Xaa can be any naturally occurring amino acid
MPKFEVPDGWTVQAFRFTLDPTEDQAKALARHFGARRKAYNWTVATLKADIQAWHASGTVTAKPSLRVLRKRWNTVKDDVCVNTETGVAWWPECSKEAYADGIAGAVEAYWNWQTSRAGKRAGKRVGFPRFKRKGRDQDRVSFTTGAMRVEPDRRHLTLPVIGTVRTHENTRRIERLIKAGRARVLAISVRRNGTRLDASVRVLVQRPQQPKVVHPGSRVGVDVGVRRLATVATADGTAIEQVENPRPLGAALRELRHVCRARSRCTKGSRRYRERTTQISRLHRRVNDVRTHHLHVLTTRLAQTHGRIVVEGLDATEMLRQKGLPGARARRRGLSDAALGTPRRHLSYKTVWYGSALVVADRWFPSXXXXXXXXXXXXXXXXXXXXXXXXXXXXXXXXXXXXXXXXXXXXXXXXXXXXXXXXXXXXXXXXXXXXXXXXXXXXXXXXXXXXXXXXXXXXXXXXXXXXXXXXXXXXXXXSVEPTVRPGLAXXXXXXXXXXXXXXXXXXXXXXXXXXXXXXXXXGAPTTRHGTARARRRCRAGVCRRWSHCGVDGHAGAR

SEQ ID NO: 10159 - protein, 477 aa, Mycobacterium sp.
MSRHTTFRFCLNPTVEQYVLLSRHTGASRFAFNQCLQFVKTALTVRDSDSTARVPWTGFDLINAFNTWKITADAGRTFTVDGSGAAQLLVTGLAWRNQICQQVFEEAAVDLGNALKAWSDSCAGRRGGARVGFPKFKKKTRGTQSLRLRNKHSKGRPSAIRVGDHDRPRSITLPGLGQIAVHDDTRRLRRLLAKNRARILFATISNRGGRWWASLTVEAADFHAAHRHPTRDQSAAGDWVGIDRGLSSFAVAATSDGTEVVRTGRGPRALGTGMKVQRQLAKSLSRKEKGSRNRRIAAAKLARHHYRVANIRRHFLHQVSNAVVKTHDRLVIEDLNVSGMRRNRQLARAISDAGWAEFARMLGYKQAWRGGELIYADRWFPSSRLCSVCGERNATLTLADRTFVCPNGHEIDRDTNAATNLAQWGEAHTNASPEPRTPKHGGRAINARRRDGAGLRNRVGETDSDDAGTDVHPAPAA

SEQ ID NO: 10160 - protein, 450 aa, Nostoc sp.
MKQVLTVSCKIQVTPEQVAKIDATLQAFADACEYVNKTAPPTMVNELAMQSLVYHSVRALFGLSSQLAIHAVRRVSGNRKTAKQKGKPVTGFASTSATYDVRTFSFKEKDWTASLTLIGGRERFILAIGNYQRGLLKGQNPKTATLVKRNNGTYYLNIQLESEPPTPEDTDKVLGIDLGRTDIAVTSDGDKFSGQNITKIRDKYAGVRAQLQHKSAKGTRSSRRRCRQLQQRLSGKERRFQAHINHVTSYQIVKRAKDNNQMIALEELTGIRERTNTLPRSKRERRLSNSWSFYQLRQFMDYKAIKFGVKLILVDPRYTSQTCHNCLHIHPVKGESYRSGKKFVCGHCGWIGDADLNGAKNISAIAKSAVFSQGETRSRSVSKRSAMGSTQDEQLFKTGAVIVNQPRGSGLSCKLDVRISRKAEYVQLNLFDISRASESPHCTCTQVSGG

SEQ ID NO: 10161 - protein, 350 aa, Cyanobacteria sp.
MPPSTPNAFSRFFKGNGGYPKFKGNSRYSGWTYPCKAGWKAESNGKNGYLNITNLGKIQMRGQARTWGIPTTCTIMFRNGAWFASITVQCEPARSTSTDSVGIDLGCKDAVTLSTGEKIAKPDFIKEGQRQVKTASKKLRRKRSPNRNKKIKASRRWKRERSYVSHCQRKVARQREDWLHKITSHIVSSNSLVSSEKLNVKGMTAKAKKGKRKAQKSGLNRSILDVGFGMIGQMLDYKLAEAGGFYVESPTQKLKPTQRCAKCWELTPKTLADRTHICSNPNCNHTEDRDVNAAQVNITWAWGQELTSLDAESPSSTACGSMRQLGAKKRQKRQSVAEARYSGLSDSRPE

SEQ ID NO: 10162 - protein, 444 aa, unknown
  TnpB Polypeptide
MKLTSSYAMKLNGDLKALENSITIYRSALRFIIPIVNTHWDELKEYEFINQRMAHTEKLIHSTNENKAHYNFDDEFPKFPSYLRRSVINKALGIVSSYRSNLENWEPDRKGQAPKLSLTHYAYPAYYKGNLFRNFDPIRQTIELKVFKHGDWVYKVYQLKTSDCTYYQTYLTGKKQNVPIIQKKGRRFYATFSYEEDTTLIPEESINRICSVDLGLGTDATCSIIDKDGTVYARKFISFSKEHDRLETQLGRIKRNQKRGSRHNKTLWRKVAGISQDIADKTARAIFEFGNEHGADAYILEYLDFTGKNTVKRAHFWRYKRIYKVLCQKAHRNGLRVSRVNARNTSRLAFDGSGWSKRGREITPNTPYSLMQFTTGKIYNADLNASYNIGARYFIRSLFKTVTATQRLVLEAKVPQATKRSTCTLSHLINLRSELAVLTARTQA

SEQ ID NO: 10163 - protein, 416 aa, unknown
  TnpB Polypeptide
MYLTMKQQVKHLSKEEYHSIKELCHIAKNLANQAIYNVRQYYFTEGEYLNYEKNYSLLKTSDNYKMLNSNMAQQILKEVDGSFKSFFGLLKLAKKGKYAFKDCKLPHYLPKDGYATLVIGFVRLKGNKLILPFSNTYKKTHKAIEITIPPVLLDKKVKEIRIIPKANARFFEIQYIYEAECIQRNLNINNALALDLGINNLVTAVSSIGKSFIIDGRKLKSINQWYNKRNARLQSIKDKQHFGYGKTNKQKVLLRNRNNKVNDYMSKVARKIINYCILNDIGTLVVGYNETFQRNSNIGKANNQTFVNIPYGKLREKLEYLCKLNGITYVKQEESYTSKASFWDKDTIPVYNSDNPQNFAFSGKRIHRGMYQCANGKRINADVNGALNILRKSSVVDLTVLYGRGEVDTPVRIRVA

SEQ ID NO: 10164 - protein, 587 aa, unknown
  TnpB Polypeptide
MRASRARQPLTYDVRLPDSAQADALRLLDATRLVCNQALELLWPFLDEFGTKTTGPAWKHVGRYMGSPDFHGDRQWRCESEVVGRLLRQQAERKKAFELVAPLLSDGFIRPRSEKRPMGKNRPAIKEAITALQKSLDEDDTNFVALQNVTEQCCNFYFQQDRFPSSYEELQAVPRFQVGVLTYAGDDGREKGQAYRLALDLEAGVARFRFRYPDEQGVWRWRKVDTIIPLPECLQARLRDGELMAPTLREEQRANGERFAVLDFIVEVEKESLPAWEQVERVLGADWGVHSLLTATAVNAQHEQVGRPFFLDTGGFDGRQARTRRQIDELKKKVARFEQEQDALPKDHPKRAWYQERLALYHREVERCWRKYEQRNRALAHLASNVLLLLARVHGCSLLSMESLKTLKTTGRGRGVRGRWRNYCNNATIRGEIWRLLRYKCHLVGLRFQTCPPRGTSHTCPHCGKPAKTYRAPDQRGEAVKWGRWMWCEVCGFNGDRDYCASLNIARLGVAYLIQMKHTGKARSCSISDLRVKPVSYTGAGSALLLPPTGPRPARHVRGKMCYYPGWYGSAFLQSSQPQAVFLRLCG

SEQ ID NO: 10165 - protein, 548 aa, unknown
  TnpB Polypeptide
MVTLQCLLEFSSNKDREVLLDLMRRFSAATRYAYQRLLEGQERKEIKKNISRLFDINTRYSDDAIFLANSMIESCNERQKNPKKTIFGSRKLFEQLNKNHLNGSRKEELKTKWRESRQGNLYSRGDKSKQGNLNLRIERIDNERTDNGGIDNERMDNGVIDNELYLRINTGNKQYIYAKIVRSVKREKDKWIEFIYMLSQAQDTGEYFPYSVRLKLKNGKVYAFVSIEEKLPPITIRSDIGIIGIDINAYPFHLALAIAGKDGNLDRYKSISLNELLDAGSEKREYLEWHIAHKIVEIAIKENKAISMEDLEKLPKGKRGDGLPKLRNRLQKWVYKRLLKKIEITAIRNGIEVKKVNPAYTTLIGKLKYAPQYNIDKDIAGAYVIARRGLGFKEKLPENYKDLLNDTEFLVYSIARIEDNITNIKQKIKDEKNQYRKNKLKSTLAKLRKDLKTLKIHLLYIQSGKSKSSPQQPVNRRKEQVSGLPVGRQKRWQVLSTALTFCCLEKSFRDFSPLKRIIVSGDWTAMVSRLAPLPGNGTAVEVQDFTVF

SEQ ID NO: 10166 - protein, 361 aa, Peptoclostridium sp.
MYPNKKQQELINKTFGCCRFVYNKYLAKRIDVYKNNKETFTYKQCSSDLTNLKKELKWLKEPDKFSLQNALKDLDNAYKKFFKEKAGFPKFKSKKINRFSYKTNFTNGNIMYCGQHIKLPKLGMVKIRDKQVPQGRILNATISKEPSGRYYVSLCCTDVDIEAFENTNNHIGLDLGIKEFCISSCGDFIENPKYLKKSLNKLAKLQRELSRKTIGSLNRNKARLKVARLQEHIANQRNDFLQKLSTKLIKENDIICIEDLQVKNMIRNRKLSRLISDVSWSEFIRQLEYKANWHGRQIVKVGKFFASSQICNKCGYKNEEVKDLNIREWICPSCNETHDRDINASINILKEGLRLITIQNK

SEQ ID NO: 10167 - protein, 312 aa, unknown
  TnpB Polypeptide
VVDAYSTLRAHIRAGNLGDKDSKRRVKAESKPIAFRLDAAQPFDDRCLSWQVDTRTVSIRTVVGRLREVAFIGSPEQMSMLARHRKGESDLLYRDGCWFLIATCGLPDVPAADPAGGFVGVDVGIANIATTSDGTRHSGSTLNAHRHRQRRLRRRLQAKASKSAKRLLKARRRREARFAANTNHVISKSIVTEAIRTGRGIALEDLQGIRDRVRLRKPQRVTLHSWSFRQLGAFIGYKAARTGVALVYVDPAYTSQQCSHCGHVDKKNRPDQETFACTSCGFAEHADVNAARNIASRGVAGWAVSHAADDAA

SEQ ID NO: 10168 - protein, 162 aa, Lachnospiraceae sp.
LSRKTAAEITKYAAEYQADVIVFEYLEMQGKISGKKKQKLHLWRKRDIQKLCEHQAHRNGIRVSRVSARNTSRLACDGSGVVVRNPENYSLCTFRTGKQYNCDLSASYNIGSRYFIRELLKPLPETERSLLEAKVPAVKRRTSCVYADLRKLYVEVNNLKAA

SEQ ID NO: 10169 - protein, 399 aa, unknown
  TnpB Polypeptide
MNPYLVERKKGESYTGISIEYRMYLNVAQDKYFNNIGNKLRGAYNLLVKTYVKGKDYKDIIRKNNENRREIYAFLTHTEWLENVPSILIENVCNSFWASLDNFRKHKKRPPNFKKKSNLLAISSNSSSVSKRLLCDWDNNNFSFFTSLLKKNNISSKFKTIFHKKLYGAKVKAFTFNKKSDGKWYVSMSFDVTNVMELPEPVTSKETVGIDVGIKDMAITSDGNKFQVQIKRIKMLEDRISKIQKSISRKQLINKGNFNSNNYKRLLQRKGRLQMEINNLRKQVHQYTTTVLTKGKYGTIQMEDIKLGFMIKNKHLSRSTQRIGINSFTVNLKSVAKSKGISVNYVNPKNTSRTCCECGYINKSLKLSHREWVCPDCNTKHDRDINAAKNIKKSLEITK

SEQ ID NO: 10170 - protein, 479 aa, unknown
  TnpB Polypeptide
LIHNKDFSKNNTEEKLSVILDLDLISRDVALSPYWNERCEENQSRWWLPHRIVSQGLVFQSSNTSSNYQEVQSSFWKKTIQPINSTYPISYPISLPSATPFMESVLVKGTKKIRVYPKNKDYLLEVIRQQRRAYNLAIACFIEQDEHKELRQDPSYDKSSLRKTIREFVKSEVEERGETFLSSGCDEAVASAFLTRDAVIRNRKKGKKSGYSFKTAKNPRQSLIWQKLTKGFIEKQFYITEDYPEESLGKQSRVVYDKGRWFLLVQKQITTVGQGEIQARNIVAIDPGVRTFATTFSSHECVSYGDGFFEGRIMPLLLNMDDLYSLKAKAKNEQWKRHYEKRIHRLSNRVRDRIDDLQRRVCYDLVSSYDIILLPSFETAQMSDKTGRKIRSKTVRAMLGLGHYRFELMLSWMCKKYGKRLVVVNESYTSKTRSWDGSVKSNLGGSKTISDEDIIVDRDVNGARGIMLRALYGTHTVSK

SEQ ID NO: 10171 - protein, 391 aa, Sporosarcina sp.
MMEVHFMLIHKAFRFRIYPTKEQQMLIARTIGCSRFVFNHFLYKWEHTFKETGKGLSYGICSAELTQLKKQEDTIWLKEVDSIALQSSLKNLEDAFARFFNKQNAIPRFKSKNHPVQSYTTKQTNGNIAIVGHAIKLPKLGWVKLAKSREVDGRIMNATIRRTATGKYFVSVLVETVISELPETNSAVGIDVGLKDFAVLSDGTVYENLKFFRSMEKKLAKAERILSRRKESARKRKCLLSDAKNYQKQRIVVARIHETIANKRKDYLHKRSTEIIKNHDVIGIEDLQVVKLLKNPQLAKAFSDVSWSQFRFMLEYKAKWYGKHVVIVGKTFPSGQLCSGCGARNQDVKHLALREWDCPNCRCHHDRDLNASINLKNEAIRLRTAGTAGIA

SEQ ID NO: 10172 - protein, 221 aa, unknown
  TnpB Polypeptide
LLLQFRTDQQCSSKEERSNPNTTGGREIATYQAIRDLLRNAGLPTWREYHEKYLKAMYKRDERLRHLYITAIRFLADELYRRGVRKLYIGYPYMLSQDNDNEYITNIWWFRKIVLWIIDVFREYGIEVEIVSEDYTSRECSICGNKHKNGRKHRGLYICSKTGKKINADINAALNIARRLGYRIEISRKIESYLVTHSGVKPLNPLQRANTRDPSIENPAP

SEQ ID NO: 10173 - protein, 360 aa, unknown
  TnpB Polypeptide
MQLTETVKLYPNKYQTELIKATMSEYISTVNKLVFDAVNGRSITKMTTADVKVNLPSALCNQCIRDSKSIIRKYNKALRNSDTQVKLPVLKKMCCYINNQNFRISDDCIGFPVIINGKSKRISVKTKISKRQKSIFSSSKLGTMRIVVKGHDLVAQIVYDAKEDATSSNDNVMGVDLGIKCPAVSYCPDGSIKFYGNGRKNKYIRRHYNNLRKRFQKAKKPKAVVKINNKEQRIMKDIDHKLSREIVNTAKAHDVSVIKLERLQNIRSTTRTSRKNNHSLHTWSFYRLATFIEYKAKLAGIEVEYVDPAYTSQICPICGRIQHAKDRNYTCRCGFHTHRDLLGAINICNSTEYIGNRYTA

SEQ ID NO: 10174 - protein, 280 aa, Halanaerobiaceae sp.
LKILVRNDCYEIEDDDTIKLPLGRTGKIKGEPHWDGKQGRLEIVYDRLDDCWRAFQSVEVEPRHQPRGDKSAYVDLGVIYPVMTYIEGGETTIGYSGRPLLSDWWLYNKQIYKAKSQAKEENDRYTSERIKRLFRQRKRRFKDAVRKIAHDFIERCYQAGVDTIVMGDLTDIREKEKWNSKADSMVHNYWSHKYLTDRIRWTAENYGIETELINERGTSSKCPKCGSEREIKRGRLFKCKECSIEAHRDSVGALNIGLAQGGNIPAEVINRAMTRPEVIS

SEQ ID NO: 10175 - protein, 428 aa, unknown
  TnpB Polypeptide
MNNEERILKNMRIAKTKRETVERHKSMLVKTFEVKIQDNKISPLQREVLHRIFLEQKWYKNYILNWCEQSSENRISKFDTKINEITKKDKDMRDVPVQIRYLSAQSRQCLVSRMVSNIKTLKTLKDRNLQRCGKLKFSKEETIIDLKQYGVSHKILSSKRIRIAGLPKTFIVNGLKQFIDIPLIEYANARLIHRGTGYYVQFVCYVPKEKVQEKTDVELGIDFGCETSFTLSNGEKLPVKVPESERLKKCQKSMAHKRKGSKNWCRELLKVRKEYQRIVNRKNDLANKVVAKVCQYKTVVIQDEQIKAWHKGGHGKAVQYSVLGKVKAKLIQKDNVVVLNRFVPTTKLCTNCGIWHDELRLSDRVFRCSCGVNEDRDIHAAKNMLWFYKNGVGVGRTKFKRVEMESLVSSIIGRGSQVLSGKHEASVL

SEQ ID NO: 10176 - protein, 420 aa, unknown
  TnpB Polypeptide
MIGKCQKLKENEMHKAFKFRLLPTKEQEVLLAKHFGCSRFIYNHFLSEKQKHYLENKETLNYHTCAGHLVSKKKEEGFEWLKEVNSQSLQASLKNLENAYSNFFKKKSKFPRFKKKSDKNSFHIPQHVTLQDSSHIQIPKFKEGLKFVKHRELKGEIKSATISKNPSGKYYISILCVVEKATKYKKTGKSIGIDLGLKDFIVTSDGKKYNNPRFLKKHQVILARKQKHFSRKQKDSNRRNRARIKVAKVHEKITNSRNDMQHQVSIRLVKDYDLIAIEDLNVKGMVKNHKLAKAISDVAWSSFVSKLKYKAEWYGREVIVIDRFYPSSKTCSCCDNVKESLSLDERTWTCSKCNTIHDRDVNASKNILRRALAIQSSGTDDYRHGAKVRPDKEKSLKGIGNEVSKKKSVRNYTPKPLCLS

SEQ ID NO: 10177 - protein, 487 aa, unknown
  TnpB Polypeptide
MVTIQAKLIFDSSEDNQKVLDLMRRWSSCMRYAYKRLLEGHKRNELKRELQGIFNLNSRYVDDAIMKAKSVLNSCKERGENPKKVIFGGRQLFEKLKRRHINGDQYRKLQREWQEKRRGNLYSRGDRSKKGNLNTRIETDEDCTRLRINVGEKEYVYARIQPGWKIKDGTYIDRNQLLEAISISGQPYSAELKLKSGVVYAYFTVEEVFPKPAITRANGVIGIDTNAYPRHVAWVETDEHGQFLGYGRIPLEKLESGSFDKREYYRWQYAHEIVKIAKDKRKAIVIERLYIKDRGRRGDFSGRKSRRIRHYFGYRSLLERVKLLAKREGIEVIEVDPAYTSVIGILKYAPQFMVTKDVAAAYVVARRGLGLNERIPSNYMELLSCLDASSLEELKEYVIKTVKNVDLRKKQIKEIEYVMRMIQSPGSEPGRLPEPLDGTSEGSRSIGYNLWRVLRVAVVTPLSPDRVLRDMSVLKSILVSGQVGRPL

SEQ ID NO: 10178 - protein, 563 aa, unknown
  TnpB Polypeptide
VRRAIPQGVDADAPRATLRHLPTTHPQEVEPHDALPPLPFPRPPRHTHADEFDAAHGLPARCQFGTRLSPLLRRILEQEAGDQRSNEERTINNETLMLRAYKYRIYPTDEQKVMLAKTFGCCRYVYNWALEMRETLYWKHHTSVSEYDMNALVRSELREHAPWLTEVSSKAIEFTMADLYDGYDNYFEGRAEKPVKRRKHDRQHYHTRGSIKVNFKRGLLTIPGIKDIPCLFHRRFNTKECKIKQVGIELLKSGVYHASILVDDGKPVPTKALIDPDKTIGIDTGLKHYVVTSDGLTDEPMHYGKEQKRKMKLLQRRLSKKEIGSRQFRVLKRRIARLHQHIANKRRDHIHKLTHYLAYENQATTICVEDLNVKGMVKNKHLAYDLQDASIGEFYRQLEYKCKWAGKNYIKIDRFAPSSKTCSHCGYVYRQLTLKDREWTCPVCGTHHDRDFNAAVNIKHFGLSENKTVPLVRWAKPVEQSLMDDRSPASAAGPKKSCCCGSTRRVREDNQQPPLRNRKTSSSGRNRKSEGQRCSNGAPDTPMPQFLKSKPTTSRTTSEASGL

SEQ ID NO: 10179 - protein, 400 aa, unknown
  TnpB Polypeptide
LHSQPKQRDVLPYIRYLRMIAYKYKLYRTKQTKRLDAMLREACWVWNHALALQKRYYRMYGGYIDVVRMQKKWVQWFGKSSRHHSQTVQEVLQRLDKSYQRFFQHIQARPPKFKKADDFKSFVFKQGGYSLNGNVLTINKIKKRYKFSLSRPYVGVGAIKNVAVKRTPLGEYFMYLFIEAKPEPVGKTHNGASVGIDFGLKTYMTLSNGERIQSPRYLKQALGAKRTADRRLSRKQDGSNHRRAARLTKNRVEELITNRRDNWQWQLAHDLCRRFDTICIEDLQLTGMTSLWGRKMQDLAHGKFVRKLEYLAVKYGVKVQKVDRFFPSSKLCDCGHVHKDLSLHDREWTCPVCHRHHDRDLHAANNILRQGIASLGSPGKTREPGKVTVRGRKHPRIPRL

SEQ ID NO: 10180 - protein, 565 aa, unknown
  TnpB Polypeptide
VIVVCPRIAQAKKVSELTGGTHLPAKVQPTPGEVKMSCRVDVGPDFARHRAAVESVTLLFSLVDDAGGAEVAAPSGWSVTAAKFEVEWPVDPERANLVRSHFGARRFAYNWALGQVKADLDAKVADPAHVSVDWSLAALRKQFNTVKGVVAPWWGVNSKDAYSSGISDLATALGNWRSSKAGLRKGRTVGFPTFKVKGKARNAVRFNAGAMYLEPDRRHITVPVIGRLRTMENTRRVHRHLAAGNARVLSMTLSEQWGRLFVAVNYAVRTAPTKPVTMPTVRAGIDLGLRFYATISTVDTATGETSRIVVANPTPLRASITARRAAGRQLSRRIPGSKGYLSAKTKLAKMNRRAVNIRRETAHQFTSMLAGTFGEIIIEDLDLAAMKRSMGRRAFRRSVSDAALGLIRPQLAYKTQATAAVLTVADRWFPSSQIHHGCAGTDGHRDKMGRCRLIASTRLAKQLICPATDQLVDRDDNAADNLRDWPGHASCSTVGAAAPNVSSSANGGGDVGPVPRLSAGRASGCKTPTSVEAIRGEARTAAGHRTPSPTAPSGTPQGVHPSDDR

SEQ ID NO: 10181 - protein, 417 aa, unknown
  TnpB Polypeptide
LDESELKMQIYIKTENQDNNMVMQKSFKFRIYPIRKQEKRLEKCLDQACFLYNQLLDIHQQVYLGEERTLTEFDMNNLLKDFETPNLHSQTKQNIPKRISDAFNHFFRKVKSKEKEKGFPKFKKRVFYTSLTFPQYKQEIVGDRLYISKVGMIRMVKHREIEGEIKTLTIKKENEEWYATFSCENVPTEEPVIEFERETEGLDVGINKFLFCSDGREFDNPNFLKRSEKRLKRFQRRLSKKKKGSANRKKARIKLNILHTKIKRQREDFHKKLARKLAMEIKIIGIENLNIQGMVKNHHLAKSISDVGWGSFFSYLKYYKTIFGGEIIEIGMFEPTSQICSDCGHKQKIDLKQRTFECENCGMIKERDLNSSINIQKLVKQKLNNTVGQTEFQARGLDVRPSMKAIEVEAGNYRRIA

SEQ ID NO: 10182 - protein, 411 aa, unknown
  TnpB Polypeptide
MHDMANSSRKKARKLQDAKKAKAAEKEKTAKKVKPAKEKPIKYTATAKQQTDGTFEFCGGKGGFNITKQKNKALEPYGKCIHNYGVLLELIPGDKQAAINQQIGNARVVHNDYLSKREEYYKETKKALTVSQYKKEYLPALKKEKEYLNDTDKFVYENACRNVDDAYNRFFKGLSGFPKYASKTKPNGNNFTTNFTNNNIELKMIDGIPYAKLPKIGNVRFILPKGKILTDIQPHGVTIKAATVSMEPDGSYRIALRMESVIDKPVFPTVINAREIISVDLGLKEFGVFGNLEESIPVPNPRWIKIHAKRLRRFQQSLSRKQYDHKTHTGSKNWEKARAKVAKEQRKIADQRRDFHHKLSRIITDNCVAFICEDLAVKNMMKNRRLSKSIASVGWYQFLTMVQYKINGACW

SEQ ID NO: 10183 - protein, 440 aa, unknown
  TnpB Polypeptide
MKLTEQHVIDRDDPRFAVIDAAAFKSKNLYNAALYEVRQSYIKTGTYLNYHEMDRRMQPHEAYKALPAKVAQQVLKQIHEAWISFFEARDAYKADPSKFKGRPKLPKYKHKTEGRNLLVYTLQALSGGQRGKGKKKGGQGQEKKKGGQNPEKKKGALQQGIIKPSMLAIEVKTQQDPKNIDQVRIVPRNGYYMVEVIHTKEPVQAKVDPSFCVGIDLGVTNLAAIASNRKGWVPRLVNGRPIKAWNQWYNKRMKELKLKLPKEDRERVTRQMERITNTRNRQVNHSLHTASKRIVDFLVKEGIGTVVIGKNISWKQEVNIGRHNNQTFVSIPHARFIEMIEYKAALVGIRVEVTEESYTSKASFVDLDPIPTYRPNDETVHVFSGKRIGKRNRLYRTKDGRVISADINGAYNILRKRKPDAFPEAEGSAGYVVHPSRLFV

SEQ ID NO: 10184 - protein, 467 aa, Brasilonema sp.
LYKTIQVKLNVSEEVMTFLVHQGHAANSLINSAHYEIRQKHYAECPKVEFFDKDDFYRTSFKIKTVKDAGYASLCTLMKDNPHYQQLGGQCAQQTLKSVAEQYVSYNGLLSSWAKGEVSKPSMPKYRKSGGVSGFTYPAQAVALDIENGMCRLPIPRELNSLIKDELGLKEIWINGATGFIPSQLVEVRIVPRNNNWYAEYVYQSGHDGAICSLVLDHKSAIGIDPGTARNWLTCVTTNGKSFIIDVKKIKASNQWYNKQVATLKDGKPQGFWNDELAQITERKYRQMRDAVNKTARFVINYCLNHKIGNVVFGWNAGHKDGSDMGKRNNQNHVQIPTAKLKERIKQLCEENGIQFHETEESYTSKASFLDNDVLPKYGEKPKEWKPSGIRNGRIYKTAHGMIVNADAQAAANILRKVAIQLGFSLVKIVREVLTLPKRYDLFRNLKKSYRKRSCEGGLKVPVATTA

SEQ ID NO: 10185 - protein, 386 aa, Glycomyces sp.
MVLVVQLRYTYRVYPTAPQRSALARTFGCVRTVFNDAVAARRKAHSAGLPFPSTAVLDKQLITAAKRTPERAWLAEVSTVPLQQALRDCHVAYRNFFDSLRGKRGGARIGPPRFKRRSNRQTARYTRNGFALKPNGRLYVAKVGELKVVWSRQLVAEPSSVTIVRTTTGKYFASFVVGVDDGAEKLEPCADPEAETGIDLGLKSFAVLRGGKVIANPRFFARMERQLRKAQRDLSRKQQGSVNREQARIKVAKIHERVRNTREDWLNKQVKTLVSENQALYVEDLNVQGLSRGRAAKSVRDAAWGRFLGKLESKAARTGRTFVKVDRCFPSTRLCSMCGALTGPQGPADLRVRTWVCGCGAVHDRDANAEVNIRREGQRLVAVAVK

SEQ ID NO: 10186 - protein, 599 aa, unknown
  TnpB Polypeptide
MQLRYAYRLTPTPAQRRALARAFGCARVVFNDAIATRRAAHEVGARFPTDGELSKALTAAKRTPERAWLGEVSAVVLQQALADACTAYRNLFASLSGARKGRKLGAPRIRSRRDRAQSIRFTKAARFRVLPNGRLRLPGIGDVPVRWSRGLPSEPSSVTVTIDAAGRYHASFVVEVPGVPLLPVEREVGIDLGLTHFAVLSDGTKVDAPADRPQGRGEAPAGAEGVRPPAEGVGEPGEVPPQGRPCPCARRGYPAGLVAQAVHHDRPGEPTGRRGGPGRVRLGPDPARPQRARRGLVDVRRDAGVQGASRGPGVRPGGPLVPLDPGVLGVRGHRRSEAVARAHLDLRVRDHARPGRQRGPEHPRGGTRRDACGDDVRPRLAGAVVREAGTSRERGLTGCTDRSPRRSRRGGRQLAWTVAAAGGLRRAGGGGRGRRDRVRDRPEPRRGTARAHRRGGPARAAGAGRPPRDAVPRDHPCRRAHHRAARPRRPRVRLRRPARADRGGGRARGGRGGARRGRPAQRGLGAAAEPRGCRSTGGSTTRWSPSPRRRTWPRCWPGSAGSTGCASGCPSPRNSTGWSGRTGRPRRPRRSPGRGPAPR

SEQ ID NO: 10187 - protein, 387 aa, unknown
  TnpB Polypeptide
MSTRTIALTLRPTAAEATALVRLRERFNAACNQISGVAWGAQEFNKVRLQRLVYADVRAEFGLMAQHTIRAIAVVADAYKADRGTRRAFRADAAVVLDTPRLYRVTHNRARITTLDGRLKVELGIGGHQRRMLKDAVKLAEADLIRDRKGRWRLLVSAHYADPPTIDATGVLGVDVGRTDIAATSEGATFSGDNVTVRRDHYARVRQSIQRTASKGTRSTRRRARAVHKRIAGREHRFQRDTNHVISKRIVGQAVASRQAIACEDVTGIRERTNKQPRTKTERRRANRWAFYELRAFLVYKCQAAGVPFVVVNPAYTSQMCHCCFVLGKRSGKRFSCCNPACAWRGDADYNGARNIARLGLVLMQPGGPPLCCLHQPGGRATTSRAL

SEQ ID NO: 10188 - protein, 402 aa, unknown
  TnpB Polypeptide
MRPLLKAFKTEIAPTREQKQKIIRSIGIARFLYNQYIAYNKKLYKMYQRGLLDINQKHFISANDFDKYVNHNLKLKLPWIDECGSKARKKAQVNAEAAFKKFFKGEAGFPRFKKKSKQDVKLYFPKNNKGDWTIWRHKLMIPTLKQVKLKEFGYLPVGAKVTNGTVSYEAGRFYISVVIDIDENSKYNKDLETSYRTTTKGIGIDLGIKELAIVSNGKIFKNINKSSKIKKLEKRLRREQRRLSRKYESKKKKGGKTATVSANIEKQKLKVQKLHHRIDKIREDYENKVIHEIVKQKPRFITVEDLNVKGMMKNRHLAKAVAAQRFNYLLTKLKRKSEIIGIEMRIVDRFYPSSKTCHFCGHIHKGLKLKDRVYICPECGYIQNRDFNASLNLRDAKEYRVA

SEQ ID NO: 10189 - protein, 547 aa, unknown
  TnpB Polypeptide
MSQMTTFTSLIKDLPENISQAIEAYASLFSRLERKLYADLVCDKESQLVLKKRYIKEYLITSRQFNAIWRGLQGKLQSKKELAKLYIADNKDQIRSLEKTILSLSKKSQSLDKTGGCPIRSAKFRFKAHQKSRRLSIVKQRLAKLQSEQNFKIHPICFGSKKLLNAQHHLNKNGYTSHKDWLCDWQSSRDSHFYVLGSKDESWGNQGAQLIPNDDGSLKLLLRLPDAVGGGRLEIPNINFKYGRETILKACLSNQHRLQMGSKENLTNLTNMVLAKDKEANVSKNSLLANFGQAVTVRFNRHKFGWQIGVSVDEESLVNEFTGFENGCLGIDVNAEHLAVTVVNKQGNKVFTTDISCPLSGKMDTGKRAAFIGDAVKEVVEIAKQYRVGISHESLDFQRKKRALKETTGKQHRSLLSSFAYNSVLSFLTRRAYRQGVLTKSVNPACTSVIGGLKYQNNSLTSHQSAAMVIARRGLGIWLEKIRFNVPIKVGVAVLNAQPATVSMPVDPFKRWVKTNKFMKQYRVEFLKPEKTFVNLKVIENSLRLAS

SEQ ID NO: 10190 - protein, 380 aa, unknown
  TnpB Polypeptide
MRSYKTEIKLNNKQKEKFLKTIGTCRFVYNLFIDVNKERYEYDQPFMGGMKFSKWLNNEYIPNNLDKQWIKEVSSKSVKQSIMNAEKAYKAFLKTKKGFPRFKSRKNNVNMCFVKTDEKTKICCKRHQIKIPTLGWVQLKEYGYLPIREPITSGNISTKAGKFYISVRTHEERKIQNNNTNIGIGIDLGIKELAVLSGGMVFKNINKGARIKRLNKKLKREQKKLSRKHESKKKGIILGKNINKQILRIQKIHQTIINIRQDYQYKVINEVVRTKPSYITIENLNIKGMMKNRHLSKSIAEQGIYGFIQKLKFKSYINGIEIRQVDRFYPSSKLCSKCGKIKKDLNLSDRIYKCNCGLIIDRDLNAAINLQQATDYKIVC

SEQ ID NO: 10191 - protein, 431 aa, Okeania sp.
MYGCQQVLVGKNSELIAILKFLCEQSHKLTNMGIYYARQLYFKSKKSIGKFDLEKVYKNNNHYKVLHSQAAQQILRTVAESFRSYYGLIKAYTEGKITNKPRIPNYRKKGGMATVSYPKQALKLKGNQIRVPLGNTCKRWFSLDCFFIPMPSNLEFDSLKELRLLPRNRCFYWEFVYEKEVSIPQLNQDNVLGIDHGLNNWLTCVSNVGNSLIVDGKHLKSMNRWYNKQISTIKKNKPAGFWSNRLAEITEKRSRQMRDGINKATRIVINHCLENNIGTIVFGWNKRQKNEIKLGNKNNSEFVQIPTARLKERIAQLCQEYGIILIETEESYTSIASFLDGDYLPIYGEKPNDWKPSGKRTKRGLYRSGNNCFVNADCNGAANIIRKVSRKLGLDLSRLCRDTLTCPQRVYLWSAKKRQSNKDLSCCLVSA

SEQ ID NO: 10192 - protein, 367 aa, unknown
  TnpB Polypeptide
MLRTISIKLLVSIDTDAALKSVQRAFSEACNNIVPFAKAHRVFNNVKLHHLCYYDIRSKSPLGSQFVCNAIKSVAGKYKALKLKKQAEVPLIHFKPKSVHYDKKTYTLLDENTVSLTILSGRVKAKLVWGKHQRAVFDKGLAKEAELIIKNGSWYFNLVIDIPNPETVQSDVVMGVDLGENNIAATSTGKLFGGGKLRYDRDRFLAMRRRLQRNGSQSAKQLLKRLSGKEARHVTQVNHVVANAIIDEAIKHNVGVIALEDLTHIRKRIKAGKRMRARLHRWAWYQLQLFIAYKAEAVGIKLEYVNPAYSSQTCHQCGAIAKRDKNRLTCTCGNRAHSDLNASLNLAWLGKTAVLPRGAVNRPNVAA

SEQ ID NO: 10193 - protein, 424 aa, Halobacteriales sp.
MADSRLVTRTYRARVRNHSQVRDDLDSLGFAASKLWNVARYTVGRVWDACGQIPSSFDLQAYLKSHERYAGLHSQSSQRVLAELAEAFTGWYGHRNDGNRRANPPGYRKHGDDHPRSTVTFKQAGFKHDAANNRLRLSKGSNLKDGWGDFILCEYDVIGPRGTTVENVQQVRAVYERGVWRLHIVCKVQVEVAEPPGDRTVGVDLGICNFAVVSFGDESLLYPGGSLKEDEYYFAKQRAKCDDSFSREAQRLNRKRTDRRTHFLHTLSKAIVAECAERGVGTVFVGDLGGIRDDENGDPADWGRHGNLDLHGWAFDRFTTMLTYKAEMRGIAVETVSERDTSKTCSACGAKADSQRVERGLYVCDECGTVANADTNGAENIRQKSTSESSHEDRSTGWLAQPAVRLFDKTRGAFLPRERATREP

SEQ ID NO: 10194 - protein, 176 aa, Bacillus sp.
VSLLVETELQELPKTNSYIGMDAGLKNFAILSEGTTYKNPMFFRLLEEKLAKAQRVLSRRTKGSSRWNKQRVKVARIHEYILNVRKDYLDKTSTEIIKNHDVIGIEDLQVPNMLKNHKLAKAISEVSWSQFRFMLEYKAKWYSKQVIVVSKTFASSQLCTCCGYQNKDVKNLNLRK

SEQ ID NO: 10195 - protein, 363 aa, unknown
  TnpB Polypeptide
MKKGFKVRIYPNREQIQLIEKTFGCVRYVYNYMLNFKQKAYNIFKLKLSYVKMSSILTKLKQHKVWLYEVDAAGLQQCLKDLDFAYKKFFNGTGFPNFKSKRGKNSYRTNGRTITLDQENKKIRIPKIGWIKFRDKTNFKGLIKINNITISKSSSGKYFASISAEVDITALAKTKKSCGIDLGLKDFCILNDGTKFENLRFLERSEKRLRLLQKSLSRKVYGSKNYEKTRIKLAKFHEHIANCRKDYLHKISIFLVKNYDVICIETLRIKNMLKNHKLAKAISNVSWYEFCQQLEYKCLWYDKKFVQIDTYFASSQICSNCRYKNSEVKNLEIREWTCPKCNKHHDRDINAATNILNEGLTLI

SEQ ID NO: 10196 - protein, 400 aa, Burkholderia sp.
MQRLQAFKFELTPTGEQRRDMCRFAGACRFVFNKALALQQTNREAGGKFIGYVAMARHLTAWRNGAETPWLKDSPAHPLQHALKNLERAYKNFFAGRTAYPRFKKRGWCDSFRYPDRKQIKLDQGNNRIFLPKLGWLRYRNSRNVLGEVRNATVSQHAGKWFVSIQTAREVEQPVTQATSAIGIDMGVARFATLSDGSFLAPLNSFKRHEARLRRAQQAMNRKVKFSNNWRKAKARVQRIHACIGNARRDYLHKATTTISQNHAMVCIEDLQVRNMSRSAAGSVDAPGKNVRTKSGLNKAILDQGWFEFRRQLDYKMAWNGGWLIAVPPANTSRTCPACHCVSAENRKVQAAFRCVECGHEVHADVVGAINILARGHRVAACGEPVQSGRSMKQEPAEAI

SEQ ID NO: 10197 - protein, 249 aa, unknown
  TnpB Polypeptide
VALTVNVVRLDPAAVTGPVVGVDRGIRTFAVCSDGTTIDSPRALARGQRRLRRRGRAVTRKQPGSANRRRAVLALARYHRRIRNQRVDALHKATTALAKAKSVIVVEDLYVAGMVRNRRLARAIADQGWGEFHRQLTYKTAWYGSRLLVAPRFYPSSKTCSSCGLLKTTLPQDIRMFSCEGCGQMIDRDLNAARNLARLAEAQARLVAASSAETRNACGEGSAGWAATGPVELTSVKQERTRVHTITGA

SEQ ID NO: 10198 - protein, 293 aa, Scytonema sp.
VGTTYSVSFPTVKGTKRVPIEVASKHWQPVLEGIVGGTIERGSAKIIKHRNKWYVYVSITEEVPEVIATNRIGCDRGQNNLAVVAPKKGFGKFFSGKEVMHRRRYFQKRRRQLQEAKKFRALKKWNKKERRWMDAVAHTVSRRIVRFAEFSNAEVVVEDLEGCRKTMKQSKKQRADFAQSRHSWSFYSLEMKLDYKLAMSGLKLVKRPAPYTSKSCSTCGTLGIRERHHFNCSHGHYHNADLNAARNIAQWDGFACSLNLKRDTAAMAMSDSENGLLGAAPNWMKTQSTGIGE

SEQ ID NO: 10199 - protein, 154 aa, Calothrix sp.
MTIASLSDSSCKGDREKMYEESPNISGIVLLQYNYKLERSGGKLIEINRWFPSSKLCSNCHYQISELPLDVRTWTCPSCGTHHDRDGNAAMNIRAEGIRMLALSAAEMLSSSGTGEANANGEDVRPIRGRKPKMRQSSVKLEANTVLGTPSQCG

SEQ ID NO: 10200 - protein, 366 aa, Streptomyces sp.
MKLVVQVKLLPTPVQAAALEATLHACNEAATWVSGVAFVKDVKRNFALREHTYSEIKQRWGLGAQAAQHTIKKTCDAYRTLAANLKAGNLGKPWSKPYRRAVEKPITFRPEGAQPYDDRMLSWQIADRTVSLWTLSGRMKQVAFMASPEQLARLALYRKGESDLVARDGMWFLHATCEIPEAPLNTDPVAFFGIDLGIVNIATTSDGQIMAGRALNRGRLRERTLRTKLQKKNTPSAKRRLKNRRRKEARRAKDINHKIAKHVVAEAGGTAHALKAVGEHRTRNRPRRADGHPRTGTASQAPTGYPLQLVIRPVGGIHRVQGQEGRGTGGVCRSGVHLPHLRRMRPHRQSEPGLAGLVRVPVLRIR

SEQ ID NO: 10201 - protein, 460 aa, unknown
  TnpB Polypeptide
MKVFSHVVRGWLNFFDYLKNPHKYPHPVKPPKFKSKKNCFHIVSFPRKDVKIDGSTITLCYPKNHRIGKGRRKKSDLNFISINTNLDLSQLDISEVNIVPKYGKFFELQIIYKKKKEKEKKKEEGKEKERKEINALITNHGNDVGNNNDKKERDLVCRKKIRRMALDPGVSNFFSVVIEGVKKGFLIDGKIWKSLTTFRLKTISELKSRLDSILNKAKKMAQDSLILFPAPYFLVHRLEQKIANLWYKIAKVNEDFAHKVAKYILALALKYNVKEIVIEDRFRNKNKPSGMRDIANQLWHLAPHGKVVEYLKYLCKEHKIKLKVRDERYSSGVDSTEGAVPTKTKTTKTRRGIRKKMKEYTPERRTSRGLYKSSLGIVNADINAARNIGGMRGEEGLREVERVYLYQKKRVNKGMGEREGKEKESESKKKGSPVERVEAVAVAKGNKVRLSFEPERINLS

SEQ ID NO: 10202 - protein, 368 aa, unknown
  TnpB Polypeptide
MKRSKNTMKRSARVFLNDLNQGKAEELRAFLYLCHDVLQYFTDVFWARGEMTAKFADLETVHLATNRFGITTRLSQGLAKQAMEIVASQRKKPTKERKKPALRRHVVTLFYHFLRLEEFKGEEFDFAAVFVGSGAPRLAAPFRSTAPINQFLSDGWTISKTIRLGIRRGRWWIELIFEKERPEPKTEGRVVGMDSNYRNGLVFSDGQQVGQKLHARVQIFDKREKHTRQQIKEELAREIKKIDLAEVKTVVVEDLKKVKDGKRGTFSRTMNRRLSHWQYAYAVDLLERRCEFEGVRLERKDPWKTSQHCPACGRWDKRNRRGDKFCCVFCGYSDHADFKAAKTLELLGLAGAYGLRSLPNLTFASVQN

SEQ ID NO: 10203 - protein, 397 aa, Xanthomonadales sp.
MIIAHKIALDPNNKQATYFAKAAGTARFAYNWALAEWQRQYAAWKQDNSLPKPSQAALRRQLNAIKREQFPWMLEVTKNAPQMAIIQLGEAFKNFFAGRAKYPKFRKKGVHDRFTLTNDQFSVEGSRIRIPNLGWVRMRESLRFAGKIMSATISRVADRWFVSITVDTDDPPKRCAENQGVVGVDVGVSALATLSTGETITGPKPHKALLNRLRRLSRSLSRKQNGSRNRAKAKAKLARLHARIANIRSDALHKLTSDLSRRFHTIGIEDLNVRGMMANRHLARSIADMSFFEFRRQLEYKAERRGGMVVVADRWFPSSKTCSTCGSVQKEMPLSVRHWICPDCGSHHDRDLNAARNLATYAASSAVSACGEEGAGSGCKTGVKPSSVKQEISTEPV

SEQ ID NO: 10204 - protein, 297 aa, Halanaerobium sp.
MQTKIVDKAYSFRIIPNKEQEELINKNIGCVRFVFNHFLAQSKDDKYLSYSKFAAQLPKLKQKYNWLREVDSISLQQSLKDLDKAFKRFFKGLAGFPKFKSKKNNKQSYRTQYFKRSNGTESIEIKNNKIKLPKLGWVKFRKSREVTGKIKNVTIRKSKAQKYYISICVQEEIKELPQKNKAIGIDLGLKNFLITSNGEVVSNPRTLSKYEKRIARLNKRLAKKEEGSNNWYKVKNKLARVHEKIANIRKDFLHKLSTKLIRENQTIVVESLKVKNMLKNSNFTKTFNLNYARKVLV

SEQ ID NO: 10205 - protein, 545 aa, unknown
  TnpB Polypeptide
LKQIRGYFTLRKRKKKSRTAIYKKNCVEKCIKVETVQLNEEEYAILDEMFERYRQCKDMFLKRLCGIGSILNIQSFQNVRNMIRKEQNALPNEYGNKSYCDIFEIQGRFWVMALSDTCMTLKSMWTNLGNKCKAKLRDNHTDLSKPERTYCNYILSSPKILYCILNECEYTGSKSKNYRRILDDIKDVPEIRIKYIHSMLRRLVRDNKPYPEAKKADCILMDEVMYKITSEKDADYILLMTNSKGTKLKLKLKSRFCYNKKGNTQIVFNREKRTLSIHKCIKARQSETKKGHPVGIDKGYATLISCNDGNGKKPEYGENFGKLISAESERINKKNTNRNYFYDKCRKLQDKLNQSEDKSERELLRELISKTKQCHLGKKKYNKKHTRAMKHMESVTNHNIRMFMNEMEPSEIVLEDLSFVTDRKKPRTKSYNRKMSSWQKGILDERLVYIAKIFGAETIHVNAAYTSQYCCICGSKLGLRYGKHSGLAECEICGTVNANTNAAGNILARKTDRKIMQYTPYKEVKAICDKRAEALNAAVEHADIW

SEQ ID NO: 10206 - protein, 218 aa, Bacillus sp.
LPKLGLVRFAKSREVKGRILNATVRRNPSGRYFVSLLVETEVQELPKTHSYIGMDVGLKDFAILSDGTTYKNPKFFRSLEEKLAKAQRILSRRMKGSSRWNKQRVKVARIHEYMTNTRKDYLDKISTEIIKNHDVIGIEDLQVSNMLKNHKLAKAISEVSWSQFRTMLEYKAKWYGKQILRKWDCPSCRTHHDRDINASINLKNEAIRLLTARTVEIA

SEQ ID NO: 10207 - protein, 411 aa, unknown
  TnpB Polypeptide
MKLIIPATIHRGNSVALKQLMRDWSSCARYAYQRIHRDALTGNAIKVACKLFYMTKLNQRYVADAVLKAQAIKKDHVIFGGRKRWRDTLSGILPKKEWQETRDSELYSRGDRTKKGNPNIRILNTPEGYKLRIGLPGPREFLMFDLYIPEGRKSNKKDYKELLNLYGDCYDVRVKNKANKFHVSIGLDIPDVKPIYLCSNGVIGIDTNPDGLAVAEIGPDGNLLSHEYLNAERLQFARHDKRQHDIKALALQVVNKAILCNKGIVVEDLKFNDGKHGSRKFNRMRHNFIYSQLLLTIERRAIKDGVEIRKINPAFTSIAGIMKYQEQYSLNRHIAAAFITGRRGMGIMERVKVKLELGENKKLNLEGKGFKIALTAKAYSYFRHLYRVVEMKSPGLTAPCLSPGFGNYGTG

SEQ ID NO: 10208 - protein, 587 aa, unknown
  TnpB Polypeptide
MRDSRTHQPLTYDVRLPDEAQADALRLLDASRAVVNQALEVLWPHLDEFGSERAGPAWKDVGKYIGSPQPHGDRQWRCESEVVGRLLRQQAERKKAFELVAPILSDGFIRPTTEKRPVGKNRPAIKEAITALQKSLEEDETSFVALQNVVEQRCTFFFQHDRFPIDYKELQPVPLLKVGMLTYAGDDGREKGQAYRMAVDLEAGVARFRFRAPSEAGPWRWRTVDTIISLPECLKERLPHGELMAPTLREERRADGERFAVLDFIIEVEKEALPEWRSVERVLGADWGVHSLLTATAVDEHSEQVGGPFFLDTGSFDGRQARTRRQIDEVKKKVARYEQERDALPEDHAKRSWYTQRLALYRREIELCWRKYERRNRALAHLASNVLLLLCQIHGCSLLSMESLKTLKTTGRGRGVRGRWRNYCNNSTIRGEIWRLLRYKCHLLGLRFHTEQPRGTSHTCPHCGVPAKTYRSSCDRHEAVKWGRWMSCENCHYNGDRDYCASVNIARLGVAYLLQMKQTGRARSCSVSDPLVKPVIYTATGSALLLPPTSSHARPILSGKMCYYPGWYGSAFLQSSQPKAVFLRLCG

SEQ ID NO: 10209 - protein, 427 aa, Micromonospora sp.
METQWERPVQERRVVKVNRGYVRRLTLTPEQAAALDTQGHAARALWNLLHAWWTWGGKGRRPGLKQADEAIRQARVDIPWLADLPAQAAQQVLKTYVRAWRNCWEGRACAPEFKGRLRSRMSVDVPQGRDLAVTRLSRHVGQVRLPKVGVVRFRWSGSIPGVGREPGRTTGARLVKDVLGWHIVFRTEVETGTPAPHHGPAVGIDRGVNVALALSDGADHTHGSWLRPKEAERLLRLERKAARQRRARKPSERTSNRLHRTYDQIAGVRARAKRRRHDWQHQTTTAIAEKYGIVVVEHLRVKNMTRSAKGTVAAPGSNVRQKAGLNRVMLNEAHARTIDLLTYKLAERGGQLRKVPAAYTSQTCSGCGHRDPRSRNGVTFTCTSCGHAGHADTNAAQNILHAAGLGRVRTWSPAPVGRETSTTRRAT

SEQ ID NO: 10210 - protein, 397 aa, unknown
  TnpB Polypeptide
MRTYKLKVPYCEQLDILNAASASVWGECLALQKVWCYMHGSWGYFTCIKACELWMDKQLSKSQPLHSQSIQEVRSRYFKNWYGFRVLRRNGDKTARPPHKEKRFQTTTWKKSAIRFKEGLFGKQVVLSNGRGNKPLMVDLPKKFDIKNTPALINLVYNRGQYELHFVYKINESVKSESEGVVGVDIGEVHPLVSHDGAITEIFNGRYIRSLYRLRNKVIASMNTKIDRCERHSQRWWHLVRRKWKRIKKIDNQIRDGLHKHTTKFVKLCESRGIGTIVIGDLTGIRENINYGKRANQRLHQWAFGKVTQLITYKAKVLGIKVEVIDESYTSQTCPNCGNRHKPNNREYKCKCGFKYHRDGVGAINIRQKYLGHLGVPVAATMASPVGIRLEVRCCSA

SEQ ID NO: 10211 - protein, 118 aa, Bacillus sp.
VLLLVGTEAKELLKTNSHIGMDVGLKDFAILSDGTHYENPKFFRSLEDKLAKAQRVLSRRMKGSSRWSKQRVKVARIHEYILNARKDYLDKISIEIIKNHDVIGIEDLQVSNMLKNHK

SEQ ID NO: 10212 - protein, 108 aa, unknown
  TnpB Polypeptide
MTAVRMKLHRPISEKWKLKFVTVSREPSGKYFASLAESFDAVCVEDLNLKGMAGGLHLGKGVHDNGYGLFLSMLEYKLEERGKYLIKVDRYFASSKICSVCVFLYESD

SEQ ID NO: 10213 - protein, 426 aa, unknown
  TnpB Polypeptide
MQLVEQHLIRKGDPRYRLIDAAAFASKNLYNQAMYQIRQAYLHEGKYLPYVEVFHRVKQMDCYKALPAKVANSLLILVHKNWVSFFKALEAYQLDPSTFVGRPRIPGYKDKERGRNILIYDTQALGKRHFKKTGTLVPSGLAIEIETCLTEWWHLDQVRIVPAPSGYLIEVVYEQPEEQADVTQAWVAALDPGVDTLAALTSNKPGFQPLLVNGRPLKSENQCYNKQRAHLQGLLPENQYSSHRLSAITTKRTRRVNAYLHTASRRIIDVLVEEGISTLVLGKNLLWKQEGTLGRKTNQQFVQIPHARFLDMLTYKAHLIGITVLFQEESYTSKASFLDRDPIPVYDPKRTEKPQFSGKREYRGLYRAKDGRRIHADVNGSYNILRKALPNSFGQGIVAPAVVARAVEVVRKEGTGSSVNGNRPNG

SEQ ID NO: 10214 - protein, 555 aa, unknown
  TnpB Polypeptide
MSQIVRMRERHSHPETDISKVVEVEEIAVRYQALRREIVQHYWAAEHLATVIHNPKSVITLRRHNDDAKSYPLGSHLQALAVSNGLDIIRGSWNQTFEKTRVAAIKRYPDIIQEIKEADGQIRLESIQNPARHEINWLLRWPLHLVTIYAGGIVIPTDENGPITKFKDNDHAKICHWLSLALRRYRSGQPSLKHKTTFEIDDYKCLIISDSKFSVWLSMSGLTKGKPLRIPMSGDDLEFLDSTANLRISVEVDIHGVKRIVFRRALKIEVEDRIGHDVVGLDKGANIATVATDSDPEHALFFGREAGDVLGRRSEKSYRRQRSRLASYADNLAGRHTPSGHFHGNPNPTRSEKCKAKHIRRNNLGSSRRDAEQRRCEAELRNIYGRVARELTEAYPNAIEFDEEKLDFKGSDQKRSRKTNRKIGRWAKKELSKAINSHVSASGACRKFVNAAYTSQACPRCSWPNRSNRKDQAFRCTHCGYRGHADAVASSNVLKRGSDRTITLFTSYKTVKNILLERHTEWRESVGADARCASRGCGSDLPVVSPIGSGDNLTV

SEQ ID NO: 10215 - protein, 555 aa, unknown; identical to SEQ ID NO: 10214
  TnpB Polypeptide

SEQ ID NO: 10216 - protein, 455 aa, Moorea sp.
IKYTHQYKAFPTTEQKLEVNLWRRICQYWYNRQLGERFDWWERNRTSINACPLVCHLPQLRDNPNYYSQKKLLPGLKKGGVTVEWSGEKLNFSRVPANTLQQVCQRVDKAFERFTRSDASGKRSGKPRFKSQSRYRSFVVEGAGLELHSCSIGGKFLYLKLPKLGLLKVRSHRPLPDGAILKQVQLIKKNDGWFVNLRLDDPTVPTVSADEFIPTWENSLGMDAVLHEEDYIATSEGVKLPSLKSLRRHIAKLGKTAKKKNAHKRGSKARRKLAKREGRQHQKIARARKDFQYKTAHRLVRTGKKVFFHEDLNLKGLTKRNAPLQDETGKYLPNGQSAKSGLNLSWADAAFGQFFLILGHIAAKAGAVVVAKNPAYTSQLLSYRDEVIFTDCALRAYWDELEKLWVDRDINAAINIKRVGLDVFPTIKRRKGSIVVVASGADDTSKEVLRILRSA

SEQ ID NO: 10217 - protein, 353 aa, Acinetobacter sp.
MKTLKLRIKDKHCKVLDQLAAEVNFVWNYVNDLSFNHLQRTGSFFSAFDMAKYTKGTSKLCGLHSQTVDAIREEYAGKRKQFKKAKLKWRVSNKKSARRSLGWIPFKKSGINYADGYVQYGKQKFNLWDSYGIGKYSVKTGSFVEDSRGRWYVCLVVESPKQDKPTSTKAIGIDLGLKDIATCSDGTVISNPKFYRKYEKKLGIAQRAKNKKRVRALHAKIANCRKDYLHKASTMLIKNNALIVVGDLSAKKLVKTKMAKSVLDTGFSALKTMLKYKCENAGVLFEEVNEAYTTQMCSYCGEITASSPKGRADLRIREWKCVNCGTAHDRDKNSALNILALGHERLAVGIPVL

SEQ ID NO: 10218 - protein, 420 aa, unknown
  TnpB Polypeptide
MKGENLMDITKKVRLYPSKTMLTILDMLCDYRRFCWNQALEVWMSLYNQRQEHLPSGLRLKVKQAIKDKSISFTDDENALLMQYPAPTHYTVRKMLTKQKQEWQYQLSSRVLYLAVADLAKAWQYFFNNKEKKALRAGKPTFRQKKNPKQGFKTDRSCIRNGKLLLDKPRQYKGDWYAIPFKGYSLPDGDIKYCSITKVNNKYYASLVIDTPIEPLVKIGQNTAVDANVKYFDYTDGQYSIYPKRLNSLYAQIAFYQRRLARKRQVNGKKALDSKSYTVMRAKLQALYEKATAIQNDLLHKFTTYLYRTYDIIVIEDLDVKSMQMSKKAKNLHRSLFGKFRFQMEYKAKKFNKQLIIADRYYPSTQRCSHCEHVKKGDDKITITGNAKHGTAHNEYVCYECGYKADRDMNAVMNLLALIK

SEQ ID NO: 10219 - protein, 459 aa, unknown
  TnpB Polypeptide
MSYRVIQCQIAQDNLIYDYCDSNAQKAKLLYNAALFRIRQIFTGWGKDSRTDNEKEIFAEVDLLQQTYPSIKVKRVISYCHLEKLMRVTNNPDFFAGLPMQTAQSVIKHAVTDFSNWLKSLKAYKQDPSKFLGKPQMPHYQKRNIITFGITNQDAVLYHAGHGANLKLPGIKERFYLSNVEADSVLKEVKIKPYYGRYILCLTLESENSVTDNADRPNICAIDFGVSNFAAVVCNDGSSMLYKGGAVLSECQWFHKKRAKAVSIITKGHEHMHASSKYLSALSRHHADFIKDQCHKISRSIINYCIEHHAGTLVLGENKLWKQDCDMGSQNNQNFVSMPIGLLKQMIIYKASDAGIKIITQEESYTSQADITVMDYIPVYGADDENAVFSGRRITRSLYRCSNGMIINADCNGAANIMRKAIPDAWNGITDFSFLASPKVSGFHELNPLSIPVKEIAAA

SEQ ID NO: 10220 - protein, 394 aa, unknown
  TnpB Polypeptide
MKRLIRTFKYQLKPNDQSFRWLNHTLNLCRSLYNAALEERRTHWKRKRISISCNDQQISLTQIRSEHPEFAELPRRIAVDCLVRLDRAFKGFFRRVKKNVEEPGYPRFKSANRYDSFSIAAPPGTGWSIDTDKSIIKIGKVSIKVNFHRPFHGQPIGFSIKRTGRKWFVAITSDIGEAPAKVPVAKHPVGMDFGLETLLTFDDGTIVGNPRWLRDSLARLKEAQHRLSLKTNKRSRRRAKAKAALNKLHERVANQRREFLHVVSKDIVERFDYICFEDLNIKGLMQLPSPTGKAKGIHRNIGDASWGMLTSMVIYKAEEAGKWTVPVNPRGTSQVCAKCGADVPKKLHEREHRCACGYVVHRDVNSANEVLNRGVRLAKIPIEWDRCRVGFHCR

SEQ ID NO: 10221 - protein, 384 aa, Methanomassiliicoccus sp.
MIRTLKLKMALTNEQKASLLRTMESYTRAFEIAAQWGYQNRNANKFAVHHGVYHTIRQEVPDLPAALVLTAKDQACEALKVARLKKAPHRRTYAAMRYMRREASVHISKGTVSLASVDGRIKTTCYFPRDFNRYMLWEVRASNIMYERKRKEFYIGVMVKKEAPPREEGDILGIDRGINKVAVCSNNVFFDSKRINSVRGRYAKNRAELQAKGTRSAKRRLKEMSGREKRFVACESHRITKEIANMNYSVFALEDLSHIARQRWVTKGLKVKLQQWPYNQFEEFLSYKAEEGGKQVVFIDPTCTSQQCSRCGHIDRGNRVRGWFRCLKCNHQLDADLNASRNIARFGKIEMGRLHANQPNATDDEEGCSGAQEYSESSCKPLQM

SEQ ID NO: 10222 - protein, 431 aa, Brasilonema sp.
VFGCQQVLIKTDKSLEGVLQFVCSESAKLGNCGTYYARQLYFKTGKILSKFDLHKLLKTNPHFQALYSHVAQQCLTTIAESFKSYLGLLKAVNKGAVEQRPKLPGYRKNGLALATFPRADVKLKDGLLRFPLGSKVKIWFGLDAFYLPMPSNLKYSEIREIRILPRNQCFYAEFVYKMPDTEQPTLDKVKVLGVDPGINNWLTCVSNIGTSFIIDGRHLKSMNQNYNKRVSTLKKDKPQGFWSKQLAHITEKRNRQMRDGINKAARKVIRHCLKNKIGRVVFGWNKRQRQEINLGRKTNQTFVQIPTSRLKDRIAQLCEYYKIELTETEESYTSKASFLDNDVLPTFGEKPEGWQPSGKRVKRGLYRTANGYKLNADCNGAANIVRKVAMKLGLVVNGISRVSLSAPSKLRLWSLQESPNFVSKRASAKFA

SEQ ID NO: 10223 - protein, 265 aa, Staphylococcus sp.
LIIDTKEIEEYITKLPLDEVSDMEVPEDILKNLKHDYQNIFQYNLSTAIKLQNAVNRYKKEVEIEREEERQELIKQRKVKYIGVDVGQTRIITASDYEMDNYIILKEKNLTARIKKYNKDMDNLMKAKNHKGKKLLLESFKKYVKNIVENELLYKLEIEYKQPTVFIIGKNYLIEDKYSSQNVLTDSIYTVFKEASLKEPSKSNGIVDVDFVNERYTSVKCPECKNGSPENKSKDGFKCSNCSFYHKRPDVVACRNMLDKYFKKK

SEQ ID NO: 10224 - protein, 238 aa, Ornithinibacillus sp.
VRFAKSREVDGRIINATIRRNPSGKYFVSILVETEVVPLPKTHAITGVDLGLKDFATLADGTIYKNNRYLKSSEHKLRKAQQVLSRRVIGSSNWNKQRIKVARLHEKIANQRNDFLHKTSTDIIKNHDVIGIESLQVANMMKNKRTAQSIADVSWYQLKAMLKYKAEWYGKTVVEVSKTFPSSQLCSSCGHKNKDVKNLNLREWTCVCGVHHQRNVNAGQNLKNEAIRLLTAGTAGIA

SEQ ID NO: 10225 - protein, 486 aa, unknown
  TnpB Polypeptide
MAVKTITLKLYKPSKRKKDIIDKAICNYSKAFAYLLNKARYAIEIEKDKFFEDNGGYKAYRVAKWVDKETLKELNRFNVEPFKDSLLLDFGMTVAGFLNLRAVNKNVGFPEKRIRPIYFCRYDTKRDYSILYDENKGRYYVKLYLMNSKDENRREIQNLNGMKLRYIDREEKYLELTDRKERYILVPLCFGKWQEEYLKKALNQTGIMKTARLIKKNKDYYLSVSIKVEDSNTIKTINYLGISRGIKNEINFTVVPKNEDKYTTTGFINFKHIDKNTSNYLHEMSSKIAKIAWENRAQVILESLDLKNDRLSYGDEFKPALSVAIYNKMIGLIDYKLISYGLPPPIHVSSVGIFYKCPECGNFSYKNRQSESLFICTNCGTVKDIDELGSINVARKLKEYDKTTIKMNAQVIGDKVKLSNKLLEMEFILDYNMMLFEQLAEELKKRVENFEKNIDFYRKDSSFKIKLSLIKKIKNAVDLTSIIEIV

SEQ ID NO: 10226 - protein, 378 aa, Bacillales sp.
MRRIHHDLLEGGGTDMLKGYKYRLHPTPAQAEFLVRTIGCARFIYNKLLEDRIAIREEAKAGIVTRRKPATPASYKPLFPFLAEADSLALANAKLNLDTAFAKFFAGTGGFPVFKSRRRSRASYTTNNQHGTIRIENGKVRLPKVGFVRFIQHRPFEGIIKSATVSMTRTGKFFVSILVKQDDAPWIPAKNKVGIDLGLKHFAVMTNDAMISEKIENPRFLRKSEAKVKKAQRALSRKKIGSKNREKAKLLLAKKHEKIANQRQDFLHKLSRRIVDENQVIVVETLTSKDMMKDHKVAKSIADVSWYEFVRQLEYKCKFYGRTLIKADQWYASTQICSTCGVKGEKKKLDVREWTCTHCGAYHDRDINASLNLLRLAD

SEQ ID NO: 10227 - protein, 248 aa, Okeania sp.
VPSTITVKLDPSGRWSISLRVNDTRDLRLNPTNKQVGIDLGITSLLTTSDGEKFANPKNHYKLHKKLRLAGKSLKRKTKGSNNYQKARLKVARIHAKIKDSTEDYTHKLTTQLIRENQTVVVEDLAVKNMVKNHKLARAISDANWGELVRQLEYKAEWYGRELIKIDRYFPSSKRCSICGHVVEKLPLNIRQWDCPECGSHHDRDINAAINILRMGTRGVRQTQGNAHQEGCGRSSVSLCSDCKTRRE

SEQ ID NO: 10228 - protein, 417 aa, unknown
  TnpB Polypeptide
MKRTNIFKLKPAIKEQEQRLFELADNCARMFNEINYKRRQSFFSRNFDWNTDESYHKYKKVIGSATAQQVTRKNNEAWKSFFALLRLKKQGKLPRQIRKVSPPGYWKDRKTGKRVLMILIRCNCYKLSEKYLKLPFGLKVRWKGKNRWEGKKQGRLEIRYDDLSSRWYAYMPVEVERKPLHQPTGDKKKKAYVDLGIINIITSWIEGEKRPGIYSGSTVLSDWWYWNEKIGEYQSNMEKNGKRKTSKRLRKLFRKRKKRFRHLINTIIARFVKNCWEKGVSEIVIGDVKNIRENSRKKKKGRKANAMINNFWSFNYIYERLRTTVENYGIKMRKKEEKYTSKTCSLCGKVHRNGRKHRGLYVCKTHGVTMNADVNGVANIANPIFPKPYWRDRDNWLVTQPSVVKALIFTTVKPPTL

SEQ ID NO: 10229 - protein, 368 aa, unknown
  TnpB Polypeptide
VEYSYKFRLYPTAEQQEQMSRNFGCCRYVFNHFLTQRQEQYKKTGKAPTRFQQDKSLTMLKQELPWLKEVDSTSLQATLQDLDAAFQNFFRRVKQGEKPGYPRFKSKHDHRQSYKSKCVGTNIKVLDKAVQLPKLGRVKCRISKEVKGRVLSATVSRNPSGKYFVALCCTGVEIEPLPSTGAAVGLDMGVKSFAVTSNGMEYPNHKYLSRSEKKLARLQRQLSRKSKGSNRWDKARFQVARLHEHIANQRQDTLHKLSSEIIRQNDIICIEEMRDGSLICIGKGNEEWNCSAPHGAGRLMSRHAAFHALSMEEFQKEMEGIYTTCVVPETLDESPMAYKSMDEIIDQIEPTVEIVQRIRPVYNFKASD

SEQ ID NO: 10230 - protein, 401 aa, Kitasatospora sp.
VKRAFKFRFYPTDAQAAELSRTFGCVRKVYNMALQARTEAWSLRRERVNYNATSAMLTTWKRTGELAYLSEVSSVPLQQALRHLQGAFANFFGKRTKYPRFKSRKKSRDCAEYTSSAFRYRDGALTLAKMAEPLDIVWSRPLPAGAQPSTVTVSQDASGRWFVSLLCEDRPSMPEAVNAAVGIDAGLTSLVTLSTGEKVTNPKFERADRERLARAQRNLARKAEGSKNREKARIKAARVHARIADRRQDFLHKLTTRLVRENQTVVIEDLTVRNMLKNRKLSRAISDASWTELRSMLEYKADWYGRDLITVDRWFPSSKLCSACGTVRGTMPLNVREWTCDCGASHDRDVNAARNILAAGLAAAACGDGVRPRRSTPGGQSSTKQEEVPPPRTRAAAQPRG

SEQ ID NO: 10231 - protein, 499 aa, unknown
  TnpB Polypeptide
MDLNGELLDSIPVMKKLASEVQGISSYATYVVRNDAQLGVGLAKAGAIQPATAGRRAGVTMPDFLANGRTGKSRKEWLVRYNVVTAFRSWQERINAANGESGKYVSQGWKRTVNASAPSYGEDTVNLGAVDKQYATIENNPFIDGEIILKMVIQGKWYRLIFPFDDTRFHEGKVALPLIKIQNNEPVFIFTVATDNPVVQFSGDYTIGVDVGINDYATVVVRNSNTGRIVRQTTLSQRVHSLWNSVRASERQVRALNKKAGKLLYDRQAHMSAIDEAEFHREAASRKKRELAILAAQEIAYLSHQFNNAVVAVEDLGWIRNTMQNGRWNRGTFVQWLTHYVTQNGGWVVAVNSANTSQICHLCGSKVKHSEHKVSVCPKHGDMDRDINAAANIAARAVSKVDKARKTRAKNRKLQRQVALKTPVARASLKYPGRDRAKNAPTPKRKNRASKEVNLPISPARVVMTRVLADWDASGILETNKAAINLDYVTRKCRLCSLN

SEQ ID NO: 10232 - protein, 450 aa, Natrinema sp.
MRIYLVYTLNGSVRGRRTRSSRSTSQTIRQRSARLRSENVGRRDRQSGPRHRSIRRRRVDHALQLPVQAQTDRRTPRAVSVDRTSAYSEQKLLPDLKREWTDLQDVHSKVLQKVVQRLYDNLSTLKGRKDNGYRVGELRWKAPQEYRSIKYSQTGFKLNNTSGRPVLSLSKIGDVPMVSHREVPDDATIKEVVVKQEPTGEWFAVLGIETENDAAPKPENPEKYIGIDVGILKYAHDSDGTAVEGPDLTDERERLEREQRKLSRKEHGSANYRTQQRIVARRHADLKRKRRDFLHKLSNYYAREYDLVAVEDLDAKGLMELPSNSRNRAGAAWGTFLRMLEYKCDREGTHFVAVEPAGTTKECSNCGVATDKPLWVREHSCPSCGFEADRDLNAAYNILSRGLTEVGVVHPDSMPAETALPTGTDSVPAKRVLETGSPVLSEAVRPSRAG

SEQ ID NO: 10233 - protein, 327 aa, Natrinema sp.
MAIQVTRTYVGSIQNQRQVCDDLDSLVDSASKIWNVARWTAGRVWDAIGEIPNEAPLKSYMKNQACWKDLNAQSSQKVIEELSDAFQSWFNLRQTDDEANPPGYRKHSDERPRSTVTFKADGFKHDPKNNRVRLSKGRNLKEHRSDFILCEYHTCPDIYLSEINKVQNVRVVWNGDEWELHFVCKVELETTDSTGDGVAGIDLGITNIATVAFPDEYVLYPGNSLKQDKHYFTRAEYDTEGESDPSEKSMWARRKLANRETHYYHVLTDAIITECVERGVGILTVSWPEDVRDSDWGKRGTRSCTRGRSIASTSTSITRERYAVLMC

SEQ ID NO: 10234 - protein, 385 aa, unknown
  TnpB Polypeptide
MSSVADCTGSEVIVTKSKKIRVYPTPEQRKTLRQWFGTARFTFNKTVALLNETDTQANWKAIKTGILHDLPDWSKETPYQIKSVAIRDACVAVREAKKKYQKTGGFQSVSFKSKRSPSDSIFIPKSAIKARGVYHTVLGDIKMTEPLPDNICDSRFVKEKDKYYLCISYTVTTPKRKSNGRVVALDPGVRTFLTYFHEHGFGWLGHHAINRIQRLCSYLDDLLSRASKATQQSRKNMRRAAHRIRKRIRNLVDELHKKVARYLVDNFDIILLPTFETSDMVMCGKRKLRKMSARQMLTLSHYRFKQFLKHKAKETGCIVVDVCEAHTSKTVSWNGEIRESLGGRKIIRDSTGLKMNRDLNGARGIFLRALVDEPWLLSLSNLQTV

SEQ ID NO: 10235 - protein, 383 aa, unknown
  TnpB Polypeptide
MIYTRSSKCYYTKWLTAEKQSTIKEFLKEAHRVICWAIDKHHYSIAYNNMEKKELLLARNLHECDSWLTERAKKNCFAEAHALVLGTKRSCDELKKEYHKPGHDPNRIILSMTNATINIKPELKNFDILLELRCFDSRVRSKQIAIPLKKNQHFNKWSEKGKLAASILLSDRYVQFSFEIRCEKKKEGSVIAIDPGARNLLTSDNGKMYGQRMWGLLQKLKRKKRCSKAWYACREEILEYIDKTCKEIPFEALKFLILEDNRRIKNKMKIKRRLSKRVRSVLTGWAIGRIDLRCNQLSEENGVSFRRVPAWYNSRTCLDCGHSEEANRVSQDVFVCRKCGHTLHADVVGATNTLARFALGPYGAECKPEFEQRHPGYFQLKVA

SEQ ID NO: 10236 - protein, 384 aa, Bacillus sp.
  misc_feature (294)..(334): Xaa can be any naturally occurring amino acid
MNSLRKAVKTMARKKAVKVLRKQKKRENIQRFTQKQNIGRACLTAKEFRLLQRMSHSSNALRNVGLYTMKQSYLNHNKMVTVKEVDTAIQADMNYWSMQSNSVQAIRRSLFTEVKSFFKAMEQWKKNPEKFTGRPKFPNYSGSTDKRIIEIYQVPKVDENGYWMIPMNVAFRKKFGSIKIRMPKNLRNKKISYIEIVPKQKGRFFEVHYTYEMHVSQMKKPFTTTSNALSCDLGVDRLVSCVTNTGDTFLIDGKKLKSINQYFNKMICNLQQKNIENRISKRVVTNQMAVLWHXXXXXXXXXXXXXXXXXXXXXXXXXXXXXXXXXXXXXXXXXLQKLVFLIKIRFQFGLRMIGRIIALAANESLVVCTKVNQGNVFTLILMVR

SEQ ID NO: 10237 - protein, 360 aa, unknown
  TnpB Polypeptide
MAILAKMEDAHLNLYNTALAEKNDQYEKTKKSDSVFTQIKRFVPAVKQTENGKLCNYSSLQQTIRRLHKSFNAIYNRRGGKPRFKKTVPLEYSTYGDGWKIVNDSLRIQNVGFISLKTHRPIDGKIKSLVVKKNGDKFYACVACKRISAPLKQTNKAVGIDFGLKTFLTMSDGEKVEHSLPLKRSLKNIAKIHRQIKKAVESKSARKEKLKRKALRLTYEKTKNRRLDFAHKLSRKIVNENSFIAVEDLNLRGLTTGIKNINRKYSDVAVGMFYDLLAYKAESAGRQFVRVNPKNTSQACCKCGKLAGLTLKDREIVCDCGHSEDRDINAAKNILALGLKTVGLYGSLELSANLVQTRSS

SEQ ID NO: 10238 - protein, 402 aa, Escherichia sp.
VKRLQAFKFQLRPGDQQECEMRRFAGACRFVFNRALALQNENHEAGNKYIPYGKMASWLVEWKNATETQWLKDSPSQPLQQSLKDLERAYKNFFRKRAAFPRFKKRGQNDAFRYPQGVKLDQENSRIFLPKLGWMRYRNSRQVTGVVKNVTVSQSCGKWYISIQTESEVSTPVHPSASMVGLDAGVAKLATLSDGTVFEPVNSFQKNQKTLARLQRQLSRKVKFSNNWQKQKRKIQRLHSRIANIRRDYLHKVTTTVSKNHAMIVIEDLKVSNMSKSAAGTVSQPGRNVRAKSGLNRSILDQGWYEMRRQLEYKQLWRGGQVLAVPPAYTSQRCACCGHTAKENRLSQSQFRCQVCGYTANADVNGARNILAAGHAVLACGEMVQSGRSLKQEPTEMIQAAA

SEQ ID NO: 10239 - protein, 431 aa, Acinetobacter sp.
MNISQHYKFRLLPNKEQEILLNQAIGSARFVWNQILAKSFEMFAKDEYIRYETIEKNLVPLKKKPEFSFLGQTYSACLQQKIRDLAQAWNKYYNPKEHARLKENKRKPRKPKFFKLTDGSEVQLRPLMPRFKKKSDGEQSFRLPFADCDVAGGRVSLPKGTGWIRFKKSQEIIGKITSVTIKKICGLWYVSFCTNREIKQPLHPSKSAIGVDLGIKKLVTTSDGQVFEPINSFKANQLKLARLQRKLKKKTKFSENWKKLNLKINKLHHHIANIRHDYLHKVTTTLSKNHAMIVVEDLKVANMSKSASRTPENQGKNVKAKSGLNKSILDQGWSMLVGMLEYKQQWRGGLLVKVDPKYTSQTCSSCGHIAKENRPTQAKFECVSCGYVANADINASRNILAVGHTVLSVEGRRSKGRPAKQKASEIREEVA

SEQ ID NO: 10240 - protein, 510 aa, unknown
  TnpB Polypeptide
VRYYDTATRHRFTAENGVDADLVSADLAHMVTWMAEAEREVLASQEFHDLALKVLEGDKPTGSLNSWGRKRLSRYDFEFQKYNMNEILTTHVVSVLEAYAVSVGLFQVMSTHTKETKPERILSHYRGSYPNAPQPTSGMARAHLIRYHKKGERKASLPGVSAKLNLAVCDTYFAPKAYRDDDDTLSVTIQVKTPSYGVTKIHLRLPENRGRFGNGKVCRPTIRLNNKGQVVFDIAVEHEINEKQTKKVVGVDLGKVEPFVATVIDPESSHRSAPYYANYKRRLGSLVKKEQQRRDLSRHLYKRADLCDKYNRTDHANALRIEAKRVSAKATRIKHEISQCIANQVVEIADQNDANISLENLSWLDSQGGRWPHAEIQSRIESTAKRYGLKTIKVSAKDTSKTCSHCGGKTSNNTKTRVGTCTTCSFRLDRDVSASREIALRATSPSSRSRERMRSLLRQREQMRSSAATRQSKPVNALRGNQGHTGTSERDSEATLMMVRGTLDSRGSPT

SEQ ID NO: 10241 - protein, 411 aa, unknown
  TnpB Polypeptide
MQLVEQHCIDRYDPRFAAIDPACFASKNLYNAALYVLRQAFFHHRRAPGYAKLAHTLKDTDEFRALPAKVAQWVVRQVCGDWSNFWKAHKAYMKAPAKFTGRPKLPHYKPKMNGRNMLVYTRQAISQTGLEEGRICPSQLPIVVQTKQKEVRQVRIVPHASHYVVEVIYSVKPQSLTANKLRPEWAASLDLGIDVLAAVTSNKKGLRPFLVNGRPLKSVNAYYNKRRAALQAALPQGQHTSHQLEALADKRNRKIAHFLHWASRYIVAWMVRERLGTLIVGHNVGWKQAVEIGRVNNQNFVSIPHSTFIHMLTYKAELAGIKVKVHEESYTSKCSFLDLEPIRKHAVYCGRRVMRAEFVSAQGQRIHADVNGSYNILRKGLPSAFARGIKGVVVRPVRVLPARKLKNWRCL

SEQ ID NO: 10242 - protein, 312 aa, Thiotrichales sp.
MGKSLGSQDLSARVFTIASAPITGHQRILRTQSMWMASVFDYPLSAGVRMAEAVCFEGNIKSATVSRDADQWHVALAMETTDILHAKGVGSVGVDLGVNALATLSNGEVVEGPKAHRRLLSRIRRLSQSLSRKKKGSANRAKAKTKLSRMHLRIANIRKDNIHKLTTKLATSFGLIGIEDLNVRGMVRNHCLARAVSDAGFFEFRRQLGYKVAMTGSSVVIADRWFPSSKTCSACGSIHDMSLSERTKSCDCGNKMDRDVNAAINLEHYAVSSTVSVCGEDSSGVTQFRWRETASVKQKSGTQTVCLGLGKS

SEQ ID NO: 10243 - protein, 526 aa, unknown
  TnpB Polypeptide
LLDERYWSDTHIERVDNHSGTAYTYIRDDVYDCFENVDEYLYSRFERCVYQLVTSVLEAHSDEYQAYQFVSEAVAERKIKRIGWTKLRNRLFSEDSPYVQWGILESVVEQLNNYFDTHGRFPECYTDLVSCPEPNGTLPYAPDAGDYDIHEVSEKHGKLVFTMNAPDSLETDTYHDWTDHEIEFSCHSRFAEMSRCGELGAPTLHESEHGYTLDLPVSVPEMESNSADGRVLSVDLGVKKQATAIAIDSDEGQVAPPRIVNHDAKEKLFRLATEAEGINDRLANLRRDGKGHTKRFANLHSEYQHLRQRETRLREQIQHDVANQLIWLAVEHDCEAIVFESLGQMESPDTSGSLARSISTWARGSLLEKANYKAGLMGLETTTVNAWGTSRYCPRCGERGETVNAPDDHRECRHGGHFHCPECDYECDRDVVGALNVGRKHLSGSQMEEAKPVAYTETGNHASFPSPAEGARSTGVQSTADSQDEASGRQTRLTQYCSTACRGESDTVDCSKIMGVTWTGSCPAVV

SEQ ID NO: 10244 - protein, 409 aa, Candidate divison MSBL1 archaeon
MRITFEVPVSSPTRKKESFLESVSDKFPKMVLWFLTVFEMEGLDFRGTSLNRARKVVKELCYPAGERDSKYDCKGAVRFPHSHYYDTAITEAIQKWNSFLSWREKSGTGKRVPEIKAYAPVLDALMFELDLENGWITLKTGRGEKNVHVPITVPNKSHYEDLNEEKISSIRLKKKDDRFVFLLAQKSFSPKKPSPNELGEGPVIGIDLGERNLASLVAVRLGSQRPEIVNVKFFGGKEAKKLEHREQHVRKRLQERGKSGEVPGRGRKANDKKKDTCEKIAREIRETAEELGVGAAFIGDLKAPRPKNFGSLSRRLGNYPFSRLKEAIERHLGKAGIFVKLVYEGRTEDDLGTSQKCHRCGSEGERYRNRFTCSSCGLEDYNADLNASMNIAERGMKLLGRTEGLGAVP

SEQ ID NO: 10245 - protein, 267 aa, Scytonema sp.
MRRQAVKVRLYPTEQQVQILAQHFGCARWWWNYGLNKCIETYKATGKGLSQSGLNSLLPPLKKDKETEWLRECYSQVLQSVSLNLSRAYQNFFEGRAKYPKFKSRHHRQSIQYPQNVKQVDSCLKFPGTLGVVKAKIHRLLDGTIKTVTVSKCPSGKYYASVLMEYEGEYPTSSTEGKVVGIDLGITDFAITYDGEKTSKYPNPKHACKYEKKLAKKQRIAARKVKGSNRRRKATKIVARVYEQVSNVRQDYLHKLSRKIVDKPALW

SEQ ID NO: 10246 - protein, 485 aa, unknown
  TnpB Polypeptide
VRSRSAWNSCSARRAPRSSAKSSPWRSCPTTCTCSCPPCRSWPRTRSRRGSRAGAAASCGRSSRSCSRCRRCGRAVRFSARRATSPARPSSGTSRARPRGTHEAGRMKTYLYKLRPTKPQLAAMEQTLAVCRHLYNGALAERRDAWENERRSVTFAQQCASLPALKEKSAYLPSVHSQVLQDVMHRVSRSFENFFRRVRSGEAPGYPRFKGEHWYDSFCYRQFGDGRGAKFDADGRLSLSKVGAVRVCKDRPLTGTPKTCTVTRRADGWYACIACDTGPEPLPKTGETVGIDVGLESFATLSSGEAVPNPRLLRRAERRLKTAQRRVSRRRKGSGRRNKARVLLAKAHLRVRRARLDFCHKVAHDLVRRFDAIAIEKLNIKGMVKNRRLAKSISDAGWGLFVSVLTQKAESAARQVIAVNSAYTSQDCSHCGGRVPKALSVRLHSCPFCGFEAHRDHNAALNILNRVPKSGGDTAFGETATVVAA

SEQ ID NO: 10247 - protein, 209 aa, Bacillus sp.
AMKKELVWLKEVDSIAIQSSVRNLADAYMRFFKKQNSAPRFKSKKNNLQSYTTKQTNENIAIIGNKIKLPKLGLVRFAKSREVEGRIVNATVRRNPSGRYFVSLLVETEIQELPKTHSYIGIDVGLKDFAILSNGTHYKNPKFFRSLEDKLAKAQRVLSRRMKGSSRWNKQRVKIARIHEYISNARKDYLDKISTEIIKNHDVIGIEDL

SEQ ID NO: 10248 - protein, 407 aa, unknown
  TnpB Polypeptide
LGARPGQGQLGRTSGRPGDRAAGVEPLRAAPHLEPGQAAGRAVVAGMLQGGLRLGDRRPCGGPAQLVGRQARPPRRAAGRVPPLQGPPSGPRPVRFTTGAMRLEPDRRHLTLPVIGRLRSKENTRRLQRLVAKGRARVLSMTLAEHGGRLVVSVQAIVALQPRTPSQPDGRCGIDLGIGREWAVIAHDGDTIQRVAHPAPWAATQNQRRRVARQLSRRIVGSRGHRQAKAKLAALDRRAANLRTHHTHTLTSILARRYGTIVVEDLDVAAMGRGMGRRAFRRTVYHAGIGSFRPILAYKCAQQSGRLLVADRWLASSKTHHGCGGYLPDLKLGDRTWVCPACGELVDRNANAARNLRDWTGPVGDRVVQRGGVAAPAPSVGDHGGQAHAVRGRARLQKTTPSGGGGR

SEQ ID NO: 10249 - protein, 379 aa, Fretibacterium sp.
VRTYVFKLYQSKKHRRLHRTIDVAGCIWNHLIALHRRYYHRYQKSLNITRIQLHITKLKKTKRFAFWSTLGSQAIQDIAQRIDRAYRSFFRNLKHGLKTAPPNFRAVKKYRSFTLKQAGWKLLPKNRVVIMGKEYKYFKSREVAGKVKTVTVKRDSVGDLWLFFVVEEGEVPIEVRSGEIVGLDFGLKTFLTTSKGEYIQSHLFFKRNAKLLKDLSRKLSRKKPGSNNRSKARLALARAHRRTANQRRDFHFKTALALAREYVPVVVEDLNLKAMQRLWGRKISDLGHAAFLNILSWECFKNGSRLLKIDRFYPSSKTCSKCGYALAELPLSMRSWQCPICSAVHDRDINAAKNIQRVGASTLKREDVRPASAGCLCRS

SEQ ID NO: 10250 - protein, 295 aa, Crenarchaeota sp.
MLPLSRSVRRWILDVLRSSGFKASFHAQLSLERRLNGDPHALRITVIASRRVDPAKLRIDLPLRMGRWIVLAVDVNSTHGVKCLYALIDLDREYVKLLQDPRFKPPGHVYRRKYASKIKSLLKRLQNTCTITVSRLKLYRFLYRMTLRRISRLNRQWCLDTMHIIVKRLLKYARKHKARPIVLLDVPDYESLHGDSKLQGTLLRFVELLENRLTWYEIPTIRVIACSTRCPICRQKMKLIYKTRNVRAYRCSNCNIILDRDYVACLNAIRQIVSEDKTLKLLKPLIEKRQLKFVP

SEQ ID NO: 10251 - protein, 463 aa, Mycobacterium sp.
VAKFEIPEGWAVQAFRFTLDPTAAQARALARHFGARRKAYNWTVATLKADIQAWRETGVETAKPSLRVLRKRWNCVKDAVCVNAETGAVWWPECSKEAYADGIDGAVDAYWNWQTSRSGKRDGKPMGFPRFKKKGRDADRVSFTTGAMRVEPDRRHLTLPVIGTVRTHENTRRIERLIAKGRARVLAITVRRNGTRLDASVLVLVQRPQQPKVAHPGSRVGVDVGVRRLATVANEDGTVLEQVPNPRPLDAALTQLRHVCRARSRCTKGSRRYRERTTELSRLHRRVNDVRTHHLHVLTTRLAKTHGRIVVEGLDAAGMLRQKGLPGARARRRGLSDAALGTPRRQLSYKTGWYGAQLVVADRWFPSSKTCHLCEHVQDIGWDEKWTCEPTDGGCGAPHQRDDNAAINLARYEETPSVVGPVGAAVKRGADRKTRPGRAGGCEARKGGSRKAAEQPRDGVRVA

SEQ ID NO: 10252 - protein, 171 aa, Nodularia sp.
MDKTDTYQTSSKHYKQNLAQLKRLSKRHCRKEKGSNNRYKSQIKLAKHHAKVTNLRKDTLHKITTYLCKNHAKIVVEDLNVSGMMSNHKLAQAVADCGFYEFKRQLEYKAQKFGCEIIVADRWYPSSKTGSVCGHQQEMPLKERIFQCGNCGYTIDRDLNASINLSRLAKA

SEQ ID NO: 10253 - protein, 538 aa, Bacillus sp.
MVDVVTQTIETCNRAKRFAFQTIVREKRWNRKIYTDSLHLVLKRKYQLNDYYANSAAQEAKALFTGLMELQKRYEKQTQEKIKKLKKKLKQERTKLTNLRKIKQSCVKGKLTFPKNTRFAKHNNLISLSRKKDTLIWLNEYLFEPQYLDVQIKRIQAKIGLLTHSQYRLTQKLPSYKTHIPSAVFGSKKLFRSQFTTREFVRNHDKWKTFFSRSRNKQLILSGRKDAKHGNFVFQYVPETQGLWMTTSSGKTLMFPAVTFPYGQEIIEEVIITQLQCENKKKHGKPITWSVEDYGEYYIVKCLVDVPENPHTNYSKSDGVIGLDCNLEHFAWANVTKDGNYKGSGSLGFSIMGKSTGQITKIIEVEAIRLVDLAERYNKPIVIEKLDTTQSKTGNRYGNKHANRMRSMFAYEKMTSAILNRADKRGVAVFQVNPAYTSISGKMKYMRKFGISIHQSAAFTIGRRGLGYKEKVPGVLQPYIPKKDAHHWSHWHQLNNRLDIRTHHFYQLYDVDQPKEVLQIERLHLFENEKKKLAKLFA

SEQ ID NO: 10254 - protein, 338 aa, Lachnospiraceae sp.
MHFCTIILVLSPMFLGAPQMPHYKKKGSVSGLHFTNQDCVIRDNNGKCYLKFPHFHGDYLPIGYVSGSLKEVRVRPYYSDFLVICVYETESTEPLPENGNACGIDFGISNIVALVSNTQKCMLYKGGALKAQNQWYNKQRSYYQSIAMQGREAKEAKQLGLLNTRRMEQLNRKRNQFFHDALHKIASDVVKFCLENDIRAIVLGKNKNWKQNCNLGHHNNQIFVQMPISTLSYCIKYKAEENGLFVMEQEESYTPKASLVDGDKIPVVGDQEKPSFSGKRVSGRLYCTKEQMLINADLNGAGNILRKAYPTAFEGITDYHFLNKMIVKKYNTMYSSNG

SEQ ID NO: 10255 - protein, 410 aa, Erysipelotrichaceae sp.
MAKAKQNQSRNQTLYRAIKVRAYPDGKATKTIQAHFAAVAEIYNLLIKENEAQKARTGKDLNRGELSLAVGKLKGRFPTVNPQCLYLTSYHVNQGLKRVSPLNGGPGFLRKKKTDAVEASFSISCPKPDLEYLSNHKDAILTLPKVGKIRVRMHRKAPSNVVWHLVTVSRNRSGQYFVSMDYEFVKEIPLVKVKKAVGLDFSVPHLYVASDKSLVPDESKIHARQNSYQDIAKQSRKLARKKKGSKNFMKQKLRLAKAYQHMENQRMDFIQKESNVIVNDYDFVSAETLSLIDIEKQFSLYKNVSDDSWFKFTNILSYKLAERGKIFHQVNKWYPSSQTCYRCGYINRNLQLADRDYNCPKCKFHIDRDYNAAKNIRDQGLREAGFKIRYLNFNSSQTPVPTIPEQDKRS

SEQ ID NO: 10256 - protein, 425 aa, Burkholderia sp.
MQRRKVTFRLYPTATQAERLTAWTRLHCELYNAALEERIDAYRKTGRSIGYYEQQNVLPAIKADRPEFVGLGSHALQQTLRRLDLAFQAFFRRLKAGQTPGFPRFKASKRFSGFCYPDPAGWKLMQCGARGATIRLGSGKDAMSIRARGRHRFGDSVKPNDLTILRKNDEWFASVTLRVSAAASARVRSGDDHRGVDFGINDWATFDNGETIANPRFIRNELARMADLQRCKARKQRGSVRHKRLGRQVARLHTRIGNLRREFLHTTTSGMVASCAVLATEELRTQNMSRSAGRTNDKPGRMVRQKAGLNREILSAGFSMTHKMLAYKAVEAGTRLHISNALQLKPSQRCAACWEIVPKTLAQRVHECPHCGHSAPRDQNAASVVLIDAHTPGTGVAVRPKPLSRQRAKSKSVTRETPATVSNDV

SEQ ID NO: 10257 - protein, 380 aa, unknown
  TnpB Polypeptide
MEVKFVMTIKHKAFKFRLYPNLEQANKIKQTIGCSRLVYNQFLDFKIYDYKTNKTSNSYNACSKLLTKLKLALPFLKEVDKFALQNSLKHLNSSYENFFKNGFGFPKFKSKHNPINSYTTNFTNNNIKILDKHIQLPKVGKVKYKGYKNNNIGAYKIISATVSRNNLNQYYCSICCEVNITPLPTLTKEVGIDLGVKTFATLSDGKIISNPRTLFKYEKELKKQQRKLSKKEKGSKNREKQRLKVAKIHQKIANIREDFLQKETTKIINENQVICIEDLSVKSMMMSDKYKNLAKELANVSLNRAVTMLSYKADWYGRKLIKVDRYYPSSQLCNCCGYKNTTLDINDRQWVCPSCKSKLDRDYNASLNILTEGLRISHSS

SEQ ID NO: 10258 - protein, 374 aa, unknown
  TnpB Polypeptide
MNKAYNFRLYPTKEQEILFAKTFGCVRFVYNKMLAERKDTYEQFKDDKEELKKHKSPTPAKYKSEFEWLKEVDSLALANAQMNLQTAYNNFFRDKNVGFPKFKSKHRDKNSYTTNNVNNNIRIVDKKIKLPKLGLVSVKQHRQIPSNQIIKSCTISKTPSGKFYISILVEFEQEIILVSPKKENVLGLDMDMKNFYTDNQNMKADYPRFYRNSLEKLAIEQRKLSKCVKGSNNRNKQRLKVARLHEKIANQRKDFLHKKSRELVNLYDAIIIEDLNMKAMSQCLNLGKSVSDNAWGMFTVFLKYKLDNEGKLLVRVDKWFPSSKKCNDCGEINKELQLSDREWICKSCGCIIDRDYNAAKNIRDEGLRLLGLVA

SEQ ID NO: 10259 - protein, 542 aa, Streptomyces sp.
MADLRPVAAPVVAHGPSGVAVRDRPKHLTPEDEKVLRLVGAHLGSLASKDLKTRCRDGLEHSTDTWAARKRGLTAESSSRWAGAITKATHDQWALARRGQAAHVQSLEAGITTIRHRLSLPVGEKGSKRAPGGYRSTHEWFHKTRRLHVLEERLDQVQTDREAGRVHVVRGGKRLLGTRHNLDTAQLTEDEWHERWEASRWFLQADGESGKRFGNETIRITPEGEVSIKLPAPLAGLSNARHGRYVLTAKVRFPHRAQEWADRVEANRAVAYRIHHDVQRGRWYLTASWQHPVTKTIPMATALAQGVVGVDTNADHLAVWRLDTHGNPIGRPRRFFYDLSGTAQHRDAQVRHALTRLLNWTKACGVKAIAVEDLDFQAEKTREKYGHKRRFRQLISGMPTGRLRARLTSMADATGIAVIAVDPAYTSKWGAQHWQKPMAGPTRKTTRHDAASIAIGRRAQGHPIRRRTTPPRAHQSDAHGHRTVQADRRAPGREGPRPRIPGPRTRSVPPGAMSTRATRTSKTVRGVRSDQVSVQDSLLLTE

SEQ ID NO: 10260 - protein, 383 aa, unknown
  TnpB Polypeptide
VFRAYKFRLWTNVNQERELEIMLETHRRLYNAALGQRRWFYDEWKISRSYSDQSGWFKDERESNLWFAAINFSSAQATLRRLDKAFANFFRRVKAGQEPGYPRFKSADRFNSILYPSHGDGIRLKGNRLRVQHVGVIRVCLHREVEGTIKTLSLKREADKWFLVVTSDVGVPSPVGNILPAVGLDVGLTHLATLSNGEKIENPKYLKQELPLLRRAQRSLSRKKNHGSNRKKAKRRVTRIHARVANLRHEHRHKISNDLISRYGKIAVESLNVQGMVKNHRLARAISDVAWSSFVEVLTHKAERAGGEVVQVFPNHTSQLCSACGKNVPKTLAVRVHRCGCGLVMDRDQNAARNILERAWPGTGQLGISLAVAALPKEAVCFS

SEQ ID NO: 10261 - protein, 412 aa, unknown
  TnpB Polypeptide
MPAAVNGEMLVKGVVFTMESNLPTEARFLLEDFRLVVNNAIRAGLQARVTSRNALVRLAYRDFRQEHPKMYSQHLLSAFEVACSVLKNYRRRVGIGTACKTPYVKRLMMKAENQAYKLNRSSGTIDLPVRAGCHVELKLVVSQFHRKYLDDSTLSLGSLTVLPDRVIVIFRKEAPKPYVPGAALSFDTNERSLDGVFVDRIGTSVVKADFSDVAVIQQRHHDRRKRLQKKKSHDRRIGRHLCRREGTREHRRIEYRLHQVANAVLSFAEKKRSAVVLEDLRGFRFKRNKDLNRRLSMWPRRKLHTIIEYKSQWRGIPVFKINPRYSSRKCPICGRIQDSRMGTEFSCECGWHLDKHVNASINLLQTAISKGMAGGLRFDPGAFQHDVMMILYEPAMAARSEPNGTSCVNGVT

SEQ ID NO: 10262 - protein, 487 aa, Shigella sp.
  misc_feature (136)..(227): Xaa can be any naturally occurring amino acid
VKRLQAFKFQLRPGGQQECEMRRFAGACRFVFNRALARQNENHEAGNKYIPYGKMASWLVEWKNATETQWLKDAPSQPLQQSLKDLERAYKNFFQNRAAFPRFKKRGQNDVFRYPQGVKLDQENSRIFLPKLGWMXXXXXXXXXXXXXXXXXXXXXXXXXXXXXXXXXXXXXXXXXXXXXXXXXXXXXXXXXXXXXXXXXXXXXXXXXXXXXXXXXXXXXXXXXXXXVTGVVKNVTVSQSCGTWYISIQTESEVSTPAHPSASMVGLDAGVAKLATLSDGTVFEPVNSFQKNQKKLARLQRQLSRKVKFSNNWQKQKRKIQRLHSCIANIRRDYLHKVTTTVSKNHAMIVIEDLKVSNMSKSAAGTVSQPGRNVRAKSGLNRSILDQGWYEMRRQLAYKQLWRGGQVLAVPPAYTSQRCVCCGHTAKENRLSQSKFRCQVCGYTANADVNGARNILAAGHAVLACGEMVQSGRSLKQEPTEMIQATA

SEQ ID NO: 10263 - protein, 429 aa, Lyngbya sp.
MMGNCQVRFLGGRDAVTYALLPDNKAVRLWRDERDVNQSRISRLCKELAKEFPFAKKLNSMARQASGERAWNSISSFYRNCRQGVKKKGYPQFKKHSRSVEYKTTGWKLSDDRKSINFTDGFKAGKFSLFCNKAVREDLFTLKINRVRVVRRADGYYAQFCFDGLRSEPGEYTGKVVGLDLGLNYFYKDTNNNAAIYPKYLRSSEKRIQKLQRRLSRKFVKGVQPQSNNYHKARKRLGKCHLKVQRQRKDWAVKLARCVVTSNDVVVYEDLKIQNMVKNHHLAKSISDASWYQFTQWLDYFGKIWGKTVVSVSPHFTSQDCSNCGFRVKKTLLSRTHKCPKCKTEICRDTNAALNVLKKGMSILGTEFQQYSGATSCGEPALEEAHQESTQGHWEAASFEGKLGETSTSVNEEKSDLISRVDEPRISNS

SEQ ID NO: 10264 - protein, 374 aa, unknown
  TnpB Polypeptide
METYTLGYKFRIYPSKTQEILIHRTLGCVRFVFNHFLAVRRDEWKVNRNPLTYVKTSRLLTDLKKREETAWLSEVDSMALQEALRDLDHAYENFFAKRARYPRFKSKRSHSQSYRTRNQSGGIRIEGNRIKLPKVGFVKIKQSREFVGRILNATVRRAASGKYFISLCVEMEKESLLRPNGGKQIGIDVGLRAFCSDSDGNVTQSPRPLKKLQRKLCREQRRFSRKLPKSMNRDKARVRVARVHERIANIRRDFLHKLSTQLARENQTVAVEHLNVKGMLRNHRLAKSVSDASWSEFFRQLTYKTELHGGELLKVDTFYPSSQTCSACGYQNPLTKDLSVREWDCPKCGTHHDRDVNAAKNILCKALEDKSTVA

SEQ ID NO: 10265 - protein, 396 aa, unknown
  TnpB Polypeptide
MRSVVSAKIKIIVNPEIVKTISVYKKALQFCVDYAWEYNITQNFKLHYAIYHDVRKRFGLPSQLTVGCIRQACSMIKTSITSFNNLSKKRQAKLETPTKPFVDKVAVSYNFPRTANLKGNLLVIRTMNKRLSFDINIPDCYAEYFTWGKPDESLLMIDRKQRCFFIFTFSKEVTATEQNNASQQVLGIDLGVNNLAVCSDSRFYNSAKVKQVKRKFKYLRSKLQSKGTRSSKRLLMKISGRETRWMKHINHCISKDVVSNFNGNKIVMENLKGIRKKQRGRIMNYWISNWSFYQLQSFIQYKAERKGIIVDRVKPNYTSQICHKCGQLGSRSKGCFSCHCGLHNFNADLNASRNLAHPMLDERQAFVTKPYSRGNEAEGISQDAIEAELTAKSPAL

SEQ ID NO: 10266 - protein, 582 aa, unknown
  TnpB Polypeptide
MEDGLVLRRLVSFMESRETLLDDGQTLVLLSLKERLAINVLISYLQMVFLQYQKTPEKIICMLEFHLKSKRTIWKDKYHFYPVNTQAISLLKTLLQVSTIKEKGFWDCWKKVMQEKSMKSWYLAKTDCVVSDSNYLNGRFYKTIQNSWFTNSQTNHQNKNLLKTFLPFYKFLLVGGMEKEDIELIRSRKYRLKLNSIQKKTFKKWEQHYRWTYNKSIGLINNGNNHCVDTKNIISHLGPIEQTASTGNYYTKFGLRNLVTSEEVNCRNPWVLETGYNIRANASFEAHQAYKTNLEKVKSKSIKYFDLKYKRKRNITWTIGISKENIIQKDPKRLFIYESTGIVTSTEAIPEINKDCKLHFDGKYYYLIVPRTIEKRPSKAKNWFCSLDPGVRKFQTLYSPDGNESIIIGDRASTEIYKLLLKLDKCNDSTKEVKLRHRIKNLQKELHDKTSRFLCENYNNIYIPKLTKENDIISNKNRTIRKKTVRNMVVLAHCKFVEKLKTKANEYTNVNVHVITEEYTSQICLSCKKGTKCGTELYKCKYCGFQTDRDYLGSCNILLKQWGLLEVPRQDTANVDMRFSVM

SEQ ID NO: 10267 - protein, 475 aa, unknown
  TnpB Polypeptide
MCSERRVIRQAYRFELDPNQVQRVLLTKSVGASRYVYNWGLAESQREYEIAGRRPGHSELKKRLVGLKQGEAPWLYEVSAHIGQQALVDLERAFDRFFKSLKGELPKSGYPRFKRKGERDSARLYEVVLEERHLRMPKIGRVRLKETCSAHGFEGRILSATIRRLADRWFVSICVEREREIVLARPVARPWDVVGVDLGLKAAAAIDDGSTTRVVAPQQALRRKLAKLRRLNRQLARKQKGSANREKAKLELARVHYRISCQRQNFLHQLSSSLARTKPVIVLEDLNVSGMVRNRHLALSISDAGMSELRRQLAYKSEWYGATLLIADRYFPSSKLCSSCGVIKTNLELDERQFDCDACGVSLDRDENAAINIRAYGLNTLGSVPLPADRRKVTPDGEEGPGSSTTGVKPASLKQEALARGSRRVSRRSTPKDVLVRVERDRRPQLSPYFNEGGDSRRAGSAATARSPGARSPRP

SEQ ID NO: 10268 - protein, 166 aa, Salmonella sp.
RLTALKKVPEFAWLNDVSCVPIQQSLRHQQAAFSNFFAGRAAYPAFKSKCHKQAAELTASAFKYRDGSLYMAKSKTPLDVRWPRPLPFTPSTVGIDVSLKYLFVTDTGFKSGNPRHTAKYAARLTLKQKSQRLKEPRQSPLKGGPTPRENCRLPNGCLTQGHPQTD

SEQ ID NO: 10269 - protein, 147 aa, unknown
  TnpB Polypeptide
MQFGSHHYDKQLYRVRVLQEHTANQRKNFCHTVSTAIAKQYDAVFVEDINLRGLAGSLKLGKSTNDNGFGMFRTMLEYKLASQGKTFAKIDKWYPSSKTCSVCGFIKDDLTLADRVWTCSACGTTHNRDHNAAINIRTVGLLGLYPA

SEQ ID NO: 10270 - protein, 422 aa, unknown
  TnpB Polypeptide
MMYSPRFRLLPTTVQREAMDWTRNTVRQVYNHGLREFNNIPDDAGTLRQRVWSVRDTLPAMKDWWSDLKHVYSTVLQKAIERIRDNIQNLGKLKAKGYDVGSLKWKKPREYRSFTYRQSGFELDKKSGPDGRGLLVLKKLKGETREIPIRLHRDLPDHEQIKEVTLKKEPTGAWYVSFCIKTDEPEKPDVEDITPGDTVGLDLGVLNFVHDSDGRSVGRLDLSADRERLEREHRSLSRKQEGSNNWEKQRRRVATVHARMTAKKQDFKHKLAHFYTTQYDAVFVEDLNVRGMLEGPGNARNKAEVGWRDFITILEHHGDKNACHVKEINPRGTTKECSSCGVETRKPVWVREHSCPSCGFELDRDWNASLNVLARGLPKLGVVHSEETPVKTVTAVDTQNVSASRVVETGSPCLKEAASAAE

SEQ ID NO: 10271 - protein, 379 aa, Methanosarcina sp.
MLLNHIMRCMMKAFKFRLYPTTTQSVQLNQHIGNCRFVYNWALDKKIKTYEQTGKSISRFDLNKLIPVLKTSNEWLGEVNSQSLQGMTKQVESAFTRFFREKNGFPKFKSKKNPIQSFPVPQHYTVDFEKKTIKLPKIEPIKAIFHRKFEGELKTATVSRTCKGHYYISILVEDGKELPVKETFTESTTIGIDVGIKDFAVLSNGEKVENPKYLKNSLQRLKVLQKRVSRKQKGSKNRAKAKQRLAVLHDKIKNQRNDFQNKLSFRLVSENQAIALETLNVKGMVKNHHLAQAISDSAWSSFVTKLEYKAEWLGKTVLRIGQFEPSSKLCSVCGFHNKELQLKDREWTCSDCKTKHDRDINAAINIKKFALIDQNLIGL

SEQ ID NO: 10272 - protein, 209 aa, unknown
  TnpB Polypeptide
MASSKVGVDLGVKTLATLSTGEIFTGAKSYQKAKHKLAKLQRIVARRKKDSANRFKAVKALARLHQKIANIRSDTLHKLTNYLSKNHAVVGIEDLNVSGMMKNHCLAASIGDMGFYEFRRQLEYKCPLYGSKLIIIGRFKPSSKTCSNCGKVKEVLALSERVYRCDCGLELDRDFNAAINIEKLTREVLSCLLVDGVLPTVPDEIRSFC

SEQ ID NO: 10273 - protein, 405 aa, unknown
  TnpB Polypeptide
MLRKVVKVRLIPTNEQQHQLAKMFGCSRWWWNFALNKSIETYKETGKGLGQSALNALLPKLKKEEETEWLGECYSQVLQATTLNLTTAYRNFFDGRAGFPKFKSKKGKQSIQYPQNVKIVNSYVKLPGDIGEVKASIHRTIDGRIKTVTISRTPSGKYFASILFEVEGENPKTAEGKIYGIDLEVKHFAVVTDGEKVSKYDNPKHLAKHEKNLKRKQKKLARKKDGSNSRYKYRKFVAKVYERVANARPDFLHKLSHKLTSDSQAVIVENLHVKSMVRNHNLAKAISDCGWGSFVNFLTYKLKRKGGKLVEIDRWFPSSKLCSNCYYQVDEMPLDVREWTCPHCGTHHDRDGNAATNIRAEGIRMLKTEGTAVSADGGEVRPRSGRKSVLRHSPVKSEAPTIPSG

SEQ ID NO: 10274 - protein, 221 aa, Azotobacter sp.
VSCLCGFEPETLPVVPKTLGIDLGLKDLFVTSEGERFGNPRHTAKYASRLALAQRRLSRKQLGSKNRAKARRKVARIHAKISDCRADGLHKLSRRLINENQVVCAETLAVKNMICNPKLSKAIADAGWGEFVRQLEYKGGWAGRQIVQIDRWYPSSKRCSCCGHTLERLPLDVRRWSCPECATEHDRDVNAAINIKAAGLAVLALGENVSGMGQVSMSCSR

SEQ ID NO: 10275 - protein, 354 aa, Escherichia sp.
  misc_feature (266)..(269): Xaa can be any naturally occurring amino acid
VKRLQAFKFQLRPGGQQECEMRRFAGACRFVFNRALALQNENHEAGNKYIPYGKMASWLVEWKNATETQWLKDSPSQPLQQSLKDLERAYKNFFQNRAAFPRFKKRGQNDAFRYPQGVKLDQENSRIFLPKLGWMRYRNSRQVTGVVKNVTVSQSCGKWYISIQTESEVSTPVHPSASMVGLDAGVAKLATLSDGTVFEPVNSFQKNQKKLARLQRQLSRRVKFSNNWQKQKRKIQRLHSRIANIRRDYLHKVTTTVSKNHAMIVXXXXSGGQLLAVPPAYTSQRCACCGHTAKENRLSQSQFRCQVCGYTANADVNGARNILAAGHAVLACGEMVQSGRSLKQEPTEMIQATA

SEQ ID NO: 10276 - protein, 294 aa, unknown
  TnpB Polypeptide
VTELTKTLELKLVDPNAHKREKLRETRAAYQQALQEAFDANCTTLGEANDIVGDYELSGYAKNALKRYVPQLTTTYGANELSDDHPVRFTNEGGKIDHKPENRVEWYVKVPHHEDYHLWVPAQPNPEQRDWLEAVIAGDADVGEGRLLKREGTWYFHLIATRDIPPNSEDPPKERTPIGVDIGEASLVTVCHRDEHGSPTNPELWTDEGKTVRRLRKRYFTTMRRLQRRESERIADTFGDELWAQIDDILHTVTREVVEYAESVETPVLVLENLTYIQESMDYGDYMNRRLHGW

SEQ ID NO: 10277 - protein, 451 aa, Planosporangium sp.
VIASREKAPKHGPGRLVVDGTDHVLHRKAQFALHPGAAAEARLLALLAALCECYNAALAERRDAYRATGRTVSLFEQYNQIKDLRGVRDDVLAWGIQPVRSALKRLDEAMAAFFRRVRAGQVPGFPRFRSRSRFDTACWDEPTSWKLGKDAETGRWRLAVQGVGTVALSKKASRQLDRLVKRGGDPATLTITRRRAGTGWVWRATVGFKNVTTQPLPGTGRVIGVDRGVAVTAATSDGQLLRYPAQAQAARDTAVLLGQSLAGKKRGSRAWRKTVRTIARERCKAAAIVDNWARETAKTIVAAADVLVVEDLELKNMTRSAKGTVDKPGRNVRAKAGLNRSLSGAALGKLATRVAVKAEEAGRTLWRVNPAYTSQDCPACGHRRKGNRDRTVFRCLNCGHTTHADVNAAVNIAAAGQQAHTVWQAAGAPPLARPKPRLRRRTADQPLPAAA

SEQ ID NO: 10278 - protein, 291 aa, unknown
  TnpB Polypeptide
MTINSLFRSQTCIKIHSPIEITIPPILVDKHIKEIRIIPKANARFFEIQYIYKTECVQRNLNHNNALAIDLGINNLATCVTNTGESFIIDGKRLKSINQWFNKKNARLQGIKDKQGFGKGTTNRQKAIARDRNNKINDYMSKAARIITNYCIANDIGTLVVGYNETFQRSSNLGKQTNQNFVNIPYGKFRDKLRYLCELNGIAFVKQEESYTSKASFWDKDNIPVYNADNPQEYEFSGNRIHRGTYKTKDGITFNADINGALNILRKSSVVSLETLYGRGEVDTPVRIRVA

SEQ ID NO: 10279 - protein, 436 aa, unknown
  TnpB Polypeptide
MKLIGDLNALEISIGIYRQTLSVLIPIINDNWETLSEYKFANQKYNCIEKWIHSTATNQARFDFDVQFPKLPNYLRRSAIAQSLGIVSSYRSNLANWEKDPKGQAPQLSLTHYAYPAYYKDGLFKNFDPIRQTIELKVFKNGDWVFETYKLKTSDCTYYQNHLTGKKQNVPIIQKKGRRFYATFSYEENVPLVPEESISKICAVDLGLGTDATCSIMDQDGTVYARKFISFGEEHDRLHTQLGRIKRNQKRGSRHNKTLWRKVAGISQDIADKTVKAILDFGNEHGVDVFVLEYLDFKGKNAVKRAHFWRYKRIYKVLAQRAHQYGLRIARVNARNTSRLAFDGSGWSKRGREITPETPYALMEFPNGKTYNADLNASYNIGARYFIRHLLKTVTETQRLALEAKVPQVAKRSTCTLSDLINLRSEFDVLTSKIQA

SEQ ID NO: 10280 - protein, 428 aa, unknown
  TnpB Polypeptide
MGCHPGVTQACENALVGSRFDGQLRWLHKVRLYPNCAQERALIEMLRVTRELYNALLQQRVDLWRNWRKAVPAREQYAQITELRAVDPRFAAVYRECEDAVLHRLDLAFAAFFRRLKRGQTPGYPRFKQPSCWNQLEFPHGDRALTLDAGQLRIRLPGVGAVRLRKGRSVPAFGRAFVVTKNGRWYAIFEGHRCRAPLPQTGRSVGIDRGIRVLAALSDGQQIPNLRPGSRRRKLLAHHQRVLDAVTQKGTGGLVLNRHDPVRLAAARRFARAKEREANARRDWLHKVSRRVVDRFDRIAIEALRLSPMTRSAKGTVNEPGTNVRAKAGLNRALLDAGFGILATLIREKAEYAARTVIEVDASYTSQTCAACGFVCKESREGSQFACVRCRHKADADVNAAQVILLRAESLPPTRAPGLARGGLHNAA

SEQ ID NO: 10281 - protein, 267 aa, Agaribacter sp.
IETYESLKADKEAWKTVKHPTPANYKKEYEWLKEVDSLALANAQLNVDKAYKAFFKGNAKFPKFKSKHHKQSYTTNVVNRNIQLLDGHIKLPKLKMVKIKQHRAIPSEYNIKSCTLSMTSSGKYYISILTEYEKEIKRKEIEKVVGLDFSMGEKANYPKFYRQILNKLAKEQRKLSRKKKGSANWNKQRIRVAKIQEKVANQRKNFLHHKSKELVSNFDAVVIEDLDMKGMSQALKFGKSVADNGWGMFPSFLQYKLKEQGKQLIKI

SEQ ID NO: 10282 - protein, 514 aa, unknown
  TnpB Polypeptide
MASKSAVSRTYPRTPYAAFSKDGESLDLNEVLDGIRKDAELVAHYALNEMTEQNLALVTYFNGIKPAEAGRQMNLKLPAEVKKQFKSGASRLEKMFQEQVVSNLRSWAARVEVMTQTYPKYVSAGWKRTASDSKPTSMQPRLALSAADRHYREMSVTPERVSLDMVVQGSWVTLHFPTPSQLLEQGCEPGVPDIWIDKNNRVVFGFCGKTDPGRPKFSERYVIGVDVGVKHPAAYVVWDTEKKEVVERSLLGQRARSLSNKIKRGQVQVTSLRKKGKDEEAVSHRQHLSNRRKELSIFIAQELANVSWRYGNAIVSFEDLSHIKNTMKHGRWFRGEVYRRTRDMVEADGGRVMKVNAAYTSRRCHVCQTDLDMSDYSSPVCESCGITHHRDLNAAANIAQRVNVKKACQTRKRHATKTKRIRRSKCQLKPLKHPGTKNRPTPKAPQNQKKRKTSILNYPPLPKKEVSVRMCPADHRVSAVDHRGDSWFQTTSGTTVPKKNQSTANTVDVVYTRE

SEQ ID NO: 10283 - protein, 403 aa, Moorea sp.
MIILEFKAYGKKKQYQSIDEAIRTVKFVRNSCLRLWMDNKGFNKYDLNKYCKTLAKNFPFANELNSTARQAAAERAWSSIARFFENCKKKVSGKKGFPKFQKHCRSVEYKQSGWKLSPDNKSITFTDKKEIGKLKLKGTWDLWGFDKKQIKRVRIVKRADGYYVQFCVSVDVKEQLKPADATVGLDVGLKEFYTDSRGKTEPNPRFYRTGEKRLKFYQRRVYRKKKGSANRKKAINRLGRTHLKISRQREEHAKRLARCVIRSNDLVAYEDLRVKNLVKNHCLAKSINDAGWYQFRKWIEHFGTKFGRVTVAVNPAYTSQNCSECGEVLKKSLSTRTHVCKCGCELDRDHNAAINILKRALGTVGHIGTLVLNQNACRESTSTLPDSGLVEQVGSLKQESPCL

SEQ ID NO: 10284 - protein, 209 aa, unknown
  TnpB Polypeptide
VRILPRCKALWFEIEYVCEAEPEKVDLGLDNFATCLSTSGAAFIIEERGLKSFNRWWNKEKAKLQSIYDKQGIKMGKKMAWLLRKRKNVINNFMNQAVNYIVKYCLANRIGNIVIEELKKIKQNMKLGKKNNQNFQYIPYGLFKQKLRAKCEYYGLNYIEVDEAYTSQTCSICGDVSKNNRKHRGLYVCRECGFVANTDVNGALNILKK

SEQ ID NO: 10285 - protein, 315 aa, Frankia sp.
LSPDAAQVEALLAQCGHARYVWNLGHEQRAAYRPGRGPTPGYHEQARQLTEARAEHAWLAAGSQIVQQQALRDLDQAWRNFFNGTHRRPGFRRQGVHEGFRIVGPAASRVRQDNGRWSSVLVPKVGWVRFRRSRTVARARRGSNRRGRIKGQIARLKAREADRRKDWVEKTSTDLTRRYDMIRVEDLNIQGMTRSARGTVDNPGRNVAQKAGLNRGILANGWGLLVRRLEQKAPGRVERVPAAYTSQRCSACGHTAPGNRESQAVFRCVACGHTAHADTNAACNIAAGRAVTARGGTVLAGPVNREPQQHELLFG

SEQ ID NO: 10286 - protein, 454 aa, Acidimicrobiaceae sp.
VETETPLAAKGKTGPLVSRTGQVLSRSVTFQFALDPTLEQRVLFAKCAGARRYCVNHHLGRVKENLDLRVTEREAKVESESLTPGLSWSAFSFINEFNAWKNGLLETSLTGDDGERGLHWRNEIPESVFECASSDAARSLKNWSDSRKGERRGATVGFPRFAAKGRSTPSFRLRNRTTPGETNAIRFTDASHLRLPKIGSVKVHGPTRRARRMIELGRFHAYSATVIQRGGRWLVSLSGVATEFHQAQRSPATRHRSPVGVDRGITSLAVCADANGHFLAAFEGVRELRTAEQRLIAAQKTLARTTPGSTGCEKARARLNRRHCRVALTRKHLVHQASSQLVRTCAILVLEDLNVAGMTRNRRLAKSVSDAAMGELRRQIEYKAKWHGVEVILADWFFPSSKTCSGCGQVKDSLDLSERIFTCTVCGLTIDRDLNAAVNLARWTPAVAVEIPST

SEQ ID NO: 10287 - protein, 330 aa, Archaeon sp.
VSELSKDGVRARSFTITPTSLSISIQKDITEIKPEGAIGIDRNLRNITISTSHRAIMYRTEKILSIKENSQHVKASFRRFDVRVRNRFFTKLRGRQTRRVNQYLHKISKHIVEEAKRTKSMIVFEDLVGIRKLYRKGNGQGRKFRRIMNQTVPNYEIQRQVTYKAKWEGIPVYFVDPKRTSTLCPICGGPLQEDRQNRRKVLCSNCGKTMDRDVVASMNVAHKGWARFTHPGGLSDEAMKENVIPGKYQEPLILRVDGRSWLRRPDAGLAKHLPSGLVNYTEPLVVYKIKQRTAQNNSTSHQYHIYIKLNYSKNWRDYSKDWQDRKAFYI

SEQ ID NO: 10288 - protein, 421 aa, unknown
  TnpB Polypeptide
MYEERNRKIRETGKATRERRSNMDCRVISLKIQENRLSKAKLEKLYRCFLEGKWLYNAVVATETLSLDDTSTVQIKVNNTFEVREINTLSAQMRQSVVEDVRQDIFNLAKAKKKGLKVGRLRFKKECNEINLKQFGQTYSIKGKNRIYVQRIGVLVVNGLEQINIDEVEFANAKLIKKPSGFYIHLTVYTKKQSEVSTEKEIIGLDMGIKNQLTFSNGVKVSFYLEESEQLKGLVRKLNRQVKGSNQCRQTLNRIKRIFEHQNNKKNDVVNKLNHVLKTDYIVCFQDELLNSWKRTKSRHKFSFGKQVQHGILGRVKGKLKKNSSNVMLNSSVPTTQTCPVCGCLTKHSLDKRKYHCKHCGFENQDRDIHSANMMVLLSGYGTYRSLNTDTVSTDRMVGLLDNLSHLGVVVKTTDSMEAPH

SEQ ID NO: 10289 - protein, 361 aa, unknown
  TnpB Polypeptide
MLKAYKFRIYPNEEQKVYLAKTFGCTRFIYNKMLADRIKAYEENKGKDIKAMKYPTPAQYKNEFQWLKEVDSLALANAQMNLDKAYKNFFRDKSIGFPKFKKKMGTNNYTTNNQNGTVYIENSHIKLPKLKSMLKIKQHRQFNGLIKSCTVSQVPSGKYYISILVDCENIELPEIDKKVGVDLGIKEFAITSDGEFFSNPKHLKKSEKRLAKLQKDLSRKQKGSNNRKKARIKVSKLHEKIAKQRKDMLHKVSTQLINENQVIVIEDLKVSNMIKNHKLAKSIADVSWSEFRIMLDYKAKWYGREIIIAPSNYASSQLCSNCGNQSGQTKDLSCRTYTCPVCGMIMDRDINASKNLLKLAM

SEQ ID NO: 10290 - protein, 377 aa, Synergistaceae sp.
MITYVFKLYNSKKNKRLNKTINIASFIYNHLIALHRRYYRMFNKMIPVYQIQLHITKLKKTKRYAFWNNLGSQAIQDVAQRIDRAYKLFFNNLKRGVRTSPPCFKKVRKYRSFTLKQTGYKYSGDNEIAIMGRKYKLFKSREVKGKIKTLTVKRDALGDYWLYFVTEEEVQPIEARSGKSVGLDFGLKTFLTTSDREKIESPLFLRQASRKLKKLSQKLSRKKGGSKNREKARLNLARMHRRIANQRRDFHYKLSLDIARRYASIFVEDLNVKAMQRLWGRKISDLGHAQFLKILDWQKYKNGCQGLRINRFYPSSKQCSACSYVLPKLELSVRAWTCPECGTEHDRDVNAAINIERVGASTLKGEDVRLASASNLC

SEQ ID NO: 10291 - protein, 411 aa, unknown
  TnpB Polypeptide
METIYRAYKYRIYPTQEQKILVNKHIGSCRWLYNYALEKKTTAYKKDKTRLSRFELSSDLPKLKKQEETMWLKEVNSQSLQMSLKNMDEAFIRFFRDKKGFPKFKSKHGSRQSFSIPQSIKVDWENKRVSIPKIKNIKFALDRKPTGQVKSATVSRTPTGKYFISILVDTGLEPPEKHKIKEETSVGVDLGIKDFLITSDGEKVKNPKYLKTHLFRLKRLQSRASKKTKGSNNRRKSNLKAAKLYEKISNQRTDFLHKVSSKLISENQTICLEDLNVQGMLKNHKLAQSISDCSWSKFNEFLEYKAEWNGVNIVRIGRFEPSSKMCSKCGHIKSDLTLKDRVWNCSECSMTHDRDINAAKNILDFGLHRNNLVGAGRPKVKPLENTTSGFCESKNKVGSMKEETQGSLALG

SEQ ID NO: 10292 - protein, 380 aa, unknown
  TnpB Polypeptide
MKRKNMIKSYKYKLKPTVKQQQQLNMFFGCARFIYNWGLNQKIQTYKQDKKTIGYVELAHELTGFKHKEENEWLNKCPIEPLQQSLRNLDAAFVRFFREKKGFPKFKSKKKSRDSVKFIHAVHFNFEDWKVKIPKIGWTKLCKNKTFDDTSCKIGTLTVSRDKCGEYWCTIVVDNLQPKPSKTKIVLATSVGVDLGIKDYVILSDGTKYGNPKYLEKYSRKLAHLNKVFARSKKGSKNHEKLRLRIARLYRKITYMRSDFTHKLSTDLIRRFDTVCLENLNIESMLKNHHLANSIQSAAWSEFVRQLEYKAELYGKNVVYIGRFEPSSKTCSKCGYINSELTLATREWTCPQCGEHHDRDVNAAINIRDFALHKQNLIGV

SEQ ID NO: 10293 - protein, 546 aa, unknown
  TnpB Polypeptide
MITQSKYGKGFVSHDMTRQKYGELYSFAVSIRNHKNKVSQYVCNNLLHFLEYNRYQFLKEMRTAFNGDIPSSFDAQAYQQVFDAYQNKFDGIQRKLKFENILFVGFEFYKRDTKKNKKGGLKKVVTKHSDTPLSTCLTYLARYGNENIVEYITNQLPTCDNKKRTFYENILRCCDKFSFNRLYKLALSKRNRTISHYAEHPIEFKSLTFSGRSRKTKIVDYNSHYGSVINSYISLSGIGRKSFDIPVKFSKEYHGSMKDYFKSNPDYEYTLTFNEKYKQICVYLCKDGERYIPQAGDNVIGIDVNCKHNLFSLSDETTYDYDRKLVNDYCKFCLEVDKLKENKGYKVGKRKQQKLDTLKVKIVKSEQQLIANMCKELQAQGVNHIVMEDLDNGFGKCYVKDADNEDINYNRKVKFLGLSSLKQEVEHIARKYDIAVSTVQASYTSKMCPICGCIEDENRPNQETFKCIECGYESNADFNAATNIKNRVCEAVLRNMLLKQLDNGAYEPRKLKREKVKEVLLSFRRSLQKNMGSECRECIVNTFEYV

SEQ ID NO: 10294 - protein, 386 aa, Brasilonema sp.
MAYKAFRTKLKLSTQQKPVMAQHAGYSRWVYNWGLKLWEQAYKDGLKPSVGMLKKFFTNHVKPQYQWMNQLSSKVYQYAFINLGEAIARFFAKKGKSPRFKKKGKADRFTIDNSGAPIKVGGLRHKLPFIGWVRTYEALPECITKKVTISQQAGDWYLSFHIEIPEASPTPKSIDRVGVDLGVNALATLSTGAVYPNLKAYRKAKHKLAKLQRLASRKQKGSNNRHKANIKVARQHRRVASIRNDYLHKITTYLAKNHGEVVIEDLNVSGMLANHKLASAIADCGFYEFRRQLEYKCERYGSSLVVVDRFYPSSQICSNCGYRQKMPLKERVYICPCCNVSRDRDLNAAINLSNWGRLDPGKPVEQVPPTVCDETGSKRFKQLCLF

SEQ ID NO: 10295 - protein, 432 aa, unknown
  TnpB Polypeptide
MALGWVMLCTMKRIERIRLYPTPHRAAALARMLDVTRDLYNALLQQRRDSYRLRRISLTARMQYAELTELRGEDTRVRATYRECEDAVLHRLDLAMRAFFRRVKRGEAPGFPRFKSRSRWTQLEFPHGDRALRFDAEQRRVTIPGVGVVKLRKGRAVPTTYGRAWLLCKSDRWYACFECERAVQPLPATDAVVGVDRGVHVLAALSDGRLIANAAVGERRKAASARLQRELEAVTVRDGAGRVLNRRDPQRQKAQARLGRAKEREANARRDYAHKVSRQIVNGADVIALEKLRLRAMTRSAKGSVERPGRHVRAKAGLNRRLLDSGFGLLRQMIVAKAEEAVRTVVEVDARFSSQTCAHCGHVASESRRRRRYCCIACGYATHADVNAALVIRGRAQLALMSESTRPRTPVAAIRMSRRRHTQRKASTRTRT

SEQ ID NO: 10296 - protein, 432 aa, unknown; identical to SEQ ID NO: 10295
  TnpB Polypeptide

SEQ ID NO: 10297 - protein, 390 aa, unknown
  TnpB Polypeptide
MGVKLTKTVVLKLAEHDKSLDKTLKAYSEGLNFASKVVYENGKPISANNLQRICYPILRNKIGLKAQMACNVCRQVAGAYKSMKSNREWKLAEFDARTMVLSYGRDFSFKGEYLSITTLDGRKKYKLIIYDYAKQYFDGTWKFLASRLVKKGNEYYFHLSVEKEIPDVDLSKAKKFMGVDIGLNYIAVACTTDLECKFFGGGIIKHIRHMFVNMRRRLQKKGTRSAKRVLKRMAGREKRLINNICHTVSKRIVEFAVKKGVDVIGLENLNGIRKRAKVRKKQRYDFESWIYRKLQFMIEYKAKERGILVVYVDPKHTSITCPRCYHVNKANRSGKLFRCKACGYTLNADLVGARNIERKTREFRYMRDLLGCCQPPRRPLEGQAPSVRKG

SEQ ID NO: 10298 - protein, 411 aa, Streptomyces sp.
VNIVVQVRLMPTPEVASALECTLRTANDAANWLSGLAYERGETSRRALQGLAYVDLKTRGLSAQPALHVLRKVADAYTALRANIRNGNLGKPGSKRRGRAEGRPISFRADAAQPYDDRCLSWQVDERTVSIWTTAGRLQGVRFACSEQARNLLAERRRGESDLVYRDGMWFLIATCEVPEAELYEPVDFLGVDLGIVNIATTSDGKIHAGRGLNRYRKRQLVLRAKLQKKGTKSAKRVLKRQRRKEQRKATEVNHIISKRIVTEAERTGRGIGMEDLAGIRTRVRLRKPQRVTLHSWAFAQLGRFVEYKARRAGVPVLFVDPAYTSRICAECAYTDKLNRVSRGRFVCRSCGFVDHADRNGSRNIRARAWRLWRSGAESHAPAPVQGAGWRGLPNSQLGSTSKPGPSEPGS

SEQ ID NO: 10299 - protein, 260 aa, unknown
  TnpB Polypeptide
LEGEAAPLPVSDCATGIDVGLNSFAALSDGTEIQNPRHYRRAEARLRRCQQKVARRRMGSNRRRKAVRLLQRAHVHVGNQRRDFQHKESRKLVNEYGTIAVEDLNVKGLAGGMLAKSVHDAGWSMFVTMLVYKTECAGRRVVKVDPRGTSQTCVCGTRVPKTLADRWHECPACGLSVGRDVVSAQVILPNGRDSALRRQRRGGSLMRCLRSRRVLRDGVVTFLPFQIYSTGYRNRTKLQNTCDFLECTCCTFSFHIYWFQ

SEQ ID NO: 10300 - protein, 358 aa, unknown
  TnpB Polypeptide
MKFTYKYRMFPTKSQQSILNGQLETCRFLYNHLLEIRKNTWEKEKKSMSCYDTQNLIPKLKEEFPQLKSVYSQVLQNVNVRIDLAYQGFFRRLKSNEKSGYPRFKGKGRYKSICYSQYGNGCKLEKNKLSISKVGDVFVKLHRPIEGTPKTVTIIKQPTGKWFVCISCKDIPKKIKNFTKTNKECGIDVGITSFATFDNGNKIDNPHFFETEEKQLSKAQNKEKWKAVKRIHERIGNKRNEFLHKITNDILKQYDFISIEDIDVNSIIRKRWNKKRIYDVAWSNFANILSHKAENADKIVVKVNPAYTSQTCSDCGTRTIMEEKDRIYNCSCCGMVKDRDVNAAINILRLGIQSHVII

SEQ ID NO: 10301 - protein, 419 aa, unknown
  TnpB Polypeptide
MMRAYTYKMKPTDAQKEFLSKCFGCTRFVYNHALSEKIDAYRNDGKNLSFFDLCASIRTLKNQEEYSFLKEVPALSLNYSLLNLSNAYSHFFKTKSGFPNYKSKKHCRDSVKFAPNAIKYDFTNFKVRIPKAGWITICRERTFDPTAVKLNSTTVSRNACGDYWCTVSFEDRTLPEPKAKVRKETSVGIDVGISEFAVLSNGERIPNQRFSEREEQRIARAQRCLARKHRGTKDEVPSKRYVRYRTKLARIHRSIKNQRSDFLQKLSTDLIQRFETICVEDLNVKGMMKNPSLAGAIGSASWSEFVRMLGYKAEWHGVNLLRAGRFDPTSQLCSVCGYRNPGTKDLSVREWTCPVCRTRHDRDVNAAVNIMNAAIEKHFNKQSPAVTGITDADGVDSENNAETRSPECDYASVETSMQK

SEQ ID NO: 10302 - protein, 558 aa, unknown
  TnpB Polypeptide
LSNTQRPEKQRRLSELTNEPSAAGMKMAKSKPSKRHQVNADTISSHSLLALHQILEPLCCTPELVLAPSNQISTDKLPHLETSTRKRKLSQKSVEDSTSSAKKCLPYWDKSCKVMSEWLSLPTKIGSQDLALTSFDGSVNNTTVNSWFSTKQTSVQSEKWLKTSWQSFNASVLDCTDSESTKLKSRKIRIYPSLELAKVWRNWVAACRYVFNQAIAYQKENGSTSKLKLRNIIMQSDLPEWVSKAPCHIRQNAIFDAHQAYSASKDCRFRSCCAPQQTIKFNDCNFSKGTWYSSLTKGLRFKASEAIPDTSSYGTQLVFSKGRWFGIFLNEDVAQSNSSQGLITLDPGVRSFLTGFDGYKFTEFGVGDMGRITRLCQHLDDLMSRISKCDNKRKRQQMRKAAGRMRTKIQDLINELHKKVACYLTQNYKIIYLPTFETSQMVAKVRRKIRAHTARAMLTWAHYRFKLFLKQTADRRGCTVIDVTEEYTSKTCTRCGHVHPKLGGSKKFKCPSCGYEIPRDFNGAFGIFLKALRDTASIVYEANSATVALSGNAQTNVA

SEQ ID NO: 10303 - protein, 447 aa, Halorubrum sp.
VVIQAFRMLEVHHTHRAKILNHSQVAEMFDQHGWSVSKLWNVANYHSREVWEETGEIPDHGDLKDELKGHTNYKGLHSQSSQRVLEELAEAFNSWYEKRKSDSRANPPGYRKKNYYDSEGRRVHEEHPRSTVTWKQNGIKHDPKNNRVRLSKGANHKEHPRAWEYILIEYETRPGVTVENLQQVRAVYDKAKGRWELHLVCKDEIETPNAPGNETAGIDLGICNFAAVAYSTKEADLYPGNRLKQDGYYFPKEIAKCEDSGGEEATRLHAKWSERRTHFFHSLAKHIVERCVEQEVGRINIGKLAGVREDDNGESKNWGKHGNLNLHGWAFDRFSNILEYKAKVEGIEVVEVSEHNTSKTCCVCGREDDSQRVERGLYVCESCDAAFNADVNGAENIRLDINEESNSESALSSGGDRSTGWLAQPGVYLYDLSSGFQPQAQVVDCKP

SEQ ID NO: 10304 - protein, 399 aa, Planosporangium sp.
VKANLDQRAAERTYGVAEADLTPCLPWSKFSFINEFNAWKNGHLATSPTNADGSRGLAWRGEVSSDVFECASVNAAQALANFSDSRSGKRAGKTTGFPRFKPKHKSVPSFRLRNRAMPGKAQQIRVAGSKSLRLPTFGDVRVHGCTKKLRRMLEAGRLHLYAASIRFERGRWIVALIGLAAPFHPQRRSPAGRHPVPAGLDVGVKALAVVADADGRVLHAVEGVKALQRAQAALRRANKTYARTKQGSAGRCKAAARLGKVHARVAHLRNNLAHQLSHQLATTLTRLIVEDLNIAGMSRLRWLARYVADAGLGDLRRLLTYKAAWYGLDLVEADRWFPSSKTCSGCGTVKANLSLTDRVFACGCGLVLDRDVNAAVNLARWAPAPAVGPSASPPQPADA

SEQ ID NO: 10305 - protein, 388 aa, Rhizobacter sp.
MNSFFVIFFMYWVMEKIIHKAYKFRLAPTAEQQAYLAVQFGHCRFVFNHFLNLRIQTYAETGKGLSYAALCKQLTSLKQQGETKWLSEAYSQTLQQSLRDLDTAYNNFFNKRAKFPSFKKKSNRQSCRIPQGFEIIDRSVKLPKFAEPFKFRKHREIKGTVKHISISKEPSGQYFIAFNVEELVDVPEPKTKKAVGIDLGLKHFAVLSDGAKVSAPNFYRASELRLQRAQRRLSKKIKGSRNRDKARLQVSKIHRDIRNARTNFLHQLSHRTTDENQVIVLESLNIAGMIRNHHLAKSISDCSWSEFVRQLKYKSEWKGGTVIEAGRFYPSSKRCSKCGNAKQALKLSERVWICEHCHTEHDRDINAAKNLLKFALREQGDPKCNEPQ

SEQ ID NO: 10306 - protein, 248 aa, Mycobacterium sp.
VWPVLIHGSVSIVGVRRLATVADAAGNVIEQVSNPRPLDAALKELRHVSRARSRCTKGSRRYRERATEMSRLHRRVNDVRTHHLHVLTTRLAKTHGRIVVEGLDAAAMLRQKGLPGARARRRGLSDAALGATRRHLAYKTRWYGSQLVVADRWFPSSKTCHACGHVQDIGWDETWQCDQCVAVHQRDDCAAINLARYQEPVSVVGPVGAAVKRGADHKTRPGRAGGYEARKGRSHKAAEQPRDGVQVA

SEQ ID NO: 10307 - protein, 405 aa, unknown
  TnpB Polypeptide
MKLNRQVRLYPNKTMKRVLDSLCDYRRYCWNEAIACWNDQYEARLVGLSESILDKLRSKTEALTDAEQDLVNQYPNPSHYSVRDELTEQKEDWQYALSSRVLYQAVKDLATAWELFFKNQDTAGKPTFKTRKAPKQGFKTDRARIRNGQLLLDKPRGYQGQWKTIRFKGLSIPNGKLTLCSVTRVNSRYTATFTIEVESIPSPRTGQKTAVDANVDHFDTTEGRVTLKPEVLNPLYARVRHYQQILARKRCRNPRAIHSKGYKATRTKLQRTYERIANIQQDLLHKFTTDLYQRFDIVVIEDLDVKKMQMSKRAKNLHRSLFGQFRQMMEYKSRKFEKTLIIADRFYPSTQRCSSCGFVKTGNDKITLNGNLKHGTRHHEYICYQCGYEDDRDHNAVLNLLALAE

SEQ ID NO: 10308 - protein, 537 aa, unknown
  TnpB Polypeptide
MSKRRVFTYQTRLSADPFLDGVLAAYADLHNRAEHSLFAALQSGGSINDLKRDFLGRFGLTARQFNAIRVGLEGRIASIKERRPQLIAEAETRIKRAEKVIAKLAFSAHDSNKLHQKKRRLTTLRARHASMKADHDAGAIRLCFGSRKLFRAQFDPEANGYADHTAWKADWQASRSNQFFVLGSGDETAGNQTCQASVADDGSLTLRLRLPNALGGDVVGISSLRFAYGHEAIVEAIQNGQRVHTITKTGKPTVKRVGAAISYRFQRDGKGWRVFVSVEAHTAAQISDRQAGAIGIDINADHLAVSETDRYGNLVSSQRIDLHTYGKSTDQAMALIGDACAAVAQRAKVAGKPVMIEKLGFRKKKAGLEASEPKMARMLSSFACNKVVAGIKAACFRAGIEVIEVNPAYTSVIGAVNHAQRHGISIHQGAAFAIARRGLGFSERPIVRTGIVPARNGSHVTFALPVRNRAKHVWSFWSDVRRSLKAAHVAHYRLSTMLTPPTPATRSECAPRSSTARSRGANRSQHCSGNVVDQLPC

SEQ ID NO: 10309 - protein, 416 aa, Mycobacterium sp.
VATLKADIDAWQATGIQTAKPSLRVLRKRWNTVKNDVCVNIETGVVWWPECSKEAYADGIDGAVDAYWNWQNSRSGKRDGKRMGFPRFKKKGRDPDRVTFTTGAMRVEPDRRHLTLPVIGTVRTHENTRRVERLIAKGRSRVLAITVRRNGTRIDASVRVLVQRPQQPKVTDPGSRVGVDVGVRRLATVATADGAVLERVPNPRPLDAALNELRHVCRARSRCTKGSRRYRERTTEISRLHRRVNDVRTHHLHCLTTHLAKTHGRIVVEGLDAAGMLRQQGLSGARARRRGLSDAALGTPRRHLSYKTGWYGSQLVVADRWFPSSKTCHVCGHVQEIGWAEHWQCDSCSASHQRDDCAAINLARYEDTSSVVGPVGAAVKRGADRKTRPGRAGGREARKGSSRKAAEQPRDGVQVA

SEQ ID NO: 10310 - protein, 474 aa, unknown
  TnpB Polypeptide
MDCAGSKLISPTAFKFRLYPNGKQEESMVKAVEGCRRFWNMALEDRMARWQGERRSTTYWQQCLTLTAEARENPAMRSMYMQTLQDVLRRVDRAFKKCFRGKGRLPRFKKHSGFGSFTYPQAYNGSVRLDLQRGRLSLSKVGNVKVVVHRPVPVAARLKTCTVKREPDGKWFACLVYEGVVSLVDVPLPQVWITPLGIDLGLKSLITTSDGEKVEPPRFFRKSERKLVRLHRAMSNKTSGSKNRVKATLKLAAQYSRVSNQRRDFHHKLSARLVRDHSLIAFEDLRTRNLVRNHSLAKSIKDASWWQLVQFTEYKAARAGRMLVKVPPEFSTQECCFCGTRNTVALEIRQFACGGCGKILDRDRNASRIVLKRGILQVGRDKDRDGPRRVQENLGQAAPKLKPVETGPLPPRTTGDASSVVEAGTRSGNSPAGSPRSHDAEGCHKAAALAYSGTGRDAPGKLGKPRPWSVGGGC

SEQ ID NO: 10311 - protein, 323 aa, unknown
  TnpB Polypeptide
VLYTGRPEDTDLIQTVVERLFDNLNGLSKLKENGYGVGQLKWKPPRKFRSFTYSQSGFKLDKKGGQTVLSLSKLADIPIRLHRALPDDTTLKQVTVKKEPTGEWFATFGVQIDREPPETPRIPRRASESTRGFSSMPTTRMEPPWGRSISPSSVTAWSASNGSSHASNTGRTITRSNDGASRSITLICGGNAATSLHKLSAYYAREYDLVAVEDLNVKEMMESPSNSRNTASAAWRTFLSLLEYKCKREDAFRGGQPERDDQGVCVLRRLDGEAIVGPWTFLSRVRFRGGQGRERGVEHSFWRPRRYRSGTLRITVLRIAKRF

SEQ ID NO: 10312 - protein, 321 aa, Okeania sp.
MYGCQQELIKIPEIIPFLEYLCTTANKLINCGIYLARQWYFKLGKIPGKYNLEKKLKSNSNYQFLYSQAAQQTLRGVAEAFKSYQALSQKYLKGELTDKPQLPKYRKKGGMGVITYPKQALKLKNGQVKVPLGRKVKAAFKVDSFLLDFPSNLEFKEIREIRILPRNFCFYVEWVYELKADLPRLDKAKVIGIDHGVDNWLSCVSNVGTSFIIDGKHLKSKNQWYNKQIATIKDNKPQGFWSNKLARITEKRNRQMRDAVNKAARLVINHCLKYGIGRIVLVGINDKKIVLISAQKITKSLYKSPRLNSKKELFSYANYTA

SEQ ID NO: 10313 - protein, 375 aa, Bacillus sp.
VRWIDRTKQNKAFKFRLLPNKKQEVLFAKTFGCVRFVYNKMLAERKDTYEKFKDDKEKPKEQKFPTPAKYKDEFPFLKEVDSLALAKAQINLQHAYKNFFEGNAEFPTFKNRKSNQSYTTNRVSGNIELQDGHIKLLKLKLIKIKQHRKIPKNYKLKSCTISKTKSGKYYVSVLTEYKKFIQSTAIEQVVGLDFAMSELYVSSENKKANYPRYYRVMSEKLAKAQRILSKRKKGSARWNKQRIVIAKLHEKVANQRMNFLHHKSKELAYNFDAVVIEDLNMKGMSQTLHFGKSIHDNGWGMFTTFLDYKLREQGKQLVKIDKWFPSTKKCSCCGAEKPMALSERTYECSCGYVADRDYNSAINIKNEGLCLLALV

SEQ ID NO: 10314 - protein, 376 aa, unknown
  TnpB Polypeptide
MTKKKNDKKNTITYVLELLKPTKKKQRLFFRNIDEVVKSRRAIAKELNKDNKKLSTADFSYINLPSAVKNQDIREVKALYKRFKKSNSKKETLEFKPNQPICYNNQNYKINGHIISIPLFTNKASRYAFPVKQNERFADLQNHIENGAKLGKASLFFKGNKWFFAVTISFDIEKVDTKNTMGIDIGLRQLAVFSVKTAKGKEISRGFHSGNHAGFTRKKYNALRRKLGKAKKQKVIEKIYNKEQRWMTDLNHKISRQLIDLAVQEKVSTIVMEDLKNIRQTAKSHKRPDRNLNRWTFYQLQQFIEYKAKLSGINVIYVKAKYTSQRCSNCGKILKKNRKKNLYTCQCGNHIHSDLNAARNIADQHLKGWQVREQSA

SEQ ID NO: 10315 - protein, 405 aa, Fervidobacterium sp.
VKILKSKSRNTSILKRSKFSIIVTYRYRLYPNEKQKTLLAKTFGCVRFVWNYFLAWREQRYKEEKLSTTEPECRKHLNSVLKEQYPWLREVDKFALENALINLDNAYKIFFKKQARCPKFKTKKSHRFSYTTNSTNNNIQVDFGEIIINPDKSRCWGKIKLPKLGWVKARIHRTFDGRIKSATVTLTPSGRYYVSITVEQEKVYNRRISETPQNFAIALDLGVKDLYVDSQGKHIENPKILARYEKRIKKLQRELARKVKGSKNFEKIRIKLARMHERVTNIRKDFLEKLSSQVVSENQAIICEDLRVKNLVRNSHLTKSIHDVSWSKFVEMVRNKAERYGRVFLQVSPSFPSSQICSKCGHKNEGVKELSVRTWKCPKCGMEHDRDENAAKNILRQGLLQLGIT

SEQ ID NO: 10316 - protein, 426 aa, unknown
  TnpB Polypeptide
MRRMKANTMRLDPSLEQLQTMHLLGDRVSALWNAANYACRQGFFVGEKIPSYHSLCCAFQDHDAYRALPSDVAQEVLKVLREAWSSYFALRVLWKAGKLKDKPGLPKYRKDRKTGKRLTDWIPLKCDRAYRVESRTVSVTLPRDLRGAGRLVLSYWGIRRYHGAGRRAVICYDKARGRWYFRYSVDVPDNAIKPWPGVAGIDLGIRVLVSLSIAGVETAFHFLGREVLKDWMYWTRKIAEHQRELAHRNKKTSRRLKRLYAMRRCRLQHAWDAMARRVVKVCKRYKVGKVVIGWPKGILDDSHLSRKWNGLTHGFWSFEQVSQRLMLALRRAGIVPERVGERGTSSHCPRCESPRVVRRPRHLLRCRDCELHVHSDQAGSFNMMRQKYPVFWDGAEAAPAPETHRFNQHRWADAHNPSIQVEDLAA

SEQ ID NO: 10317 - protein, 416 aa, Opitutaceae sp.
MMEKLQAFKFELRPDGRKKRLMNRFAGCKRLVYNKALAERIRAREAGEKMPSYADLCRRLTAWRNAPATAFLAEAPVHPQQQALKDLDRAYKNFFEGRGAFPKFKSKGEGESFRYPDPKQFKLDQANGRVFLPKLGWMRYRKSREVEGELRNITVSLDAGKWFASIQTRQEIEPAMPMAKAFCGIDMGVACFATLDGGARVEGPNSFKKHEQRLAQYQRRMARKIKGSANWWKAKRRVRKVQSRIANARKDFLHKESAKLADSHAGIAIEDLRVKNMSASAKGTIESPGKNVKQKSALNKRILDQGWGMFRTMLEYKMAARGHVLVVVPAANTSRKCPCCGHVAAGNRPSRSVFCCVACGHSGHADHVAAINIREAGHALLACPARGASMPPATGTRRSGGAKAKAASPSVGIPVL

SEQ ID NO: 10318 - protein, 293 aa, unknown
  TnpB Polypeptide
MRSYKYRLYPNKAQERIFLSTLETCRRLYNNALAERWYAWKDERRCITYREQQDALPGNKDEYQQQVHSQVLQDVLRRLRKAFDAFFRRVRNGETPGYPRFKGKGRYDSLTYPQSGFSLSEDERHITLSKIGPVRIKLHRPLEGRVKTCTVKRDVNQWYVVFSCEVESSARPHNGPAVGVDVGLEKFATLSDGTVIENPRFLRESEQKIKKRQRRVSRRKKGSNRRKKAKKELGKAHRKVRNQRTDFAHKLSSQLADDHSTITFEKLNILLNRHLSHRLSSFIFSDIGAVSSS

SEQ ID NO: 10319 - protein, 430 aa, unknown
  TnpB Polypeptide
MRQVERHWIKEGHVLYSTCDDLTFKAKNLYNAGLYQIRQSIFERNRCREEEKPSVLSWVELVSQFRKEKQDDMLALPSKVSTNILKNLGSVIHSYYQTLKAFHDKSNSSVTSKPQLPRYLHKTEGRYVVEFTNQTISKKRGLDGELILCPKDLNLSIPTKVTTPKCVRIVPKLKAFVIEVIYEVEVSPLKQTGNYVAIDLGIDNLATITFSNGANPLVVKGSKLKSINQDYNRLIAKAKSKLPANQKTSQHIHRLWRNRELKLQSYLHKITSFLSLYFDEMAIEKVFIGKNQGWKLEVSLGKKTNQSFTQIPFNTFVSQLTYKCLVKGIEFIEQEESYTSKASFLDEDEIPVYKDIQTKPQFSGKRISRGLYKAKNGRVLNADVNGSYNILVKGLLSLGKTLNRKAVSFHTRSLKVWQSISSKALLSQYM

SEQ ID NO: 10320 - protein, 410 aa, unknown
  TnpB Polypeptide
METIEISRTVKSRIVFQNSDDVPKMVASQEAFRQGCNFVSEYMFNNDFPMNSVALIKQLYNDLRSQFGLKSQMAQSCVRAVIARYRTVQTQLRKQRVWDGYKKDNHGNDVKKYVSKDLDFLWKPIEFKRPQLDLVRNRDYSYNDDNTLSLNTIHGRVLVNAVFNGFEQYFDGSWKLGTAKVLKSGKHWYLHIAVTKEVEQPAFKPAHVVGIDRGLRQLLTIYDEKGRTTFVNGKNILQKRRHYKRLRAQLQSKNTKSAKRRLEAIGQRESRWMNDVNHCLSKTLVNQYGSGTIFTLEDLTNVTFDTVFKRARNDRYEHHSWTFYDFEQKLIYKALDKGAQVVSCDAHYTSQRCPKCGLIDAKNRDKSKHEFCCKACSYRTNDDRVAAMNIQFLGTLYNSGNPKPAFEKLD

SEQ ID NO: 10321 - protein, 425 aa, unknown
  TnpB Polypeptide
MLLAHRIRLDPNNVQASYLARAAGTARFAFNWGLAEWERQYKAWKADRSQELPTEAALRRQLNAIKREQFPWMLEVTKTAPQMAIIQLGEAFRNFFAGRARYPRFRKMGVHDRFTLTNDNFAVDGCRIRVPKLGWMRMNEALRFTGRIMSATISRVADRWFVSITVDTDDLSHLPAAENQGAAGVDLGVLALATLSTGEVIAGPKPHKALLGRLRLLSKGLSRKVKGSANRKKARAKLARLHIRIATIRSATLHRLTTDLTRRFHTIGIENLNVRGMLANRSLASSIADMGFFEFRRQLEYKAAMRGGQVVLAGRFFPSSKTCSDCGGKVDQLPLALRSWTCPYCGRTHDRDVNAAVNLRNLAVSSTAPACGEEGSGWGRETPAKPASGKQEATSESGANRPVSASVAERCGTEPRAQIDGRQQG

SEQ ID NO: 10322 - protein, 460 aa, Lactobacillus sp.
MLSIGDSFDKIGYQEHTFPTAIDDTEQLIRRTEPMTRSYKTKLHVANDAQNDFLVLCMAVKRKLYNLYRSVQFGLLETRKRLYPDYDAFKELPKETRNQFYISAAEFEKVFNHVIRVSGSYPAWWDQAPQKTRKQAFRDAERAFQNYFKGLTKEPRFKGYHARQVTYFSGSIRVQRDRIRLPLIGWLRLSEFGYLPTDDRLQKTGYHITGCWVSRWANDYWVVATDEPAPTRPVSYADTKLGLGIDLGIKDMAILNTGKKFINIAKTPYYYHVEKMKKRWQARLARRKIAAEKSFAKNHPHQKAGYLTSRGIEEARYYLARWSAKLAKINKETVRQAIAQIVQLKPPHITVEKLNIKGMKANPKLAPSLQKLGLAYFKTWLTWQCQKHGIELREVGTWYPSTKLCSTCGTYNRAQFHGTMADLAVRQFICPHCGLSIDRDVNAAINLQQATDYTVLTATE

SEQ ID NO: 10323 - protein, 159 aa, unknown
  TnpB Polypeptide
MYLKIFNIRQDTLHKVTTYLAKSHSKIVIEDLCVSGMLRNRRVARAIADVGFYEFRRQLEYKCRWYGSQLVMAPRRFPSSKLCSGCGHKKKEISLSEREYVCEECGVRIDRDLNAALNLVAASWSETLNACGEDVRLGGSTRPVEQTSVKQELNISQGP

SEQ ID NO: 10324 - protein, 544 aa, Streptomyces sp.
VGGLRELAVSFVVPGPAGVAIRDRLRVSETDAALLAEAGVFLGSLAAGDLAERSRQGLTHDGASWAVRKRALTGRSSARWAGSITKAVHDQWALARRSQAAHLAWLRGQIAQIEARLARPLGAKANKREGLARGYATRAEWHAKSRRLNALKDRLAVVEADWAAGRVHVVRGGKRLAHTRHHLDDAGLSEQAWRERWQAERMFLAADGESGKRFGNETIRVTDTGQVSIRLPAALAHLANAPHSRYVLDATVRFQHRGQEWRDRITANRAVAYRIHHDVTCGRWYVTASWQRAAAPVLPLRAALARGVVGVDMNDDHLAAWRLDVHGNPVGAPRRFFYDLSGSAEHRDAQLRHALSRLLHYTQRCGAAAIALEDLDFTDGTSREQHGRNKRFRRLLARFPTAKLKARLVSMAAEQDIAVVAVDPAYTSRWGAQHWQKPLTTPTRKISRHHAASIAVGRRALGHPIRRRTAPPPHHQSDDAGHRTAQAGPEARGREESRTHPPGPRTGCVSPVVERTRGTSLPNTVRGSATEQQSWQQDSLPLSV

SEQ ID NO: 10325 - protein, 342 aa, Desulfotomaculum sp.
MARYCAAVRWSFKRLLEGNKVQEIRLAVQTKFNLNSRQANDAVSDAQSTIKSQHELVNMHYENAKAKARFTEKRIAKAKSPAKIENLNKRLDKEQRKLAYWQKHLDNNTFPPVVFGGKKLFQARCKGNITRDRWREARSNRYLSRGDKTKGGNLNTRIYAVDGNIYLAIAADPVRKGKTIRYNHITVPIYLAHKPSKKTGQINGINYRQMVLDYLKTGAAYQVEILRKNEKYHIHITIEEEPPVSYQTHGVIGIDTNPDGLGIAIVDYLRQYRGSRWLSEGQWTYARSNRRTNLTGEKAKQIVTPVKETGYALAVEDLKFKNDKSVTSKFNRMSHDLSGPNF

SEQ ID NO: 10326 - protein, 431 aa, unknown
  TnpB Polypeptide
MLSKNERIRQSNIETRQRRATQRCLVFSFKINEKKLSKSDFKKLEFMFVQARWLYNYILGLENIKACDTKNKTIYSYDKDKNKVERTLNLNSKVIQGIKQGIEYSLKTLLTTKKKGKKVGKLKFKSDYNSIELNQYKNTHEIKEKGIRVCGFKRPLRIFGLKQIKDKKYEFANAKLVKKPTGFYIKLTCFENLNHDRINQVTQNQKSDVGLDFGIKTNITTSDNEKFDISIGESERLKGLQKKFSRQIKGSNNRNKTLRKMKVEYERLNNKKKDFGNKLVNYLCTKYHTVYMQDEMISNWKKTKRSKKSNKKLRFLSFGKEIQYSCLGYIKSKLSKQPNVVMIDRSYHTTKMCYKCGNLHQDITLNDRIFTCPHCGYSEERDLKAAKTILFIGQCKNTYVPVERRNTDVEKMSDFLVSYETKKQSSVKHRS

SEQ ID NO: 10327 - protein, 404 aa, unknown
  TnpB Polypeptide
MSELTYNVILKFEKQEDHNFWLNLLIEQRDMFNYASEMVFKEKPKLILPTIANLIYYPIRKKAKLLNAQAVCKIEREVLATFRSIKSNKHRIESAPIKKNLCMRLDKRLYSKFSKTGISLISGKSGIRCRASLALYKKIENLFNQYPTSDPLIFYRDNNFYLSIPFKVTDKVKENEDTLGIDLGCRRLVTTSDGQAIKATDYLRYKRKIRYLKRKLASRKKSSHSARRKLKELKRRERNYSKQYIEKTVNSILNSTKQSIIAIEDLTKIKENTKRDYGTHNNRISQIPFYMFKHILTYKATLSGKEVKTVSPKYTSQIDCSTNKRDGVRKGCRYYSINNYVLDADWNAAINIKNRAENIKHLVSYAILPLDGTLSILNKQVAVNQPIVSRDNIKLASCHLLRCQ

SEQ ID NO: 10328 - protein, 406 aa, unknown
  TnpB Polypeptide
MNRAYKFRLYPKRHQIETLDKTLMLCRRLYNASLEQRITVYKMGQTVSYTAQANELPALKRELPEFNSVFSQVLQDTLRRLDKSYANFFRRTKEKKSKAGFPRFKSSNRFKSITYPQAGFQILENGHLELSKVGTIRMFMHREIVGTVKTCTIKRDAVGDWYAVFTVELPDAPKRKVKTAIGVDLGLKNLAMLSTGESILHPKFLRASEARIKIIQQEVSRKKKGSNNRRKCARRLAKAHRRVERQRDDFLHKASRALSMKADAIVFENLNINGMLKNHRLAKSISDVSWGKLMQFTHYKAASAGGAVYYVNPSGTSQICSRCGETVKKPLSERNHTCPNCGFSSDRDINAALNILGRLPADSGELLKTPVETMPLPPSYRTASNVGEAGGPAPDAFMQGLAIRQP

SEQ ID NO: 10329 - protein, 403 aa, unknown
  TnpB Polypeptide
MHKAYKYRIYPTSEQEKILIEWLGQLRFVWNQFLELNIKKYESEKKFIFKYDLMKLLPDMKKQHVWMTAPSQSFQIIAFHLDSALRNKFKHKMGFPRFKKKGLESGIKIPQTNNQIKINKNTIKIPKLGEIKWVQHRELVGDLKSITITRDVDQWYVSCLCEENINILSKKITSIENDITGLDLGIKYFLVDSNGVVIDSPKYLKQSQKQLSRYQRQYSRKKKGSNNQNKARIKVARLHRRIRKQRADFHHKLSNQIANENSIVICEDLAVKNLTKNHKLAKAISDQGWSQFISFLDYKLQWRGGRLVKIDRFAPSSQLCSCCGHRQKLSLDIRTYICPKCGLVCNRDYNAALNIKSFGLEILNKSGTDLIHACRDTSSEELAYDNSSYVSVKQEAAYSSESR

SEQ ID NO: 10330 - protein, 378 aa, unknown
  TnpB Polypeptide
MSSVMSSLKVMRNYRFRLYPNKEQEQKLLDWLEACRWIYNEALAQRKNAWEQERRSVTRTEQQVWLREAKKANKRLREVHSQAAQEVLFRVERAFAGFFRRVKNGDTPGYPRFKGKGRYKSLTFTQFGKGLGACLADGKLRLSKIGLVRIKLHRVIPGKVKTVTIKRDATGKWWAIFATEVEISAPLVRPGPAVGVDVGLEKFATLSNGENIENPRHLIKTERKLKCVQRSLFRKQKSSRNREKARRKLAKLHAKVRNQRRDFLHKVSRGLVNVYGFIAVENLNVRGMVRSHCLAKSIHDVSWSEFLAMLEYKAAEAGTKLVKVNPSGTSQECSNCGKTVPKDLFVRLHECPHCGLVLDRDVNAARNILKRALALEAA

SEQ ID NO: 10331 - protein, 402 aa, Thermococcus sp.
VNYLRRQQFFNHEPVDFNRTEKIVYEKYKGEIGSATVQQIARKNAEAWRSFFSLIKKRKELPKWLRPKPPNYLKEEGKRKPLIVLRNDQYRIDGNKVILKGLGKFKKLEVQFKGRIHLKGKQGRLEIIYDDVKRKWYAHISYTVEEKLEGNSWVKLPRTPKGNLVAGIDLGVNNLMAVYVENGESFLVNGRPLKSIGFYWQKRIAEYQSKLNKSGAKASRKLKRMHEKAKLQAGHYINTAVRQTVRRLYELGVSRIVVGYPKEISREPDKGRKQNFVLSHVWRFNYVIKRLTEVAEEYGIQVVVVNEAFTSQTCPLCGKPHKGARFVRGLYMCPVEGLVFNADLVGAFNILRKAVKTITPNLSGLYAQGRGNGPETGPEGLKPHFILGPNETPQTSPSMARD

SEQ ID NO: 10332 - protein, 318 aa, Thermococcus sp.
MPKYLPKDSYFICIFQKDMFKVNGDKIRLSLGKNFTKEFGVRFLEFKLPSTVVGKKIKEVRIVPRCKGLWFEIEYVYEVEPQKADLDYNKYLSIDLGLDNFATCVPTSGTPFIIEGRGLKSFNRWWNKEKVKLQSIYDKQGIKMGRKMAWLLRKRRNVINNFMNQAMNYIVKYCLKNKIGNIVIGELKEIKNGMNLGRRNNQNFQYIPYGLFKQKLKSKCEYYGINYIEVDEAYTSQTCSVCGDVNRNNRKYRGLYICKKCGNVMNADFNGAINILKKVAPESVRIGGSGRVNRPVRVRLPATGCRVNSHEAPSVRAG

SEQ ID NO: 10333 - protein, 393 aa, Thermococcus sp.
MPSETIKLTAKFKLKETPDGLDELFSTYRDIVNSLITYAFENNITSFKRLKKEKYEELRKDYPELPSHYHYTACQMASSIYKNYRKRKRRGKANGRPVFKKDSIMLDDHLFKLDLEKGIIKLSTPKGRITLEFYPAKHHGKFRGWKVGQAWLVRTPKGVFINVVFSKEVEVKEPEDFVGVDLNENNITLSLSDGEFVQIITHEREIRTGYFVKRRKIQKKVKVGKKRQRLLEKYGERERNRLDDLYYKLANKIVELAEKYGGIALEDLTGIRESIRYSAEMNGRLHRWSFHKLQSIIEYKAKLKGVKVVFVDPAYTSSLCPICGGKLSPNGHRVLKCSNCGFEADRDVVGSWNIRLRALKMWGVTVPLESPPMKTGGGKVIRYDSFTCFKSSG

SEQ ID NO: 10334 - protein, 435 aa, Thermococcus sp.
MKRTITLKLQPSKETERTLKELAQISSKVWNRVNYLRRQEFFEGKPIDFLKTEKIVYEEFKAEIGSATVQQIARKNAEAWRSFFSLIRAKRNGESPKWFKPKPPDYLKDNGKRKPLIVLRNDQYRIEENKIILKGLGKFKRLEVQSKGRIHLKGKQGRLEITYDPIRRKWYAHISVSVEKKLQGEEWVELPREPLGNLPAGIDLGVNNLIAVYVENGESFLVNGRPLKSIAFYWQKRIAEYQSKINKSGAKKSKKLTRMHQKAKLQARHYINTTVRQTVERLYHLGVSRIVVGYPKEIARNSNKGKKQNYLLSHVWRFNTVIQRLKEVAEEYGIQVLVVNEAFTSKTCPVCGKPHEGARFVRGLFKCPATGLVFNADLVGAFNILKRAVKTITPSLPGLTVGRGNWGKTVPEGLKTHFLVGLNETPQTFPLLARG

SEQ ID NO: 10335 - protein, 370 aa, unknown
  TnpB Polypeptide
MECAYKFRIYPTRKQEDLIQRTFGCCRYIFNRFLALREEKYKKSGETINYVTCSRELTLLKKKLVWLSEVDSHALQNSLKDLDTAFQNFFHGVKAGQRVGYPRFKSKRDRHRSYHTNNINSSIRVEEKAIRLPKLGLVKCRVSKAVQGRILSATVSQSPSGKYFVSLCCTDVEVEPLPKTGAVIGVDVGIKNLITTSEGVKYDPARYIRESERKLAHLQRELSRKTKDSKRREKCRVKVARLQERIANQRSDALHKLTTELVRNYDIICIENLNAKGMMRNHHLAKSIADASFRELRRQLEYKAAWYGKSVSVIDRFYPSSQLCSACGAQSPETKDLDIRKWTCPKCGTQHDRDINAAINILNEGLRQLV

SEQ ID NO: 10336 - protein, 554 aa, Iningainema sp.
MAKKKSLYAELTHRSYSRQKDDNGNRIPQLRRGIEAQLPEHPFLEDWGFYYQSFFRTAVNELQKGKTEDQIEKEFQERFGIEWAWSDSLSTDAKARTDQLVTARDNRISELTKDIESGWKTVAEGIEDLENRLKNPIRKNLQGFEKKLLGLKSKALRLTRKQAEKDRLLKQKRLHVCFGSAKLFNAQHHLEVNNYQSHSEWKIDWEKYRSGNFYSVGKGKVAGNNPVAGIFYEGDDNFTVRFTVPGFLREDYGQYVYLTFEITGQRKHDLLYALSANKPVTVQCFRREHKSDKWYIHLTTYVQDVPTISSLKNGGLGIDLNAETIDIIYRKRDGNPFRENDKQVILSFPIPTGTTGQKEAALRDIVCEIVRLAEIYQCPIACENLDFSVKKAQLRHSGSKQYNRMLSGFIYDKFRSFLVVRAEKYGIEVKFVNPYMTSVIGMVKYMAKYGLNSASAAAMVIARRAMGFKEYIPHSWLKTLSQFFAPEDVKDGGFGGGWRRISDWLRKYAIRRSRLFQPDTVLRFLLDSLIAASPKKAKRQRGKFTATATSVATA

SEQ ID NO: 10337 - protein, 393 aa, Iningainema sp.
LAACRWCYNQAIAYQRNCFIKGEKQPNRFKLRDIILKSCPEWVAECPYSPREESVFDAKIAFSKTATKNKNTPRFKSCRAPIKSLRISSKYWGVFYSGKGKTKQIAGFTHYATSQIVINSETFAIKDLQLNPVEPLCGEMPSEFTIVLDKGRWFICFAIPFDIQPNSKTNAIGLDPGVRAFLTGFDGQNILELGDGSISKIAILCQRLDQLQSQIALAKGRNNKRLRWKLRRQSEVLRTRIRNLTNEIHNKTAAFLTKNYKHIFLPTFETSQMVVKKKRKLNSKTARNMLTWSHYRFKQTLKFHALKRDCVVHDVTEEFTSKTCSRCGHVHDKLGGNKKFKCTNPNCGHEIPRDWNGAINIFIKSINDLVNASTTVEAGEDTPRYTVEFSTSY

SEQ ID NO: 10338 - protein, 388 aa, unknown
  TnpB Polypeptide
MIQRGYRFKLHPTAEQSELFGQFSGVCRLVYNLALEQRRDNWRNFKARTGKNISYPSQARELTTLRAEYDWIAAVHVTPLQQALRDLDRAYQTFFKGIAKYPNPRKRGMSDTFRFQGRELKTRKLNAKWSEVRLPKIGWVQYRDTRPLIGKLNNATISYAANGWHISFSLAIEHDAPANTLPSVGIDRGVAQTLALSTGELMALPDSLAALERRKRSAQRVLSRRKRGSARHAKQRRRVAALQSRSARIRKDWHHRATLDLSKRFGTVVLENLNTKGMTASAKGTAECHGTNVRQKAGLNRSILNQGWHIFETLLNYKLEERGGHLCKVPAQYTSQTCSECGAVDRESRENQSSFRCRHCGHHMNADNNAALNILRRNTSSKVVEEGH

SEQ ID NO: 10339 - protein, 404 aa, unknown
  TnpB Polypeptide
MMMFGKEVKFVLTYQRYLKRDNPIFSEIVRMSKKANNLYNQAMWLMNHEKKVHGKTLSYGDLDKITKQLPSSYNNYRLLPAQTAQQTLRQLDSNVKSYWAALKDYQKHPEKYKAEPRRPRFRQKRGRSPVIFCNQQFRYDGINIRIPSLGNFLMCFEIKNATPKQVTFLPHGEIFKILVSYETSEQSDYQGNGLVASIDPGLEILSAVAFSDMSQPILFSGKKAKDYNVHFNEKMARVQSELKSTTGKHYSKRTKSLWRKRKGFFDNHMHQVSRKLVNLLAVKGVSTLIIGKNDQQKQKNKIKNFVQVPIFRLLELIKEKAERLGIEVIVLREAYTSGTSFLDNEKPIKANYDKTRRVKRGLFISNEGRKIHADVNGAYQIMRRAVNVVWDGTTNIFNPQTVTC

SEQ ID NO: 10340 - protein, 447 aa, unknown
  TnpB Polypeptide
MVSWGPAPTPAGMPREGIYPVESKNRRTNVVRLLPNGAQERRLRKLADACARLYNELNYERRQQFFNGEKVDFKGTWDKYYEKYKGILGVNAQAVLQKNNEDWNSFFSLLRLMKEGKLPPHITHVSPPGYWKDKETGRRRLIIVIRQDRYEVDVERRVIILKDFDMEIKFVGRLRWYGKQGRLEIIYDETKDAWYAHIPVEVGVEITKTGKKSKYIVRGERRTIQIESPKGSKVASIDLGINNLASVVVSDGTWLLYKGVRAKEDFFYFQRRIAEIQSLRDSLKDKLLDDAIEELNHEMRRLYGKLMRRLLHLYRNFAKHLIEQLHELGVSTIYLGYPLNIAQQRGNKFTVNMWSYRKLMETIELKAQEYGIKVYEVVEYNTSRVCAYHDVEVKRKPRGVVHCPKGHKLPLRPKWCLEHNEESHWKDTTNNQKATILHRRAQPSSPH

SEQ ID NO: 10341 - protein, 403 aa, Spiribacter sp.
MHLRYRYRLYPNRPQRQALARAFGCARLVYNDAVAARRDAYQAGERYPSSTALQRRLITEAKRTPERAFLAEVSNIALQQAVRDCDAAYSRFFDAVRAQGQRFVGYPRFKSRKDNRQAIRLHTGGFSIRANGKMRLARIGDVAVVWSRTLPAPPSSVTVIRDAAGRYFASFVVEAGDQTAPPAVDADGTEREIALDLGLNHFAVDQNGNTITNPRCLRRAERRLRKAQKAVSRKPIGSNNRAKARQRLARCHAKVADTRADWLHQQTTRLVRENQAIYVEDLAVRGLARTRLAKSVQDAAWGQFRRLLEEKAYRRGRTCITVGRFEPTSQVCSACGRKDGPKALAIRTWTCPRCGTAHERDTNAAKNILALGRRERLNACGADVRPPMVAIGGEAGTQQSAPA

SEQ ID NO: 10342 - protein, 404 aa, Salmonella sp.
MQRLQAFKYELMPDGQQERKICRFAGSCRFVYNKALALQKERHEQGEKKLGYAGLCKILTDWRNSAETAWLADAPVHPLQQTLRDLERAYSNFFAKRANFPRFRKKGLSDSFRYPDPKQIKLDQGNGRIFLPKLGWIRYRNSRQATGIVKNVTVSQSCGKWYVSIQTECKVSAPVHPSTSMVGLDAGVAKLATLSDGTVFKPVNSFQKNQKKLELLQRQLSRKVKFSNNWQKQKRKIQRLHSRIANIRRDYLHKVTTAISKNHAMIVIEDLKVSNMSKSAAGTVSKPGRNVRAKSGLNRSILDQGWYEMRRQLEYKQLWRGGQVLAVPPAYTSQRCACCGHTAKENRQSQSTFRCQACGYTANADVNGARNILAAGHAVLACGGMVQSGRPLKQEPTEVIQAPV

SEQ ID NO: 10343 - protein, 509 aa, Planktothrix sp.
MIEIPLKVSDKDAGVLASRFEAGRQLYNACLGEAMRRQKLVKQSKKYQEARTLKKGKARTSAFKEANQAYGYSEYDLHSYCTTIRNSWIGEHIDSNTAQKLATRAFNASCRVAFGQAKKVRFKGKNQLDSLEGKTNKTGIRWVNETLIWGDLQFKPHLTTYDPVMIHGLNSRVKYVRLLRRRIGSKSKTFYYAQLVCEGKPYLKPKNSISQGTVGVDIGPSTIAIVGDESAKLTLFASELKFNQKRIRQLQSQMERSKRANNLSNYNPNFIDKRGRKNKGTIKKGRHRWNNSQSYQRLRNTKANLERKLAAHRKSLHGKLVKEILGLGNNIKLEKLSYKSFQKNYGKSVGKRAPGEFVSHLKRKAESAGALVTEFSTKTTKLSQTCHQCGSVKKKNLSDRIHQCDCGILCQRDLYSAFLAKFVDEKELLQANQAQNAWLGSEPILYAAWRQATQTNLRSEGRVSSSFGKFPESERVATKVLNVDAKNLDVVPIRESQVEASSHFEPPSL

SEQ ID NO: 10344 - protein, 419 aa, Pseudanabaena sp.
MITMNYRYRIYPDTTQQEILSEWMETCRMAYNYALREIKDWCNSRKCLVDRCSLTQEYIIPADAPFPSEVNQLNALPKAKKVFSRLGEVPSQVLQQIIKQLHKAWENFQKRGFGFPRFKKYGQIKSLLFPQFKESPVTGNSILLPKIGLILINLHRPITEGFAVKQVRILKKADIWYASINIQCNVNVPDAMPHGHPIGVDLGLERFLATSDGALVKPPKFFKQMQSKLKLLQRRLSRKQKRSKNYEKQRIKVARMHHRIDNTRKDFHFKQAHALCESADMIFMEDLDFTIMAKGFLGKHMLDGGFGQFRSITKYVCWKLGKFFGEVNSRGTSQECPECGVTVKKALTVRVHHCPECRYTTDRDVASGQVIKNRGIALISTVGHTGMETACADGLLGVELTQSRQVSKSRKGTTRKTKK

SEQ ID NO: 10345 - protein, 407 aa, unknown
  TnpB Polypeptide
VDTATVRTTFKYQLRPTPEQEQALDLVLWRCRTLYNVALEQRKTWWERGQWVSATYYQQKAELPDLKTACPEYAEVNAQVLQDVILRVERAFQAFFRRVKNGETPGYPRFQGRGRYHSFTYPQYGGGAVLDGGVLSLSKIGRIPLRLHRPLQGTLKTVTISREADGWYASISCAEVPREPLPLTGRETGIDVGLKVFLVTAGGEHVENPRHHRKAEKGLRKAQHRVSRRTKGSKRWWKAVGHCAKKYQKVKRQRSDFHHKTALSLVRDYDVIYLEDLQIRNLSRRPNAKPDGNGGYAHNGAAHKAGLNKSINDAGWYAFRRILTCKAAWAGKRVEAIPPAYTSQDCSGCGERIYKSLSVRTHVCTNCGLVLDRDENAALNILASGRAGPSGANVAGCGERSLRSPAR

SEQ ID NO: 10346 - protein, 339 aa, Cyanobacteria sp.
ISKIFAVQINRLPDNKELSAVLEYLCSESNKLYNCTVYLARQIYFKTGSYANKFWLATQLKTNPHMKALYTSAAQQTCLAVGEALIGYKRLLKLWQQGELSNKPKFPRYRKRGLFQISYPKRWLKLTEKGVRVPLGKSCKVWFDLPEIYLPFPSNLDWDSVKELQIVPRAGYFDAVWTTKTESKAINNKLNPNNVLSIDHGLDNWLTCISNRGTSFIVDGKHLKALNQWYNKRVATIKENKTQDFWCKLLDKVTTKRNRQMRDGVNKAARIVINHCLENNIGTIVFGWNKGQKQESNMGEKNNQKFVQIPTGRLKDRIKQLCEQNNIQFIETEESYTSK

SEQ ID NO: 10347 - protein, 412 aa, Cyanobacteria sp.
MKALYTSAAQQTCLAVGEALIGYKRLLKLWQQGELSNKPKFPRYRKRGLFQISYPKRWLKLTEKGVRVPLGKSCKVWFDLPEIYLPFPSNLDWDSVKELQIVPRAGYFDAVWTTKTESKAINNKLNPNNVLSIDHGLDNWLTCISNRGTSFIVDGKHLKALNQWYNKRVATIKENKTQDFWCKLLDKVTTKRNRQMRDGVNKAARIVINHCLENNIGTIVFGWNKGQKQESNMGEKNNQKFVQIPTGRLKDRIKQLCEQNNIQFIETEESYTSKASSLDLDDIPVYGEKPEGWKPSGTRVKRGLYRSAMGIEFNADINGAIGIARKAIQRGLGGFPHERLNQEVAGQYGFQFDARSFARGVLTMPRRVRLWKTRGLRRPQTREMSVEYSFISCLTSAEKNLCCFSAESAKFH

SEQ ID NO: 10348 - protein, 412 aa, unknown
  TnpB Polypeptide
MKQQVKQLTKEDYKNLKLLSHIAKNLANEAIYNVRQYYFQEKEYLNYQKNYVLLKNSPNYKMLNSNMAQQILKEVDGMLKSFFGLLKLAKKGTYNYRDIKLPHYLPKDGFTTLVIGFVRINGNKLIVPYSNAFRKEHKSIEINIPPKLIDKKIKEIRIIPKSKARFFEIQYTYEAEEVQINLDESKVLAIDFGVNNLATCVTSQGQSFIIDGKKLKSINQWYNKQNAYLQSVKDKQGYKTKYTNRQHKNLMKRNNRVDDYISKAARIIINYCLENKIGHVVCGYNETFQRDSNLGKKNNQAFVSIPFGKFREKIEYLCKLYGINYTKQEESYTSKASFFDRDIIPTYNDDNPKKYTFSGKRVKRGLYKTKDGKLLNADVNAALNILSKSKVVDLTVLYNRGELNTPIRIRIA

SEQ ID NO: 10349 - protein, 394 aa, unknown
  TnpB Polypeptide
MQVRYRYRLYPAPGQQRALARAFGCARVVYNDCLRLRDACHAAGEKISDTEVQRRVITLAKLTPEREWLAEVASVALVQACQDARRAYRNWFDSLKGRRKGPKIRHPKPRRKHGRQSIRLTRNGFALRGERLYVAKVGELKVEWSRSLPSAPSSVTVIPEPDGRYYASFVVERPAMPLPACDRDIGIDLGLNSLIVTSDGEVIPNRRFLRKADRRLRRAQRVLSRRQKGSANRASARHRLAVLHRKVRETRLDHAHKTALRLVRDNQAVYAEDLAVSGLMRTRLARSVSDAGWSQLMRLIEEKAAQYGRSFARIGRFEPTSQVCSACGVKDGPKPLHVREWACSACGTVHDRDVNAARNILAAGRADKANACGAGVRPRPVAVGAEAGTHRSTA

SEQ ID NO: 10350 - protein, 413 aa, unknown
  TnpB Polypeptide
MERLQAYKFLIEPTGDQQHAMRRIAGSCRYVWNKALALQIENQKAGEKFINHFAMCKWLPVWKKEPDTLWLKGTPSQLFQVVLKDLARAYKNFFDKRADFPTFKKKTGGGSFCFPQGCELDANNSRIKLPKLGWVRYRKSRAVEGFIKNITVSCVAGKWYASIQTEREVPQPVPTATTAIGIDVGIARFATMSDSSFIAPLNSFKKHHQRLARYQRRMSRKVKFSNNWKREKAKIQKVHTAIANARKDFLHKTTTAISQNHALVCIEDLQVGNMSRSSKGNSEQHGKQVSQKSGLNRAILDQGWGKFRRQLEYKMAWNGGILLAVPVHHTSQMCPCCGFVAKENRQTQAKFLCADCGYVENADVVGAINVLGRGQRLLACGEDGSGRGRKTPTKPASVKQEPTEATMQEVTHA

SEQ ID NO: 10351 - protein, 413 aa, unknown
  TnpB Polypeptide
MRNTKHKLFHDKSLKHLHDNLNIIGIVRNHFNALARRYYRRYGKELSYSKMSKHLTKLKKLEKYAYWNIPYSWALQNMLKRLAQSFREMRTLGRGHPKFKACKKHKGMTFDGGQAPIEKVLDKQKHERNHPTYKIRLNGRWYRFALHRAIEGEILRVQVTRDALGDVYITLTEDFTEIRYEPKTGKAEGFDFGIKDFLTGSDGERRSSPMFYKQNADTLVAAQQVHSRKVKGSNNRERERKNVARIHKKTDQQRVDHHWKLAIELCREFDILFFEDLNLDGMKRLWGKQVSDLAFGEFLRKLKHQSHKRIRSVLKIGRWTPTTKCCSVCDHKNESITLADREWACPKCHTHLDRDQNAAMNILKEGIASFALGVVRPIVLFNRIVGTSVEATSPLLKTTNASVVSGTEAPAFR

SEQ ID NO: 10352 - protein, 542 aa, unknown
  TnpB Polypeptide
MTAKLLSVKKNDRNFITVECLLAFDKDEDKEKVLNLMRKFSSMVRFAYKRLLEKMERKELKKLLAQKYGINTRYSDSAIFLAQQTLDSCLQRGQNPKKLVFGSRVVFEKLKKKHLTGKRREKIRQEWEERRYGFLYSRGDKSKGGNLNLRLVNLNNQWYLRINLGNGEYVWAKVVRSAKREKDRWIDFVWDLTQAERTDNWFAYTVRLKLKNGKIYAQISKEEKFPEITITRENGVIGIDINAYPFHLALSWTSRDGNLEKYKRISLNGLLDGNTDKREYLSWQIAHQVVEIAKMEGKAIVVENLEKVPKGRRGDGMPKLRQKLQKWIYKGLLEKIEVVCKREGVQLIKVNPAYTSIIGKLKYAPIYNIDKDVASAYVIARRGLGFKEQIPKNYEKLLEDKEFLSYSVARIEDKLAKLKREIKEEKNEYERNKLKGRLKRLRKELKLLLRYLWDSGKSEPATQEPVNREMERVRGRAMSLQKSWRVLSVALAFSCLESFRDFSPLKRVLLLGDWVGVAGRVSPSLPGQGTIAQNRCSFIQFG

SEQ ID NO: 10353 - protein, 489 aa, unknown
  TnpB Polypeptide
MVPFSSGEPVGRYPTVFTIPGTESSKSSNIRTVRLRLLPNGAQERKLRRIADATAKLWNELNYARLVQYREGGKVDFKGTEHGFYHRYRDRLGVNAGQVINLNNQTWKSYFELLKLYKQGKLPKFMGKQSPPGFWKDKLLGKRELRILVRNDRYYLEPINNGEGYLVLKDWGLRIKYAGRIKWSGKQGTLVIKYEDGRWFAYVPITVGEKPARGNPKGYVRGVYDRVQIEKPRGGNKAFIDIGLSNLFAVVFSHSDVAILIKGSTVKAEYYWWKREIKTYQSIRDWLRNHGFESWRKYQAFYLHAVYKRRERLRHYYRTAIRFLAKTLHEIGVNEVFVGYPYLVNQNNGNEYNANVWWFNKIIKWLSEVLQEYGIKLNVINEYGTSKQCSICNMEHENGRVKRGLYVCETTGIKINADINAARNIAKRAGYEVPIPKKILTYIVTTNGVKPITPKEGVTPETPKMKPAQKGQGGGHRAFWGLSDIQRYW

SEQ ID NO: 10354 - protein, 501 aa, Dielma sp.
VDAFLFKGGTSMKCLSYSNRFYYNELSEEDANCIKKDLILYNSMLHTAYKKLYLTCFYGVKEAVSLEKQLKAKYGTNDYFPLSAIHEARALLKSNIETNQRLKKECTKRIERIKEKIRKENKTLQNWQKQKEQLIQKSKEHEISEADYLYEVQIVSPNIKQLKHRIGLLTFKLNRETDKLNHLNLSVRAACFGSRKKLHHDLEAYRYERRKRMLITGRRQGKYSNNLFKYHLESGIIVYRGTEKEVHLPIQFYHHADKLERAVRLPHNTAGKAVAYELYDHGEYFIIKAIIEVEPKVIITKKEEGSIGIDINVDHIAVAHIDRQGNLCRQQILPMKLKGKTRNQRKHEIAETASKIIHECVHTQKPLVMEALDFSDKKQKQRYQPKGLNRMLSEFAYSQITEAIERKAAYERIEVIKVDPAYTSLIGKLKYVRDKGMSVHQAASYVIARKGIGYKEKILREYRVFVKEKQTRAEQWAAVAEKVGKASIKECQLTAILALFR

SEQ ID NO: 10355 - protein, 212 aa, Bacillus sp.
LGAVAFSRFFKKQNDIPRFKSKKNKVQSYTTKQTNGNIAIVGNKIKLPKLGLVRFAKSREVEVRILNATIRRNPSGKYFVSILVETEVQEMPKTESTCGIDVGLKDFAILSDGTPYKKPRFFRILEEKLAKAQRILSRRTKGSSNWNKQRVKVARIHEHIANARADYLHKLSTEIIKNHDVIGMEDLQVSNMLKNRKLAKAISEVSWSQYDS

SEQ ID NO: 10356 - protein, 373 aa, unknown
  TnpB Polypeptide
VLDVVETHFENILDKNKYSSRTVRDIFRKYSYEEEVWTENLILKQFVLNENKNELPVPEWWKGQVHSRLPRGAINKFVSSLNAAISNFKNGNIKRFEMKHRRSDNPTDYLHYEDKQYPSFIRNIKSRYWFTTKDRKRKSISLKDVDTQGRGVEIIYEKETERYYLHYPVERDWFPEEDKRIENQNVLHSTDGNRIISLDPGVRKFLVGYDPQGECIFIGEGANKVLTTMLYDIDKTDESSERIIKWKKVKNMVDELHWKTINFLMENYDTILLPEFRVSQMVRGRKLPRIVKRMMLMYSFYQFKEKLKYKCEMYGKKLIIVDESYTSCTCTRCGTINKMGGLETYDCMLGCGIILDRDVVGARNIFIKNVAQR

SEQ ID NO: 10357 - protein, 370 aa, Desulfurococcales sp.
MRVNATARVRAVAPNPSRYHKLLQFLRAFRDWTQYVINEIWSVDHIPSLKELHRRFYRALRNQGFRAHHCHKIERRAREVVKAVKKNKGSKPVLRKLTARLNYQDYRLDLINKMLRIAVLNDEWVELKLQWYSYLDRYFNGEWKLKEILVSSRNGEVWVYFTFEKEVIMKKPQYVMGIDINFNNTTYTIVNMNGRLVTMGVIPFNGLKRALAHRIIAEKIQKRYSKKWRFIKGVKEAIRKHGRRARNILTDSYHHISKRLVEIAKEYNAMVVLEDLKELRSRVNNSRRFNKKLSLWAYRRMLSYIHYKTLIDGLPVGCVDPRNTSNATKRTHHYKGYCCFMELGLKRFKLVHSRCGASWFRGNPESPRWR

SEQ ID NO: 10358 - protein, 518 aa, unknown
  TnpB Polypeptide
MIALTKTAELKIENTSVYPILDNLGNYYSHIEKELYNYLYDKEITNDLWKRTRPPYLLKYGIPARLFNAMYSEIKGKIDEAKESHQQFLKDAEARIKGFKEKIKKRENKIKTDKKLTKKDKNRLWLSVFQWKQKIDRLNQYIKFHKPTRILFGTKDFYKKQWTTDEYSKDHEAWLKEWRRRRDYHFSFIGSKDETNGNQLCQYYRENDKEFLQIRLPDAMVEQCGKYLIIQVTTDKPYYNDFHTAILAGIALFYKFLKKENGSWYAHISFTLEKEIPKTITGCSGIDINYGLIANTTVDRHGNFIGMQNYYCDPESLTSEQMEDFISTQLDEIVSNAKINGYCISAENLDLSKKKLFKYDKVTNRKIHMIAYDKIWKLLISKCFKAGVFLCGVNPAYTSFIGHFKYEKMYGLNRHNAAAMCIARRGLGLKDRLPAFIASVLQSGEESKRKTKKASKRASWRYVYRHRHHWAHWAYLKKNLERCSSVLDDTEDPGGSKATFEDKLTSRFNPSYLSFVRR

SEQ ID NO: 10359 - protein, 215 aa, unknown
  TnpB Polypeptide
MEVRRTAVVKLAVSDEQRDALHRTAEQYLYCANRTADYCWSDTCYTECKTNKRRVRDALYSELREQTDLQAQLVQAAIKRSVEAIKSVTERWKKGQRISRPTFSAETMDYDARSATFYRNKVSLSTVEGRVEPTFVLPADSPTPYERCVLSEDYEFRESTLRYDAVTDEFYLHISMRRIEGDDAEVPADTGHPDQTVLGIDLGVNSLAVSSTGMF

SEQ ID NO: 10360 - protein, 424 aa, Coleofasciculus sp.
MYAIVSVAKKQNTDTKDVIKVLKAIKVRLYPTPEQELTLARSFGCARWYWNFALNACIQHYQDTGKYLKLAAYKGMLPQLKKEYPWLKEDCYSAVLQCAAINLNKAYTNFFQGRARFPRFKSKHSKQSIQYPQNVTIERDCLKVPKIGEIKAVFHREITGAIKTVTINKTPSDKYFASINCETEDFGSQNSGDKTLGIDLGLKDFAIVHDGLYVTKYSNPKHLKRHEKNLARKQQKLARKTKGSKTREKFRKLVAKVHEKVSNTRQDFLHKLSRNLVDESQVIVVENLNVKGMVRNRKLSKAISDVGWGMFVNFLAYKLEDKEGKLIEIDRFFPSSKKCSCCGHVVSELPLDIREWDCPSCGAHHDRDGNASLNIRAEGIRILSMSGGNPAPANGDCIRPPACEGKGRRSMKLEAHTALAGQCG

SEQ ID NO: 10361 - protein, 412 aa, unknown
  TnpB Polypeptide
MTVIQQVEKHVIKKSHPYYNMFCEYTHLAKNLYNHANYLVRNEFLETGRWLRYRELDKLLKKDLVYPDYANMPAAQSAQQVLRLLETNWKSFFTSIKDWSKNKDKYSGKPKLPKYKPKDGKMVLIVTNQQVRQIDGLLQFPKSFYGFTVKPRCITLDNFEKINQVRIVPNGQSFCLEVVYSISVESELHSDNGRYMSIDLGLDNLATVVTNTGLQPIIVNGKGLKSNNQYYNKKKAHYQKVAKQMNKQHYTNRLYRLTQKRNLKVEDYLHKVSRYIVDFALENQINTIVIGNNKNWKQSVSLGKKTNQAFVQLPHQKLIEKIVYKAHACGIQVILTEESYTSGTSFLDNEPPQKEFYNKIRRIYRGLFVSNKGVKINADVNAAFQIMKKVFPNVFTDGIEGVVLHPVRVGIV

SEQ ID NO: 10362 - protein, 382 aa, unknown
  TnpB Polypeptide
MIKTIKVQLKPNNKQSTNLFGCAGTGRWAYNFAIAKIQEYYKETGKFLNDGEIRKQLTQLKQTEEYQWLYKYSNNIPKQAVKDACDAYKKFFKGLSKFPKFKNRKRSKPSFYQDNVKIKFTDKHCQIEKVGKVKLAEFDRIPFGKDVKYMNPRVTFDGLNWWISVGIEFGDLIIEKEISEPIGIDLGIKDLAIVSNEETFKNINKTKTVKKLKKKLKRLQRQVSRKYEDTKKKGGENRYKKTCNIVKLEDKIKSVHQRLTNIRANYSHQITTSLVRNKPEYIVLEDLNIQGIMKNRHLSKAIQEQCLYDFRTKIEYKCNWYGVKLIIANRFFPSSKMCSECGFVDKDLKISDRTYVCKECGSILDRDKNASINLREYGRLAV

SEQ ID NO: 10363 - protein, 371 aa, unknown
  TnpB Polypeptide
MISYKYKLYRSKNLKHLTNMLREACFVWNHALSLQKRYYRMYGKYIPCGRMQKHFAKRVKRTYLHSQSTQEVIQRLDMAYARFFKHTAKRPPKFKKHSDFSSFCYKQGGFSLHDNVFHVNSVNKDYKFSLSRPYDGNVKQVRVKRSHINEWYVFVITDSNPKPYAKTHDGASVGIDFGLKTYLNLSNGEKVNNPQFLKKSLRKLRKASQRHSRCLRNSHNRERQRLSLCRLYETISDRRSDFQWKLAHDICRRYDTLFIEDLNLCGMTRLWGRKVNDLAHGSFISILEQVANKYGCTVHKIDRWFPSSKLCDCGYKNDNLGLCDREWVCPQCGQIHDRDTHAADMILRRGIYELASSCKTIEPLGFDGCCV

SEQ ID NO: 10364 - protein, 463 aa, Silvanigrella sp.
MLEKHDEEFMASCVVKFRAYPTIEQANILSRWIGCARVIYNCKVSEDNQNYSVFKSTGEKSSVHQAYSHFKTEERDWLNQCPSQILRNASSIWYTAKQRFFKGIAKNPRKKKKGIKDTVLLTNELFKFNDEISKEGVVLKKLIIGTKSKELGVLKFKAHREFGIPQQIVIGKKNNKWFVSFCYEVEDIGKSEQDLLDEYSLLDAESLNELTVGIDRGIVIPFQTSNKLSYDFDDKSKNKIKLKQRKFKKYQRKLSRQKKGSNCRNKTKIKIAKIHSKISNIRHDFCHKFSHSIVNSDAKIFAVEDLKLKNMTKSPKPKQDVNGKYLPNMRKAKAGLNRELLSKGLAKTIEFLEYKAKKYGKLVVKVSPHYSSQECANCGHTHAENRKTQDNFLCLLCGNHDNADINAAKIIAKRGVQFLLSKPKAKTRTRLGTSRSKAGRGISKTKLEQSNPLIPITSEACSL

SEQ ID NO: 10365 - protein, 370 aa, unknown
  TnpB Polypeptide
MEYSYKFRLYPTATQQEQMARNFGCCRYVFNHFLAQRHEQYRENGKAPTRFQQDKSLTALKQELPWLKEVDSTSLQAALQDLDTAYQNFFRRMKQGEKPGYPRFKSKHNHRQSYKSKCVGTNIKVLYHAVQLPKLGKVKCRISREVKGRILSATISRNPSGKYFVALCCTDVEIKPLPSTGAAVGLDMGIKSFAVTSDGVEHPNHKHLAKSEKKLARLQRQLSRKTKGSNRREKARLQLARLHEHVANQRQDMLHKLSTDLMRQYDLICIEDLAPKNMVKNHRLAKSISDASWGEFRRQLEYKSKWYGKQVVTIDRFFPSSQLCSVCGAQWPGTKDLSVREWFCPVCGTVHGRDINAAKNILNEGLRLLA

SEQ ID NO: 10366 - protein, 427 aa, Moorea sp.
MKVLEFKVKGKKTQYAAIDEAIRTGQFVRNKCIRYWMDNKGVGQKDLYRHNTWLRAEYAFVKDLNSHACQASVERAYSSIARFYDKCKKQVPGKKGYPKFKKFSRFGVADAARTVEYKTSGWKLSGDAKSINFLDKKGIGKLKLKGTWELWRYDLKLIKRVRLVRRADGYYVQFCIKIDTKESLEPAHTNVGLDVGLKEFYTDSKGGVEPNPRFYRKGEKKLKFYQRRVSRKKKGKAVGHASRTSNRKKAINRLGRTHLKISRQREEHAKRLARCVIHSNDVVAYEDLRVKNLVKNHCLAKSINDAGWYQFRKWLEYFGQKFGKQTIAVNPAYTSQNCSSCGEVVKKSLSTRTHSCSCGCVLDSPKATLRERDHNAAINILKRALGTVGHTGTWIVDPNALGEDASTLSDSGLKEQATSLIKESPFL

SEQ ID NO: 10367 - protein, 384 aa, unknown
  TnpB Polypeptide
MYLGYKYRINPTAEKKKQLASVFGVVRFVYNWGLSERIKAHKDGKKYGYAACSRDFTKLRCDPEYSWLKDVRRDVEDRSLRNLEGAYRRFFKLKRGFPAFQKKTASQSATFRSKDSGFKIIDDKLILPKVGFVDVVWSRALPSKPIQVTISKTPSGKYYASFLVEVPDKNITKRTRSIGVDLGIKSFLTLSNGELVENPRHGKGLQKKLAKAQRVMSRKDMGSNRRQKQKIKVAKLHEQIANRRADYQHKVARSLVRRFDRIYIEDLNVAGMVKNHNLARAISDVSFGALRRILEYKARLYGKQVIPVGRFFPSSKLCSACGLKNETLTLADRVWTCPCGATHDRDINAAKNILAAGLAVTARGATIALQRSVNSKEMSNNTKE

SEQ ID NO: 10368 - protein, 592 aa, unknown
  TnpB Polypeptide
MSSKDKEIRTFHTTLRVDDAQAVVLEASAFLLSSTKRKLFVDMQSHGTSKEQNRALKTRYILDYGISGRHFNGMWNELKALIDSNMSNKKNHIEDLKKKIASTKKTIAKIKKQRISPKNKTIEKFKKQKLNRREKIRNLKIKLCNQERKLKGWQQDLKDKKVRVTFGTNKLFKAQYYLEENKFKDHKDWRKAWNHARNNQFYLLGSHDESWGNSNCQMTENSDGTFDVELTIPLALVKEYGKKLYFKNVSFGYGCEALSAAVTANEERKAIPVKNKEERKEKGHSITYRFRKDDKGRWMLYAMLDIPNPDIVSRHYKYGVIGVDINQDHWAIVETDRFGNPIKFGSIPCVTYGKSSDQSIAIIGEASKELNEWAIATKKPIVLENLDFKKKKRQLAEYSPEKARQLSSFAYSAILRIIQSRAYQFGIETFKVNPAFTSIIGRLKFADRYNLSVHQGAALAIGRRKMGFSERPPKSALIQFKAGTDIHGTFPSPARIDWKHEWCWWKSAARELQSAVARQYRKQKKAIRQSQAKSQSGNIRPRDGVDQVGCDEKTHRGSRDEIPERRRHNCSDADSDSLPNESGLLLTFVNKK

SEQ ID NO: 10369 - protein, 382 aa, Enterococcus sp.
  misc_feature (163)..(163): Xaa can be any naturally occurring amino acid
  misc_feature (168)..(169): Xaa can be any naturally occurring amino acid
  misc_feature (173)..(174): Xaa can be any naturally occurring amino acid
  misc_feature (176)..(176): Xaa can be any naturally occurring amino acid
  misc_feature (179)..(179): Xaa can be any naturally occurring amino acid
  misc_feature (182)..(183): Xaa can be any naturally occurring amino acid
  misc_feature (187)..(187): Xaa can be any naturally occurring amino acid
  misc_feature (190)..(190): Xaa can be any naturally occurring amino acid
  misc_feature (197)..(197): Xaa can be any naturally occurring amino acid
  misc_feature (201)..(201): Xaa can be any naturally occurring amino acid
  misc_feature (206)..(206): Xaa can be any naturally occurring amino acid
  misc_feature (215)..(215): Xaa can be any naturally occurring amino acid
  misc_feature (220)..(220): Xaa can be any naturally occurring amino acid
  misc_feature (223)..(223): Xaa can be any naturally occurring amino acid
  misc_feature (227)..(227): Xaa can be any naturally occurring amino acid
  misc_feature (230)..(230): Xaa can be any naturally occurring amino acid
  misc_feature (233)..(233): Xaa can be any naturally occurring amino acid
  misc_feature (239)..(239): Xaa can be any naturally occurring amino acid
  misc_feature (243)..(243): Xaa can be any naturally occurring amino acid
  misc_feature (250)..(250): Xaa can be any naturally occurring amino acid
  misc_feature (270)..(270): Xaa can be any naturally occurring amino acid
  misc_feature (276)..(276): Xaa can be any naturally occurring amino acid
  misc_feature (293)..(293): Xaa can be any naturally occurring amino acid
  misc_feature (304)..(304): Xaa can be any naturally occurring amino acid
  misc_feature (307)..(307): Xaa can be any naturally occurring amino acid
  misc_feature (316)..(316): Xaa can be any naturally occurring amino acid
  misc_feature (325)..(325): Xaa can be any naturally occurring amino acid
  misc_feature (330)..(332): Xaa can be any naturally occurring amino acid
  misc_feature (335)..(336): Xaa can be any naturally occurring amino acid
  misc_feature (340)..(340): Xaa can be any naturally occurring amino acid
  misc_feature (352)..(352): Xaa can be any naturally occurring amino acid
  misc_feature (354)..(354): Xaa can be any naturally occurring amino acid
  misc_feature (360)..(360): Xaa can be any naturally occurring amino acid
  misc_feature (364)..(364): Xaa can be any naturally occurring amino acid
  misc_feature (369)..(369): Xaa can be any naturally occurring amino acid
  misc_feature (375)..(375): Xaa can be any naturally occurring amino acid
  misc_feature (377)..(377): Xaa can be any naturally occurring amino acid
MEQLKAYKFRIYPTEEQEIFFAKSFGCVRKVYNLMLDDRKKAYEEVKNDSSKKMTFPTPAKYKKEFPFLKEIDSLALANAQLNLDKAYKNFFRDKSVGFPRFKSKKNPVQSYTTNNQNGTVALIDSKFIKVPKLKSLVRIKLHRQPKGIIKSATISRHSSGKXYISLXXKEEXXEXPKXNSXXGIDXGIXDFAILSXGQKXDNNKXTSKMEKKLXREQRXLSXRALXAKXKGXNLFEAXNYQXQKRKVAXLHEKVMNQRTDFLNKLSTEXIKNHDXICIEDLNTKGMLRNHKXAKSISDVSWSXFVXKLQYKADWXGRKIIKVDXWFPSXXXCSXXGHKXGKKSLEIREWTXPXCHTHHXRDIXASINXLTEGLXLXSMGLA

SEQ ID NO: 10370 - protein, 506 aa, unknown
  TnpB Polypeptide
VESGPGTPKGESESVTKNFNHANSDPGALGGASGLRLQRTTKKTRKNKRTRIVKKIDGEKVVIEPLNAWAQLLVGLDELHRYGGGAIEGRAVVQRTDIVRLLLNVEQEELLRHIGDQTARLINMENYRRRQIFYAKRGIDTGVKVARELAKTKAEYREVKEVLGSKNFDETLRKVAEAWKSFAELLKEKKKGKLPLWLNPKPPGYRKMDGTRIPIIIVRADNYRIDAERKVIHLGYLNISIQFTGKLRWLAKPGAKRGRMEITYDPVKKRWYAHISVEVKIERSSGNGIMGIDLGREVLVATVTSGGEALLYKGKVLKSDYYYFEKKIAAIDSALSKLEEVDRNALAEERRRLFEKRRKRRDQIFANIASHLARFAREHSIGAVFIGYPWNISQKKGNKGNTNLWGYGKLVIRLALTLENYGIAAFAVNEDNTSKKCAYHNIDIKREPRGLIRCPHGHTIHSDVNAALNIMLRGLRLLGIEAELPKHIKVLSFLATPSKTIPIKAP

SEQ ID NO: 10371 - protein, 275 aa, unknown
  TnpB Polypeptide
MVKAIKVMLIPNNVQKTKMFQYAGASRFAYNWALAREIENYEKGGKFISDAELRKEFTKLRHSDEYAWLLSISNNVTKQAIKDACTAYKNFFKGLQKFPRFKSKKRSMPKFYQDNVKIQFSNTHVKFEGFSSSRKANKQKMNWVRLAEHGRIPTDAKYMNPRISFDGLNWWISVCVEFPDCRETLNDDGVGIDLGIKDLAICSDGTKYKNINKSQKVKKLEKQKRRLQRSISRSYEKNKKGESYCKTNNVIKKEKLLLKRNHRLTNIRKNYLKKE

SEQ ID NO: 10372 - protein, 399 aa, unknown
  TnpB Polypeptide
VLKAIKIKLYPNDEQMIYMNKLLGTSRFVYNRCLSYKVTEYKDNKKSLSFGEMGKYLVSMKKEYKWMKESHSKVLQQSLINMDKAYKNFFKGSGFPKYKSKHQKQSCRFPVDAISGIKGNRINIILKLKDINYKCSVQDEKYLNKNQGLIKSGTLSRTKSGNYYFSLLIDRPNKKLNKPTNSIIGIDLGIKDFVITSAGRKFENIKVQRNNKNKLSKLHRELSRKQKDSSNKYKARIKLAKFNEKLNNKKEYYLHSITNQLLSENQTIVIENLNVKGMMKNKNLSRSIQELSLYRFKQILKYKAEWYDRQVIEIDRWFPSSKLCNKCGYKNKELTLKDRKWTCPECNSLLDRDLNAAINIKNEGIRIKIGMSLPESTPLESKSLDPQRIRKQMIESIII

SEQ ID NO: 10373 - protein, 460 aa, unknown
  TnpB Polypeptide
MLMGIRLQAHPNSGQKLILSQWMGCARFIWNAKCEEDRYLSTFAKKYMPIGVYAPIDQKFSQYKDGVLSPWLSDCPSQILRNSVSNWFQTYKAFLKGECGKPKRKPKTDAGSIHLTNELFRFETCDDGVTRLFVGTKTNNIGYLSLKNHGPYQPPKSIHIKRRLGQYFVSFCYEDPVDDTSLATGHDHLEYLRGASLEFLNQHTVGIDRGIVRPVQAGAEVFDLTPEQKRSKTRTARYLKRLQRRLARQKKGSNRRRKIKGKIGRAHLKMANIRRDFCHKASHAIVSNPNHKVIILEDLKTKNMTKAPKPKQTESGHWEKNGASAKAGLNRQILDQGWHQFETFLKYKSFRAGKALFKVSPHMTSQECAACSHTHPGNRQSQASFVCGACGHTDHADRNAAEVIKKRAIVLILDSGSELSSRGVLLDSGRGATVKTRRASARRARGSEASKKRGEAAPAA

SEQ ID NO: 10374 - protein, 315 aa, unknown
  TnpB Polypeptide
MLQVITAKLKLEASSEQKKLLGVVSLAYRDALNFTSKLNFENGKSSNGTKIQKLVYRDLRSRFKLPSQMACNVPRQVGATYKGLLTKLRQNKEAIEKGWTKKRFKGLDKAPKYISRTCNLNYLRDFSFRPDNQISIITLRGRITVGYSGYSKHTELIRSGTKIGGAKIYYSRPTKTYYLLVSLELELPEIEPFRLKRVVGADVGRRFLAVTTDVENKTQFFSGKETLHKANRYQIARTTLQQKGTRSATRRLKLVAGRERRFTADVNHQISKQIVTPNTLFGLEDLTHIRERTKPKKKGQKASKKQRKANRKQAK

SEQ ID NO: 10375 - protein, 406 aa, unknown
  TnpB Polypeptide
MSTRTIALTLKPTDAERAALERLRRAFADACNHISAVAWEVREFNSVRLQRLVYYDTRARFGLMAQHTIRAIAVVCDSYKAGKERMHRFKPTSAVVLDTPRLYSVSHNRASIATLDGRQRIRLGIGGHQRFQLATAIKLAEADLICDRKGRWRLMVCAHYADPVPISTEGVVGVDLGRRNIAMTSDGASFSGEQVTAVRDRHARVRASLQQRASKGTRSTRRRARAVVKRLSGRERRFQRDVNHVASRRIVQAAARTGRAIALEDLTGIRERTNTQPRGKTERRRSNSWAFRQLRGFIAYKAHDAGLPLVLVNPAYTSQTCHCCLHVGERAGKRFWCINPSCLWSGDADLNGRRTSLTWGHLSVAPEVRRCAVHCSPAGRATTSPRLWSWVSDTVQRAGDRKSNDR

SEQ ID NO: 10376 - protein, 410 aa, unknown
  TnpB Polypeptide
MIRAHKITLKLNNKQKTYMAKASGCARFAYNWALAEWQKEYAAGKKPNEAAMRRSLNAVKATEFPWMLEVTKCAPQMAIKDLGKAFQNFFAKRAGYPKFKKKGVHDSFTLSNDQTKVCGKRLRIPNLGLVKMREELRFDGKLLWVTISRHGNDWCAAISVEVPGETTPQSASATGEVSKVVGIDLGVSQLATLSTGETIANPNALEKKLKTLRRLSRGLSRKQKGSKNREKSRRKLCALHRSISDLRSDTLHKMTTNISRRFNVVCLEDLNVRGMTKNKHLARRLSDSSFGEIRRQLEYKTTSRGGRVLFVNAFFPSSKLCHICLAKNECLTLADRTWQCAGCGATHDRDLNAALNIRNHAVSYTVAGDARKACGEEGSGSKAVKRPRVKPASMKQESSVKSAQVGLGRS

SEQ ID NO: 10377 - protein, 373 aa, Bacillus sp.
MLVNKSYKFRIYPTKAQEILIAKTIGCSRYVFNYFLGKWKDTYKETGKGLTYNTCSAELTQLKKELVWLKDVDSIALQSSLKNLADSYVRFFKKQNQSPRFKSKKNKLQSYTTKETNHNIAIVGNKIKLPKLGLVRFSKSREVEGRILNTTVRRNPSGKYFVSILAEVEQQALEKTGSSIGVDLGLKNLAILSDGTKYENPKWFHKLEEGLAKAQRILARRTKGGSNWNKQRIKVAKIHERITQARTDYLQKISTEIIKNHDVIGIEDLQVVNMLKNERLALDISQVSWAKFRTMLEYKAKWYDKEVVVVSKTFASSQLCSCCAYKNKDVKTNNLREWDCPSCGTHHDRDINAGQNLKDEAIRLLTVGTTGIA

SEQ ID NO: 10378 - protein, 356 aa, Streptomyces sp.
VNCWEGRADEPNYKGRFRSSMSVDIPQGRDLNIVRVHRRWGMVNIPKLGRVRFRWTKDLPVGKRANKENRITGARLVKDALGWHIAFRVQTLERTPEPHHGPEVGIDAGVNIPLALSNKDHQDHSRPPRLPNGDSDRDKWLTPKEKAKLLKLERHAAHRKTFRKRGEKTSKRLQHTYDQIKQLRAKATRRALDWQHQTTTYLARMYGVLVVEQLNILGMTKSPAPKLDPEQQGAFLHNGARAKAGLNRSIAQEAWGRTVRLLTYKTARYGGRLVKVPAPHTSQRCSACGFTTPGSRESQELFVCKNPDCGWTANADWNAARNVLHLYRIGHVIVEFPAAGRRGRRAGKTVKPVAAR

SEQ ID NO: 10379 - protein, 460 aa, Micromonospora sp.
VTIQAYRFALDLTPAQQRAVLAHTGAVRVAYNWALARVKAVMDQRAAERSYGIGEADLTPVLVWSLPALRKEWNTAKSEVAPWWSQCSKEAFNSGLDALVRGLKNWADCRSGKRAGRPVGFPRFKSRRRSTPSVRFTTGAIRVEPDRKHVVLPRLGRLKLHESARKLARRLDNGTARIMSATVRRDGCRWHVAFCVEIHRAERRPARPASAIGVDVGVTYLATLSTGEHVPNPRPLDAAQRRLCTLGRRLTRRLGPDRRTGRRPSNRWRAAQAQLGRAHARVANLRRDGMHKLTTRLTREHGTVVVEDLNVAGMLRNRRLARHIADAGFAEVRRQLAYKTKWYGGHLVVADRWYPSSKTCSGCGAVKAKLPLSERIYTCTRCGLTLDRDLNAARNLAALAHEATDARSGRESLNGRGADRKTPLVRQVAAKRQPGIAFAGQTGTIPPQGGTTDHVLVRAH

SEQ ID NO: 10380 - protein, 445 aa, unknown
  TnpB Polypeptide
MNIFSSYKVKIKHYNHIFEQTVKIYRNAVSFFIDVCDKEWDVLEPLKNLERCRKIEELTLYTKKNQNPKYNFNERFYKMPSYLRRSSINTATGCYSSYYSNLKNWKANPIGNKPKLQLDRNVIPTLYKDNMYIRTDDNTARIKIFHKNDWVWLDVELNNQDVKYIQNHCTFKKEYVPTLKKQGKCWYLVFPFEDKVKFQKVDIEDQIICAVDLGLNNNATCSIMQSDGTVVGRKFVNLATEKDHLDKALNRVKKAQQNGARKCPTLWKHVNDLNTDISRKTAKEIVDFAVLYNADVIVFEHLDTQGKKKGRGKQKLALWRKQEMQKLVEHKVHILGIRISHICAWNTSKLAFDGSGKVERGTYIQNRVEKYNYSICTFPNGKQYHCDLNASYNIGARYFIRELLKSDSVMRRLPSQTKDSDYGTGTTRTLSTLIRLNADLCSNAI

SEQ ID NO: 10381 - protein, 331 aa, unknown
  TnpB Polypeptide
VGKPKKSSKGSVPMPTMPVLKRTITVELIPTKEQEEELKELGNLCSKLWNQVNYERRRQFFNGEHGVDIKGTYNKWYNEYKDMIGTITAQQVLNKNNEAWSSFFSLLRTKKEEKLLPPFINKINPPGYWKDKKERKLIIVLRKDQYKIDEEKQEIELRHLGKFRDLAIKYNGEIYYRGEQGRLEIIYNPVLHKWYAHITLKANEKLDRKTGKRVKVPLTSKGNLVGGIDIGINNLLAVYVSDGTQVLIKTRVLKSISYYFMKLISMKQKLLSLFKQPFSNKIKRLYIKWKRELNAIIDATVRKVAEFLYNKGVSLIKVGYPKNISQKRVTF

SEQ ID NO: 10382 - protein, 389 aa, unknown
  TnpB Polypeptide
MLRSYKYRIYPNERQRILLAKHFGGVRWVYNDALALRMKLWQDGNQRISWSELSARLPVLKVKEETNWLAEVNAQSLCGAILNLEKAYTAFFKSGAGFPKFKSRRGRQTFQCPHGVKVDFEAQTIRFPKFDLMRFVCSRTFEGTVKTVTVSRDPSGKHFASVLVDTGKDAPSAERFTAATTLGIDLGLTHFATFSDGEKVANPRFLKASLAKLAREQRKLSRKAKGSKNRAKQGIRVALAHEKIRNQRNDFLHKLSTRIIRENQAVALEDLNVAGMVTNRKLARSISDAGWSEFGRQLEYKAAWGGKTVIRIGRFDPSSKLCTCGIINRTLKLSDRVWTCDSCGTTHDRDVLAANNIKRFALGRVTPFEPVESARPKASRRSRKTETAS

SEQ ID NO: 10383 - protein, 804 aa, Rhodococcus sp.
MSGPGSTAPRQFAFTTRAHAAVDDATGEPVGLDDVDTRVRWLLDLIAAAGGELVSRLWQPVTFDVLTAGRDCAGRRLPAQGHVAAARLGWNPVYADKVYVPSRVTRVVTAQVMASLRTLAYRDAAIAALSERFDPATGRITPPTAAADGVPMGFARGVRRQLVAHARRTDGAQSARLRITDIQRPPQVTAMARLSAADRQLAQITATERELVLTVKLPTCPAPSGRAQWRWVRLTAAVPGHLLGRAITDWHLPTLVLDARGLLWRCAATELVPAGDLGAATVAVGVDWSPSTLGAAAITTENSDGLSSDYRGFTYDDRGLGIKLARLQAEGQMLHRKAARLTRLAATAPPEVRAQLEAKIAVLNDHRTAVGVKRGKINRELAFHFARQVTDYAAAAGAQVIAVEDLTTLETRGHGRVNNNRAAQSARRKATAALAHTAAGGGIAVVSVPARGSSAQCPGCDEPLARPGGYHTAWCSRCLVGGNRDHVAGVNLAKRALLGKGKVTRRRGRLPTIRVAEHAPVRKFRDKNGPTPSRPRHRRVRRSLPTATPRMGVTPKQHVPASQASVWDTVKPAPPNGDAGSRDTRRSPTIVTPLADSMRSTQTLWIDERNGPMTGVDRDTENVTLTALLARIAQGERDAFSDFYERTSARVYGMVLRVLRDPGYSEETTQEVYLQVWNNADKFDPKQGSPLSWLITLAHRRAVDRVRSEQSGTEREAAYGASSWYGPFDAVSEEVTRRGDTSDVVDCLGTLTEVQQRTVVLAYYGGLTYREVSERLSVALPTVKSRIRDGLIRLKQCLGVQFDG

SEQ ID NO: 10384 - protein, 413 aa, Crocosphaera sp.
MTYDFKLKPKKSQVQMIEMYLETCKKVYNYALRERKDWVNSRKSPINFCSIHSEYIISPNKQRPTYNSQCKSLTDAKKIYPQLKEPHSQVLQQTLRTLEAAFVNMWERGFGFPRFKKKMRSFLYPSVKQKWVGDGWVKLPKIGKVKMRMSRPISNGFVLKQIRVVKRASGYFVQLIYQLSVNIPETPIQGYPLGVDIGLDSYLATSEGELVKRPRFFNQLHGKLKSLQRRLKNKKKGSNNWQKLQTQIARVYQKIHDTRKDWHFKLAHHLCDQAGMMFVEDINFKAWAKGLFGKHTLDAGFGQFFNILSYICWKRDVYFLKVDKDYTSQICPNCNTQTGKKNLKNRIHNCPNCGYQTNRDVAASQVIRNRGLVAVQRGLGGFPHERLHQDAVGQPVNEIASGGVLSGSIFDWR

SEQ ID NO: 10385 - protein, 431 aa, unknown
  TnpB Polypeptide
MKEMQKQYDVTWDYCRTSMIVIKKKYGIDAVFALTKAEDVFRGIEKCLYSDGETVHFKKRGDLPCIRAKQVNRGIIMKQMNFKFKDIEFGVKIKDRYEQEEVDAILYYLKNAELMDSIAANTYKETNICVSTYRPCYVSLVCKKIRGKLRVYVHITIEGVTKPKRDRFGNMKHNKGKGIVGCDIGTQTIAYTTETKAGLKNLAERGSCIEVNERKERRIYRAMDRSRRAMNPDNYNEDGTIKKGKKKWTYSNRYKKLRTKHRELCRINATNRHLAINEDVNELRSLGDVFVTEPKNAKKLQKKAKTGKRKKRFGRSIKNRCPGYFQSQAKRKFRIYVEVPNDYKASQYDHTSDEYIKKSLSQRMYKLSDGTMVQRDLYSSFLLYCIDLNTNKIDKNKCIHEFEKQYKNQNETIEYIQMNQIKVMNSGIKVN

SEQ ID NO: 10386 - protein, 409 aa, unknown
  TnpB Polypeptide
MKTNRAFKYELDPNRGQLLLFARHAGTARFAYNWGLARKKEALEREEKVPSAIDLHRELNALKKTDFPWMYEVSKCAPQEALRNLDVAFRNFWNGRRKGRRTGFPKFKKKGIHDSFRFSTGAIHVFERHVQLPKLGRIRVKEPICASLRDIANGAGKILSATVSRVADRWYVSFTVEHETSDPVPVQGPVVGVDLGINCFAVLSDGTEVYAPKPLQKMLVRLQRLSKQLSRKKKGAMNRKKAAMRVARLYRRITNIRNDFLHKLSTELAKTKSVIVFESLNVKGMVRNRHLARHIADAGWSRFREMMQYKASWYGSTLVTAPAFFPSTKTCSVCGNIQDMPLKERTFECANCGAIMSRDLNAALNLEKLYTGSSPGINACGEEGSGSRKHYAVKPFSVKQEVTPVDICP

SEQ ID NO: 10387 - protein, 207 aa, Microcoleus sp.
  misc_feature (184)..(187): Xaa can be any naturally occurring amino acid
MEKAYRYRFYPTTEQESLLRRTMGCARLVYNKALAVRTEAWYKRQERVGYSETSSMLTSWKKEEELQFLNEVSCVPLQQGLRHLQTAFTNFFAGRARYPNFKKKHHGGSAEFTKSAFRWKDGQVFLAKCTSPLPIRWSREIPSGCSPSTITVKLTASGRWFVSLRVNDDRVKPLPKSDKSIGLXXXXLLAMEIKLPTPRTSNSFARS

SEQ ID NO: 10388 - protein, 380 aa, Acidaminobacter sp.
VEVKKVLVHKAYRFRIYPNEEQKVLISKTIGCSRFVFNHFLSAWNKFYEETGKGLTYNTCAAQMTLFKKEKAYAWLSEVDSIALQSSLKCLDDAFKRFFRKQNDRPRFKSKKNKVQSYTTKFTNGNIGIIGSKIKLPKLGLVKFAKSRDVEGRILSATIRCHPSGKYFVSILAETEVQAFQKTGSACGIDVGIKHFAKVSDHTERENPKCFRKYEAELAKAQRVLSRRVKYSKNWEKQRVKVAKIHERIANARKDNLHKFSYEIVKNHDVIGIEDLQVSNLLKNHKLAKAIGDVSWSQFRSLLEYKARWYGKQVVAVGRNFPSSQLCSNCGYKNKDVKDLAVRNWTCPECGVCHDRDLNASINIKNEALRLLTAGAAGLA

SEQ ID NO: 10389 - protein, 230 aa, unknown
  TnpB Polypeptide
MNRSGQFFISILVETEQYNKLKTGKTIGIDLGIKTLVTLSDNTIIDNPHYLRESQAKLKRMQQNLSRKKKGSKRRDKCRLKVARLHQKIANKRSWLIHNITTMLVNNYDIICIEDLNTSGMLKNNRLAKYISDASFSMFRSQLEYKCDWYGKEIVVIDRFYPSSKTCSSCGWKKEDLTLSDRIFVCENRGNKIDRDLNAAINIKRMGVDILYNRTSSDKSTSRVETSKIP

SEQ ID NO: 10390 - protein, 406 aa, Nonomuraea sp.
VTSRQGFRIELAPTLEQRTRLGRHAGLSRVVENFCLEKVKAAIEQREAEKTYGIPEKDLTPIPWSAPALERMWRLEHRDRYRWFTEEGLSSRVPKEACRVRAAGFKNFFDSRSGKRKGRKVGFPDWRKRKHGSRFRYDADRARPEAARLVRMPGVGKVRTLEDMSWLTDRIADGHARVIGSTVREQAGRWWVSFQIEIDRADINERRTVPGDAPACGIDVGVKTFATIVDDDGTVTELHAPKPLKAALRKLRRAGRSVSAKQRGSSNRAKAVKRLAKVHLEVANRRADFLHKTTTMLARSKRAIAVETLNVTGMVANRRLARAISDLGFGEFFRQLEYKAQWYGSSVWAADRWFPSSRLCGGCGTINRELTLADRVWTCGCGLVHDRDVNAARNLLEAMNLEQNAA

SEQ ID NO: 10391 - protein, 362 aa, Paenibacillus sp.
LQKAYKFRIYPNKKQIQQINKTFGCSRFVYNYFLDKRIKIYEENKETLSYGKCSSILTILKQEKEWLKEVDKFALQNSLKDLDRAYQKFFKEKTGFPKFKSKHNNRQSYRTNYTNNNIEINENKIKLPKLGWVKFAKSREVEGKILNVTISKNPSGKYFASFCCEVEIVQLPTSDNKIGLDLGIKDFVISSNGDKIDNPKHLIKSEQKLKNLQRSLSRKKKGSKNRNKVRIKLAKQHEKISNQRLDFLHKLSTKLISENQVIYLEDLKVKNMQQNERLAKNIADASWSKFRNILEYKAKWYGREVKILDRWFPSSKTCSCCGFKNEKLTLDIREWTCENCGENHDRDINAAVNILQQGLKLA

SEQ ID NO: 10392 - protein, 379 aa, Paenibacillus sp.
LNEQQKKIFKQTIGVCRFAYNFFIAHNQEKYKKSNKFISGMDFSKWLNNDFIPNNPEYSWIKDVYAKAVKQSIMNADKAFRKFFKGESRFPRFKKKKNQDVKMYFVKNDAKTVIPCERHRIKIPTLGWVKIKEKGYLPTNATIKSGTVSQKTDRYYVSVLVEEDAASESTDSNDGIGVDLGLKEFAVISSQDRPVKNINKTARVRKIEKSLKRQQRKLSRKYESAKKNKNKKEETATRQNIHKQVLKVQKLHYRLSNIRENHINQTINMIIKQKPRFITIEDLNVRGMMKNRHLAKAVAQQCFNQFKTKLEVKCKINGIELRIVDRFYPSSKLCSCCGHRKVDLKLSDRIYVCDNCGNTMDRDMNAAVNLKNAKIYKVA

SEQ ID NO: 10393 - protein, 399 aa, Paenibacillus sp.
LEIYKTIKLRINCNEYDLKRLEICNKESAHIWNLCIKENKMNFEKNKELLSKGDLQSFVKKIDVSTICAFNKTFVSRRVFEAYKAISKARKSGRKDLYYPYKDKKFFPTEWDSYRMHFNYADNIIYLATARYIGNDGKPHNGKQIVLKFKTPIPHNIKTLKLVYEHGHYYACISYLIEVKEKKPFFSNKASIDLGEIHAITSVDNNRNQLIITGRKIRSIKQFRNKRQAELRSKMDRCKKGSRQYNKYRIAYAKIKSKCRKQLDYHIHKLTRMYTNWAIEKGISVVYCGDVTGIEYGTNAKGNSFTRQKINQWEYGKIMRLLEYKLRLEGIQFEKVDESYSSQICPCCGFKNKPKNRNYRCDNCEEEFHRDIVGAWNILSNNCKLDFTPSNYTKYLRIA

SEQ ID NO: 10394 - protein, 414 aa, Paenibacillus sp.
MKLSFKFKQKLSQQQINIIEELSFHTTKIYNTANYICRETEYKSYTKLEKELKSNWHNEYLHSHNYQQCLKILEQNWKSYFASIKDYKKNSSKYKGMPQPPKYKNNKDKKNEVIFTNLAIRYQDGLLKLSLSKKIKEKFQVQSLNFAIESSKIPVNFSEIQQIKIKWDISDKEWYLIIIYNQQEANITENFKNIMAVDLGLDNIATLTFMDNKECIIVDGKEAKSKNSYYNKEIARLTSVAMKQQGDSNFFKRTKKIVKLQKKRNNYMNDFVHKVSKKIVDYAIWNECKTIVVGDISGIKQNNGTKTFVQIPIQKIVDKLKYKAELLGIEVVLQEESYTSGCSALDMEEINKQNYDKTRRIQRGLFQSKSGILINADMNGSLNILRKYTKCTPRAIENVRDNGFLNNPVRIRVV

SEQ ID NO: 10395 - protein, 389 aa, Calothrix sp.
KLLTSKFDLIYEKSVSKSLVAQSLPSTPMQQTLMSVTEAFKSFKELRSLFLKGQLHFKPQAPNYLTGYKLFKVAYPNSGGQRPNLIDGQLRFSLGLTVRRWFGISEFVLPMPSNIDYSKVKEFTILPKNGAFYLEMSYEIEKQKHNLDINQALSIDLGTADNLAACVDTLGNSLLIDARAMKAMNQLWNKKVSTRKEGKSEAYWDNWLDKVTRKRNHQMRDGINKAAKLIIDHCLKYGIGTLVIGWNEGFKTSSGMGRVNNQKFVQMPLGKLKDRLNQLCNLHGIRFQETEESYTSKASFLDGDSLPIYGQKPEGWKASGKRVERGLYRSANGSIINADLNGAANILRKVASNLSIDLGLLGRRSLTTVARVRLWVLPKFTLSAESQWL

SEQ ID NO: 10396 - protein, 361 aa, Richelia sp.
MLLGFKTELKINNLERTLLLKHCGVSRHAWNWGLALTKQILEHNFLNPDSKIKFPSEIDLHKYLVALVKSENPWYYECSKSAPQSALRALSTAWKRCFQKVSSQPRFKKKGKNDSFTLEGICRIKDSFTIQVPKIGKLKTYEKLPQIQIKSVTISRQADRWFISFKIDTEIKENQHTSIVGVDLGVKVLATLSTGKVIEGAKSYRRYKAKLSRLQWLNRSKTIGSQNWKRACLKIAKLHRKITNLRKDTIHKLTSLLAKNHGTVVIENLNVSGMMKNHKLAGAIADMGFYELRRQLEYKCQLYGSKLVVVDRWFPSSKTCSSCGHKKEILSLSERVFSCLKCNFKIDRDLNAAINLSMAVS

SEQ ID NO: 10397 - protein, 398 aa, unknown
  TnpB Polypeptide
MKRTEKHKIYKSHPMYSKLDDMSRKANNLYNQCVYFAKNSENLSEDLKTLDKVMKSFPDEYDNYRSFGHAKSAQQVLRLFQQNLRSYFASIKDYKKNPTKYTGRPKFPKFRKSGERFHVIFTNQSVRLTGQTIVIASKTFDNKLSITLRTHSAKNICQVVFAPRNDYFLVYVIYEEEDVTFSQKSNKVAAIDIGLKNLATVTFSEQDEPILYRSDLVKINKEFNRITSEYTSVLKKTQNKHTSKRRKRFSEKYSGLIEDRLHKLSRAIINDLSQRGVSTVIVGKNTGQKINNKLKNFVQVPLFRLIEMIKYKAESAGITFMQVNESYTSGTSFLDNELPIKECYDKSRRKDRGLFLSNDSKRINADVNASFQIMKKVNEKFAYKDSVKYANPIVKTIC

SEQ ID NO: 10398 - protein, 391 aa, unknown
  TnpB Polypeptide
MIKSVKVRLRPNNTQLTKLFQYAGCARFAYNWAIAREQENYSQGNKFLSDCDLRREFTQLKKCEDYKWLNTISNNVPKQAIKDACNAYINFFKKQSKYPKFKSKKQSKQSFFQDGFKIRFTDTHVKVEGFPMSKKRNKQRLNWIKLCEKGKIPTNCKYMNPRFTYDGLYWYVSVSIEVDDELNLPSNEGVGIDLGLKDLAICSDGNNYQNINKTQRVKKLEKRRRRLQRSVSRRYEKNKKGERYCKTRNLIKREKELLKLTRRLTNIRRNYLHQTTSEIIKRKPSFICIEDLNVSGMMKNRHLSKAVQQQSFYEFRRQIKYKSAWNNIPVIIADRFFPSSKLCSCCGMIKKDLKLSDRIYKCECGNVIDRDFQASLNLKAYGENVLKQSVA

SEQ ID NO: 10399 - protein, 304 aa, unknown
  TnpB Polypeptide
  misc_feature (298)..(304): Xaa can be any naturally occurring amino acid
METTHRTHICRLSNHSQVKEAFDTHAWSASKLWNVANYHAQQVWDDTGENPDEAALKHELKDHPTYDGLHSQSSQNGLEELSEADSSWYGSDDDRDNPPGYRKRNYYDADGNRVHEEHPRSTVTWKPSAIRHDTENARLRLSKGANHKSSPRAREYILAEYDAPPEVTLENIQQVRAVWQSREERWELHVVCEHDLDTESPGDNVAGVDLGICNPATVAFPDDAVVYPGNRLREDKHYFTYDEYQTEGGNGPSQRAEWAREKLARRKTHLLHALTKGIIERCVSHNVGTLVIGDPSGXXXXXXX

SEQ ID NO: 10400 - protein, 548 aa, unknown
  TnpB Polypeptide
LVNQDDLICDDKLSYILKNYECVDIVKNIDNNIKEHFPNHVRKYVNLRFKIKDKKLQITNSTTLTPIQKKEQIRKINERFNNIKYDILSTSEFRSNKKDFLKIIRIRALILPYDTFVENNIFYDLKVNPQSYLESMIVLNKLIQNLNVYRDADYKLFHILPLRTSIVPRYITLDTAAIISLFIGKAEYFKNISDKSNDVWRSIFNLDDSSFKRKHHKFIHMIKTDGVACSIVLEKKKKEERKTVKSIPIPLLTVFQSSNLVTPIKSGIKRKVHNREKNENNKYNHEYIEDAALTIGQKNMNFVFIDPGHNDLIRCLSGNFREKQIDEIAYVKGIEETSDDVTFRYTRKQRNRESKKMRDRKIISNMKTKDITEKEAKLSDYNSKTCEFEKLYDHYEQEIYRKLKFNVYTNTRKSESKMINNFKAKMGKPNDTIIVFGDYSKEGTMKGSEPHISKRIKKIFVQNKYKLFEINEYNTSKLCNKCSCITENVEIQKKKIWKLLRCTSGICLTYHDRDLNAVRNMKKIVESVLIGTGRPQEYTNQNTYLRSE

SEQ ID NO: 10401 - protein, 406 aa, Rhodococcus sp.
MSIVQRVYPSEGAQLEMLTMHCAHARYVYNLGLEQRSWWTQSRRHFRQKVTVASQMRDLTEARREFDWLRAGSTVVQQGALRDLDRAFTNFFARRAGYPTFKKRFGARHGFVVRDLAVRRINRRWGEILVPKAGWVRFRISRAWTDISAATSARVAVTNGRWTVSLTTPPAPRREPCTTRVVGIDRGVANSIATSDGRMFHAPGFTVGEQVRFVALQRRLSRQKKGSANRDRTKTELRRLRLRLADRRGDWIEQTTTELASTYCAAAVENLQIWNMTRRAKPKPDPDNPGGFLPNGGRAKSGLNRAILSSCWGKFAQRLDHKMSVIAVPAAYTSKQCSNCGHICPENRDSQAIFRCQGCGFEHHADTNAAINIRDRAFMIEHQPAGSLGDRVHQSRLRAAPTTSVA

SEQ ID NO: 10402 - protein, 415 aa, unknown
  TnpB Polypeptide
MVDVASTAPPKPPLRTLKLKLDPTRQQKLQLATFAGCSRFTYNKAVAIRMAEGSTQKSTFRIRDRIVTGRPRGTDKKENSFFKNRQWLLDCPKSIRQSAVKAAMSNIKACFSNLKAGNIKRFDAPFRTKRDEKERGWALEMDQLNVSKEGDKLYVFKDTLGEMRYFGRKQLHKLMPLANPSHDPKIQKSRFGEYFLVLSIARQPVRERRPAHPGRGAAASIDPGVRKTMVTYSPENQESFMLGRGQATVLVQLLLGHDKLQASLAAAGLTKKQRASVKAQMRRIRMRVFYLKKEFRDQTANFLARRYDVLLVPKLDTKAMTISAGRRLTTKVARQMLTLSHSMLFSRLKEKCAEYNSLFLLVKEHYTSQTCLWCGCLNKCGETYRCSRCSFTCDRDVVGAAGIFLKAVRRTDPQP

SEQ ID NO: 10403 - protein, 421 aa, Lactobacillus sp.
MLVSLTVKAKLKLDNATDAAKFQETSEQYRSACNHVSEYIFNNGFKLSGNKIQKKLYPDLRQRFGLKSQLAISAIKTTVANYKTVQTQLRRKPMAYPTGKKDKKGKEIYLKVPRDLHWLWKPVYFQRPQADLVRNRDWSIVANGEKLSINTLQGRVKAGFVLKTGFEQYLDGTWEFGGAKLIKSGANWFLHIAVNKEFPELSRTDMQHVVGLDRGIRQLVTTYDDQGKTAFFNGQAINRKRRHYKALRTSLQRHNTRNAKRRIRQMGNKENRWMTDINHQLSKTLVAKYGPNTLFVLENLVNVRFATEKTTKDTRYEKVSWAFYQLEQMLTYKAIQAGVAVITVSAAYTSQRCPHCGEIKKTNRKYQLHAYQCSNCGYQSNDDRVGAMNIQYLGTQYINGVKKPKLKKKKKCERVNLFNCR

SEQ ID NO: 10404 - protein, 296 aa, Cyanobacteria sp.
MRDEPTQLFFKHHKKGVKPPGFKKVKKYKSFTLKQAGYKFLRGNRVKIGNKIYQYWNSREIEGTVKTLTIKRTALGELFMVVVVDGYSTPEVTFETGKIAGFDFGLKTFLTCSEGFSIESPLFLKSFLNTLAKASKQHSKKHKGSNNREQARKHLVRCHEAICNRRRDWFWKLAHKLTDQFDVLCFETLNLKGMQRLWGRKVNDLALGDFLQILEWVAKKKGKRIVYVDRWYPSSKTCSCCGHVLDELDLSVRRWRCPSCHSVNDRDTNAAINIKRVGSSTLGVEDVRQSQTAILV

SEQ ID NO: 10405 - protein, 390 aa, unknown
  TnpB Polypeptide
VTSRFVYRFRLQPTVEQKRILNRLAGARRFIWNWGLTRRKDYHLAHGKTLKYVALNLELTTLKAQEDTKWLCDMDSQALQESLRDLDRSFTNFFENRACFPKFKKKRHHQATFRIPQRVKIDGGRVYCPKVGWIRLRLSQPVTVPTKSATFKRDACGDWFVTLVAEREVDAQIPLPFKAVGVDLGLKTFATFSGDAPDIPIPKFFRKAERALRKVQRIFSRRKKGSTRRAKAKIRVSRVHRKTARQRSDFLHKTTTALVAQHDLICIEDLSVKGLAKTKLGKSLLDAAFGEFRRQIEYKAAWRGKLVSVIGRFYPSSKLHRACGTIKADLTLSDREWTCEGCATHIGRDKNAAENILAEGLNLVAAGQADTQNAHGASVRLAKRERQASK

SEQ ID NO: 10406 - protein, 390 aa, unknown; identical to SEQ ID NO: 10405
  TnpB Polypeptide

SEQ ID NO: 10407 - protein, 408 aa, unknown
  TnpB Polypeptide
MKVIRGYKTELKPNNKQRSALLQHAGTARYVWNWALNRIESKVSKPNAIQLHKEWNVWKRDNAVWYKEVSKCSPQESLRNLENAFKHFFRKCKDKKKGKFKGKAGFPRYKNKHKGIGSSRFTGTIKVAENTIQLPRLGKLRLKENSYLPINAKILSLTISEKAGKWFVSIQVEENIPEPKAKKENVVGIDLGIKTLAVCSDGKEYQNPKALKTRLRKLKMLQCSASKKVKGSQNRKKANRKVARLHYKIGNIRKDTLHKITTELTKTKSIVVIEDLCVSGMMKNHKLAQAISDVGLYEFRRQLEYKGKLYGCEIQVADRFFPSSKLCRFCGCLNDELTLADREWTCACGAVHDRDLNAAKNLESLAVSSTESLNACGEESSGNKNVIIAKLSSMKQEENVKSATCRFL

SEQ ID NO: 10408 - protein, 373 aa, Enterococcus sp.
MKVLKAYKYRLYPTLSQEVFIKKTFSCVRLVHNLLLQERIQLFKTLKEQPELKVKMPTPAQFKKEHPCLKEVDSLALSNAQVYLDRAFKKFHREKSVGFPKLKQKKDAVSSYTTNNQNGTIKIIDEKYLKVPKLKSLIKMKMHRPIIGKIKSATISLSPSNKYFVSILCEAEIPTVEKTYSAIGITLGTSEFAVLSNGRRIDNDKFTKEFEQRITREERKLTRRKEIAKVKGTDITQQKNYQKQKLKVAKMREKLMNQRIDFLNKITTELVRKYDLICIEDIHQNDFFRNSKLHRGVSDVSWALFVSKLEYKVSWYNKRLIKVSACGKCSEHSDNTQLSQMFTQDINAKKGQNDSETAASIQVLVQGLKNIRT

SEQ ID NO: 10409 - protein, 379 aa, unknown
  TnpB Polypeptide
MAQMSITAKIQVVASDEDKALLDETMSVYREACNYVSDYVFRTHDLKQFSLNKALYPTLRAEFGLKSQMTQSVFKTVIARYKTILENQKEWIKPSFKKPQYDLVWNRDYSLTQDRFSINTLGGRVKLPYFAEWMSKYFDRSIYRFGTAKLVNKHGKYFLHIPVTYDVEESDLSDICNVVGIDRGINFVVATYDSKHKSGFVRGRSIKQKRAHYSALRKELQMRHTPSSRRRLKRIGQRENRWMQDVNHCVSKALVVNNPAHTLFILEDLSGIRHATERVKTKHRYVSVSWAFYDLEQKLIYKAKQNHSSVIKVNPRYTSQCCPACGHTEKANRNKKIHLFTCKNCGYKSNDDRIGAMNLYRMGINYLYDSQVPDTVAAE

SEQ ID NO: 10410 - protein, 694 aa, unknown
  TnpB Polypeptide
MIKVGIKLDEEYYQKNGLTAVKRFYDLVRVTPQLMKIKDCGLRERVFRCASQYAYFSTKEYKTRGKLVSILADLINSESDLSFLFKKKFPSRNLLLRARRIIIDVGLDVCVSYQFLKNMFLYLRNILKKRILQKYSTKLDGLISAVIKSGDLKTMVVSWLNQNRELVLKSFLRKVSRLMTKRVSRVREDADTFLGEGHFDAAIIEILQKQGYTIKDWKKARKKWRASHWKTLKKGLKAINVHEVADRILPIINSQVSPERILSLLTRHKIRLPWVDGTSFEEFLAFLKARAVKKAELSIARRVISSLLTELRNSLKEIENSPWHLLKKPHFQGQCIPLGIDDGQVYDLQINRDPENDLITGILVRLSLRPREKLLYEVKTRERFIEMVNKGLEPKRGVLTRKAGGGLLLIIPFQSGNKAESVQKCYDSDLSPGKYKVGAIDLGLKTFATISIDECVRDLDGNWEREKRSRGDSHRYFLDQKQLLGKHQEWFLKNHGNDLEFINFKRKLVNLQKATKKLQSKMKIYSNKHPTNYRHNVKYRKLRDAYKSTWRKIKNIHRELVRQISTRSIAFLEFHGVQVLRLEDLSWAKHVGKNEAGYFLSTMQVHWFFSQVQEKLTEMAHRSGIHVEKVVAGGTSQRCWRCGKIGIRRGKKFICPYCGVEIDSDLNGSRNILVAPNSPNAICVRGRRPFPPHR

SEQ ID NO: 10411 - protein, 446 aa, unknown
  TnpB Polypeptide
MYAVQKDVWHLKGLDKTIVEQLLRWSNNLFNVGTYESRQQYFKGQNAIKYPDLYKIAKTNENYRLLYSQVAQQSLKSVAESFTSFRALEKLANQGKIHQKPRLPKYRTKGGMYQVSYPGQALKVIGNKVRLPLGKKGQEYFGKDAIWVPLPERIKNSQIKELRLIPRNGEVWVEYVYESLTEQAPSCSLEVTGVLGIDHGINNWLTCVSSNGKPFIIDGHRLKSWNQWFNKEKARIQSEHVIHKLPKGFSSKRLQQLSEIRTIRMRDAVNKAVRTIVDYCENNQINVLVFGWNKGQKQEVNMGGVTNQNFVQIPTAKVKERLQQECELKGWRFVEEDESYTSKSSFLDRDLLPVKVGEKPDNWQPSGKRIKRGLYRSSAGLLINADVNGAANIIRKSKVAIDSILERVGRGFLTNPLRIKLWADSSPKVCPQESPRLQTGECQGDK

SEQ ID NO: 10412 - protein, 222 aa, unknown
  TnpB Polypeptide
VDLGVNNLLTVAGNINSTPFIITGKTIKLVNQFFNKTKAKLISQKDKLSNKAVAQKQHIDKQLNYLSFRRSNLIKDYLHKTSHYLINYAVTNKITTIVIGLNPNWKQGINIGKKNNQKFVSIPFARLVQMIQYKAKLQGIDVVITEESYTSKCSFLDNETLQKHDSYLGKRLKRGLFESLTGRFINADVNGALNILRKVIGDFKFDPIVVCSTPKIINILKI

SEQ ID NO: 10413 - protein, 226 aa, unknown
  TnpB Polypeptide
MEVGKINHVTIEYTPAGKYFAVLNVDFEPEPRPNAGGTIGIDVGIKAFYSDSNGNTVSNPRYLERSMRKLIREQRRLSRKQKDSHNRGKQRLRVARVHEKIANQRNDFLQKQSTMLVRENQTICIEDLNVKGMIRNHKLAKSIASVSWAKFFEMLEYKASWYGNELHRVPTMYPSSQTCSCCGYRNPRIKNLGIRIWECPICHAVHNRDTNAGINILKKGLQLQSA

SEQ ID NO: 10414 - protein, 454 aa, unknown
  TnpB Polypeptide
VITQIAFSDHINQGKFAALIEQAGRLGAIRSEVWERFGSINGIGLRDRTIRDNWLKQGKQFNVGATHWKQTLCDAISNIKACREAAKFDVKQAIRRHTQEKLEQKRLYTVLKSDKYLDDRYLSRTMRKQFKRGHNHTHNQIIVRSDDYTVFTLGGRVWIKIPSLIKGKRLAIPLSTTVAPKGNLRIILRNGKVEIHYAAEAVKTNDCGTQTIGVDKGYTEVLTDSDGVHHGVTLGAVLTKESDRLKKKYQRRNKLKSIAKKKPWVTKHNLGRKKLDKQAIKHQSGVRSIVHEAVNQVIDKAAVIVTEDLTSPIAGNKFGKNVSRRLSAWTKGVIASAIENGSRRRGSTVIYVNAAYTSQMDSCDGSLSGKRCGEKFYRENGEVLQADVNAARNVLARLHDSEIGRWLPYKQVKAILLQRNSANRLKLLNQDSSCRLTYLSTESELLNAYICVQN

SEQ ID NO: 10415 - protein, 379 aa, unknown
  TnpB Polypeptide
MKLTAQVKLLPTPEQAEWLKATLERANAACNWISRQAWEQHTFGQVALHHLTYYAAREQFKLGAQMIVRCIAKVVQAYQPDHETIRTFKLHGAIAFDRRLLNWRIPDQTVSIWTPVGRQTIPFAAGERQLELLKYQKGESDLLYRKGMFLLTATCEVPDDPPEGVVDFLGADFGVKNIAYDSDNQRYSAKQLLNVRHRYRRLRRKLQRKGTPSAKRKLKRLSGKERRFANAVNHCISKQLVQKAKGTQRGIGLENLTHIRQRITACRHKRAELHSWSFADLGAKIAYKAQRYGVPIEYVDPRNTSRRCSVCGHVDKASRKTQSQFLCTTCGHASHADYNAALNIRLRAKVQWAGRSVNPPNVTSMDDSVTSSPALAGSS

SEQ ID NO: 10416 - protein, 400 aa, Fervidicoccus sp.
MSSGDEGQLTLAIKMRVSPEPSSSQALLGLMRRYREALNHAVKALIENKALSLSKAHRLLYNTLKERFGLPSKVAQDCYREAISIAKSWLGNPSRGNMPRAKTLRLWLTYRQSYRIRDGCVEVLGGYKLRIISSDRRYDAYPNREAKLVFKDGKFILEVSKRVPKPAKYIPSGVLAVDVNEKHVVVGNSQHEYRFETVVERALHYKQLAENLQKKYSSSKYMAWLRRRGIKRRIKSFHRKARNIIDDWAKKTSHEIVALAKRHRYAVAREDLTNLVNNLRKLPKEHRVGLTILSYRRLEHWIDWQCEKNGVPIIVVEPRGTSSTCPICGSKLVEYSYRGLRCPRCGLEADRDTVAVMNIEKRALEKMGGPLAAPTAPQMTDVNPNRCGVPMNPLKGERSL

SEQ ID NO: 10417 - protein, 382 aa, Glycomyces sp.
MAVQNRHRAYRFRCYPTAEQEQNLARTLGCVRLVYNKALDARNKSWFRRRERTTYAQTSALLTKWKQRQDLAFLNEVSSVPLQQSLRNLQKAFVNFWDRRAAYPVLKRKRFCGAAEYTKSAFTWKSGRLKLAKHAEPLDIRWSRRLPVGSEPTTVTVSRDAAGRWFVSMLVEESISALPVSEESVGVDAGLNALFALSSGELITNPRFERQDREKIRKLQQELSRKRKGSANWYKARLRLARARARVADRRHDVLHKLSTRLVRENQVICVEDLNVRGMLRNRSLAGAIADASWSRFREMLEYKAEWYGRTLVVVDRFLPSSKTCSECGALRGGMKLHQRTFSCPDPACGHVEDRDVNAAKNILAAGLAVAACGDGVRPKRA

SEQ ID NO: 10418 - protein, 407 aa, unknown
  TnpB Polypeptide
MEEIIKRKRTEQHNIKYGSDFYKFIDEYCFKSKNLYNYANYIVRQEFINNNKWIHYNELFQLVKESDPYKDIGSNTGQGTLRILDKMWKSFFVAIKDWTKYPSKYLGRPKIPKYKAKDGRFVLSLDSNKVKLKNGYVYFAWKPFKKFNNLFRTKAKDRILQCRFIPKCRKYVMEIVYEIEVPDILEPSDRVAAIDIGVDNFITMVNNIGENPIAVKGGVIKSINQFYNKRKATIQSELKKANGKDWSKKLQKLTDKRYEMIKYQMHCISKYAVDWCVLYGIDTLIVGHNNNWKQENKGMQNFTYIPYELFIQMLAYKCEDNGIKFIENEEAYTSGTSFLDNEDPVKENYKKERRVYRGLFVSNDGKKINADVNGAYQIIKKVIPDAFSKGIEGVGLHPTIISLECAR

SEQ ID NO: 10419 - protein, 253 aa, unknown
  TnpB Polypeptide
LPKLGVVKMRLSRPIPDGFELKQVRVVKRASGWYAMLVLQMDVKVPERMPHGEPVGIDLGLLSFLATSTGETIARPRFFVDLQGKLKLLQRRLKHKKKGSKNWQKLQMKIAKLHEYISNTRKDFHFKTAHHLCDSAGMIFAEDLNLKGLARGMLGKHCLDAAWGQFLKILKWVCWKRDVYFAQVDHRGTNQSCPQCLTVTGFKELSERIHLCPVCGYQTDRDVAAAQVVLARGETALREGFPPEPLPCGGSPR

SEQ ID NO: 10420 - protein, 229 aa, Okeania sp.
VVFLSLRKKVEKIVSPREGSIKILKGNYIKLPRIGIVKTYEILPSVPVKNVTISRRADNWYISFKYDFEPAPTAKERDIIGVDVGINLSATCSDGTVFANVKAYKQAKKRLTRYQRRVSKKEPGAKNRAKAVKRLAKTHKKADATPRRRKSQGNAHQAVADIRADALHKLTTWASFKPQHHSDRRLECKWNAQKAVGKRSIPSGWDGEVSVPSGTLRERLPPIDQEITN

SEQ ID NO: 10421 - protein, 402 aa, Escherichia sp.
VKRLQAFKFQLRPGGQQEREMRRFAGACRFVFNRALALQNENHEAGNKYIPYGKMASWLVEWKNATETQWLKDAPSQPLQQSLKDLERAYKNFFQKRAAFPRFKKRGQNDAFRYPQGVKLAQENSRIFLPKLGWMRYRNSRQITGVVKNVTVSQSCGKWYISIQTESEVSTPVHPSASMVGLDAGVAKLATLSDGTVFEPVNSFQKNQKKLARLQRQLSRKVKFSNNWQKQKRKIQRLHSCIANIRRDYLHKVTTTVSKNQVMIVIEDLKVSNMSKSAAGTVSQPGRNVRAKSGLNRSILDQGWYEMRRQLEYKQLWSGGQVLAVPPAYTSQRCTCCGHTAKENRLSQSKFRCQVCGYTANADVNGARNILAAGHAVLACGGMVQSGRPLKQEPTEMIQATA

SEQ ID NO: 10422 - protein, 353 aa, Halomonas sp.
MKQTKTLKVRVKDRHAAHLSRMARSVNFVWNYLNGLSARSIREKCLFLSAYDMDRYTKGAGKDLRLHSQTLQEVSREYATRRKQFRKTRLAWRKSPGVRRSLGWVPFKSGAVKWKNGQVTFNGQHFKVWDSFVLSQYTFRSGSFNEDARGRWYFNVVVEVDVQPSAGQGAIGVDLGLKDVATCSDGVKLENSRFYRGQEDKLAIAQRARNKRRVKAIHAKTKNRRQDALHKFSRRLVDQHGEIVVGDVSSTKLAKTRMAKSVLDAGWGQLKTMLEYKCDHAGIVFREVREAYTTRTCSSCGSLSGPHGVNGLRVRDWQCAECGALHDRDVDAARNILSLGAGRCPPAVGITSL

SEQ ID NO: 10423 - protein, 372 aa, unknown
  TnpB Polypeptide
MKTYKYPLGKQSNTIRIGNLLDDMWQVHFYFHKWQRQLHKDGLPYANYNAMDNHFKELKRTTHPHWKMLPSQAVQQELKRIDKAYDRFFKKLGGRPHIKKRHKFKSITYPGEAGWSLENNRITLTFRKWNPKTRKWQLDKVPYTFHKHRQWHGTLSTLTIKRDACGDYWLCITTTYTDFRPLPTTGKSVGADFGMKDAYLTLSTGEKIQHPQPLKHALNKLRSLNKALSRKQKGSNGWWRCVRALARLYRKISNQRKDFHWQLASKLCKKFDRIFLETLNLDGMKRLWGRKVSDLAFYQFVEILAYKCSKHKRHFKQVGQWTATTKPCSDCGYPNENLTLDDRQWTCPACGSHHDRDINAAINILRAGIAVT

SEQ ID NO: 10424 - protein, 526 aa, Oscillatoriales sp.
MTDESNQSRMKLGNVSTMLNPISLTDLVLPSSAIAELVVPSKKTILQDKSNLCQSVTQNPKSSKISEVDSTSRGKDYKPYWSDLCEVISSRLLLPVETDCADLALSFSNSWQNRTVDQSWFSQILFTAQSLNSRPIFLPSFTATVAECTDLEATARKSRKIRIFLNPDQKALLKQWFGVSRFVFNTTVKYLQQPDTKANWMAIKTDILNRLPDWAKPVPFQIKSIAIKDACLAVKKAKGDFKKTGKICKVKFRSRKDTKQSLYIPKSAIGSKGIYHTKLGQSKLKEALPKDFSDGRLTLAYGEYYIVVSEEVQPQQTDNQGRVVALDPGVRTFMTFFSETSYGWLGNDSNLHIQKLCFKLDKLTSKMSKAPGRQKKRFKKAVDRLKSKVQHLVKELHHKIARFLVDSFDVILLPSFESSQMVSKSRRKIRSKTVRQMLTLSHYQFKKHLEWKAWESSKVALTKINEAYTSKTVSWTGEVKKIGGSRIIKDTDGNRMNRDLNGARGIFLRALVDTPWLREHLNLCVC

SEQ ID NO: 10425 - protein, 379 aa, Lactobacillus sp.
MTLKAIKTRIYPDSEQQEKITNNFGCCRFVWNQLLSMQTTRHDNGGNYVSEFGMNYLIKRLKAEYPFLKEAESTSLLHVSRDLNSAFQKLFKEHHGYPRFKSRKFPKQSYRSNSVNHNIQVVKNGYLRLPKLGVMRFKGGRKIAGKIKNVTIRKSFTGKFYATVLVDSEIQPLKKTNNAVGIDMGVADLMITSDSVKYPTIRFDKLLTNKKHYWEKRLARRRLQAIKEIAWDQHNNVSEPRELSDFKNVEKARIMVAKYSEKIANQRSNYLHQLTKQLVMDYDVIKIEDLKTKNLLKNHKLARVIANQSWRELRSQLEYKCAWYGKQLVTVNSRKTSQICSICGYDDGKHALDIRQWTCPQCGTSHDRDINASVNILNA

SEQ ID NO: 10426 - protein, 442 aa, unknown
  TnpB Polypeptide
MQITSSYGVELRKQNIPIRQTLDVYRSAVSYLVEIYAQVWEELEGILEAKKRFNEAEHLIHTTKKNQARFDFDLRFPKMPSYLRRAAIQHALGGVSSYKTRMGLWKKTGWIEGKPRLICGNHAMPVFYRDVMYREDEGGKDAAYLKLYDGHDWKWFHVQLSHTDMEYLRKNWSGKKASAPTLERRHKKYFLRFSYTEDVILTKTPVKEQLICSVDLGINTDAVCTIMRSDGTVLGRKFIDFPSEKDRMYRVLGRIKRFQREHGSAQAKSRWGYVKRLNIELSRKIAGAVTKYAKENHADIIVFEYLETKGKISGKKKQKLHLWRKRDIQKRCEHQAHRNGMRISRICAWNTSRLAYDGTGTVIRDPGNHSLCVFQTGKRYNCDLSASYNIGARYFIRERLKPLPVTERSLLEAKVPAVKRRTSCVYADLKELHIQMEILKAA

SEQ ID NO: 10427 - protein, 468 aa, Cytophagales sp.
MLKGIRLQAHPIDHQKKILSQWMGCARYIWNAKTSEEKEQRLILSKQEIYPKLDQSYAHFKNKEETPWIFDCPSVPLRNSIVNWYATYQNFFKKLCGRPKYKKKDGRGSIYLTRELFKFVKGEDGVTRLFIGSKTNNIGFLSIKNHRSYKTPASIYIRKKHNKYWVSFCYEDHTTSQEQITEKAYLKKLRNQGKEYLENHTIGIDRGVARPVQCSNSDSFFDLSQGEKRKKTLGEQQVRRFQKKLSRQKKGSNRRYKTKIRLSDRHSSIANIRENFCHQTSRKIVDREQTKVIVFENLGTKRMTRKLKAKQDENGKWLRNNARAKAGLNKSILDKNWHLLEAFTKYKAKNEGKVVFKVAPNHTSQECAHCHHIHPKNRKSQDRFLCLSCGHIDNADINAAKVIKQRAIQLILNSGTELSKTGVLSLSDSGRGDKVRRKKLSGDLCSVRRSVKKESGFSHRKLYCFSLE

SEQ ID NO: 10428 - protein, 279 aa, Methylococcaceae sp.
LTLRVKLPENLVAVHGTHLEFTGIKFVYGHEQILKALNSSKRIDVKSKAGKMVNKRTGTALTYRFLLDKKGWRIFVSVAIEPTKIKSQSQLGSIGLDINADHLALSEIDRFGNLIHARRINLPTYGKSSDQSTALILDATKAISLWAQERAKPVVIEALDFAKKKQELSTSNPRYARMLSSFACNKVVNGVKAACFRAGVEVIEVNPAYTSVIGAVNYAQVTGSSVHQGAAYAIARRGLGFCESPTRREGVVPTRNGGHVTFALPVTHGSLISKATSSD

SEQ ID NO: 10429 - protein, 367 aa, unknown
  TnpB Polypeptide
MLKAYKYRLYPNKEQQEYFAKTFGCVRFIYNRMLSDKIEYYKETKQKLNNTPAQYKKEFEWLKEVDSLALANAQMNLQTAYNNFFKRPDVGFPKFKSKKNNHYSYTTNNQGGNIYVSDKYIKLPKIGLVKVKKHREFDGLIKSVTVSKVPSGKYYVSVLVKQEDIEKLPECSNTLGIDLGIKEFAITSNGEMIENPKFLRQSEDRLRKLQKDLSRTKKGSKNRNKCRIKVAKQHEKIANQRKDFLNKLSKRLINENQVTALETLKIKNMMKNHKLAKSVADVSWSEFVRQLEYKANWCGREILRIDTWYPSSQICSCCGHKDGKKSLSIREWTCSECGTHHERDINAAINILNEGLRNRIVGTTRIA

SEQ ID NO: 10430 - protein, 418 aa, unknown
  TnpB Polypeptide
LSVRDFPWKKPVDFPVEKKDMLSFKYRIYPTKKEVSKLTRQMRLAKEVHNLLLEKSRQYYKDTGKTFSQYDMNNHIRCLKAERPDISEVHSQVLQNISKRVGDAYQAFFRRAKERRAGKNVKAGFPRSKKFVSSLSYPQSGFSLKNKRRLYLSGIGNVPIVLHRLPKGQIKTCTIKHYRSGEWYVGLSNEIPATTFHSNGKEMVDLDVGLKNFVTLSNGQKVVAPRFLRLSEERIKLMQRRVSRKKKGSQNRKKACIRLSMQHEKVSNQRLDFLHKLSRQQVVSYSKIAVENLNVKGMVRNHHLAKSIVDASWGVYVQLLHYKAWSAGCEVVDVDPEYTTQECSNCGKRQKMELSERIYMCPACEHTEDRDLNAAKNILKRATVGLTGSDACGDLPSTPLAKEEQGISLKQELYGAAT

SEQ ID NO: 10431 - protein, 420 aa, Halorhabdus sp.
MPNQVVTRTLKASISNHSQVRDDLDSHGFAASKLWNVGRWTISRVGDAIGHIPDADELCSYLKSHERYADLHSQSSQRVLQELGEAFVSWYEQDDPDANPPGYRKYGDDHPRSTVTWKNQGFKLDTQYNRVRLSKGTNMKESRYAADYILCEYTLQTDDQTLDAVENVQTVRAVWTGEQWELHFVCKMRIEAPETPGEKTAGVDLGICNTAAVSVGDETLLYPGNALKEDAHYFRQEEYDTEGENGPSDHVEWARQKKSRRQEHFLHALSKDIVAQCADRGVGTIAVGHPKHIRNDTDWGRHGNKRLHDWAFETLLSHIEYKAQERGIDVERVDEYGLATSITCCECGTKADSNRVERGLYVCENCELVANSDLNAAENMRATVTPNPERDRSNGCLAQPSVRLFDKSTGRVAPQEQVVP

SEQ ID NO: 10432 - protein, 202 aa, unknown
  TnpB Polypeptide
LHVNGTNTEQTVREKQGSRTVIGVDVNEDNVALSALSPDGVEDTLVIDFPEIKFERHRYFTMRKRVQNAEKPSMHDTLERREERFVRDRLHKVSRHIVEWSQQFEKPCIVFEDLKEMRASIDYGTRMNRRLHHFPFRALQYIRRTRPPSRACQRRGLTLNTRVSSVRCVGTRSARTATESDSSVGRASSRTTPTEVRASTSP

SEQ ID NO: 10433 - protein, 292 aa, Salmonella sp.
MKRAYKYRFYPTPGQVELLAQTFGCVRFVYNSILRWRTDAYYKRQEKIGYTQASARLTALKKEPEFAWLNDVSSVPLQQALRHQQAGLSNFFAGRARYPTFKSKRHKQAATLTDAAFKYRDGRLYMAKSKAPLDVRWSRPLPSVPSTVTVSKDAAGRYFVSCLCESEPASLPLTSSMVGIDVGLKDVFVTDSGFRSGNPRHTAKYAARLALLQRRLSKKAKGSKNRARARLKVARLHAKIADCRMDALHKATRKLINENQVVCVESLKVKNMLRNPSLSKAIADAGWSEFVR

SEQ ID NO: 10434 - protein, 358 aa, Salmonella sp.
MADEGTAGNVNKSGNKCCRECVTSAAVINLRVRPRTIGRRYKRGSCVTFFDLLQYGLHFSAYFVSHMKRAYKYRFYPTPGQVELLAQTFGCVRFVYNSILRWRTDAYYKRQEKIGYTQASARLTALKKEPEFAWLNDVSSVPLQQALRHQQAGLSNFFAGRARYPTFKSKRHKQAATLTDAAFKYRDGRLYMAKSKAPLDVRWSRPLPSVPSTVTVSKDAAGRYFVSCLCESEPASLPLTSSMVGIDVGLKDVFVTDSGFRSGNPRHTAKYAARLALLQRRLSKKAKGSKNRARARLKVARLHAKIADCRMDALHKATRKLINENQVVCVESLKVKNMLRNPSLSKAIADAGWSEFVR

SEQ ID NO: 10435 - protein, 237 aa, unknown
  TnpB Polypeptide
VKEQIICSVDLGINTDAVCTIMRADGTVLGRKFIDHPSEKDRMYRTLGRIRRSQREHGSAQTQGRWAYTKRLNTELGKKIAGAIVRYAEENHADVIVFEYLEMQGKISGKKKQKLHLWRKRDIQKCCEHQAHRKGMRVSRICAWNTSRLAYDGSGAVTRDWENHSLCTFQTGKRYNCDLSASYNIGARYFIRELLKPLPATERSLLEAKVPPVKRRTSCVYADLRKLHSEMELLKAA

SEQ ID NO: 10436 - protein, 514 aa, unknown
  TnpB Polypeptide
MRAQTPSYVVSVKLHLPKQIENRLEKSFRISNSAYNETISFGLKRFEAMKRNPYYQELLEARRLAKAGINKLKKAKKQTKGLTQQFKLYDKALFELRKAYGLTESELQKYLAQQRRKDDSPYKQLGAGEIQVIASQAMKTLEKVLFYQIKSHKVKFRSKYDLNISYQNKTNKQATRLVQSNKKGIAYRLYIHKMSTFVDIPIKAFNNYQQRSLLRNEKIKYVQIIRKTIRGKKVYYLQIVCQGFPPSKVSKGEGVVGIDPGVSTMAFVSQKEVALVDLVPKNITQKEKLLKRLDQAIERSRRVNNPECYKENGTIKKGVRFKRPSKRQIRLRNRKRKTYRSLTEERSKLQGQLINRIVSQASIIKIEELNVKSLQKRSRDIRINPKTNRPYSKKRFGKAIFRAAPSTFRTALETKASQLGIDVEIISPKNVKPSQYNHITQTFEKKSLSTRVYNLSDEYPDVQRDLYSAFLVGHIENGHYQQAQLKQDFPIFYEQMTAFLQQTPKTKRLTWYLT

SEQ ID NO: 10437 - protein, 439 aa, unknown
  TnpB Polypeptide
MLEVNRTHRAKILNHAQVEDPLDRHGWSASKLWNVANYHSRNVWEETGEIPDHGDLKDELKTHTTYKGLHSQSSQRVLEELAEAFNSWYGKRKSDNRANPPGYRKKNYYNDHGNRVHEEHPRSTVTWKQNGIKHDTKNNRVRLSKGANHKEHPKAWEFILVEYETRPGVTVENLQQVRAVYDQQNERWELHLVCKDELETPGAPGTETAGVDLGICNFAAVAYSTEDADLYPGNRLKQDGYYFPKEIAKCTDSGGERATRLHHKWSERRTHFFHSLAKHIVERCVEKEVGRITIGKLAGVREDDTGESKNWGKHGNLDLHGWAFDRFTSILIYKAKVEGIEVVEVSERDTSKTCCVCGREDESQRVERGLYVCEEHDDAFNADVNGAENIRLELNQSNSEFSASLDEDRSTGWLAQPGVFLYDLSSGFQPQAQVGDCKP

SEQ ID NO: 10438 - protein, 248 aa, Calothrix sp.
MIVFEAKLEGQNEQYRALDEAIRTARFVRNSCLRYWMDNKDIGRYDLNKFCAVLAANTEFSWVSKLNSMARQSSAERAWSAIARFFDNCKKSKPGKKGFPKFKKEQTHGSVEYKTCGWRLDDDRKYITFTDGFKAGTFKLWGTRDLHFYQLKQFKRVRVVRRADGYYCQFCIDQERLESREPTGKTIGIDVGLSHFYTDSNGETIANPRHLKQSEKSLKRLQRRMSRTFLVLKTELSLEINLVGNTSK

SEQ ID NO: 10439 - protein, 547 aa, Ammonifex sp.
LVKKTKLTGNELFRSVHITVPKKLVNKAKLDALYELDQLHTRAVNEWIGRWYNRTELIERILRGTATTLMQKEALARPLETPLPSAYIQIAGNRMLDILREHYLAVQDKIASDVWKDGNLSLEYRLVCAVFVRNATLFHRFVNGLAEAEDVVAKWRASKSEQLRKVAEAYDSLSPQARAGIAEFIASKFREIRENWRMPVFKGGVIQLDCRVFTLEEARGTKEFNLWAWVTTAVPHRRIAVPLCLTADKRRLLDSLFPGWLKSTARKAQLVIRGRHIRLSVPVAKPRVEPKGEPEAVLGCDIGMNTLLNLSNGLKLGKSFKEIAGKLYDEYLRLQETRNKIRNLRQRAEKRLSITKNPETRRRLERKIAEYDRHLSDHRWVELRRRIKAAVSTEIGRVVNQFLTLLGPNPERVLVVMEDLSEMTAEGVRRSSRARFDLRVWARGELQDHLKRDLEWLGGRVAFVPPEYTSQTCPICGWVDKENRQGREFRCQRCGFAADADVVGAINIGERFSDAELSALAGKYWYSKNLRRKKIKELLLVRAANTA

SEQ ID NO: 10440 - protein, 463 aa, unknown
  TnpB Polypeptide
MSNLQVIKFSLQPGHADFKIAYQLCSESRIFYNAVNSCLRARYFHKSTKEYASHIYDIPRQYGIDVDIDGSWYSCNWVWEYVAKTVRDYLKKKHKVKILTVKQQQQIVRKLCKNWLSYWELWKLYKKKEIVHKPNIPKYKKSLNGIDFNNQMINKSLVKKGVFKLSGLSQGFTIPEYLDKDTVKSGRLVVNNDRSFTVELLYEVDNIYTVADNPVVDKDMLVAAIDPGVDNLFTIVFSDYREALLYDGKQLKNTNNKINNKISNLQSAHDVERNNLMLKTGNMKLPHIQSQRIDDLWEYRERVLYHDYTTIVNEVVRTLCSAGVECVIIGYNQGIKQNMNMGKKNNRNFAYIPIKKILDNLAWKLSKAGIIVVWTEESYTSQASFVDNDTLPVYGDGTEKTFTGYRKHRGLYVSKNGGNIHADVNGAYNIMRKIVSWFQSKETGMMVRGTVVYPARRVRVISL

SEQ ID NO: 10441 - protein, 319 aa, unknown
  TnpB Polypeptide
MSETLIRTICIKLDVDGHENFLAVTQHAFNDAATWISLTCWREGITNTNTAHHRVYGETRERFGLGAQLAVCARAKALEAIKAVKTAGKNTCPVFGPRGSIRYDARTYRLMSLDRVSLNTLAGRVVCRLVPGPRQHEMLVDPAWTIGGAELVWRRGVYYLHVTQSSDAPTLPKGNPERLGVDLGMVNIATDSTGQQFSGKAVSTVRQRYLKRRAILQSVGTRSAKRRLQKISKRESRFQKDQNHCISKTLVAKASQSCKAIALEDLTGINERTTVRHGQRYERMSWAFYQLRLFLTYKAMAAGVRVVLVDPRNTSKTCS

SEQ ID NO: 10442 - protein, 601 aa, Rhodococcus sp.
MTGPGSTAPRQFAVTTRAHVAVDDATGEPIGLDDIDTRVRWLLDLVTAAGAELVSRLWQPATFDVLATGLDRQDRKLPAQGHVAAARLGWTPSDPDGVYVPSRVSRVVTAQVMATLRTLAYRDTAIAALSARFDPATGVVAPPTEPGDHVPAGFARGVRRQLIARSRPSGGAPAGPLRITDVQGPPQTSTMARLSAADRQLAQLAVTGDELVLTVKLPTSPTPAGRAQWRRVRLTAAVPEHLHGRAVTDWHLPTLVLDRRGLLWRCAATELVPAGDLKSAAVAVGVDWSPTSLGAAAITADSPEGLVSDYRGWTYDDRGLGIKLARLQAEGQLLHRKAARLTRLAATAPPEVRARLEAKIAVLDSHRTAVGAKRGKINRELAFHFAHQVTDYATAAGAQVIAVEDLTTLETRGHGRVNNNRAAQSARRHAVAALAHTAAGVGIAVVSVPARGSSALCPGCDEPLSRPGGYHTAWCSYCRMGGNRDHVAGVNLAKRALLGRNKATRRRGQMPAVRVAEHAPVRKCRDKNGPTPSRPRHRRVRRSLPTTTRRLGVNPKQYVPAPQASVWDTVQPTPPHGDTGSRDTRTSQASATPVADSKRST

SEQ ID NO: 10443 - protein, 269 aa, Okeania sp.
MRLVDRHIINRTHNFWRVCDELAFKSKNLYNLANYYCRQHFFKCGKSLDLTKLYHTTKDRDAYRALPTKVSKQIIKCLVATWRGYFQAIKEWSKHPQKFLGKPKIPKYKNKTQGRNVVIYSKESVYKAPLKDGICHLSMSEIKIPVVVDTVIEVRIVPATSCYIIEVVYEKMNQPQIHSTYVAGIDLGIDRLVALSTNKPGVKPMLVNGKPLKSVNQLYNKRKAKYQSHLKGNRKTSRKIEALTYHRNRFVENYLHNTSFLVALVFNHK

SEQ ID NO: 10444 - protein, 382 aa, unknown
  TnpB Polypeptide
MAVVKKSIKVRLYPAEKQKVLIDKTIGCARFVYNQTLEDCKRLYKQSKHFPSQNERIKNLVLLKETHTFLKEVDSQALQQSVRDFNAALGNFFRNRRCFGFPKFKSKHNNEHSYRTTCCGDRARVFDSKHVMLPKLGKVRTKSFSMPEGYKAFNITVIKTNTGKYYASICIETEVQPLPKTGKQVGFDLGLIDLLIGSDGTKFERPKFDYLYKDKLAKEQRKLSKMRTKLEGAKLNLDECKNYQKQKHKVAKLYEHIANCAKDFNHKLSRKLAEEYDFLAFEDLNVVGMKKNHRLAYSIADVRWSQLLNFIRYKCDWYGKEFKQVDRFYASSKICSYCGAYHKDIVDSLSVREWICLDCGAQHDRDVNAARNILNRALGVGY

SEQ ID NO: 10445 - protein, 528 aa, unknown
  TnpB Polypeptide
MSRKAPTPTFVLTIPLTVKPGEDRVMGGRMEAGRRLNNAILGEAIRRHDLMKQSKAWQHARTIKHKQPAEVKAATGGKAQTRSQVFNTIAKEYGFTSASLTTFARNCKNQAGWEDRLGSNVVQALAERVFAAMQEYSFGKRGRPRFKGPNRPLHSLEAKNNKANLIWKPETGCVEFGNLTLPVMLPTLAQDPYLHQALASRTKYCRILWRTVRGQRRWYVQLMQEGQPPVKTVTVNGLTRPKHPIAHGEVVGLDLGPSDIAVVGNHSASLVKFCQTVEQPWEEIRSLQRAMDRSRRATNPHCFNADGTWKKGAKFTPSKRYTQLRTELAEVERKLAAERKRAHGELANQILMLGDTIQSETLSYLSFQKQYGRSSKVRAPGSMVDILRRKAERAGGGIVDLNTWSLKLSQYDHPTQTCTKKPLSQRWHVLGNGSGVVQRDVYSAFLARCVKGNTHHPSHIEVMWAAQKPVLLQTGWLRNQPAKIEPQGKIAVAIPAERVVCNRGLAIGHGRDAVVARREPGDPDVVRP

SEQ ID NO: 10446 - protein, 398 aa, unknown
  TnpB Polypeptide
VKNIHRTYKFELLPNKEQKTLLDKHFGCVRYIYNHFLNERKEQYQADKKTDNYYGQAKTLTELKKQEDTIWLKEVNSQTLQFALRSLDTAYVNFFRGNAKFPRFKSKKNKNTFTVPQHTKVMDGRIYAPKFKGGIKVNIHREIKGEVGKFTISKTPTGKYFVSIFTEQEYHPSKKTYKSVGIDLGLKDFAITSDGIKYKNNRYTKRYERKLKKAQQHLSRKQNGSNGFEKQKLKVALIHEKITNTRQDVLHKVSNEIVNNYDVICLEDLNIKGMVKNRKLSKHISDASWGTFVRFVEYKANWNDKTVVKINRWYPSSKTCSVCGYINQDLNLSDREWTCNNGHKLDRDLNASTNILNEGLKIYREELAITKVESKSDFGNKAHSMKPEAHPISYAVGG

SEQ ID NO: 10447 - protein, 431 aa, Sutterella sp.
MILRKAFQFKLKPDGATHRKLSRFCGCARFVYNKGLAWNNERRSSDPNFKISYEKLCELLPEWKAAEETKWLAECHSQVLQQSLKDLMRAFSNFFAGRADFPKFHKKFHNEDSIRYPQGFKVDEARRQIFLPCVGWVKYRRSRFIEGKPKNVTVSRKVDGWYVSVQTEREVPDPVHPKAGDEAGIDMGVVRLYTCSDGTFEQGVRCLRDMSEKLAKEQRRLKRMVKFSKNWIKQQQRIARLHKTVADSRRDLLQKASNRLCQNHAVLYREDLKIKNMTASAKGTVEEPGKNVKQKSGLNRAILDQGWGMFFSFLNAKMTELGGLVFAVPPQNTSRTCPVCGGVSKDNRKTQAKFRCTSCGYEDNADAVAAVNILGRGQRLRACGELVPVNVAQVSRSSRKRSVVQQQEPVEVTVDGPAVNGSVGNHRPSGR

SEQ ID NO: 10448 - protein, 384 aa, unknown
  TnpB Polypeptide
MIRTIQCPLPLDSSLAETIHQYNDAVNDAIGAGWNRRTYNKNVLHAVTYASIRKRLPHLQSSLVECARDMASESLKLAKKRSWQCKKPVKKPMSSIRLNQHSFTPFLELGRISISTVDGRKTYPLVIPEYFRKYQFSTVNAVVLKLKKDKVIAFLNIEIPDPTVNDHPVTFLGVDRGINNAVVASDNTFYSSKHIKNVKYKYQYLRKSLQSRGTRRCKRKLRALAGRERRFMTGENYRIATWVMTKPFDCIVLEDLKGIKTDSRKEHRISKQTRKKFANWAYYQLEQTMENKALEAGKMVLFVNPKYTSQRCSRCGHITRSNRHGSEFACKQCEFTIHADLNAARNISDRGNAVVGRAKVNRPNVARNDEVEFLPRIAVASPRF

SEQ ID NO: 10449 - protein, 412 aa, unknown
  TnpB Polypeptide
MRSQKIRLKLTKEQERLAWWYSKVSRIFWDLLVDIDKRNNKGEFDEILSKNGNKTYHSNFYDRDIYCLNQSDYLNLAKIVVSENYEKDTDNWSWYYQPNQVFIYQFLSRELVKIKIRNKGRLNFRSVDTTQPIFNVRCDVSSDRKRPSRIYLKDNGKLQIPTLGEVRFGTVRADFDLSGKKQVARISFDGKYWYLSYVEDVDTQVVDLPAYTDGVGIDLGIKTLATMSDGTMVPNIKTFRRVRILEKRLKRLQRKVSRKYRINQCNKHNKTKNIIKLERQIKLIHRSLRNIRINHIRKFVSQLVKKQPQYIAIEDLNVKGMMKNKHLAKDITNCAFYTIREQLIRKARERHIAVRLVDRFYPSSKTCSHCGSYKKDLKLNERVYHCPNCQTTMDRDLNASLNIARTDQYVLA

SEQ ID NO: 10450 - protein, 370 aa, unknown
  TnpB Polypeptide
LYDARLIGLSSELRAKIKASLTDKTIEFSEEEQALRALFPSPCERKVRDELVARKADWQFEFSARVLQQAIKDLATAWNLFFNNPKTAGKPSFKSRKNPKQGFKSDSARIKNGRLVLDKPLAYKGEWLSIRFKGASIPDGNLKLCSVTRTQGKYIATITMDVETMALSKTGEKTAVDANVDHFDTTDGQTSLKPELLDRLYERVRTYQRQLSRKRKVNKNYRHSKGYQATRAKLQATYERIRNIQNDLLHKFTTDLYRQNDTVVIEDLDVKGMQMKKKAKNLHRSLFGRFRQFMEYKAEKFGKTLILADRFYPSTQRCSKCGHIKTGDEKITLSGNAKYGTKHNEYVCYHCGYEDDRDHNAVLNLLALAE

SEQ ID NO: 10451 - protein, 395 aa, Comamonadaceae sp.
MRRTPSRQQSHGEAGIDRLSSVSGVVDSRACRYSFNVSTIKTLKLRIKDKHTSALRSMAREVNTVWNFCNETSARAVRERGKFLSGFDLQKLTDGFSKCDGVQIGSATTQQVCEEYATRRRQFKRAQLNWRVSNPRSSKYSLGWIPFKARAARYKAGQVHFAGLKLSLWDSYGMSLYELRAGSISEDSRGRWYLNVQVKVPELVGPRLQPTSSVGIDLGLKTCATASNGQKIEGRFYRALENKLGIAQRARRKQRVRAIHARIANQRKDLLHKFSTEIVRQHAAIFVGDVAGAKLVKTKMAKSTLDAGWSMLRTMLEYKSREAGIVFEEVSEANTTQTCSCCGALPHSSPKGRAGLGIREWTCSVCGSVHDRDVNAARNILALGHERLAGGIPAL

SEQ ID NO: 10452 - protein, 366 aa, unknown
  TnpB Polypeptide
LYNAVAASETLTLEDTKIVQVKVKDDFETREIKNLSSHMRQSVVDSARTNASNLSKAKKKGLKVGKLRFKKECNEIDLKQFGNTYSVKSHNKISVQKIGVLVVNGLEQINLDEVEFANAKLIQKPSGFYINITVYSNKQPQEQTEKEVLGLDMGIKDQLTFSNGVKVNFYLEESEQLKGLMRKLSRQHKCSNQYKQTLARIKRIYEHYSNKKNDVVNKLNSILSQNYITCFQDELLSQWKQKKSKRRFSFGRKVQHGILGRVKDKLKKNSSNHMLESSVPTTQTCPECGCLTKHSLDKRQYHCNHCGFENQDRDVHSARMMVLLSRYGTYRSLNTDAVSIERMVGFLDNLSELGVVVSTNSMEACH

SEQ ID NO: 10453 - protein, 368 aa, unknown
  TnpB Polypeptide
MRLTYKYRLFPTAAQRTAMRRSLDACRWVYNKVLETRKEAWEQRQESVSRYDTIKMLPGWKQDHPFLNDAFSQCLQEVCTRVDLAFKAFFRRVKAGEKPGYPRFKGAGWYKSFTYPQNGFRLDGDRLYLSKIGDVRIVLHRPLEGEVKTLTVKQDTLGNWYACFSVEIELDPLPPSPHVVGIDLGLAHFATLSTGEQVPNPRFFRQDERALAKAQRRLSRCDKGTAEYRKHQRVIQHIHQRIANRRKDLAHKLSRRLVDEFQIVVFEDLDIRDMQENGYRSLHKSIGDAAWNQLVQYTRYKAEKAGRECVLVNPRGTTQECSNCGEVVPKNLSTRVHECPHCDCVLDRDLNASLNVLARGLASMGLDP

SEQ ID NO: 10454 - protein, 368 aa, unknown; identical to SEQ ID NO: 10453
  TnpB Polypeptide

SEQ ID NO: 10455 - protein, 256 aa, unknown
  TnpB Polypeptide
MNYYRSITGIPKAITVKREGAKWWVSVRCVDVPATPLAPTGREVGIDLGVENIVALSDGEEIKGSHFGARASERLANAQRKLSTKQRGSNRRRRQVEEVARLHRKVKQQRLNNAHQLSRRLVNEFDLLVLENLTIKRMVAKLEAKPDPDNEGAFLANGAASQATHSRSIHDAGWGQFRSLLSYKAESAGRTVVVVNPRYTSLTCAKCNDVNKANRVTQAEFRCCSCGHEDHADVNAAINILRAGRAQLASASVGSN

SEQ ID NO: 10456 - protein, 358 aa, Lysinibacillus sp.
MSQTITVKIKLLPTKEQASILSEMSETYISTINTLVSEMVAAKKSTRKSSKDIPVSLPSAVKNQAINDAKSVFKKVKKNKYNVIPTLKKPVCIWNNQNYSFNFSHIFMPIMMDGKVVKTPIRALLVDKDNRNFELLKHKLGTLRITKQVNKWIAQISVTISTVQKTGMKVMGVDLGLKVPAVAVTDDEKVRFFGNGRQNKFKKRKFRSLRKTLGKKKKINAIRKFNDKEQRWMKDQDHKISRTIVNFAKENKVAVIRLEQLANIRQTARTSRKNEKNLHTWSFYRLSQFIEYKANLVGIKVEYVNPRYTSQICPNCSEKNKAQGRKYKCKCGVEKHRDLIGAMNIRYAPVVDGNSQPA

SEQ ID NO: 10457 - protein, 254 aa, Pseudanabaena sp.
MLVFEFKTYGKQVQFAAIDEAIRTVQFIRNKCIRLWMDNPKTNKYDLSKQSAILAREFPFADKLNSTARQAATERAWAAISRFYDNCKAKIFGKKGYPKFQKDNRSVEYKASGWKLADDRKSITFTDKKGIGRLKLKGTRDLNFYQLDQIKRVRLVKRADGYYVQFCIQVDRQEVIKPTHKTIGLDVGLESFYTDSLGVKVENPRFYRTGEKKMKRSQRLVSRKVKGSSNRRKASAASHLEIRIGKSTEIGEIV

SEQ ID NO: 10458 - protein, 426 aa, unknown
  TnpB Polypeptide
MAKTFAAQVNRLPDQPELKAALEYLCRESNKLYNCTLYLARQLYFKAGKFSNGRWLSTQMKRNPHMKALYTSAAQQTCISVGEAFKSFKELLKLWRKGELAERPKPPNYRTSGGLFQISYPKRWLKLVDGLVRIPMGTACRVWFNLPEIFLPFPTNLNWGKVRELQIVPRAGYFDAVWICEEKPIEPVDLDPDKALAVDPGLDNWLTCTTTEEQSFIVDGKHLKSLNQWYNKQVATIKKGKPQGFWCNRLDRITGKRNRQMRDAVNKAARMVINHCLEHGIGTIVFGWNKGQKKGVEMGRKTNQKFVQVPTARLKQRIQQLCEQYGIQFIEQEESYTSKASALDLDEIPVFGEKPEGWKPSGKRVKRGLYRAANGEVINADCNGAWNIGRKAQVTGMQCRPARGSLTNPKRLRIWELPHVDQAQKC

SEQ ID NO: 10459 - protein, 391 aa, Bacillus sp.
  misc_feature (162)..(162): Xaa can be any naturally occurring amino acid
MSDRYYKLFGKSVSQLALQKRFTKIKKRKRYEWLKEINAQVPKQASKDFDTARKHSFKKYKNGYHTSYKSKKDLIQGFYANYERLVIGKKVVHIQSIGEVKTSQQLPRNKKTSNPRVTFDGRHWWISVGFQEDFESQELTNESIGVDVGLKELFVASNGMKXSNPRVTFDGRHWWISVGFQEDFESQELTNESIGVDVGLKELFVASNGMKERNINKDAKVKKLLRRKKSAQRDMSRRFKKGVKIQSAGYEKAKAEHLRLSRKITNIRNNHIHQATAKLVKTKPMRIVVEDLSISNLLKNKKLSKAFLFQKLNFFFQCLSYKCEKYGIAYVKADKWFASSKICSCCGVKYDHSVQPEGQWSLKIREWRCASCNSYHDRDVNASINLSRWVK

SEQ ID NO: 10460 - protein, 366 aa, unknown
  TnpB Polypeptide
VWIKPHRRFWLYWWKVLLKEAELASTLVLKRRRNKWYAIFAFDVAPRKEPPAEVVAFDVNENSVAVAKLSLLATVDRVATWNRQYINPAVYFIKTDFGRLAKRYEAVRNAKLEELKRKYPFAGRDDEEKVQNVTDMREFRKFARRLRERRRKEGRIKQVARQMTKSPAVIITEELGKNPQEEKIGVEEKRVKKRELRHRVKQTPFRRILRAVEDEAREVGSAVFYVSSFRNSKVCPIHFALLKNGGGWHTLHCPYGHVVDRDVAAVFNMLWKVTPAGTAKGVWWDLKDVKRRLEKGRGLVPKEAVRRRNPLVPWPVVRAVWTSLKSLKAGDKWPAVLARAAPMTPAQGADEDGARAPPRGAGTPAL

SEQ ID NO: 10461 - protein, 355 aa, Carnobacterium sp.
VQLYPSASDIEKFEETQQQFLNACNFVSTYIFDHDFELGQTTLHNALYHQIRQDFGLQSQMAQSVMRTVIARYKTVKTQFKQKPKRYKDIHTGKYHTLYKDLYHLTKPLGFKQPVAVFVRNRNYTYHQDDTYSLTTNQGRIKVSCDKQHIAYLQQFSQNAYKFGQAELLCRKGKWFLHVSASKEIDSPDETNIQRIVGIDRGLRQILTIADDTTHTTFYSGKSLMKKRRRFKELRQSLQAKNTKSSRRRLKTIERRENRWMNDVNHQLSKTLVDRYGANTLFVLEDLTNVTFNTTHHRKQDARYEHHSWRFFDFEEKLMYKALESGSQVLKVSAQFTSQRCPKCESIDKANRQQA

SEQ ID NO: 10462 - protein, 391 aa, unknown
  TnpB Polypeptide
MQPQDPTRPRIHSVTRTLRLKVKTESYAWLNTAAYEVNQVWNWSAEVSEKAARPCTGERKWLTGFDLNNLSAGASEYFDKIGADTIQRVNGEYAEQRRIAKRIRLRWRTSRGPRRSLGWVPFKAASLKRKGRSLRFCGKTFRVFEPERLEGVKWRQGEFAQDAVGDWWLCLRIKIQVEESVAPLEKVGIDLGLTEVAVTSDDARCEKSCFYRGIEQKIAQAQRRGHPRQAKFLHRRAANRRKDALHKFSRRIVNEYEKIVVGDVSSTQLVKTRMAKSVLDAGWGMLRTYLQYKSQQAGRTFQIVNERNSSRICSNCDALTGPQGVNGLRVRRWTCAACGVSHDREVNAARNHLRRAELPASVRKRVIVLAGSAEPSIPLAQGRTEPVRTVA

SEQ ID NO: 10463 - protein, 522 aa, unknown
  TnpB Polypeptide
MSIHMMQTLKVKLEPTPEQVQAIRETMHQFNAACNFVADKAFELHTANKIELQKVVYYPIREQFNLSAQMAIRAISKTCEAYKRDKSIKPTFDPDGSVVYDQRFMSWKGLDLVSLLTIEGRIKVPVVICEYHKPRLNRIRGQADLIFERGEFYLCVVVEVPESPKIEPIGVIGVDLGIKNIAVDSTGEEFSGDGIENVRSKIDNLKADLQSCGTDSAKRHLKKLSGREARFRRDVNHCISKKLVAKAKDTSSVIALEDLQGIRERMTVSKAQRRKQHSWGFYQLRQFVEYKAAIAGVPVVYIDPDYTSQECPVCHHISRSNRPTRDRFACVCCGFSGPADNVAARNIAARVAVNLPIVARFFCGAPSPQYWRASCPPIHWRVVDSIFPRLYQPEICVLVRFSSELRLEEADHRSGSKIIGELRGVYLILKSYYHGLPAGIVPRQIDHSSDDPCYRVFIDDLASSERCQGCRRHGETSGLTDPSGQFILAILGWESRDVHRAALSIGVVPFCGVIDPHLQGDA

SEQ ID NO: 10464 - protein, 624 aa, Streptomyces sp.
MWVGGVVSCISAAGCFSAGNWRSYIECVTFLGGVRLSWRQGSSVASGGGDGVGGLRSAAEPFVASGPSGVAVRTRLKHLTPGDEQVLRLVGAHLGSLAAKDLKVRCRDGLDHSGESWAVRKRELTPLSSSRWAGSITKATHDQWALARRCHLAHIQNLEAGVRTIEDRLSPPVGQKGTRKAPGGYRSAREWHAKSRRLRVLEDRLTAARADREAGIVHVVRGGKRLARTRHHLEAAGLTESAWRGRWEAERWFCQADGESGKRYGNETIRVSPDGEVSIKLPAPLAHLSNAPHGRYVLADRVAFADRVAFADRVAFADRVAFADRVAFADRVAFAHRGGEWADRVAADRAVAYRIHYDTGRTRRYLTASWQIPPTPTLPIETALAHGVIGVDMNADHLAAWQLDTHGNPTGSPRRFSYDLTGTAEHRDAQIRHALTRLPHWAHACGVKAVAVEDLDFAAEKTREKHGRRKRFRQLVSGMPTGKLRARLASMADQTGIAVIAVDPAHTSRWGAQHWQKPLTSTTRKTTRHDAAAVAIGRRAQGHPIRRRTAPPPQHRSDAVGHRTVQARPGALGREGTRPRVPGPRTRSVPPGRGANAGNQNAQHRPGRSAEHGFWQQDSLPLSP

SEQ ID NO: 10465 - protein, 418 aa, Streptomyces sp.
VIRAYKFLLRPTARQTAALGEILRDHCSLYNGALRERRDAYRHTSKTSVTYGDQSAQLKEVRAFDPERQGRWSFSSQQATLRRLDKAFRAFFRRLKAGRTPGYPRFKGVGHFDTVAFPKDGDGCRWDSTPHDTRTRVRLQGVGHVRVHQHRPVLGQVKTISVKREGNRWYVVLACDEVRAEELPPTGAIVGIDLGVAHFLTTSDGEHVANPRFLQAMADELAGAQRHLATFPKRTLQRTKAHRAAARKVAKLHGKIRRQRADFHHKTARTLVRGHDVIARERLNTASMAKSPVAKPDPDRPGGFLPNGAAAKSGLNRSILDAGWTQFLRILANKAESAGRPVVSVDARNTSRTCPECGHVAKGNRATQAKSACTACGFTANADHVGATNVLSRAGLVLCAAAWPPTQEARAFTRGWSH

SEQ ID NO: 10466 - protein, 315 aa, Streptomyces sp.
VIGIDRGVTITAALSDGRRLNCPQLTVKERAQVRTHQRRAARSPKGSDAKAAEYAKVAGLKAREANRRKDWCEKTSTMLARGYDLVRFEKLNVKTMTRSAKGTVEQPGRRVAQKSGLNRSILARGWGLLRQRTGHKAPGRVEDVPAPYTSLRCSACGWIDKNSRKSQAGFVCSCCGFTCNADTNASINVAAGQGGIPRPRRTAGAGGTTTATSRSNTREPQPTWVGIPLFRRGGGCQRVGSVRPDCASVNAGAMPWSSGPTLSTRMGISAGRTRNQAPWSRRRRSRPSAGVRRLAGRGRCCFAVAKVMSVMVLRA

SEQ ID NO: 10467 - protein, 428 aa, Streptomyces sp.
  misc_feature (428)..(428): Xaa can be any naturally occurring amino acid
VSHSTLVKRKFGHRARLALSPAEVLKTDDQAHAARTMWNLLHAWWQMTPKEKRTLANADAAIRQARQDIDFLAALPAQAAQAVLKTYFRAWKNCWEGRADAPNFKGRFRTVMSVDIPQGRDLNITRVHHRWGMVNIPKVGRVRFRWTKDLPVGRRAGVENRITGARLIKDALGWRIAFRVQTLDAKPDPHQGPDAGIDVGVTVPLALSNGETYEHGEWLTEKEKARLLHLEQRAARRKRHRRPGERTSRRLHRTYDQIAGLRAKAKRRALDWQHRTTTAIARTYGTVVVEALTLTNMVKSARGTIEEPGKNVAQKAGLNRSICQEAWGRTVTMLAYKTARLGGTLRKVPAPGTSRRRSACGFTTLGSRESQAVFVCKNTGLRLVGQRRPQRGPERPAPVPDGPRARPGCREGSRQAREARQARCREVX

SEQ ID NO: 10468 - protein, 252 aa, Streptomyces sp.
NGQWHIAFAVVPEPVPAPGTGEVIGIDRGVTITAALSDGRRLNCPQLTVKERAQVRTHQRRAARSPKGSDAKAAEYAKVAGLKAREANRRKDWCEKTSTMLARGYDLVRFEKLNVKTMTRSAKGTVEQPGRRVAQKSGLNRSILARGWGLLRQRTGHKAPGRVEDVPAPYTSLRCSACGWIDKNSRKSQAGFVCSCCGFTCNADTNASINVAAGQGGIPRPRRTAGAGGTTTATSRSNTREPQPTWVGIPLF

SEQ ID NO: 10469 - protein, 245 aa, Streptomyces sp.
LSVKREGRKRFAVLSVEQDQPEPLPATGSMAGIDLGIANFLADSNGAFVPNPRHGRKAAVKLEAARQALSRFPRRKATGRTGNHQRAVDKAAQLHAKVRRQRLDHAHRTALGLVRAHDVIAHEDLIIRNMSKAPAPKPDPDQPGAFLPNGAAAQAGLNASINDAGWGVFLTILHAKAESAGREVIAVDPRNTSRTCPECGHTAKENRPTQEEFHCVACGHTAHADTVAATNVLRAGLVRRNADPA

SEQ ID NO: 10470 - protein, 390 aa, Streptomyces sp.
MWNLLHAWWQMMPKEKRTLANADAAIRQARQDIDFLAALPAQAAQAVLKTYVQAWKNCWEGRADAPNFKGRLRTVMSVDIPQGRDLNMTRVHRRWGMVNIPKVGRVRFRWTKDLPVGKHANAENRVTGARLIKDVLGWHIAFRVQTLQVKPKLHQGPDVGIDVGVTVPVALSDGKTFEHGEWLTGEEKARLLHLERRAAQRNQQRRPGERTSRRLHHTYDQIAGLRAKAKRRALDWQHKTTTAVARTYGTVVVEALTITNMVKSAKGTVEAPGKNVAQKSGLNRSISQEAWGRTVTMLAYKTARLGGTLVKVPAPNTSRRCSACGFTTPGNRESQAVFVCKNPDCGWSGNADHNAARNILHLYRTGLALVPAAGRAVVRRAKRVKPATAR

SEQ ID NO: 10471 - protein, 531 aa, Streptomyces sp.
VSHSTLVKRKFGHRARLALSPAEVLKTDDQAHAARTMWNLLHAWWQMTPKEKRTLANADAAIRQARQDIDFLAALPAQAAQAVLKTYFRAWKNCWEGRADAPNFKGRFRTVMSVDIPQGRDLNITRVHHRWGMVNIPKVGRVRFRWTKDLPVGRRAGVENRITGARLIKDALGWRIAFRVQTLDAKPDPHQGPDAGIDVGVTVPLALSNGETYEHGEWLTEKEKARLLHLEQRAARRKRHRRPGERTSRRLHRTYDQIAGLRAKAKRRALDWQHRTTTAIARTYGTVVVEALTLTNMVKSARGTIEEPGKNVAQKAGLNRSICQEAWGRTVTMLAYKTARLGGTLRKVPAPGTSRRRSACGFTTLGSRESQAVFVCKNTGLRLVGQRRPQRGPERPAPVPDGPRARPGCREGSRQAREARQARCREVSRNLPASVGRNLPASVGRALQSERIASASNVTPTARTTEATRNASCAISRLTPAARSARSCESRHAPHPLRADTANAHNSWSTRSTPGSPMTFIRSPVRSSPYA

SEQ ID NO: 10472 - protein, 254 aa, Streptomyces sp.
MGSPDRVSRSVRFACSPDTLKQLTEYRKGESDLIERDGRLFLIATLDIPEPEVFEPKGWIGVDRGITNLATTSDGDNHSGRRLGRYRRWQARKRAELQAKQTRSAKQLLKRRARRESRHATHVNHKISKTVVAVAQRTDRGIALEELGGIRERVTVPRDQRARQSSWPFHQLGAFIAYKAKRAGVPFIEVDPAYTSQRCPRCGHTERANRRTRDHFHCRRCGLAGPADHVAGANIAKRGATAWVFVNMPDPVPA

SEQ ID NO: 10473 - protein, 434 aa, Streptomyces sp.
MSRFRMYPSPAQAERMLTHCAHARYVWNLAVEQHSHWRRWRKCAPGFAEQCRQLTEARRDNEWLGAGNVDVQQQALNDFAKAKNARFTSGFGEPTWRKKFRHEGFRVIGTGRVPECNEDGSPKLNAQTGKQVMGRSVVVQKLNRRWAQVKVPGCGWVRFRLTRVGLPDAKTFRVTFRNGQWHIAFAVVPEPIMAPGTGEVIGIDRGVNITAALSDGRKLNCPQLTTKERAQIRKHQRRAARAPKGSPEKTAEYAKTARLKAREADRRKDWCEKTSTMLARSYDRVRFEKLNIKTMTAKAKAKPDPDDPDQYLKNGRAAKAGLNRSILAQGWGLLRQRTGDKAPGRVVDVPAPYTSLRCSACGWIDKNSRKSQAEFVCSSCGFACNADTNASINIAAGQGGIPRPRRTAGAGGTTPRKGSSVREPQPNRVGIPLF

SEQ ID NO: 10474 - protein, 490 aa, Streptomyces sp.
VAVRTRLKQLTPGDEEVLRLVGAHLGALASKDLKARCRDGLEHSGAMWAVRKRELTPLSSSRWAGAITKATQDQWAPARRCRLAHIQNPEAGIRTIEHRLSLPVGQKGTRKAPGGYRSQREWHAKSRRPRVPEDRLTAARVDRAAGIVHVVRGGKSLARTRHNLDTAQLTESAWRGRWESERWFCQADGESGKRYGNETIRISPDGEVSLKLPVPLAHLANAPHGRYVLACRVAFAHRGSEWADRVAADRAIAYRIHYDTGRDRWYVTASWQIPPAPALPIEAVLAHGVVGVDMNADHLAAWRLDIHGNPTGAPRRFFYDLTGTAEHRDAQVRHALTRLPHWARTCGVKAIAVEGLDFAAEKTREKHGRKKRFRQLISGMPTGGLRARLASMADATGIAVIAVDPAQGHPIRRRTAPPPQHRSDAVGHRTVQAGPEVSGREGTRPRIPGPRTRSVPPGRGANAGNQNARHRPGRSVEHETWQQDSLPLSL

SEQ ID NO: 10475 - protein, 402 aa, Streptomyces sp.
MTQQVRRAFRYRFHPTDEQAAELSRTFGGVRLGYNKALEERARAWYGEQRRVSYVQSSAALTAWKKTEELAFLTEVSSVPLQQALRHLQAAFGNFFAKRAQYPRFKSRKKSRASAEYTRSAFTWRDGRLTLAKMVAPLRIRWSRPLPEGAEPSTVTVSRDSAGRWFVSMLCEDTVAPAPASDLAVGPDAGITSLATLSTGEKITNPRHERRDRARLARARRELSRKVKGSHNREEARGKVAKVHARIADRRRDFLRKLTTRLVRENQTLVIEDLTVRNLLKNGKLARAISDAAWTDLRSMLEYKCAWYGRELVVIDRFFPSSKLCGACGTITAKLPLNVRTWTCECGAVHDRDANAARNILAAGLAASACGDGVRPQRESSRTGRSSAKQETQRATAGTPHP

SEQ ID NO: 10476 - protein, 436 aa, unknown
  TnpB Polypeptide
MAMKRTNTFDVVPLSGEDEAVLRRVLDASASLWNELNYERRQNFFDGESVWDTEDYRKQYVDVLGSATAQQVIRKNTEAWRSFFAAREDGEDTAPPGYWGNEDDGRELQTFVRNDQYTLEWADRSRLEIPIGSQLKDEFGFGHNERLRLDVRGDPKWDGEQGRLELHYDELEDRFRAFQPVSEFSPRDSPLADEAAALDIGANNLVACTTTTGERYLYPAHDLFGCFRQTTREIAYYQSKLPEGRYTSKRIRRLYRKRTRRRDHAMDALARDLVERLHAGGVATVYLGDLTDVLETHWSVETNAKTHNFWAFRAFVDRLACTAEEYGIGVEVRSEAWTSRTCPNCGSTADTTRHRDTLTCECGYEGHADLTASETFLRRHEDDVARPMARPVRLTWDDHEWSASPRACPNEDRTNPQVASAEVVHSGTPNGGIPRL

SEQ ID NO: 10477 - protein, 416 aa, unknown
  TnpB Polypeptide
MTAMEYSRRYFTYPTGEVAERLEHHLDVHRQLYNHVRWDYENSPEDDKPSEYDQNNKLTEWKRKWPVFGELYSKAAQATVARFHHNLSNLRKKKEKGYNVGRLKRQAPTDYRSVTYNQSGFDLDEKRGRDRFAYVRFSKIGWVKVRYHRPIPDHATIKEVTFKKKTTGGWFISFSLETDDADLPEKPDVDSLDASNSVGIDLGIQNYIHTSDGKTVDWLDLEDEYERLRREQRKLSRKEQGSNNYEKQRREVARVKCHIKWKILDYQHKITTWLAGEYDAVFVEDLNVKGMLEQSHNARNKQDAAWRQFITLLEYKANLYGCHVVQVEARGTTKECASCGVETAKPIWVREHSCPACGFKTDRDANAAMNVLQRGFSEIGLGWPEDTPVETVTATDTTHFESVSASHVVETGSLRA

SEQ ID NO: 10478 - protein, 426 aa, unknown
  TnpB Polypeptide
MQLTEKICIHPTPEQEEVLWYLSEQCRQIYNFALAERRRAWELNNLRFDFQVFPWGKPEYICYFKQQNDLPELKEKYPRYSFVYSKVLQMVLRTLDADYKSFMTLRAKGDRDAQPPGFKGRKYFTTMIYNQSGYKIKDGRITITQFYRKDTPLTFDISKEYLKIYQISVFKDGNKYYLSIVHEVPEKPYMNNGFYQAIDLGITKTVTAINTQGKFFEATNPRPDKYWNPKVDAIQSRRDHCKKGSNKWKHLHEAMNKRKKKCSNQIKDSQHKLSRNMVDNTRANTVIIGDLDVKKMPKSKKATSGLNRSTQNNGYISRFVRFLTYKAELAGKKVTEIDERHTSKRCYVCGKEHDMPLWKRTMECDCGNVIDRDRNSAINIMLRFLSQNAMWTGYQQFVDNLRKTGPPVPIHVLAVHSQEAPCASVR

SEQ ID NO: 10479 - protein, 595 aa, unknown
  TnpB Polypeptide
MCYENNLPFPSLDETFIQYCLKVNGKRDKRGRKAQDTETQQALETFYDEHFKEVLDHADKFDLCNYSFLMPYLATQMHTAIHNNLKEHFVTRLLRFINKTTCVYEEDLTKEEATKERHVLKQALFDNSTSVPERYAEWYAQHKKHIVPDSWSVSLPYDVKVQPERYLPYTFYMNRVLEMNECKLFQPLSLRNSIVPHYINFDTAALINFFAKRGEKGVLLQQVKLNQERFWNRIFNLDLRIFHHKRYLFNYTLQTDGVGVSLLFVHREYDKKKKVHPEFNEGEEMSLSYVDELNEEDLKFLKNKNVVGIDPGKYNLVYMADGKKKLRYTAFQRRAESMVKRNQKILRQEKINNDIIAQETVLSDYNSKTVDISKFKEYLKAKNKLNSKLRPFYEQELYRKMKLRQCVYTRKSEDRFLNRISETFGKDAVMAYGDWSRSSQMQHFVPTKGVGLRKLIANKFTTVLVNEFRTSKLCCGCHKELCHLRVKQNDTTKKLFRCLVCNECESSESKQPVFVTRNLNSALNIRHLTCRSIVGLKRPVPFCRDGTGLTLTSETTQETVSEEKVGQSVDFAVRNGTNLCKDKMPEGRRFKLAKV

SEQ ID NO: 10480 - protein, 357 aa, Bacillus sp.
  misc_feature (46)..(79): Xaa can be any naturally occurring amino acid
MRTMVLYIMLWKTYVFLVQQKILIFTLIMIHKALILIKMEYVITNXXXXXXXXXXXXXXXXXXXXXXXXXXXXXXXXXXKNLRNKNISYIEIVPKQKGRFFEVHYTYEMHVSQVKKQPTTTSNALSCDLGVDRLVSCVTNTGYAFLIDGKKLKSINQYFNKTIRNLQLKNMENGLSKRLVTNKIAALWHKRERQINGYIAQTVGLLFKKVKEFDIDTIVVGYNAGWKQKSHMGKKNNQKFVQIPFEKLMAAIENKCIKEGIRFFKQEESYTSKASFLDKDPVPVWSKDDKTQYRFSGKRITRGLYQSKAGTCIHADINGALNTLKKSKIVELDDNLKVKTPILLEVQKRKAIASRIA

SEQ ID NO: 10481 - protein, 166 aa, Bacillus sp.
  misc_feature (124)..(157): Xaa can be any naturally occurring amino acid
MKERNINKDAKVKKLLKRKKSAQRDMSRRFKKGVKIQSAGYEKAKAEHLRLSRKIMNIRNNHIHQATAKLVKTKPMRIVVEDLSISNLLKNKKLSKALSFQKLNFFFQCLSYKCEKYGIAYEKXXXXXXXXXXXXXXXXXXXXXXXXXXXXXXXXXXCYRTSRASR

SEQ ID NO: 10482 - protein, 394 aa, unknown
  TnpB Polypeptide
MQSSVAPTFFSLMRKLKKYQSSSMKKKNPRTELRTLTTLSSQMKQGLLEQVQEDVRSLAKKKKEGFKVGKLKYKKIVKTIPLKQYNITYKIQQPNYIRIQGLRQWLKVRGLKQIPKNAEFANAKLIQKQNDYYLHVTVYLPKRKRKHDNDTRKQSIGIDSGIANQLTLSNGIQIKYNLQIRKQLRRTYRKLSRKKTGSKNYLKTLVTLRKLFNHWNNRKHDVINKIVHILTTHYKIICYQKDNIKNWQRLFGTKLLNTALGELFVTLNKRATTSGVVDQWEPTTKRCALCQTVLPEPIPLSDRTFVCLNCDWTSDRDWNAALVIEVLGLQELDLDLYSTHFLDFDLELPTERRNVKPLETKTSQMILNGLFQQIPFVSSEVLSMNEEAHSLRCG

SEQ ID NO: 10483 - protein, 441 aa, unknown
  TnpB Polypeptide
MKVPLTAKLKLLLTPEQFSALRETSLAYRDALNHVSRYAFAHGKQSNQQWLQRECYDEIRVRFRLPAQMACNVPRQVGATYKGLWTKARKNTEARKAGLTKKRYKGLDEAPKFVSPTLTYNYHRDYSLKADHHVSILTLGGRVIASYTGYKEHIALIEHGAKIGAAKLWFDKPKKQFYLLVSLEVEVADPDPSTVTTITGVDVGVRYLAVTATTRGEQAFHTGKRVVPKANHYARLRKRLQRKGTRSATRRLVQVSGRERRLKQDANHVVATRIVRRYAHALIGLEELTDIRERTRRKRGKQASKKQRKANAAISKWSFAELHAMLSYKALLAGSMAIKVDAHRTSKACPMCGHAADANRPGKGLLFVCRNCHYTLHADLVGARNVTMRTLLVRQDWARTGQLSFAPGSLDGPDVSRDEAKAARLSHYAELRWSVDTSPRL

SEQ ID NO: 10484 - protein, 317 aa, unknown
  TnpB Polypeptide
MKRTSVVRLIVDKSSEEKLKLLCNLSSKLWNEVNYARRRMLFEKKGVDIKATYKEFYEKYKVLIGSATTQQILNKNDEAWKSFFKLLKLKKEDKLPPFITKINPPGYKKKNNRRILWIVLRKDQYKIEDNKIVLKGLGVIGRIELRYKGLIHLKGELGRLEIHYDPDRKRWYAHISFEVSEKAARRVWTSVPKKPRGDLVAGIDVGTNNLMAIYVENGLTQLVNGRPLKAISHYWRMKIAEYQSMLNKYGLKTSRWLRTMYSKWRRQIKSYVDSGVRQAIEWLYNVGVSIIKIGYPKNIHRKMETLTMSTYGHMATC

SEQ ID NO: 10485 - protein, 379 aa, Chloroflexi sp.
MLIYEYKLDGNTAQYAVIDEAIRVVQFIRNKCVRLWMDTRGISKNDLQCYCAELAKEYPFARRLNSQARQASADRAWSAISRFYENCKQKKPGKKGYPQFQHNNRSVEYKTTGWKLDPDGRHITFTDGCGIGRLRLVGNKHQQIEAFPITQIKRVRIVHRADGYYCQFSVQADRTIEHVPTARQVGIDVGLKAFYTDSEGNAVENPRFLRTAEKKLKRLHRRVSKKQKKSANRNKARQRLAKAYLKVQRQREDWARKTASTLTTSSDLVAYEHLQIANMVKNHTLAKSISDAAWGRFLWWVNYYGGRHAIPVIAVAPQFTTQDCSGCGRRVSKSLSVRTHVCPQCGLVLDRDQNAALNILAKALHGTGGHSGTDAPMRA

SEQ ID NO: 10486 - protein, 348 aa, Cyanobacterium sp.
MLKAYKYRIYPTDEQKVLLAKTFGCCRWFYNFALNLTNETYKATGKGLSRNEIINKLPQLKKEKEWLSEVPSQALQQVALDLSSAFLNFFEKRAKFPKFKKKGNKQSVRFPQSIKLDGDYLTLPKLKKVYCKVSRLPNGKLKSVTVSMTTSGKYFASCLYDDEQDLPERNSEGKAIGIDLGVKDFCITSDGSKYGNLNHYRKYEQKLAKKQKRLAKKQKGSNNRNKARKAVAKIHEKITRCREDFLHKLSRKLVDENQVIVVENLAVKNMVRNHKLAKSISDCGWGQFCTMVKYKAEWDGKTYIEVDRFFPSSKTCNHCLHQVDSLTLDIRSWQCRKCGTIHGKHIDL

SEQ ID NO: 10487 - protein, 602 aa, Planctomycetaceae sp.
VANLQIKKHETPTHRYYTPWDATAFVTEIGRLRCITDAGHSFLQQSAAFCRMERATIARLIADKPVDKPALMVEFGFPGRMVNTAIIHAKGCIDSARECAKLNLEDATEAIGRKLGEYWEASEATDGQAELFGRRRGLAKLVAREARAERAVVKPSVFPGRHAFLRQSELGPGWKADYEASRADHIGCIGSADEACGNSTLQVQLDEPEMREGNLWWWCTVAHAQQVLGYFRLRADENEDLLGILQTNATSKELAEVDAWLDDQGRIIHPKKVAQLQKEGRSPVATRKVLRTVTKGRTALNVMLHRHEDGRWYAHLSYGQTNFPKPFEPVGWMGVDLNVDSIAHACLSNDLVLLSYGKTYFKPDGPAGERTTELYKQINALVAEAKERRLGMSLEFLEFEASKRWLKNKLGVLLRMFPYRKIRAIFEDRCRAAGVPLRFVPSGYSSILGALIAQRHPELGRDQAACVIIAARATEDGNAWLEGLCETATKAESITLRFNAKGLFGCNTTLMGATSARPPHGHQRDHPCRPSSKNPSPLRWQICCGKRVSDISKTMRTDYRATVLAMRRAAVPQGRSNDIPRPQVPTLLINDHYAVLPRNAQL

SEQ ID NO: 10488 - protein, 363 aa, unknown
  TnpB Polypeptide
MHKAFKFRLYPTPEQCTLIYKTIGCVRFVFNHFLALCKNTYEQEQKTLSYTRCAAELTILKRKKEWLGEVDSTALQRSLRALDDGYQAFFRKQNEHPKFKSRRDANQSYTSVNNGTMRIEGNRLRLPRLGFIRFAKSREVDGRILSATIRRNPSGKYFVSLVCEVGIQPLPPSPNAVGIDLGLKDYVTLSNGQKVGNPKYLRKYEKRLAQLQRVLSRRQKGGKNREKSRVRVARLHEKIANTRNDFLHKQSTRLVHENQVICLEDLCVKNMVKNSKLAKSISDASWSKFRAMLVYKSNWYGRRLSVVGTMFPSSQMCSGCREKNPAVKGLAVREWTCSACGAQHDRDVNAACNLLNEGLRLLA

SEQ ID NO: 10489 - protein, 380 aa, unknown
  TnpB Polypeptide
VIRGFQYRFYPTKPQEQKLAQAFGGARYVYNWGLQLRTNAWYQDQKRVNYQDTSALLTELKKQPEHVWLNDCSSVVLQQSLRHLQSAFERFWQKMSGYPAFKKKHGPQSATYASSAFTFKNGVLKIAKVGILKIRWSRRFQAKPTTVTISRNAANQYFVSFRVDELLPKAAKAKRSVGIDFGINAFATASDGSKCYAPKPLKKYLAKLKRQQKALSRKQKGSKNRAKAKLALARTHVKIANIRKDFIHKFTTKIIRENQAIFVEDLNLRGMVRSHCLAQALSDVSIGEAMRQLQYKAEWYGRTLQKVDRFYPSSKRCHVCGWIIDKLPLSNRHWLCPKCETLHDRDDNASKNIQAEGQSALNSGDGVRPIRSQGRKGICR

SEQ ID NO: 10490 - protein, 315 aa, unknown
  TnpB Polypeptide
LQNVAVRVDLAFAAFFRRVKSGETPGYPRMKGDRQYDSITYPGTGFKIGDSTVSLSMFGRLIQVKAKIHRPVIGKVKTCTVRRYGNKWFACFSVEQENAFLPPSSESIGLDAGLNSFLALSNGEFIANPRFFRKDEKALAKVGRRQAKTVKRSKERRKANRVLSRIHERIRNRRHDFVHQTARRLVNRFGVIAVEKLNVKSMVKRNPKNHNLAKSISDASWSMFRSVLTHKAESAGREIHAVNPAYTSQDCHACGYRAKKKLSERWHNCPMCTASLDRDTNAAINILILVIGTSHTGITVCQVTPVEAPAFTHGE

SEQ ID NO: 10491 - protein, 367 aa, unknown
  TnpB Polypeptide
MKQVIAIKLEPSQEQCQALLKTVEAFNRGCQYAADVAYEKRLANKIALQPFVYGTLRSEFGLSSQMAIRAVAKAVEAYKRDRRVHVRFDKHGAMVYDPRIMSFKGLTQVSLMCLNGRELVPMRYGAYQAARIDRAKGQADLILRDGAFYLYVTVDLPSAPPVDAKDVMGVDLGIAVLAMDSDGEAHTGEGVKQCRRKFSRLRAGLQKAGTKSAKKHLRRNRRRESRYQRDVNHCISKHLVQKALAGQKALAIEELSGIRERTQATVRTNQRYERLSWAFAQLRAFIAYKCEAAGVGLLIIGPRNTSRTCLACGHCAKENRRSQSEFLCKQCGFQANADIVGASNIRRKGLEARANVMSPMVSAIAYA

SEQ ID NO: 10492 - protein, 551 aa, Bacillus sp.
MAKTNTPSFVISLVLDLEKQQKKDFIISTINKESEINRQLYNACLGELLKREKQVKRRRIYKKLVRQNRAISKQISLFEEIMKKDKTNDAYKKSMKHYRNEKKAVMEQIFDLQKECGLSEYSMHEYIKPMRSHFHNKLNSIVAQKTATKAWNTFRKKLIGEAKKVRFIPRGESVSFEGKNNATGWRFSEGKIVYQKLNVPLKVKENDLYMQEALSRIEHEEEFAYTNADGKKLKSNCKVKYVRILKKEIRGKERYFAQLVCQGYPPVKKDGSGKEKYPLGKGRVGGDIGTSTMAFVGDKQLSLFNLGEQIKQIDDVERKIQLLQRSLDRSKRATSPDYFDDKGRIKKGKKTWVYSNRYKRNRQKLHELQRKVAVYRKLSHQYMANRIKLYGNEFYIEKMNIRGLQKRAKETTISEKTGKYQKKKRFGKSIANRAPSSFISILKDKVKNSGGSFEEVNTTTFKASQYNHKTGECTKKPLAQRWHLFDEGDEKVQRDLYSAFLLKNSKANKQTPNKTLCDKTYKSFKELHDEEIKKIESMKNVVLNSGIKSAI

SEQ ID NO: 10493 - protein, 446 aa, Bacillus sp.
MARKKPIKVLRKKKKTVNMQRFTQKQNIGRSTLSAREFRLLQRMSHSSKALRNVGLYTIKQKYLNENKMATTKEIDNAMKADMNYWGIQSNSVQAVRRTLLSEVKSFFEALKKWKETPEGFTGRPKFPKYSRSTAKRVIEIYQVPKVDQDGYWSIPMNTAFRKRFGPLRLRMPKNLMDKNISYIEIVPKQNGRFFEAHYVYEVPMSQMKKQQTTTKALSCDLGVDYLLSCTTNQGDAFLMNGKKLKSINQYFNKKISELKQKNIENGLSKRIVTNQIASLWRKRNLQIDGYLSQTVGLLFKQIKRLNVDTVVMGYNAGWKQESHLGKKNNQEFVQIPFHRLISAIENKCLKEGIRFVKQEESYTSKASFLDNDDIPVWSKGDNTMYSFSGKRLYRGFYRCENGQCIHADINAALNILRKSQVAEWDEKTKIKTPMIMDVQKRKAVA

SEQ ID NO: 10494 - protein, 242 aa, unknown
  TnpB Polypeptide
VRKINRAVKIRIYPNKEQITQIEKTIGCSRFLYNRMLADKIRHYQEEKKMLKNTPAGYKKEYPWLKEVDSLALANVQLNLEGAFRKFFREPGVGFPHYKSKKHSRKSYTTNMVNGNICLQDRFLKLPKMQPVKIKLHRMIPEGWKLKSVTVSREPSGKFLPACCSTVKTKQRRKDRRKNSWGWILPCMGCVYFLPVKEPDIPCFTGMQRKNLPGNRENFPDVKRAAVTIRNRRKRLLYIMKR

SEQ ID NO: 10495 - protein, 225 aa, unknown
  TnpB Polypeptide
MEAEISDCEQGTVRKIFASLLFDCENQTAEKRQAEKFLGMDFAMHGMCVFSTGERAGYPMFYRNAEKKLAREQRKLSRCEKGSRNYQKQKKKVALYHEKIKNQRKDFQHKLSHSLAEDYDAVCVEDLNLKGIAGGLHFGKGIQDNGYGQFLSMLGYKLEERGKYLIKVDRYFASSKICSVCGHKKKELALSERIYLCECGNRMDRDVNAAVNILKEGKRIYKKCA

SEQ ID NO: 10496 - protein, 486 aa, unknown
  TnpB Polypeptide
MITTTKFRLYPSKKQFKKLNEIFTIYNKAKRIGYNLLFKGEAGIQQKLMEFCHNNPYVNTILIDNKTKLAQQKTWLNKRKTYLKRKILVVQGMIGAIKRNNYRDRKLRGLYIRLSSLQNKLIKLELKPIVFGTKNLFLQRIRRKISREEFIIHRDASFSCIGKVQYGQKNSNLKLLPSKVLKIRTFSKEKGKKWIIIPFSVNIKQERKFREILQVDKYTITVKRKFMKGDLRYYAHISYETPLPEIKYSFGNGCIGLDFNYNFIALANTNREGNFLSYQIIPFRNLHSYRKGRRDDYASFKLDKIINYCINKRKGLIIENLSIDQSFSYSKRQNRKLSNLRTSMLSLLERKCARNGIALRKVHPAYTSIIGELKYLRSYNLSRHILASYVIARRGLGFTETIPALYERLLAQVGDTLKPHLKPSRPYQQWAQLYDLFKHCGITSFNPSETSSFKPSIIMKKLVKNGVNPATGAPSDNLRAGLPVYG

SEQ ID NO: 10497 - protein, 484 aa, unknown
  TnpB Polypeptide
MHMVMLTVEFHQFRLKVGTYPGEDTPQIINHFFGEHATAVFCHKDQVNVHLENAMPAVSYFVVFLHRPSIIQNMKRLQAYKFQIEPNGEQQRAMRRVAGSCRFVWNKALALQIANHETGEKFINHFAMCKWLPVWKKEPETLWLKETPSQLYQVVLKDLVRAYKNFFEKRADFPTFKKKGVSSSFCFPQGCELDSGNSRIRFPKLGWIRYRKSRAVEGDIKNITVSCVAGKWYASIQTERDVAQTEHPSTSIVGLDAGVTLFATLSDGTMFEPVNAFRKNAAKLAKYQRCLSRKTKFSSNWKKQKQKISRLHQRVAHTRNDFLHKTSTIISKNHAMIVIEDLKVTNMSKSAAGTIEAPGRSVKAKSGLNKSILDQGWGEFRRQLEYKQAWLGGDVLAIDPRNTSRTCPACGHVSAGNRKSQSKFECVECGYAENADLNAAINILRAGHARLACQVNGAVMPSATGTHRSYLPHSGVEAVGIPSL

SEQ ID NO: 10498 - protein, 378 aa, unknown
  TnpB Polypeptide
MKRMITALRVRLEPNKKQMSKLFQSAGVARWAYNWTLGKQEENYKNGGKFIKNGELRKELTQLKQTEDLKWLNAYSNNITKQAIKDACDAYYKYFKGLSGKPKFKSRRKSPPKFYQDTEKIKFKDGKVRLEKIGWVKLSEKNRIPEDIKYTNPRVKFDGVHWYVSVGIEVEKKPVELTGCSIGIDVGVKELAVCSNIEEAYKNINKTKKLRKIEKKLKRLQRKVSNKYEKNKEGRSYVKTGNIIKLEKNIKKLHRRLGNIRTDYRHKVTTEIVKTKPSRIVMESLNISGMMKNKHLSKAIQQQGLYEFSKFIKYKAERQGTEFVEADKWYPSSKTCSECGYVKAKLSLSEREFRCECCRAVIDRDKNASINLSRYKVS

SEQ ID NO: 10499 - protein, 522 aa, unknown
  TnpB Polypeptide
LAKNQTYRAFVARPTHILDLNGELLDGARVLAGLVSEVRDISAYATYVVRNDEALGDELARVSATVPAVAGCRAGVTMPDFLATGRTGRSRKERLMQYNVVASYRSWQERIKAASGESSKYVSQGWKRTVSAAAPSYGGDYVNLGAVDSAYARIENDPFADGEIVLRMVIQGRWYRLVFDFDNERFTEGKVALPLIRVQDDLPVFVFTVVTDNPVVQFSGDWVIGVDVGLNDYATVAVRDIKTGRIVHQTTLSQRVHSLWNSVHASERQVRALRRKAGRLLSQRQTRMSALDEAQLHREAASRKKRELAILAAQEIADLSHLWGNAVVAVEDLSWVANTMQNGRWNRGALIQWLTHYVSQNGGWVVAVNAANTSQQCHMCDQQVTHPTHKLSICTEHGVMDRDVNAAANIAARAVPRVVKARVTRAKNRKLHPQAPLRTPPTRASLKYPGRDRTKRKPTPKRKNHHPFSKGVILPSCPARAQAPRLEASVLADQGAHGTLGTNKAALKQGDTAYKSRLCNLI

SEQ ID NO: 10500 - protein, 360 aa, unknown
  TnpB Polypeptide
MLVTLKIKLLTDSEQHAKLLETMRVFNEACNFISQLAFEKKIFNKVKLQQECYYEVREKFRLSSQFVIRAISKVTESYKTNKKTLHTFNSTGAIIYDQRLLSYKGLEYASLLTMDGRIIVSMVFGDYQKGVIDGRRIRGQADLVLVDNVFYLLVVVDLPDGSPNDIKGFLGVDLGIVNIATTSDGEQMSGKTVRAVRRRNNKLRQKLQKKGTKSAKRLLKKRRRKEQRFIKDVNHCISKKIVAVAKATDRGIAMEDLGGIRDRVKTVRKAQRSELSSWGFYQLRQFVQYKAILVGVSVVFVDPRNTSRECPVCGCIDKKNRPNQSTFKCTACGFSANADINAACNIAGRAAVNLPYAGTA

SEQ ID NO: 10501 - protein, 409 aa, Streptomyces sp.
MQLRYAFRLYPEPGQRAALAGAFGCARVVFNDAVRAREDARAAQQPYPKAAVLSQQLITHAKNTPERSWLGEVSSVVLQQALRDAEAAYRNFFASLKGERKGKRVGAPRFRSRKDSRQAIRFTTNARWKITSGGRLSLPKIGDVKVKWSRVLPAVPSSVTVILGSAGRYFASFVIDTDVDTDRARWTEPDPEAAIGIDLGLTHFAVLSDGTKIDSPRFLRRAEKKLKKAQRELSRKQKGSRNRAKARQKVARAHAGVADARKEFHHQLSTTLIRENQAVAVEDLAVAGLARTSLAKSVHDAGWSQFVTMLEYKAQRYGRTFVKVGRFEPTSQRCSTCGHRDGPKPLAVREWTCRACGTVHDRDHNAAINVKQAAGLAVSACGAPVRPEPVLAQREETGSHGIPAGCRAA

SEQ ID NO: 10502 - protein, 387 aa, unknown
  TnpB Polypeptide
MWKACDELCFKSKNLYNYANYIQRQKFINGEKIYKYNEMAKLLKTHETFTSLGSNSSQHTIKLLNKAWKSFFVSIKDYWKNPSKYLGKPHLPNYKNKNGRYICVLTNWQSQIKEGYLYFAFKPLKSYNNTFKTQVKGKHMQTRIVPNGSCYVLEIVYETEVLNIPTESKNIVGIDLGLNNFATLTNNVGALPIVINGKNIKSYNQYWNKDISKVKSDLKKRHNQNWSNKLESLTQKRNNKIEYFMHCTSKMVIDYCMAIGCDTIVIGYNQEWKQECNIGKATQRFVQIPYYSFINKLKYKCENIGIKFIETEESYTSGTSFLDNEEPTKENYNRSRRISRGLFKSNTGILINSDVNGSYQIIKKVFPNAFVNGIVGVDLHPIRVNIG

SEQ ID NO: 10503 - protein, 480 aa, unknown
  TnpB Polypeptide
MKAILIDLTSEQKALLDHMMLVFCTAVRYSFKRQLEGQVIGDLERVVAHKYNLNIRQAKDAAESARQTIVSQHVLVKLYHEDYTKKVEALVKKLKNPKLSVRKVKALTSKLAKRQRKLSYWTVLKESKTFPPVTFGTKEMFLRRCKGLITKKEWNDRRNNRFYSRGDKSKGGNPNLRVLFKEEAGFLEVSTFEKAPKNRAIKVLIPIYLPQKLSKKTGNVNGIPYRQLFMDSLERGEAYQVELLKREGNYYAHITFDELEAKVIYTGHLSVIGTDTNPNGFGLTEVGINGNYKGHTYLKQHELTFCRGNRRTNLCGELVAQAVDKAEKHHCGMAAENLKFKDDLDVASKLARVNHQFVYSTLLQMLERRCLRHGVEFIKIKPQFTSKIGLYKYCHQYGLAVHNGAALVIARRSYGLKEAVPKLLQDKLVLEKKLVAFKKMNAWGQWSEVSKQVTKLFKKRKEVNTPGLWLVRRKELLGIA

SEQ ID NO: 10504 - protein, 312 aa, Mycobacterium sp.
MRVEPDRRHLTLPVIGTVRTHENTRRIERLIKAGRARVLAISVRRNGTRLDASVRVLVQRPQQPKVVHPGSRVGVDVGVRRLATVATADGTAIEQVENPRPLGAALRELRHVCRARSRCTKGSRRYRERTTQISRLHRRVNDVRTHHLHVLTTRLAQTHGRIVVEGLDATEMLRQKGLPGARARRRGLSDAALGTPRRHLSYKTVWYGSALVVADRWFPSSKTCHACRHVQDIGWDEQWQCDRCSVVHQRDDCAAINLARYEETSSIVGPVGAAVKRGADRKTGPRPAGGCEARKGSSPKAAEQPRDGVQVA

SEQ ID NO: 10505 - protein, 374 aa, unknown
  TnpB Polypeptide
VIIVNKAYRYRLYPTIEQKIMFAKTFGCARFIYNKMLGDRLDYYKETGKKLNNTPAQYKEKFPWLKEVDSLALANAQINLNKAYNNFWSNRKHFGKPRFKSKKTGHASYSTNNQHGSVRIEGNKVKLPKIGWVRLCLYRPLMENSTIKTVTISKTPSGKYYISILVEYKNQILPIVPKNFLGLDFAMHGLYVASDEDNADYPNFLREAEKKLVKAQRKLSKRQKGSRNRHKQRLRVAVLHEKIANQRRDFLHKKARYLADRYDAIGIEDISVKAMAKRKKGGKFSFGKSISDNGWSMFTSMLEYKLAWQGKQLIKIDKWYPSSQLCLCHVCGYQNNDTKDLSVREWDCPKCGSHHNRDKNAAINIREEARRISA

SEQ ID NO: 10506 - protein, 366 aa, Scytonema sp.
LRCSDPAKFKSIRKFSGWTYPALSGWKANTSLKHGSVNLNDLGIKVKMRGQAKQWGKPTTLTIVYKPGLKQWFASFTVEVSDVAAKFGSQSELAYNSIVAFDLGCETAITTYNGKDVEQISNPRFTQKTEVKIKRASKELRRKQAPNRNKKTKASQRWKKANKRVARLQRKAGTQRWDWQHKVTSEIASRYDIGATEHLNTKGMTRKAKKGSKRKKQKAGLNKSIVSVGFGTLNKMLTYKIEAKGGLMIVLPTKNIKPSQRCPKCGIIHKEWAELSNRHHVCSDCGFEIPRDAGSAIVMYNVVTNQQPGLRTSLDSLGCLSSTSKTSKCKNTGSMKQRSACEETKIRASGGTGRNPVRRKRRGSSL

SEQ ID NO: 10507 - protein, 400 aa, Scytonema sp.
MKQVLTVSCKLQVTPEQVVKIDELLQAFADACEYTNRMVKPGLTNEQAMQSLIYNDVRARFGLSSQLAIQAVRRVAGNRKTAKQKGKPVRKFAPTSAAYDERVFSFREHDWTVSLRLLGSRERFKLAIGNYQRGLLKGQTPKTATLLKRQNGTYYINIQLESQPPVIETTDKVLGCDLGRTDIVVTSEGDKHSGKDITEIRDHYSHLRAKLQQKASIGTRSSRRRCRELLKRLSGKERRFQTHQNHVISYQLVQKAKTNNQVIALEDLTGIRERTNELPRTKVERRRSNSWSFYQLRQFLTYKCIKFGVKLVLVNPAYTSKTCHNCLHIHPVQWLSYRSGKSFRCGHCDWSGDADLNGAINISVLGQLINLPGGSGALSCSLQDHVLRAAENPNLSRQAG

SEQ ID NO: 10508 - protein, 417 aa, Scytonema sp.
MRTAYQYKLRPTKQQVASIDRWLSMLCAQYNYFLADRFNWHEQNRCSINACPLVCHLPELRDNPDYYSQKKTLPILKKTHPHYGDIHSQVLQDVVKRVKVTFDRFLSGDSNGRRSGRPRFKSRDRYRTFTYPQMKDDCIQGSLINLPKLGNIKVILHRPMPNGFKIKTVSVTKKADGYYVTLSLEDPTVPSVKHDINPDSITGIDLGLKEFLTTSDGEPVAIPQHYRKSQKRLRVIQKRVSRRKKDSNRRRKAVKQLGKQHKKVADKRKDFHFKTAKQLLSKYDVVAHEDLNVKGLSKSRLAKSVHDAGGHPLLVNSSHQSRSRSVRLWRINAGLLVIAVNASGTSQDCSSCAVKVPKKLHERWHSCQCGCSLDRDHNAAINIKNRALGHRVLKAQLMSDGIPGVAEKPTLYCTQSV

SEQ ID NO: 10509 - protein, 390 aa, Actinomadura sp.
LKFPLRLTARQAGSLAACLEDHRQLYNAALEHRRTAYRKAGVTIRYGDQSADLKHIRADDAGGQGRWSFSSQQATLRRLDKAFAAFFRRLKAGQRTGFPRFKGRGWFDSVTWPRDGDGCRWNSQPQHPATAFVRLQGVGHVRVHRHRPVHGVVKTISVKREGRRWFVILSCDDVPAQPLPETGAAAGIDMGVASLATTSDGEHLSNPRHLRTSAERLARAQRDLARKRRGSARRRKAVARVAALHAKVRRQRLDGAHKAALTLVRAYDVIAHEDLRITNMTRSASGTAEEPGRNVAQKSGLNRSILDAGWGVFLRVLAHKAESAGRELIAVNPANTSRTCSHCGHCAKENRVTQAEFACTACGHTAHADVNAAINILRAGLALRDASEAA

SEQ ID NO: 10510 - protein, 390 aa, unknown
  TnpB Polypeptide
VKAVKGVRFAYKPTPHTLELLATFRGMVNEAIRICLVEKLKGRLKLRDRMYKEFQVRYGVTSCFPYSVAEVAWSIVKKHRRWQRKPYARRPMLKMDAYNFSLNYSILSLPFKKGERVEIPLKYGEYQRSFLMDNTLKRGSVTVTETSIVIAFTKESPITEPTRRVGYDLNEKSIVGSEGTIHDLSEVARLHTLYGVRRSGFYERHPCDRRLRKKFASSRREKERVSQALHRVSTLIVEKARANNEAIILERLTGIKYAHQRGNGETTARRRRIALWPFRMLQSYIDYKAKWAGVPVEYVSPSYTSKKCNVCGFINHKLMLTERSWLCPQCGAKLDRDLNAAINIERRGKIRCLGEVHPGARDTDEAVKGNETTTPILRAEAPKPSLREVQ

SEQ ID NO: 10511 - protein, 365 aa, unknown
  TnpB Polypeptide
MTKLTVKAKITDDSKSKPSLIELEYSNYQTYLQSGCRITTNLYSATKQQAERVLKRIKEPKPKKKYPLILRRDLIDIQKDSKFPCVYWMKIPVYPKSINVRIHTSCKYDLSSNEYSIRESKIVNIQNCWYTYITIERQKDTNIANTADNVLAIDIGCKNIAVTINTANTRPNFYGSKLRDRRGFHFWLRRKLGQKKAFYKINVLKNREFLQVDHELHQISKTIVQEAKRTNAIIVLGKLKGIRKRIKAGRRIRRLINNFPYYRLVRYIENKAGWMDIKVLEISESYTSQTCFNCHVIDKTARKTQGLFKCNNCNVVSTNADYNGAMNILQRGLGILSSLRGFLTYPEPSVIVDRNKMITRELPHV

SEQ ID NO: 10512 - protein, 443 aa, unknown
  TnpB Polypeptide
MLLTQQNRLKLNTQEENALKAACRVSKNLFNVCLYQQRQYFFQERKYFRYEGAYHLCKDNENYKMLATDVGQQTMKVVDRAFRSFFNLLKQRTVAQYNAKVKLPNYLPKDGFFPLIIPIRKRDWEKLPQKLPQKEWRFTIPMARIFRRHFGAVTITIPERIRDKQIKEIRIIPKQGAHYFEVAYVYEQSEQESRCVGDGVVAIDLGVDNLATCVTTKGESFILDGKKLKSKNQWYNKRNSRLQSIKDQQGIKGLTKQQAGLYYKRSNQVKDYMNQAVRYLVNYCLAQGMGKVVVGYNPTIKQNVNLGTHNNQNFVQIPHHLFRLKLKSLCERVGLAYIEQEESYTSKASATDGDPLPVYNSDNPQTPKFSGKRVKRGLYRTASGKLINADANGALNILRKYLNLSKAKENQFLQRISGCLIQPFRLVGAKRRLPLEHLKNLPL

SEQ ID NO: 10513 - protein, 590 aa, unknown
  TnpB Polypeptide
MSDHLSLPIRLPDEDAERFERLAILSQRVANHVLEDHWTPPHLDGVADSSYQAWKYFDEHEPFEELDLYLPSRFRRCILQKVGATLRSHADRRDAYQSIRDVLPDHKIRRIHRRRIKEKLWNDGDYLSSGYVDDLVDQLNSYYDRHGTYPATYFEMQDCPEYGSGVLPFSADDGPTSGQVVKYQYDADSEILTIRLKTPDTVSPETRGDWSWTEYERGGYDAFHDLLAHGDLSAPEFQPSRRKNGDAYYELSFPVEIEHGETTDDADCVLALDAGIRKDMTAVVVTEDGEQLSTPHFIQFTNREKMRRLHRERTRLNDRLAAVRRAGRAHTDEFAHIQSEYERVNNKIRHKREQLTHDVANQVLALALLYDVDAIVHEDLRSLSPPSDEEMLSWELSSWARRDIIENIEYRAECAGIGVERVFPEGTSRSCPRCGASGHTCKSPDHHEELWWGGHFQCDNVRCGFEGDRDYIGALNVARVFFSDGDTLDYDFTSSYTGDSAIVLADRSAGERSAASRSTSDAVSDPGTRLTFGTGIVAYEPGQAEATAGGGSAVIAPAVTLPESKNDSSDGRGPAVQQCSQFRRCTTENY

SEQ ID NO: 10514 - protein, 405 aa, unknown
  TnpB Polypeptide
MIKRKAFCFRIKTTPQIEQEFAKFAGCSRFVWNRALALQKERLGAKEKMLRYTEIAGMLPAWKHELPWLLEAPSQSLQQTLKFLDRAFKDAFDKLNPKRFPTFKKKGKCTDSFRIPQGFKVDGDRIFLPKTGWVRFFKSRDIEGAVKNITVSRRGKHWYASLQTELEIPEPRHASASEIGIDLGVRAFAALSDGTLVAPLNSFRAMEKKLAKAQRSLARKVKFSANWRKQKARIAALHERIANARGDFLHKLSTDVCKNHALIAIEDLRVSNMSRSAKGTVEAPGRNVKAKAGLNKSILDQGWGEFRRQLEYKALWAGGVLVPVPPQYTSQSCPECGLVDVRQPAQGRVQMPRLRTHGGRRCQRGHQYSRGGARRDGLWSGKGSCDRSEAGTTPCRLMQHGILGL

SEQ ID NO: 10515 - protein, 275 aa, Bacillus sp.
  misc_feature (79)..(97): Xaa can be any naturally occurring amino acid
  misc_feature (132)..(132): Xaa can be any naturally occurring amino acid
  misc_feature (185)..(185): Xaa can be any naturally occurring amino acid
  misc_feature (187)..(187): Xaa can be any naturally occurring amino acid
  misc_feature (237)..(237): Xaa can be any naturally occurring amino acid
  misc_feature (270)..(270): Xaa can be any naturally occurring amino acid
MKQNGQLPSNEWKGSFLNKYATIKELPALKKEYSFLKEVDSIALQKSVENLADSYSRYYKKQNKSPRFKSKKNPIQSYXXXXXXXXXXXXXXXXXXXQKQKRKVAILHEKISNARMDYLHKVSTEIIKNHDXIGMEDLQVSNMMKNHKLAKAISEVSWYQFKKMLEYKAKWYGKQIVTVSKTFAXSXLCSSCGYQNKDVKHLNLREWDCPFCSTHHDRDINAGLNLMNEAIRLLTVXREWDCPFCSTHHDRDINAGLNLMNEAIRLLTVXTTGVA

SEQ ID NO: 10516 - protein, 373 aa, Aigarchaeota sp.
MKTVMKNAKRLFNLNTALIQTARDKAVEILKSFEENRKENNILRLKRISIRFDKRCYSFSKTTNVLTPYWLTLSLNRRERVSLPIIFGEKQKQRIEETFRGEWKFTTVEMVKRNGEWYAHFVLSKTVELPDEPETVIAIDRGEHNLAVAVAISKRNPEKPLKGQFWRGSEIKRIRGLYSHIRRKLQEKKLLKKVKELSGKERRKVNQQLHIIANQIVEYAKNFPKPTIVMEDLNGIRKNFKKSKNLNRRFHSLPFRKLQAIVEYKANLEGIDVSYLPKKEVKDTSKTCHRCGHVAQVKGRVYKCTNCGMEYDRDLNACINIAHRVMSSMGWRSREPREPADKEIGVKPTLNAGSSRLQSWSSSHTYPLSKRLG

SEQ ID NO: 10517 - protein, 326 aa, unknown
  TnpB Polypeptide
MQFVKVFRGGEDMESVRRAVAVELERPPPGLSAVEEPYRRIVEEVAVYVAERGRLEKEKYNELYHRFREQYPLPAQLTQQAINQGVETGKSFLELKRDGRVYKPRPEVRRVSIRFAKDSWSYRKTATAIAPVKIAVSLPSGRREIWIKPHRRFWLYWWKVLRKEVELASTLMLKRRRNKWYAIFVFDVAPERKPPAEVVAFDVNENSVAVARLSLLATVDRVVSWNRQYINPAVYLIRTDFGRLAKRYEAVRGRKLEELKQKYPFASGDEEERRQNVADTREYKKFARRLRERRRKGGRVRQVAREVTRSPAVIITEELGKTRRRK

SEQ ID NO: 10518 - protein, 459 aa, unknown
  TnpB Polypeptide
MKSAVKIPLLVGEREAAVLDGQSRIANWLYNKLLEQANALRQQYRSSQDQTVGKTLYTERGLRDMIPTLKEQHPFLKSVYSSPLKNAALRLSQAIRAYQDGKHGRRAKAVNWPRFRAWKRSWFSLQYEEPHKGYHVVASTLTLSLGQDPEGQQIKLTLTLAEALPHWVNHDHIRQCRIVKEGQIYSVIFTIERQLPNGKPLSPTKVVALDPNHKNFAYAVDSNGKATEIHNPYFLKALDRRIDHLKAKRDHCKKKAKQLTRPDGSTFWLPSRRWRSLNARLQEVYRKRREQTKQFLYTVANRLYHDYDAIGIGDYVPRGRSGITRKMRRSMHNQSLNRRFKQVLSWVALRSGKTSLEWAEGGSTRTCHDCGYVVAEGIPPEVREWDCPGSGCTRHHIRDENAARNGLTRTFKVLELPCSGHWEVSSRCAWRFNGLGLTIRRSLTDSATGINFQEIKSFP

SEQ ID NO: 10519 - protein, 406 aa, unknown
  TnpB Polypeptide
VSETSVRKTYQEKLRPTPAQERELERVLWRCRTLYNTALEQRITLWKQRGVSITRYQQEAELKTLRAEMPEYGALHSHVLQDVLARLEKTYQAFFRRLASGETLGFPRFHGRDRYHSFTYKEYGNGARLDNGYVVLSKIGRIAVRWSRPVGGTIKTVTVSREADGWYVSFSCAEVLTQPLPLTDKETGIDVGLKVFLVTADGDIVENPRHYRKSEHALKKANKRVSRRKKGSKRRAKAAHQCAKQHQHVRRQRQDFHHKTALSLVRQYDVIYVEAIQPANLSRRPEPKPDENGNGGYEHNGASRKAGLNKSIHDAGWRHFLSILTFKAACAGKRVEAVNPAYTSQDCSGCGERMQKSLSVRTHVCTNCGLMLDRDENAARNILWRGQRLRGLAGMPAGMNREPVGL

SEQ ID NO: 10520 - protein, 236 aa, Cyanobacteria sp.
  misc_feature (236)..(236): Xaa can be any naturally occurring amino acid
MKLTHIYRIKPSTEQVAIMDTWLEMLRRHFNYALGQRFDWLRRTRCQIDRCSLISEPIGDIPNLFPSYNFQAGELKTTKELFPIYKEIHAEVQQQNLKRLDKAWQRCIKPDKSGKRAGRPRFKKQGEMRSFTFPRINGPKAGVNKIEAGVLTLSKIGSMPVIMHRPFSHGFELKTATIVKKADGWYIAISLEDDSVPSPKPIDEIKTVIGIDLGLKAFLVTSVGESVEVQQHYRKX

SEQ ID NO: 10521 - protein, 514 aa, Cyanobacteria sp.
  misc_feature (236)..(309): Xaa can be any naturally occurring amino acid
MKLTHIYRIKPSTEQVAIMDTWLEMLRRHFNYALGQRFDWLRRTRCQIDRCSLISEPIGDIPNLFPSYNFQAGELKTTKELFPIYKEIHAEVQQQNLKRLDKAWQRCIKPDKSGKRAGRPRFKKQGEMRSFTFPRINGPKAGVNKIEAGVLTLSKIGSMPVIMHRPFSHGFELKTATIVKKADGWYIAISLEDDSVPSPKPIDEIKTVIGIDLGLKAFLVTSVGESVEVQQHYRKXXXXXXXXXXXXXXXXXXXXXXXXXXXXXXXXXXXXXXXXXXXXXXXXXXXXXXXXXXXXXXXXXXXXXXXXXXVQQHYRKTQKHLARQQKRLARKTSGSRNAQKQKEKVCRIHQRIGRKRENFHYNIAHQLVKQYDLIAVEDLNIKGLRRTRLAKSIYDVAWGKFLTILEAVALRSGVHLVKVSPHNTTVDCSRCGTKVPKTLAVRLHECTKCSLEMDRDENAAINILHKALNAVGLTVSAYRRLSGCTPDEVGIPNCEFGKLTLILTDIASEDVTSL

SEQ ID NO: 10522 - protein, 384 aa, unknown
  TnpB Polypeptide
MRKINRTYKFRLYPTESQTELLAKHFGCARFVYNYFLNQRQEQYRLTGKSDNFYTECKTLTELKKQEETAWLNEVNAQSLQFALRCLETAYTNFFKKRAKSPNFKSKHSKNSFTAPQYATISDNKLFIRKFKEGIKCRVHREIKGKIGKVTITKTPSGKYFASVHTEEEYVTPLEKTKKSVGLDLGLKDLLTTSEGERFTNNHYTKKYESRLATAQRHLSRKKKGSRGYESQRLKVARIYEKISNRRADYLHKCSISLVRRYDTICVEDLNITGMVKNHKLAKSISDSGWGGFVYMLTCKAEWNDKKVVKVDRFYPSSQTCSVCGHINKQTKDLSVREWECPACHTHHDRDVNAAINILREGLRQYTSAGTADYTGGEEVRAVL

SEQ ID NO: 10523 - protein, 381 aa, unknown
  TnpB Polypeptide
MLRAIKVRLYPNNEQEQELNKVLGAYRFVYNHMLAKKQKDYEADKTNLSGNDLSKWFHGVLRKDEQYPWLKEQNTQVMQQAIRQMDDAYQKFFKKHNGFPKFKSKKDKQSALFPRKAISRRNTFETKHITLITSLKDIKFRCSDLYHSRLRKYKDNIRSATLSKTKSGNFFLSILVDIPESELVKFKKTNKQVGLDLGVKDFVITSDGVMFENKHFFKSEERKISKLQRQLSRKVKGSNNRNKQRVRLAKAYERLSNKKENYIHSVVNEILKSYDVVFMEDLNVRGMLRNHSLAKAIQEIGFYRFKSVLQTKASQNGKEVYLIDRFYPSSKTCSCCSYKHQGLKLSDRFWTCPECGEHHDRDVNAARNILLEGQRMLRESQ

SEQ ID NO: 10524 - protein, 397 aa, unknown
  TnpB Polypeptide
MQNIQPLKKGFKYRIYPNLQQKEILIKIFGASRFVYNYFLDKNKKEYEDWKTGVCKTRPVVNAFQLMTELPLLKQREEFKWLNDCPAQILQSKISDLNNAFQRFFKNGGYPRFKSKHFRQSVEFNNQNYKIKDSKLQLLKTPDLIKINWHRELSKGKITRCVISMEPTGEFYASFTCEYTPVKTNGTGIVGLDAGITDLATTSTGETFENPRHYVNAQKKLTKLQRRLSKKKKGSKNRNKARLKVAKHHSHIANQRKDYMHKLTTRLVRENQAVAIESLQVKNMVKNHKLAKHIADAGWGMMREQLVYKTIASNHCKLILADPYYPSTQLCSDCGTKPAERIKLGVTKWTCCNCGSVHERDHNAAKNLEQLALRELLMAKQMKSDKPIILAGRYTPV

SEQ ID NO: 10525 - protein, 402 aa, Fischerella sp.
MSNYTVRKLKIGNTEQMQSLSCAAGELYSQTVINFWRTVRKKGKWLKPSSLMRWLPNDSQNRLHAHSADAVVQNFFASLNSWRERRKSDPDARPPRRLKRFFKVQWKSSAIKVKDGKLRLSNGRGNEPLIIDWAWDAPKLVEMGWDGKEYELRACYASEEVSVKKSGSVAGVDLGEIHLAVAHDGKETIILNGRLLRSKRRYQNKLKVKLSRLIDVKKRGSKRRKRLILSKQKQLAKLNNQIRDIQHKQTTKLVSTLNDRGVQTLVIGDIRDIRKSVDYGKKANQKIHQMVYGQTRQMLTYKSKRLGMKVELQDERYTSQTCPTCGKRHKPKNRIYKCSCGFNFHRDGVGSINIRKKYLGVMELPVVGAMASPIGVRYSAHLRCSAVHFRSSESDRERIPCL

SEQ ID NO: 10526 - protein, 477 aa, unknown
  TnpB Polypeptide
MKQKRKKRKQQHDSAIVTYKIPYSCENLNEILPYIKQYNSVLRFTYNRRLDNHDLDLSEKEFDKFIRGCQNQMNNVELIGSHLKNSANIDAKGLIEKYELDPIIFGGKNLFLQRCNDKISKEEFKRERLSPLYSVGEATNYGNRMFQLLDLETVLFKPSKQKHFTLKLHSIGQKRLETLKRLIVLQNTKSIPITYSLDMNYVYITFDMNRLNHQEYNVIQNRVIAIDVNPNYVGYSVVDWKSSKEYQIIDSGFYEIKPLNDYRWSKKVTSDDPHAIYVTNKRKHELIHIAIELATKAKHYKCEVFAMEDLTIPSSDTKKGRKYNRLVNNSWNRNLLLNQIKKHINCSSTTLIEIDPAYTSKIGNILYRKEYLIDACLASIEIGRRGLEFFSQYISKRKPKEKIVIFPDLSSVKSILIQSLEELNMCNEFESWKDFTSLVKDSKARYRVSYLESLSKYSGVLFRKFHKRKFIYTYVYL

SEQ ID NO: 10527 - protein, 742 aa, unknown
  TnpB Polypeptide
VLHVATEIITLTRTFGMMPASRADIIAPAMLERVVIAANAFIKVGASLDPALLEGTTLVAVKRFYAAARAVPGLDPVLQATRLRERAWRCASHVAYYALQEHQRRCMVIPAIMTVMQGISLSIIREKQFPSKDFLDSARDSLKGTGLPAGCLSTVYLSNMARHAKHLLENAIRVSSREAIASCIAAIARDPARIVDLVIAGLVAGMDGVPANIARAVSVRFTRRVKDRAHGRGLPAGKHRLDVLVDAILGGKNLNTWQKARCTWRDAAMEEMAMRVRSLDVAALASEAVKVVLASMTVDEAIATMFSSRRCPRVNVTSQVMPDPARFLHERAMVLARNQIGVALWPTLAAEVHELLAGIGKEPFSHVALPRCKKQSIPVAIDDGQVYQLDLRKDAGDGGRVVAATVHISLEPGVVSTFTLRELDRIDTMLSRGFVPARGTITRKPGGGLLLHLPFEKSCTVGAFPGSIRTETMNRGNNVVVAGVDLGLKHLAWLSVGECQRSARDDGSWEPVDKARPEIARCCIDQPQLAGKKGDWLAGRAATVPNLKRQLIATMGRARALQRQKDLLRHRFGKRCKHARQYFVARREWQRCWRRVRHMHEEIARQVATRIVAACVHHGVGLLRFEDLSWSSRSSKRESGSWLASWQVHWFFSQVQERATLLARLAGIAVEFVDARGTSKRCSACGAVGVRDGKRFSCMIDGCGKKVDSDLNGARNVRIASTSPRLHAKVEGARFRPLACRA

SEQ ID NO: 10528 - protein, 184 aa, Oceanobacillus sp.
LDKYAVLSDGKSFENPRFLRQTEKKLKRAQKKLSQQKRGSANYKKQVIKIRKLHEKVANQRRDTLHKWSYNLTKYYSVIAVENLNIRNMVKNKRLAKSISDAGWGMFRNMLSYKCERNGGLLIKVNPEFTTQDCSECGTRVKKSLSIRTHVCKSCGTILDRDYNASLNILRKGLEQLDQMLVMD

SEQ ID NO: 10529 - protein, 404 aa, Okeania sp.
VITLIYQYKLRPNKQQEEEIKDILDVCKSVYNYALRERKDWLSSRKSPINSCSIICEYIIPADAPYPDYNVQAKNLTIAKKNNPRLKSVNAQVLQQTLKTLDRAFSEMKSLGKGFPRFKKRLRSFVFPAMLKNCLGNNKIKLPQLGWIKLRQSRLYPENMVAKQARIVKKASGYYLMVSFQSSESVPDNPVGKTSLGIDAGIESFIATSTGKLIKSPKFLLSKQRELKLLQRRFKHKTKGSSNWLKLQNKIARLHETIANTRRDWHFKLAHKLCDLADNIFVEDINFISWSRGIVRKQSLDSGIGQFINQILPFVCWKRGKYYAKVDKDYTSQECPLCGYIQRKKLSERIHNCSHCGYQINRDIAAAKIIRKRELKAVGHTVNENACGDGLAGVEFNLFDLLPS

SEQ ID NO: 10530 - protein, 373 aa, Paenibacillus sp.
MIIKKAYKFRLYPNKRQATLINKTIGCSRFVFNHFLSLWNSTYKETGKGLTYGSCSAQLPALKKELVWLKEVDSIAVQSSVRNLADAYKRFFNKQNDAPRFKLKKNHVQSYTTKQTNENIAVVGNHIKLPKLGLVRFAKSREVNGRILNATVRCSSSGKYFVSLLVETEVQELPKTNSSIGIDVGLKQFATLSDGTTYENPRFFRVLEEKLAKAQRILSRRTKGSSNWNKQRVKVARIHDYIANARKDYLDNISTEIIKNHDVIGIEDLQVSNMLKNDKLAKAISEVSWSQFRAMLEYKAKWYGKQVIAVSKTFASSQLCSCCGYQNKDVKNLNLREWKCPSCAAHHNRDINASINLKNEAIRLLTAGTAEIA

SEQ ID NO: 10531 - protein, 366 aa, unknown
  TnpB Polypeptide
VKEEGIRVETHQIKEGHPFYNWAVQECSLNTSLYNRTLYILRQAFTGKHDNIPEYADLIKKERFISKFDLISRMLRLNDSDFRALLKAQEAVQTVKKCAESFSTWFKSLNAYKKNPKKFTGKPRMPRYKKEANSDKLFSVAFTYMDARIQKDGTINIRRDFKLPIKTKLATLQELRLVPKQGCIEIQIFYKANFLKTDLDYNKAAGIDIGIDNLMAVTSNEGSISHLVNGRPLKAINQFYNKTKAEIVSKLAERNADTSKRLRKLTLRRNNKIKDYMHKASRSVVDLMAENKIGNCFIGHNDGWKQEVNIGKRNNQNFVSIPHKAMFNPIKIDIEKKHPMSVSDQGVEGEGFTHCLSNPNTLSLTA

SEQ ID NO: 10532 - protein, 457 aa, unknown
  TnpB Polypeptide
MSKGWKKNDKFNERGYIAIRYRAYPTNEQDQKAVQIDGCCRQVKNLAKEQRDLAYRLTKKSPSYTAQTKDLKELRDDPDLAPWLSDAPSQILQQALRDRDTGYQRFFSGKARYPTWAKKSSRISFRDPQDVKVKRSSRRWGDVKIQGMGWIKIRLHRPLVGNRVCSATYTKEPDGKTFISVICERHKRQPTEPLDKENAILGVDRGVAVAIATSDGDLINRENWTPKERERLIRMERTRERKKSTRVQVKGEISHKSKRQVKTELAIAALHSRVRRRRNDFVEQVSCDLAKNHATVVFEDLHLAAMTHSAKGTIDNPGKNVKQKAGLNRVMLDKSLGKMLTRTDDKVHNHGHKVLCVPAPGTSITCPKCGYRDADNRTSRSVFICRHCGHTAHADINAAINIRERGIELAHAGGTPVAAYQGTNLEPASVGAEPGAVRDGRGSGNKETGYITERVVA

SEQ ID NO: 10533 - protein, 529 aa, unknown
  TnpB Polypeptide
MRTKDQALRVANVTGGTILPNKNNKPTSRVQVTDFEAYRSDIENISVLFSLFTDDGNPISSGWTLRGTVFEVEWPREQERRSLIWSHFGARRFAKNWALARIKNDLDKKKNDPAHVSIPWTLQELRRVWNQEKATVAPWWAINSKESYSAGIADMVNGLKNWSDAKKGKQRGRRIGFPRFETKHKSHNRIRFSTGTMRLESDHRHITIPVIGSLRSKENTRRLERHLTKGNAHILSMTLSERWGRLFISVQYAARTKIISPTKAISINSDSKAGIDLGMRTLATIADNDNQIFKIDNPAPLKNTLAERRRESRKLSRRIPGSRGHRAARTKLARLDRKAVYIRRETYHQFTRQLVNTYGEIHIEDLNIAAMKRSMGRRAFRRSVSDTALGMFRPMLAYKAEDVGTNVVLVDRFFPSSQIHHECGGLLTGKHKLDEKLACQSCNTEVNRDENAAKNIRDWPDSNASSGLVEASVLPVPRPPSGGTDGRSDDRLTGHRTRLRKTLSNQGRGPERREPKSENQTEEPREGCV

SEQ ID NO: 10534 - protein, 256 aa, Okeania sp.
MPSNLQFSDIKELRILPRNRCFYLEFVYQKEIVIKHKLNPKNVLGVDPGINNWLSCVSNVGTSLIIDGRKVKSLNQWYNKRVSTLKEGKPQGYWDEQLAQITEKRNRQMRDAVNKAARLVINHCIENQIGTVVFGWNQGQRQESRLGKTTQSFVQIPTAKLKERVKQLCLEYGIKFVETEESYTSKASFLGDDVLPIPTFCGLSIDRDLNASINLRKRVLIGEVSSECKTHSRNAVGLTVDACGRSAADSSGGSRK

SEQ ID NO: 10535 - protein, 472 aa, Caldilineales sp.
MSPKVTRVLHSQGLNRDKYDRLSRIAVLCGQVRADAWQRCSGVSTVLQSPYEIRDAWMAEGYDWHRLPARLGKATLADALGDIAAAREAAKVPVKKALRHRTRGDKAERERLYSLLKQNRWTEDPFLHRQMRQQWRGGRSHVKNQIVADSGSYTTKVWHGWAWVYLQGLERGQRVAIPLKGTHLPSGTLRILLRDNGQVEVHYAVDEAQVCSTRPCGASTVGVDKGYTEAYADSDGDRHGEGLGDLLFAESDRRKVKGQQRNRLRDIEQKHRAKGNYCKADNIRQNNLGHQKWDRRRTLHHKQVRDHLCHAAHAVVDKAGTLACEDLSASMKSAKYRHRDTNRRLNGWVKGVMADTLTSISRRRGSALALVNPAYTSQIDSRTGLLQGTRQWDRFYCSDGVVLDADVNAACNILARLYDEEITLYTPYRDVHALLAERTRTAVGTAPPGLELWGLATLSPSTESELPRTHKV

SEQ ID NO: 10536 - protein, 553 aa, Streptacidiphilus sp.
VAVLVNEAESPTPPGDKPAERVIPPQVAARLAAQQRKLDANLVDMTAVVPVTLSWADHLRAHQACHAAAGLWNRSVDWLHEQWRGQKSPKKDDIRRFVTALPADARPFHAHTAQAIAHDLHDAVVTMRANKKAGRKACAPWRERKYRPLSFTKDYGWRITPEARLGLSLGRGRDRILVPLPEVVSRDGVPVAPKFWGEMRLCWSVTARRWSLHIAYSTPSRALPAPAEDRPTVTVAIDEGIINPMTLAARMPDGTTRVLVVNGRQGRAAKQWRNKQTARLQQKLSRCKEGSRRHRKLMAAKKKLQAKTDRRLHDFDHQVTVRAERFTREVHAAWTEHHQAAAQTGGTAAPVVGVRLVAGDVRGIERNTNKKRRASRSTRQQLSQWSRGRQEQQLAYKTGLTIEHISEAYSSQTCPKCLRRWKPRGRQYICKNPECGFRCHRDAVGSVNIETLAVNEGQFLPLTDLRIEVKYRRPQAGWSPLQRSLHSWHQQALGQASVCRERREGRRSARNRATCRTRPADDAVVPRPRDEVGTIQEAATTLAGAGRTAVHAP

SEQ ID NO: 10537 - protein, 368 aa, unknown
  TnpB Polypeptide
MILSKKIRCLPTPEQLIKFKKSTGTARFVYNLMLSENKKAYNNYLKSNIKNKSPFISGYDFGKYITKLKKLPEYSWLSEVSSKVAKQACLDCDKAFERFFKKLSNFPKFKKKGIKDSFYVRYDSIKVTQRGFKCEKLGEIKTSEPMPKTDKYYNSRIVYDGKYWYITFGIDVPEKINNDNSGKTLGVDLGIKSFVTVSDGTVIPNINKSKKPKSVYKKIKYFQRKLARCKKRSKNRIKVIKKLQLLHRKLRCIRQNHIHQATTMLVKTKPAKIVIECLNVLGMLKNRKLSRAISEAGFYEFARQIEYKCKLYGIDFVKADKFFPSSKLCSNCGCKKDKLKLSERTYHCEHCGNVIDRDLNAAINLSYL

SEQ ID NO: 10538 - protein, 376 aa, unknown
  TnpB Polypeptide
VLCNIAFKFRVYPTKEQQILINKTFGCCRFVYNYFLTKRRDAWVNNKQSINYEQTSVMLTKLKNNKQYKWLKDVDCTSLQNSLKDLDRAYKNFFEKRAKYPRFKLKRVHAQSYRTRNNNGDTTICIIGDKIKLPKIGLVRAKIHRNVVGRILNATISRTASDKYFVSLCVEVDKSTLMHPNKGGIIGIDVGLSALYTDSNGKKVGNLRAFKRRARRLKLTQQRLSRKKKGSKNYKKQRKKVAKVHEKIANTRKDYIHKQSLILVHENQIIAIETLRVKNMVKNRKLAKAIHDACWAELFRQLQYKAKFTGTKVLQVDPFYPSSQICSSCEHRNHDVKNLGIRMWICPNCGAVHDRDINAAKNILRQALKEIMAQYQ

SEQ ID NO: 10539 - protein, 509 aa, Deltaproteobacteria sp.
MIKAQRTTSKYLNKSKFEDVKSILKQIAAIKNTLSLHIFNNKALLLNTDGINKLKSDYKIVKDGYISSWNIQREMQMLIDKYLTTLKKITQNRRIRIQSKMIIVKYKVNTKFYKKGETKEFEIKFKSTKLTGLIKYLAYLDFNKPLELQILNQDVLSVFEYFKTKPYFDRILNLSKQIQSNILSKVKLIEIPEYSSVMLSNKPNINVAHIFIDDTNKLYKYWFNFKMKGKKYLRLPVQINNKYHKIKDWIGKEFVLNLSLKQNKINISATIEEPEPVFKPFSKAEGLDINVKHNFAILSDGAYFDYDRDLVKGIANELLILDKIGAQNLNDKQLRKLQKLYRKLQWYIGLEIHNILNYCEENNITDLVVEDLLFRDKLGVINEEFNVKYGRLLKLLRLSDVKNILKRQAEKRGIKVHITPSQYSSITCDCGSIDKVNRQTQEVFECKHCGHKENADLHSSKMLKNRFLSNVLRERLHNLDNFGRLIPKKLSKYAIKLILEKRFELICSS

SEQ ID NO: 10540 - protein, 429 aa, unknown
  TnpB Polypeptide
MQLVEQHVIDKSDPRYNVIDEAAFKSKNLYNAALYEIRQAFINHGVYLNYNEVQKRMQSHEAYQALPAKVSQQILMVLDRNWKSFFEALATYKEDPSKFFGRPKLPRYKHKTEGRNLLVYTIQAISAKGLQCGIIKPSMLAIEVQTKHKQVNQVRIVPCKGFYVVEVVYEKAVKQAQVNPAYYAGIDIGMNNLIALTSNKPHFQSMLVNGRPVKSVNQFYNKRRADLQSKLDHTGMTKRMERMTNKRNRRINHYMHTVSKRVIDVLVQEGIGTLVIGKNDGWKQEANMSKRNNQNFVQIPHARLIAMLTYKAELVGIRVKVTEESYTSKASLLDLDPLPIRDLNNDTKHTFSGKRVKRGLYRASDGRSINADINGAGNIIRKVAPNAFGQRAVEDGKAVLASLVVHPVRIVVPLTKPKSKHGEVKASGQ

SEQ ID NO: 10541 - protein, 506 aa, Oligoflexia sp.
MESTFEASRQLYNGCLGEGKRRLSLLRQSKDYQKARSLKKEDPNRKKLFKQAKDQYQFNEYSLHAYAGELKNSWIGEHIGINLAQKLATRAYAALEKLLYRKAKRVRFKTKNQLDSIEEKTNTTGIMWKEMGVKFQDHFIPAIVDPSDPVIVYALSKRIKYCRLVHRRVRGQTLYYIQLICEGTPLSLSERKSLKIKSGKVILPENHGTTGLDLGPSTVAIVGEKSAGLHQFCDELKDKEVELRKLQRKLDRQRRANNPKNFEKNGRVKSGPKKWVSSSYQRHTQTKAAELGRTNAAHRKSLHGKLINENIRLDSEICLEKLSYRSFQKNFGKSVGNRAPGMFIERLKRKAENACGSVIEFSTFKTRLSQTCICGKREKKPLSQRIHQCGCGVKAQRDLFSAYLARFVQDDRLDVSAAKESWTGAETLLRTAFEWKCQTASRGTCPSSFGISKEILEKSGSSAQEGTECTLRKPNDKTWNAVKLGLTPGMRVQESQMEFLFRTPLL

SEQ ID NO: 10542 - protein, 381 aa, unknown
  TnpB Polypeptide
VNLGAVDKQYAAIENNPFVDGEIILRMVIQGAWYRLIFGFDNERFTEGKVTLPLIKVQDGQPVFIFTVVTGNPVVQFSGDYTIGVDVGINNYATVVVRDTKTGQMVHETALSQRVHSLWNSVRASEQQVRDLRKKADGLLSRRQERMAALDEAQLHREAASRKKRELAILAAQEIAYLSHVWENAVVAVEDLSWISNTMQNGRWNRGALVQWLTHYVSQNGGWVVSVNPANTSQQCHTCGSRVTHPTHELSVCAEHGVMNRDVNAAANIAARATPRVVKARVTRAKNRKLRPQTVLRTPPARTSLKYPGRDRTKSKPTPKRKKRRRVSREVILPSCPARVQALCLEASVLADQSACSALGTSQAALKQGNTAYKSRLCSLI

SEQ ID NO: 10543 - protein, 349 aa, unknown
  TnpB Polypeptide
MLEAVKAEYEASGKFLWRYDLSARFKGRGGEHVPQSTVQTLADRLHKALKAMLDRKELGLRGGFPRFKGYLNWHSFQLRQWGKSKDAWIDGRHLRVPGKLGTAIKLKQHRPLGGTPKTAYIVRRVDKWFVVIACEVEPQDVPPREPNPVGIDVGLKEFLTDSDGNTVANPKHFRQSERKLRTQQRRASRRKKGSRRRRKATIQIAKTYIKVNRQRRDFHFKTAKQYVDRHDTIVVEDLNVSGMVRNHHLAKSITDAAWSQFLSILTDKAESAGGQVIEVPPHYTSQKCSKCGELVPKSLSVRTHVCSHCGYVADRDHNAARNILQAGLRKIPLGQSGQALTYPVGDCVA

SEQ ID NO: 10544 - protein, 381 aa, unknown
  TnpB Polypeptide
MKSIVTIKLKIPYNKSLVDTMREYSDCINYISNQGFKSNVNNRYKLHHLTYYKARNKFKLPSQFIINANRVASQTLKSINTNEGSKPIFKEFMPLDFDRRTLTFSFDKVRVTTINGRIDIPIEIPKYYWKYLDWSYQTMQVNIDKFNRMFLHITFSRDIATPKNSDRFQGIDVGISNIAVTSNKQFFNSKRTKYIKSKFRYLRSRLQSKGTPSSRKLLKKISGREKRFMRQCNHEISKAIVSSCNIGDNIVMENIKGIRGCRVSKKQRYWLNNWSFYQLRQFIKYKARLKGCKVILVNPQNTSKRCSRCGSLYTIRKSSDFHCLNCSYHLNADLNASLNLKWLGKSLITKADVTQLHIPNVDSKAIFSGTADEFRDKSPHL

SEQ ID NO: 10545 - protein, 377 aa, Mycobacterium sp.
LLAGRLVGLQWRAGLIIAIAAPAQTGRRGKEQQAEIAEIEALIAAGKVLSTRIVRTVINGRDTYRMQLVCDGHPTRRRPVGEGRVSFDLGPSQIAVAVRGVDGSWSGWVEPLADAIRLDTMRLRRTQRHLDRQHRAGSPDCFNRDGSHTTGRCVWQRSSAAQQTTIRVAELHRRLAEHRKTLHAGLSNRLLAHGADIACERLNYVAWQKNFPRSVRDRAPGLLVEVMRRKAESAGGGGRLYEYSPYTTALSQTCLCGAKKKKPLSQRVHRCGCGIKEDRDLFSAFLGLHVRQEADGLDRLDLESANHGWLIHHHDVDGRRAPAAAAPKRRGRMHPPSRRSVARIKARRKAKTMMRQSRSTRTFPAGEPTALPAQQAA

SEQ ID NO: 10546 - protein, 250 aa, Mycobacterium sp.
AGRLVGLQWRAGLIIAIAAPAQTGRRGKEQQAEIAEIEALIAAGKVLSTRIVRTVINGRDTYRMQLVCDGHPTRRRPVGEGRVSFDLGPSQIAVAVRGVDGSWSGWVEPLADAIRLDTMRLRRTQRHLDRQHRAGSPDCFNRDGSHTTGRCVWQRSSAAQQTTIRVAELHRRLAEHRKTLHAGLSNRLLAHGADIACERLNYVAWQKNFPRSVRDRAPGLLVEVMRRKAESAGGGGRLYEYSPYTTALSQ

SEQ ID NO: 10547 - protein, 364 aa, unknown
  TnpB Polypeptide
LNKSFKVRIYPTEEQRVLLEKTFGANRFVYNYFLNLKSKLYEFYKINLSYNNTSKVLTELKRQKTWLKDVDSKSLIYTLRDLESAYQNFFNGRSKYPNFKRKDDKNSYRTNGSTLRVDNSFVNVPKVGLLRYKDTYKLEECNILKVYNVTISKTSSGKYYASISTEVYIPCFERTNQNIGIDLGLKDFAIFSSGIKIKNPRILKSLEVKYRRLSKSVSRKVRGSANYQKAKLKLSRFHEHVANIRKDFLHKLSTNVVKTYDIICIENLNIKGFMKNHKLAKSFQDVSLYEFIRQLEYKAKWYGKTISKVDRFYPSSQLCSNCGYKNSDVKKLSIREWTCPSCGIHHDRDINSAINILNEGLSLL

SEQ ID NO: 10548 - protein, 410 aa, unknown
  TnpB Polypeptide
LEEKLNSNDNKIYRSVKIRLLPTKEQEVLFWKSVGVARWSYNYFLSESYRVYQDWLEDNSKPKYISEMDVRKYINNVLKKTTHTWLKEVGSNVMKQGVKDANIALQNFFKHGKSYPKFKSKKRSKPSFYVNYETLKRTPNGLRGEKIGVVKTRESLPKIGTNQKYHNSRITYDGKFWYLSVGYEVNRLDVKLSDNRLGIDLGIKELAVVSNQDGTMIKKYHNINKTHEVVRLERKLKREQRKFSRKILLNTSHCNNKNRPKYKKELDLCKNIQKQRSIIQRLYRRLLNIRTNYLHQTTTEIVKTKPFQIVLEDLNISGMMKNRHLSKALMCQKLYEFRRHIEYKSELYGIDVVIADRFYPSSKTCHKCGHVNKGLKLSDRIYRCDCCGNVIDRDINASINLANYNIDNIT

SEQ ID NO: 10549 - protein, 306 aa, unknown
  TnpB Polypeptide
LRKQFNAIKRKQFPWTGEVSKCVVQEAIIDLGIAFRNYKSASHKGRYPTFKRKSKSTPSFCAANEVGTFRTGGKRIKLPVIGWIKTREAVRFTGPLKRATVSKTAGRWFVSVLVETDDVKPIARPEAPRVVGIDLGVTTLAMLSTGEAVEGPKAHKAALSRLRRSNKALARKVRGSANFRKAKARLARLHARVANIRRDAHHKLTHRLVHQFDRIGIEDLHVKGMLANGKLARSISDAGFGEFRRMLEYKAKFYGATVIVADRFSPSSKTCSECGVVAAQMPLSVRVWLRQLRRDALPRLERGEEP

SEQ ID NO: 10550 - protein, 542 aa, Streptomyces sp.
MRGLREIAASFVVPGPSGVAVRTRIKQLTPADEEVLRLVGAHLGALAGRDLKARCRDGLEHEAEAWAVRKRELTPQSSARWAGSITKATHDQWALARRGALAHLQSLEAGVRTIRHRLSLPVGSKGAKRAPGGYRSRREWHAKARRLRVLEDRLERERADWEAGRVQVVRGGKRLARTRHHLPCAQLTEGGWRERWEAARWFLQADGESGKRYGNETIRISPSGEVSIRLPAPLRHLANAPHGRYVLTGRVRFAHRGQEWADRIEANRAVAYRIHYDTDRARWYVTASWQIPVSPTVPMAAALAHGVIGVDMNADHLAAWRLDTRGNPVGDPRRFFYDLSGTADHRDAQVRHALTRLLHWATSCGVKAIAVEDLDFTGEKTREKHGQKKRFRQLISGMPTSRLRTRLTSMADATGITVIAVDPAYTSRWGAQHWQKPLTSTTRTTTRHDAASIAIGRRAQGYPIRRRTAPPRTHQSDGCGHRTLQTGPDSPGREGPRPRIPGPRTRSVPPDTERTRATRKPNTVRGARSEQEWVQDSLLLTE

SEQ ID NO: 10551 - protein, 231 aa, unknown
  TnpB Polypeptide
VNLHRPVEGTIKTVTLRRSATGKWFVCFSVEKEPQHRADVPDAAVGIDVGLEKFATLSTGEEIPNPRFFRRDEKDLARAQRKVSKEEKGTPARAKRRKVVARIHERIANRRKNVAHQISRKLVNTFGTIVFEDLSITRMMKNHSLAKSIADAAWNQLITDTQYKAAEAGAVCMQIDPRGTSQRCSRCKTTVKKDLSVRVHRCPVCQLEIDRDLNAAINILAVGLHSLGVSP

SEQ ID NO: 10552 - protein, 369 aa, Hylemonella sp.
  misc_feature (297)..(302): Xaa can be any naturally occurring amino acid
MARAPKPTFITELPLVASLTHEAVMVDRFEAARRLNNAVLGDGLKALALMRDSKAYQAACLMPKGKDRSEAFKACNQKYGFTEYALQALATAHKNAAGFEARLGATETQKIATRVFAALQEYAFGKRGRPRFKGKNRPLHSMEGKSNAAGPRWHADTATVSWGKGFVMPVRMPTKSKDPYLHACLQAKTKYCRIVWRMERSKRRWFVQLVQDGVAPAKYEFLSSGQVVGLDIGPSTVAIVGDEAVALEKFAPSVEQPWKAMRVLQRAQDRSRRAMNPDNYNADGTAKKGAKRWGKSXXXXXXTTCAGNTSSASWSVALPLHASAITVSWPTRYWVLAIWSRSRSCPTRDCRRILVEAPKYVRQGCLSRC

SEQ ID NO: 10553 - protein, 507 aa, Solobacterium sp.
  misc_feature (56)..(113): Xaa can be any naturally occurring amino acid
  misc_feature (238)..(288): Xaa can be any naturally occurring amino acid
  misc_feature (426)..(452): Xaa can be any naturally occurring amino acid
MCYNNNMKKMSDYMFHIGLQMRVYPSDRQKAMIRMNGGASRFVYNRLVAVHNEMFXXXXXXXXXXXXXXXXXXXXXXXXXXXXXXXXXXXXXXXXXXXXXXXXXXXXXXXXXXQFRKVKGTSIPTFHKFDNTYCYQTSNHYAGKKLNTIPHVVGLYEGSVRFTDRNHLVLPMLGTIRMKGSRKLIDALLNRVAETRIGTVAIRMDACGDCYISLALASDEPFHTAYASTGRAAGMDLXXXXXXXXXXXXXXXXXXXXXXXXXXXXXXXXXXXXXXXXXXXXXXXXXXXNYQEARLRLAKCHRHVANQRLDFIRCTADKEVKSHDYLFAEDLKVRNLKKNHKLAKAISDSGWRTFLTELQNTASKRGKICLLVNPRNTTQTCSSCGYVMSDDNRIVLGQEEWVCPMCGSHHVRDHNAAINIKNAGLXXXXXXXXXXXXXXXXXXXXXXXXXXXLIVWQLTMITALSLADLHLPAAADKRVRCIRVSWSASAHAMHVLMFLQACGFSRG

SEQ ID NO: 10554 - protein, 428 aa, Prochloron sp.
VKKNDISRNFCWGCCILYNNARSPLMITLEFKAYGKKQQYLAIDEAIRTARFIRNSCIRYWMDNKGINKYELSKYSKVLADQFPFALQLNSTARQASSERAWSSISRFFDNCKKKTPGKKGYPKFQKRGRSVEYKQSGWKLSPDKKSITFTDKKGIGKLKLKGTWDLWRFAQKQIKRVRIVRRADGYYVQFCVAVDIKEELEPTGNKVGLDVGLKDFYTDSDGKTEPNPRFYRTGSERLKFYQRRVSRKTKGSSNRKKAVKKLGKTHLKISRQREEHAKRLARCVIRSNDLVAYEDLKVRNLVKNHCLAKSINDAGWYQFREWIEHFGQKFGRVTVAVNPAYTSQKCSNCGEIVRKSLSTRTHVCKCGCKLDRDHNAAINILKRALGTVGHTGTLVLDQNACGELSSTRTGSGLVGQDSSVKQESPSM

SEQ ID NO: 10555 - protein, 544 aa, Streptomyces sp.
VVVGGVREVAASFVVAGPSGVAVRGRLKHLTGQDELVLRAVGAYQGGLASRDLKARCADGLDHDAKSWAVRKRGLTGLSSSRIAGAITKASHDQWALARRCLAAHIRSLEAGITTLRHRLSLPVGSKGTKRAAGGYRSRGEWFQKSRRLKALEDRLAAAVADWRSGRVRVVRGGKRLLNTRHHLAEAGLSEAEWRERWEVERWFLAADGESGKRYGNETIRVTPDGRVSIKLPAPLAHLANTAHGRYTLTTPVAFAHRGAEWADRVEGNRAVAYRIHYDTGRGRWYLTASWQKPVVQTVPLEAARAGGVIGVDTNAGHFAAYRLDPHGNPVGNPRRFPYDLSGSAAHRDAQVRHALTRLLHWAKQTGVTAIAIEDLDFGAEETREKHGRRKRFRQLISGMPTGKLKARLVSMATEHGLAIIAVDPAYTSMWGGQHWQKPLTTSHRKMSRHDAAGIAIGRRALGHPIRRRTTPPRAHQSDAHGHRTVQAAPSAPGREGPRPHIPGPRTRSVPPDAARTRATRTPKTVRDVRSEQEWVQDPLLLAE

SEQ ID NO: 10556 - protein, 363 aa, unknown
  TnpB Polypeptide
VGEKEYVYTTIKPGWKVKGGTYTDRNQLLQAISTLGEPYSVELKLKNSVVYAYFTVEEIFPKSEITKSNGVIGIDTNAYPKHIAWAETDSSGQLLEYGRIPMPELESGSSSKREYYRWQYAHMIVQMAKEKQKAIVIESLSIKDRGRRGDFSGRRSRRIRHYFGYRLLLEKVKLLAKREGIEVIEVNPAYTSVIGMLKYAPQFMVSKDVAAAYVIARRGLGLRERIPHKYMMFLSRLDVNELEELKEYVRKVVKNTYVRKKQLREIGRVIKFLQSLESEAERLSVPLDGTSTGSRGENHNLWRVLKVAVVTPLSPDRVLRDMSVLKSLLVSGQVGKTYKGASSCFLGQGLWLSQKPPAGAGKA

SEQ ID NO: 10557 - protein, 210 aa, Okeania sp.
VREKVDLLNLQIASFLATLRDLKTGSHAQTARFTKGGFKVGQHKVYLAKIGKLKIIWSRELPTTPSSVTLIKDSANRYFLSFVVEIQPEILPKIDSSVGIDLGIKTFATLSDGTKIDAPQPLKKRISKYRKLTKSLSKKTFGSKRYEKARLRIAKFQAKLKDTRTDFMHKLSTEIIRDNQTIVLEDLNVSGMVKNRKLSRAISDARLATI

SEQ ID NO: 10558 - protein, 422 aa, Marinobacter sp.
MIIRQGFKFRLEASDTQGARLRVLCGHARFVWNQALAKCHEAADAEGEYVPRYETMAKWVTAWKREPDTEWLKEAYTDNLQQKLKDLDTGWQRYFKKVEGAQRPRFKKKGKSRDSVRFVNFQKYCKIDNRRVKLPAGLGWVRFRKSREIVGAIKNCTVGFEGGRWFISFQTEREVSEPAHPSASMIGVDMGVARFLTLSDGTFIEPVSAFKVNQGNLARAQRALARKVKFSANWQKQKAKINRLHSRIANLRRDTLHKASTQISNNHAMIVIEDLKVGNMSRSAKGDVDNPGVNVKAKSGLNRSILDQGWYEFRRQLEYKQAFRGGGVLAVPAHHTSQTCPECQHVSPDNRTSQARFECVKCGFKENADLVGAINIQARGHRVLACGEFGLPDSVKQEPVRNREEVAPSAAHAALGIPHRRC

SEQ ID NO: 10559 - protein, 427 aa, Escheichia sp.
MHQENTMLPRRISVSLFIDQSIIWPVKRLQAFKFQLRPGGQQEREMRRFAGACRFVFNHALALQNENHEAGNKYIPYGKMASWLVEWKNATETQWLKDSPSQPLQQSLKDLERAYKNFFRKRAAFPRFKKRGQNDAFRYPQGVKLDQENSRIFLPKLGWMRYRNSRQVTGVVKNVTVSQSCGKWYISIQTESEVSTPVHPSASMIGLDAGVAKLATLSDGTVFGPVNSFQKNQKTLARLQRQLSRKVKFSNNWQKQKRKIQRLHSRIANIRRDYLHKVTTTVSKNHAMIVIEDLKVSNMSKSAAGTVSQPGRNVRAKSGLNRSILDQGWYEMRRQLEYKQLWSGGQVLAVPPAYTSQRCACCGHTAKENRLSQSQFRCQVCGYTANADVNGARNILAAGHAVLACGEMVQSGRSLKQEPTEMIQATA

SEQ ID NO: 10560 - protein, 336 aa, unknown
  TnpB Polypeptide
MKLYIKAVNDIIQVAFTGTNIKKYSSKDIKANLPSAVRAQVARDARSVLAKYRKNCHKAVLHNRKHPEKIHTRNAPVLKKPVCFWNNQNFKIQGSTLRFPLMESGKSTMQSVEMMLTKRQEELFKSKLGTLRIVEKRNELYAQITYETNIPEPETGAAMGVDLGLKVPAVTVTDTGKTRFFGNGRKNKYLKRFYRYQRKKLQSKKKMSVVKRIEHKETRVFRDIDHKVSRKIVDFAVENNVKVIKLERLTNIRSTARTSRKNERNLHTWSFYRLAEYIEYKARLLGIQVVYVNPKDTSKRCPSCGKLNMALDRNYQCSCGFHKHRDIVGAYNICYT

SEQ ID NO: 10561 - protein, 640 aa, unknown
  TnpB Polypeptide
MKEPPDPNLISSNYRTIKVPLTKVLKHFDIIQPKFEESVLRVNQFATIGYEFLKLYVLHLFENKVELPKINKALITKIFNLIGQGSNKGRKCKVSSDTITTFYNDIFSKIYPNKLNSSHLSYVLPILNDEMLRCFETNIKTHFLKYLCKYINVLIRYSLVDAVKMSKLTKLERKVQYQGINKEIRDIKNDIITMKIEKSNEKYHKFIKDTISLFPKDSIKKNNLIYNVKASPQKYILASLQLNKKIEDQGKKCYQVFCQRSNYVPKTITLNTSGLIEVINDTKREIYGIGYSKMNNNAKRYQKQAWREILKLENKQLFNHRDYIFYNQIQTDGISCNLLLIRKDFYNKTYGQKLPEYDEDIEFEIKQLEKLTKDECEKHLSKKLIGIDPGKKDIITMVDEQGNYYSYSNCRRRNDTYSKRSNQIVLAEKSKNDNEIIKMETKLSKFNKRTLSSNRFIDYLQEKQTYTKKLQEFYEKPLFRKLVLRRFCRTKSAEHTMLNEIERKFGKNLLLGLGDWSINSSYQMKGCMPTPNKGISKLLMKRFEVISVDEYKTSKLYNNDLTKELTNIKVKRGKKSKSIHTLLTPTRNPNGVILNRDRNACKNILLIMKEFLHTQTRKAEFSRTSQAKACFGLEKQIVDS

SEQ ID NO: 10562 - protein, 357 aa, unknown
  TnpB Polypeptide
MISMLLVYRYRVKSLNGLLNKQARAVNFVFNYCNDRQKDALRFGRKWLRGFDLNKLTTGSSKELGIHSGTINAVCEQYAQSRSQKKRPYLRYRGRKNLGWVPLKGRELKPTPAGFHFNGHEFKVFKSRPLPEGACIKDGTNFSQDSRGNWFLNVCIEVSPVAARPIQSGIGIDLGLVDFAVLSNGEKIAAPALYRDAECALAQAQRAHKQRRVKAIQARTANRRADFLHKLSTRIVREFDLIAVGDVSAGGLARTNLAKSVMDASWSSFRTQLAYKAVKHGAWFEEVNECYTTQTCSDCGAKPDSRPRGIAGLGIRKWVCSECGCEHDRDVNAAKNILSKFVSGSGHRTPVEGILAL

SEQ ID NO: 10563 - protein, 431 aa, unknown
  TnpB Polypeptide
MMVNLDEYERKVEADIRKLKTRLALVTEARKRKAKKLENLEKLPPERIVFGGKKLYSEKDVVEVTKSDDSSNDKNQKTSKKASNKWRQEFFEKRHQSMSLPGRHTSKYGNFLCKYDGKDLSVTCIDGSVTIFHDFKLPRYNEAFQNNFTCKPEDRQSLCYNFTVKRDRKNRKYIIVSVTMKLQAYENSYYGNGAISMDINYDHFALAEINETGKLLDQKLIRFDLVKKSTGQITNILGAAVKEVFNWCAEKDKRLIVEDIDLTIKLASRKYGNRKGNHHMTLFAYQRIASSIENQSLRREIAFCKIDPAYTSQMGKFLFMRRYGMSIHQAAAYTIGLVGMGLYDKLAPDLRMLNLLKTKECIVTEFSQETYKTIWARITKTFSGISKHFFYRSIPYEVLEERKRPSLSTLAAEMKVRYMPKLTNYKSCEQI

SEQ ID NO: 10564 - protein, 363 aa, Paraburkholderia sp.
VRGAEHRNRHHPQGRPAVVRGRTRKGRARNHYGILGPLVRLAQQKEQAASRGPEGSRRVIVRVHKIRLDPTAEQARYFARACGVARFAYNWALAEWKRRHEAGGKPNEAAMRKQLNAIKAAEFPWMAEVTKCAPQVAIKNVGLAFDHFFRRLKLGQKPGYPRFKRKGIRDSFRADNGPQNASSHAVQVVGSTVKLPRCGVVRMREELRFAGRVLGATVSRMADGWYVALSVETEERLRAVEDRGAVGVDLGIKTLATFSDGGGAPAQKPHRAEHKRMARLSRSLSRKQKGSANRAKAKAKLARLHLRIANVRKDALQADDETRSELLDHRHRGFKRLGHAEERQTRSCHRRCRILRVPPSTGI

SEQ ID NO: 10565 - protein, 201 aa, Paraburkholderia sp.
MAAAPPRKSRTVPSISAWRACHARCRANRREVQTGPKRKPSWPGCTCVSQTSARMLCKLTTKLAANYSTIGIEDLNVSGMLKNGRLARAIADAGFFEFRRQLEYKAAMTGAQVIVIDRFFPSSKTCSACGAIHAITLADRVIECGCGLKMDRDLNAAINIRRQALAQQSVERKALADASATVKPASVKQKKSGLHSNVQTT

SEQ ID NO: 10566 - protein, 451 aa, Actinomadura sp.
MVTHAYRFALDPTPRQARALRSHAGAARFAWNWGLAACRDRYSGEGKWWSGAELHRLWNTVKKTDPALAWWGENSKCVYQEAFRDLERALREFVRFRKGLRKGGRLGFPRFKKRGRCRDSFRFGSGVMRCAGRTVTLPRLGTIATHESTRKLARRLENGTARILSATVSRTAHRWFVSFTVQVDRHVPERHVRPGSAVGVDLGVATLLTAVDDRGGVTEIAGPKALRAGLRKLQRLSKAHSRTQHGSANRAKAVRRLARHHARVADIRSDALHKATTHLAARYETVVVEDLNVTGMLANRRLARAVSDQGFGAARRMLEYKTRWNGGRLVVADRWFPSSKTCSGCGGRKPSLFLSERTYRCEACGLVLGRDVNAAINLRDLAASGAESQNACGGDVRPGPAGRPPAKQEPGTAPRVDQTGTAAAQATAVPCGRCSHPPHADDGKALVKPAV

SEQ ID NO: 10567 - protein, 333 aa, unknown
  TnpB Polypeptide
ILATHQAAAALDGVEAIEDLDEHYTTSRPEFTSNTVKYDRRTMTLFDDGSVSLSTVDGRIRCDLNLPDEEDGYQHEYLTDDEWEVTESTLSKRDGDYYLHLGFRKPKPEKQVEKQGDDEDRTVLGVDLGIINIATTSTAHFASGRELRHQHREFERIRGNLQQTGTQSAHRTIQQMSGRESRYLRDQLHQTANQILEEALTHDCEYIAFENLKHIRERAPPVKEFHQWAHRQLVDLVEYKSEAEGISVEFVDPENTSRRCPECGHTSKGNRVRQAEFDCESCGATQNADYVGAKNVGWRYVRRGLQSSWRTGDSQLALKSETVTPNRGFVPSD

SEQ ID NO: 10568 - protein, 341 aa, unknown
  TnpB Polypeptide
VTTHCIVRLVALRGLSAATRAQCQALRAEAGRLWTDLVAMHTQARAQGQWLSASDLEQATKGGQYALHSQSVQALCQKLAANVVTATALRRQELAETGRLQTQYPHHAKASQTVVWKDQALAVLPTGSLRLPSGAERPPLLLPLPAEYQQANLRRAELTWRADHYELCLTLATGEPLPPPLPTGAVAGVDLGEVHIAAVTTTRRHALVVTGRQLRACKQWRNKVHSLLREQLSCCQVGSRRTQRLTKRRAQVSAKVSRQQRDLLHQAARQVVNFCASESVTHIAVGDVRDIQTGVSLGRVTNQKISQWPHGQFARYLSERRRDWACAWSGLTRRTPPEHVV

SEQ ID NO: 10569 - protein, 318 aa, Lactobacillus sp.
MQRELDRLCDYRRYCWNLALETWQDMYEARTLNKDNNPSPNECRVRDELVNNKADWQFTLSARCLQLAVKDLANAWKSFFDKAQLDWGKPHFKSKKAPRQGFKTDRAKVINGKLRLDKPRGIKSWFDIPTYEALRMKQVKIASIFRERGHYYAALSYEEKAGIKVKTGKKTAIDVNVGHFSYTEGRINILPARLQKLYKRIKHYQRILAKKRRVNGKLAGRSNNYVQVRTKLQRDYRRAFNIQNDLLQKFTTELANNYDQIVIEDLNVKQMMMTHVASKGIQRSLFGKFRQILSYKCAWYDKELILADRSYPSTQKMC

SEQ ID NO: 10570 - protein, 289 aa, Microcystis sp.
VITLTYQYKLEVNKKQEREIVHILDVCKSVYNYALSERKDWLNSRKCLADRCSLVSEYIIPADQPYPNYFVQAKNLTEAKKVYPILKTVNAQVLQQVLKTVDKAFDHIKSKGFGFPRFKKKMRSFVFPALSKNFLGDEYLNFPQLGKIRIRKSREYPSGFEPKQARIIQKASGFYVLVSFQSTELVPDMTVGKNCLGIDAGIESFVATSRGDLIKAPRFLLKVQSKLKLLQRRLKHQVKGSNNWLKLQDKIARLHEKVSNTRRDWHFKLAHYLCDLADNIGSSLLVMVR

SEQ ID NO: 10571 - protein, 420 aa, unknown
  TnpB Polypeptide
MESEVNIMKLSFKCYYKFNQLQNNIINELSYHTTKLYNIANYDCRENKYNNFYTMRELYKNNYHKQFLYSQSYQQIFKILDQNWKSYFASIKDYKKNPNKYKGEPKIPKYKNLNNKKNEIVFDKQGIRFKNNYLILSLSKEMQNKFQVQSLNFNINYIKIPNITRIKQIRLAWDNSNKRWYINFIYERNIINIAKNYNNIMSIDLGLNNLATITFGHLTRFYIIDGKYAKSKNSYYNKEIARLTSIIMKQQGDSKYFKRTKKINKLQIKRNNFIKDYIHKASKKIIDLAIINKCKEIIIGDLTGVKQNNTAKSFVQMPQQRLVEKIKYKAELLGIKIIMQNESYTSGCSCLDLEEVSKKDYNKSRRIYRGLFKSNTGILINADVNGSINIMRKRIKCIPRSLEMMMDNGFVDNPIRLRVA

SEQ ID NO: 10572 - protein, 401 aa, Aeromonas sp.
MQRLQAFKYELRPDSQQQRQMRRFAGSCRFVYNKALALQKELLEQGEKRLSYAGLCRQLTAWKGANETGWLADAPSQSLQQALKDLERAYSNFLSKRADFPRFKKKGLCCGFRYPQGCKLDQANNRIFLPKLGWMRYRNSRAVLGDIKNVTVSQASGKWFVSIQTEREVEVPLHQGGDIGIDMGIARFYTLSNGDFKAPLNSFKRHEKALRKAQRAMSRKTKFSANWKKAKAKVQRIHSRIAFCRKDFLHKETTTISKNHALVVVEDLQIRNMSKSAAGTAEAPGRNVRAKSGLNKSILDQGWFEFRRQLDYKTAWQGGHMIAINPKNTSRTCPCCGHVSGDNRQTQSVFLCVKCGFSEHADVIGAINVLRAGHAQLACEVSGAIRPPAAGTHRSELRACA

SEQ ID NO: 10573 - protein, 287 aa, unknown
  TnpB Polypeptide
LKWYGKPRRLEIAYDDVEEVWRGFISVKVERPPVRGGSKLLHIDLGVVNLATVWARELKQPIAFSGRAILSDWWYWMKRIAKEQSKMARINKTETSRRLRKLYRIRQRRFRHAMNAMVKTIVEDAHELGISKIVLGKLKGIRNNGCNSKANAMIHNFWSFEYIIRRFKEKAEEYGIEIELVSEYETSSLCPICKTKGIRRYRGLFYCPNCDKAINADVVGVLNMAKGKTIIPSPSWRDRDNGLVAQPLLLRWNGIMWGPKMAMSIRPMKTLEARISRLQSWRVSIRG

SEQ ID NO: 10574 - protein, 395 aa, Okeania sp.
LITLTYQYKLKPTQHQEAEINHILDVCKSVYNYCLRERKDWLNSRKSPINSCSIVSEYIIPADTPYPNYNHQAKNLTIAKKTNPRLKSVNAQALQQTLKTLDRAFSDLKSQGKGFPRFRKKLRSFIFPVMLKNCLGNNRVKLPQLGWIKIRQSRPYPDVFQAKQARIIKKATGYYLMITFTSSDLVPDNPVGKKSLGIDAGIESFVATSTGKLIKSPKFLLSKLRELKLLQRRLKKKKIGSNNWLKIQNKIARLHEKIANTRRDWHFKIAHQLCDLGDNIFVEDINFKSWSKGIVRKQSLNSGIGQFINEILPFVCWKRGKYYAKVDKNYTSQECPKCGHINKKKLSERKHSCSNCNYQENRDVAAAKVIKNRGLIAVGRTVKEKRTACAEVSSA

SEQ ID NO: 10575 - protein, 416 aa, Okeania sp.
MRTAYQYKLRPNKEQIATIELWLELLRRQYNYRLGERFSWWSENRCPVNACPLVMPIPQLRDNPDYYSQKKDLVNTKDKFREYKLIHSQVCQDCIKRVKLAFDRWFKADKNGQRLGKPRFKGKGRYRSFTYPQIKLNCIEGNQINLPKIGKVKLIQHRPIPEGFQIKTVTISRKADGYYVTLSLEDKSVPALTTKVEPTLKNTLLIDMGLKEFLVTSEGESVPIPQYYRKSQQRLKTKKKRLSRKKKGSKRWLKALLSVAKQHKKVADKRKDFHFKTANELLSKAEVIAHENLNIKGLAKTHLSKSINDAGWGQFLSILTVKAENAGQKTIAVNPKNTSQNCSNCGEKVPKKLNIRTHSCPHCGIAIDRDVNAAINIKNRAVGHSVLKARGVRRGTGTAKREAHTNTARLVWEYVT

SEQ ID NO: 10576 - protein, 408 aa, Streptomyces sp.
VDVSGRQYVDEVSHKQGFRVELAPNDTEAALMGAHCGLSRVVENFCLETVGKKWAQRQAEETYGITGDDLTKVPWSAPALEREWRAAHPKRYPWFSETRMSSRVPKEACRVRAAGFGNYFNSKKYRRKGARVGFPTWRKRKHGSRFRYDADRAKPLGPRVVRLPAIGDVSTREDMSWLVDRLATGQARILGATVRERGGRWWISFQIDIAQDDINKRRQVAADAPTCGIDLGLRTFAVISSSDGSTEEIHAPKPLKAAQRALKRANRTLARTAEGSKNRAKARRRVGLLHLRIADRRRDLLHQTTTRLTRTKSAIAASGRPIAGSPPARHAPAVATSTEPWPWPTAPGNAPSAELCTTGITTRQETSSRRCSPTAVPRAKPSPGSSPERQNASWRPREPALPGVGSGR

SEQ ID NO: 10577 - protein, 205 aa, Tuberibacillus sp.
MTKQNKAFKFRLYPNNEQEKQFAKTFGCVRFVYNKMLAERKETYEKFKDNKEILKKQKFPTPAKYKKEFSFLKEVDSLALANAQINLQKAYKNFFEGRAEFPKFKIEDLNMQGMSQALHFGKSVHDNGWGMFTTFLEYKLKEQGKQLIKIDKWFPSTKKCSCCGKEQDMPLSERVYKCSCGLVLDRDHNSAINIKNEGLRLLTLA

SEQ ID NO: 10578 - protein, 389 aa, Clostridium sp.
MKLLRAYKVEIKPTQEQSIKIHKTIGVSRFIYNFYIAHNKAIYEKENKFISGMQFSKWLNNEYIPNNQDKIWIKEVSSKATKQSIMNGEKAFKKFFKGLSGFPKFKKKKNQDVKAYFPKNNKTDWTIERYRVKIPTLGWMRLKEFGYIPTNVKVKSGTVGYKANRYYVSILVEEMDIVVPNPTNEGIGIDLGLKDFAICSNGDKFKNINKTSRVRKVEKKLKREQRKLSRKYESLKTRNKNIKGGKATRQNIQKQIVKVQKLHEKLTNIRTDYINKTVSEIVKQKPSYITIEDLNISGMMKNKHLAKAVAQQKFYEFRTKLTSKCNQNNIELRVVDRFYPSSKTCSCCGSIKKDLKLSDRVYKCNCGLVIDRDLNASINLANVKKYKIA

SEQ ID NO: 10579 - protein, 373 aa, Clostridium sp.
LKIKEQSEVRELLKAYKFRIYPNKEQRLYLGKTFGCTRFIYNKMLSDRIKLYEENKDLDIKKVKYPTPAQYKKEFTWLKEVDSLALANAQMNLDKAYKNFFRDKSMGFPKFKSKKSNRFSYTTNNQKGTVYIEDRYIKLPKLKTMIKIKQHRKFNGLIKSCTISKTPSNKYYISILVHTENKQLPKVDKKVGIDVGLKEFAITSDGEFFSNPKWLRKSEKRLRKLQKDLSRKQKGGNNRCKSRLKVAKLHEKITNQRKNFLHKLSIKLIRENQSIVIEDLKVKNMLQNHKLAKAISEVSWYEFRTMLEYKADWYGRELIIAPSNYASSQICSNCGYKNKEVKNLELREWVCPKCGIHHDRDINASKNLLKLAI

SEQ ID NO: 10580 - protein, 330 aa, unknown
  TnpB Polypeptide
LRNKHPGGRPAAIRIGDNARPRSVILPGIGPIAVHDDTRRLRRMLANERAKILFATVTHHGGHWWVSLNVEAADVHPAHQHPLRAEADHGGWVGVDRGLSAFLVAATSDGEEVARIGDAPKALRAGMARQRRLSKSLSRKQKGSAHRRQAATKLGRHHHRNTNVRRHFLHQVSNALVKTHDRLVIEDLNVTGMLRNHRLAQAISDAGWAEFARLLRYKQAWRGGDVLVAGRWFPSSKRCPECGTVRGDLNLAERVFTCGCGHSADRDRNAATNLARWGQAHHDPHRSPDPQAGGRATNARRRDGADQHPTCAGETSPDDAGTDIHTAPAA

SEQ ID NO: 10581 - protein, 431 aa, unknown
  TnpB Polypeptide
LQAGEETVLDLVAEVPYALRVVLRGFRYRFYPTPEQEPLLRRTIGCARWVYNHSLGECNNSYAATKKSPTYNKQSAHLTAWKKLPEFAWLNTVSCVPLQQALRHMHGARQRFFKKQARFPRFKKKGDGGSAEFTRSAFTWRDGKLTLAKMDTPLGIRWSRPLPENVDPSTVTVGLDAAGRWHVSLLCEDKVERLKPLPIESAVGLDLGITSLVTFSTGEKVANPRHDDRELGRKRFLSRSLARKKKGSKNRDKARIKLGKLNARVADRRLDNLHKLTTNLVRETQVIAVEGLNVSGMIKNRSLARAISDVGWGELVRQLEYKCEWYGRTLIKVDRWFPSSKTCSCCGYLLDDLPLSVREWQCPECGAEHDRDVNAARNVLAAGLRQLAAGLAVTACGPGVRHRVLRNPVRSGLKQEDLGREPGNPLPQPPG

SEQ ID NO: 10582 - protein, 401 aa, unknown
  TnpB Polypeptide
MIHGHVIALDPTVRQRQAMLRACGVARFTYNWALHEWNRQYRAGQKPSGTKLKKQFNAIKGEAFPWIFESPRDANAGAFSDLDTAFSNYIKSITGKRQGPRVGPPNFKKKGKTRDAFYVANDKFHFLADGKHVHLPVIGSVKTREPLRLHGKILGGRVKRIADRWYLSVQVEGDFRVPNVPEHEILGIDLGLKTAVVPSRGEPLDAPKPLRKALKKLRRANRKLHRRQEGSANRRKAREELAKIHRDVANIRKDFLHKTTTKIARETQAAVIEGMNVAGMLRNHSLARALSDVGMGMFRTLLIQKGPVYGCEVIVADRWFPSSKTCSGCGVVKAELSLGTRTYECEACGLVLDRDRNAALNLEAYPRLSGNSRKATPVDTAASTRRPQRRASVVAEAGAKS

SEQ ID NO: 10583 - protein, 400 aa, unknown
  TnpB Polypeptide
VVRKCKPKKPDAPTVLVVQGKLVLDEAPRDSLLSTMERMNAAANWLAPRAFEHKLADKRRLQRLFYYDMRADFGLPSQMAIRTIAKVCDAYVRDRSICPTFRPRGSVAYDTRLYSFKKESTEITLTTLDGRIRCPILFRDADRERLLSSKYGEADLVFRDNEFYLLVSVSIPYEKPAEPVDFLGVDLGVVNITTDSDGTVFAGDHLNVVRERYANTRSKLQSVGTKSAKRLLKKRRRKEMRFARDTNHRVSKKIVTRAKDTGRGIALEDLTGIRERTTVRKAQRRVRSSWSFAQLRGFVTYKACLAGVALMVVDPRNTSRTCPACGFVSKANRKSQAVFECVWCGHAGHADTIAAQNISRRGLATYSAMSLAAVTRPDASSVGGTYGHLHVVTQVQSLGL

SEQ ID NO: 10584 - protein, 542 aa, unknown
  TnpB Polypeptide
VISPEHVRDLAKVLRPQPSRGHTLERVHELGDRDLRRVVDEQMRVVRLEVGLPKLASEVGADLNPRRSQNLERSLRDRASPVLRHEDQVHGQLVHDVPPLAKVLDLCHPGVSSMSDTDGKTKKLRTSRYRVYPTDEQVARIEAWQDPLRLLWNLGNQQYLFSQERCRYGRKWPHPFEQANQLTELRAEHERLRDVPYDLAARVFVELNLSWQRCWAGLAEQPRFKSKNRGDWTVMCEPNPKVFRAEDDAIVFPKLGRIEAVVHRPLLGKPKTCTITRDIDEWYVSIACEVVRDPDALPPPVPVGAPVGIDRGVVNLLMDSNARPTANARYDDQTRVQVARAQRSAAKKKKGGKNRKKANKVVSRLRRKARRQRDAVLHRESLHYAKNHSVVVIEKLNLPNMTRSASGTVEEPGTNVAQKRGLNRSILGAGLGKFGTYLKYKAKDHGSTVVEVPAAYTSQTCSSCGHVAAESRKTQSEFECVACGYCLHADVNAAKVILSRGTHGGAVCGGSGALGRPKKQKLRVVRRGSRSVSGKAPDFRPG

SEQ ID NO: 10585 - protein, 321 aa, unknown
  TnpB Polypeptide
MWKSFFVAIKDWARHPNKYLGRPKIPKYKAKGGRFVLSLDSNKVKLKNGYVYFAWKPFKKFNNLFRTNAKDRILQCRFIPRCREYIMEIVYEIETPDISKNSDRIAAIDMGVNNFITMVNNIGENPIAVKGGIIKSINQFYNKQKANIQSELKKVNDKEWSKKLQKFTNKRYEMIKYQMHCISKYVVDWCVLYGIDTLVVGYNNEWKQKKQGLQNFTYIPYELFIKMLSYKCENNGIKFIENEESYTSGTSFLDNEDPIKENYRKERRVYRGLFIANCGKKINADVNGAYQIMKKVFPKIFINGIKGAGLHPTIINLACVK

SEQ ID NO: 10586 - protein, 388 aa, unknown
  TnpB Polypeptide
MLTGRKFAAKFRDATAREAYLTWSAGQMFIYNESVLEQRFFDSLSRLVAETERHKQPVRKECRIERPKPDQKYAHFIDKAERPWLSQVPSAIQGIGAFRFCQASRRAAAGLASRPKLRAIKDADRHLLLTRDYFTIEPSARSGWYELRFGSARIPGGTILFKAHREFIVPATVSVTLTSKALFVSMSYKETEEERFPETEQEMIDRLRQYSEEELIACGNGIDRGVVRPVQTSNDPEPYALTKDQLERIRRKERQRKHYQKRMARCEKGSRNRAKMRRKVSRTFDYRKNVINDFAHQTSHALAADAKVQFFVLENLQVQNMTRQPHPKYDDSGKALPNGARAKAGLNRAILSSGWRKTEDYLKYKAQKAGKLIIKVDPAYTSQRCPKC

SEQ ID NO: 10587 - protein, 420 aa, Micromonospora sp.
VKVTRIAYSVRLNRGKYAALVEQARRLGRVRSEVWQRYGSIAGVGSGLTDRQVRDRWLGDGTHVQFAVLANAWKETVRDAMADIAANLAAAKVDVRRAVSRRTTDPAERRRMFTALKADQWAEDPFLSRQMRKHWKRGHNRTHDQIVVRADRYNAAVDGRGRLWLAVPGLEPRKMVRIPLSTTVAPTGTLRLILRGGRVEVHYQIDATQMRSSQRACGEATIGVDKGYTEALTDSDGQPHGEQLGDLLTRESDRLKERNRRRAKLRSIANTAALRGDCAKARRIKANNLGTIKRDRRAARHRARVCTEIFTAVHEVVDKAGTVIAEDLTKRFTRFGRRSGDQFHCTSCGVVWQADVNAAINILQRAGDPDIALHTPHHKVKQILQDRTDRHRTRLPVQDSSPATTGRRANYPNRSTMSNK

SEQ ID NO: 10588 - protein, 448 aa, Thermococcus sp.
VKRTNTFIVEDNSALWKLADNCARLWNELNFERRHAYINYRKFSWYPKHLYKKYAPIIGSATAQQIIKKNNEAWRTFLKLKRLEKLGKHPRCIKKVSMPGYWKKNGKREFRVIIRNDCYKLDSKYLYLPKGLRLQYKGKLKWNGKKGRLEIIYDDVDKVWRGFMTVKVEKPPKRGGNKPLYIDLGVRCLATIWHEDMKQPIAFGGGELLWDWWYWTKKIAREQSRVARINKTRTSRRIRKMFRTRKRRFRHAVNAMIKWIVEYTRRNGLSKIVVGKLKGIRNNNHRNAKANSMIHNFWSFSWVVQRLREKAEEYGIDVVEVSEYRTSSTCPRCGSNKVVRRGRMFKCLKCGLDAHRDVVGVINMGTLHNGGMPIGLVAQPLLLRWNGMRWEPRRAMKNQPMNTPEARISPLKRGECQLVGMKSYRKMRLKNGCPRYSKTQPEKNHQPR

SEQ ID NO: 10589 - protein, 454 aa, unknown
  TnpB Polypeptide
MNEVARTERHVIKKNHILYSKFEEITFASKNLYNLSNYYMRQVFIICDKIKNNVPLNSEQLNFLEEINNKVNDYNKFKENNLKMKSKEIKKLNFFDADNKSIKYDFLNFLMKNTLEYKSLYAQTSQQCLKLLEKNWKSFFSSIKDWKKNPSKYSGKPKLPKYLKKDGKNIIILTNQLVKYCNNQLIFPRKIDSFKLKTKISGKFQQVRVLPRNNLFVIEIVYRKQVPEFKKNNGKYVGVDLGVNNLAALTNSENISPVLISGKKAKSINQYYNKKLSFFRKVTKQMNNKDWSNKMGKITLKRNNIMKDCFHKASKSIVDYALSCGANTVVIGYNQGWKTNVNMGKKVNQMFVGMPHKTLIEQIKYKCEEHGINVELPDERYTSGTSFLDNEKPVKELYNKKRRVRRGLFKSNAGKFINADINASLQIIKKVSSDAFSEGHGVEDYGFNPVKVVL

SEQ ID NO: 10590 - protein, 246 aa, Cyanobacteria sp.
  misc_feature (230)..(244): Xaa can be any naturally occurring amino acid
EHIKIDAGNDQRGKLKGKTPTSAQLCKHRDDKYYIHIQYKGDASNLVKTKNVIGVDFGRRDIAVTSNGDKWDGSGITKARDRFSRVRASLQTKAVRSKRPASLTKGTRTTRRRVRNILKRLSGRERRYQTWLNHTISRAIIQDALKSSSIVAIENLTGIRDRTNQQPRNKTERRRSNSWAFYQLRQFLEYKGIQSGVEVIAVSPRYTSQTCHRCLHIGLRSGKRFGCTNXXXXXXXXXXXXXXXWF

SEQ ID NO: 10591 - protein, 366 aa, unknown
  TnpB Polypeptide
MLNVAGWIWNHSLALQKRYYSLYGKYADVNKMQKHIAKARKRIPAWQALHSQTVQEIVQRQDASYQKFFKRKQKRPPKFRKSIFFKSFLFKQGGYKLEDNKLTINSIKKTFKFSLSRSYGKPKTVRLYRDRLGDIFLIIVSEHPLEGIFKKLNNSKNTKRKAVGLDFGLKQYLTFSDNAPPKQSPLFFKQGSNAIKKANRSLSRKQKGSNNRKRARLCLARVHKKIANKRRDWQYKLAHELCREYGFIPIETLNLKGMQRMWGKKINDLSHSSFVSTLKHIAMKYDVIIHEIDRWYPSSKECHCCRNIKKDLSLKDREYVCERCGHVGDRDSNAAKNILRQGIAEYESICKTEKAIQPNPQFALAS

SEQ ID NO: 10592 - protein, 272 aa, unknown
  TnpB Polypeptide
MYFVKNNPKDCLCERHRIKIPTLGWVRLKEKGYIPTSKDGYVIRSGAVSMKAGRYYVSALVDIPAPEADGNFTDGIGIDLGLKDFAVVSNGTVYRNINKTARIRKLEKQLRRAQRKLSRKYENLKKGESTQRANICKQKLKVQKLHHRIENIRTDHINKVISEIVKTKPSHITIEDLNISGMMKNRHLSKAVASQKFYEFRTKLKIKCAEYGIELRVVDRWYPSSRICHCCSCIKKDLKLSDRIYRCTCGYIEDRDLNAARNLRDAETYEVA

SEQ ID NO: 10593 - protein, 484 aa, unknown
  TnpB Polypeptide
LGEYADGADGFDRSGDFGRGGLRVGGDEHVDVVGHDLYLLQRPSVCGAGLGYGVAACDFDFSGEYLVPVFGAEDDVVAEFIDLVTVSLHAHKTYGIIRGVTTGKSKTAQRRESMVNATPQRTLVLPLDISPEQYGIFEGLADSYNRMWGSLVSWCENNRSVNRTRMQKDNYARLRAEYPELPSQFVCIAMRDAAGAVRSWNSNHPKRRWNLKASRRKKTINYDLRVMSLRGNLLSLSVTHGEKRQRILLPDIPEWFDRRYPERKLNAAKLVLDPDGRNASVMLVYRLPQSTPIEHGDVLGVDLGQHSLTMDSRGGETSYSRMQGIRRRYAHNRKTLQEKGTRSARRRLKAMRHREERFIRDVNHRASKRLANTPNVSVIAFEDLAYIRRQARKGTKTGRRRRNMLNQWPFAQLQEFTAYKAARNGVRILMVDPAYTSQKCNRCGYVDARNRNHARFDCLRCGHSDNADHNAALNIRDRAIQNLG

SEQ ID NO: 10594 - protein, 446 aa, unknown
  TnpB Polypeptide
LAVVFGGGPASCDGDLVLPVRLPQGAGSWAHTAHRLAEPRLWHKVNLVRLRAPGVPGGWRYEAHLLVLKAPYTSPSSARRRLAAAGPDRRAGIDVNVSRVAVVSVDRELTEVRACSITAGPKERASLAAEQLRGRRRARAMERSRRCRNPTQYQLSRAQQRRAKMRVEAGQRAVTVNLPRGSRLANSAGVPRQAYHLDVLSGGYRRLRAEVAAAGAARTRARDDRARSCAQELVWVHGASLVVEDCDLRLWARRWGRSLLAFTPGRLVSAIADEAGAVTTRSGTGLVRASTRTTALSQNCLCGERVPKALAERTHRCPSCGLIGDRDLVAAALAAFVTLSDPHSPGTARVDYQAARRALARIEGLQAALSESSAAPPPRPLRRRDGREQASARRRRAARRSAGSALPTTPDEPPRQLARRDHAGPSLAHAGPDQRLVFGQDLWPGA

SEQ ID NO: 10595 - protein, 409 aa, Okeania sp.
LKARYRYRIYPNHIQITKLNQLFGCCRFVWNQSLAYCNQLYADGQKKPSYVDLTKQFITQAKRELVWLKEVASTPLQQSLKDLDQAYRNFFNSCTGKRKGIKVKPPKFKSRKSRQAVRFVGANYKIGQDKIYLPKVGKIKIIWSRPLASNPSSVTIIKDSAGSYFASFVVETCAENLPKSGNSIGIDLGISTFATLSNGEKINAPKPLKNNLKKLAKFQRKFTRTEQGSKRREKRRLKIGKLHAKIKDIRTNFLHKLSTDLAKKYDTIVLEDLNVSGMIKNRKLAKAISDLGWRQFRSLTEAKCEKYGRDFRTISRWEPTSQKCSCCGFKGGKKELNVREWTCLNCGSFHDRDINAAVNVLEVVQPKTKVEIVKETVAKNPVQLSLFNEVAEGQRSIIFGHGGNVRLAS

SEQ ID NO: 10596 - protein, 275 aa, Okeania sp.
MPDNYILSLTKLWVSMTWKKFTKRTTTIKFYIRSSAQQILRTVAESFHSYYGLIKAYSEGKITNRPRIPNYRKKGGLATVSYPAQALKLKGNQIRVPLGNTCKRWFGLDCFLIPIPSNLAFSAIKELRILPRNRCFYWEFVYEKEVVVKPQLNQENVLGIDHGVNNWLTCVSNVGTSLIVDGKHLKSMNRWYNKQVSTLKENQPTGFWSNRLAAITEKRNRQIRDGINKAARIVINHCLKNQIGTIVFGWNQGQKNQIELGKKVIQNLYQFLQLD

SEQ ID NO: 10597 - protein, 452 aa, Okeania sp.
MSTGATMKLLNVSNRSKILKSRYKYRIYPNHIQITKLNQLFGCCRYVWNSTLAHCNQLYSNGQKKPSYVDLTKQFITQAKLELLWLKEVASTPLQQSLKDLDQAYKNFFDSCKGKRKGVGANGRSPVQPPKFKIRKSKQTARFVGANYKIGQDKIYLPKVGKIKIVGKRELPAEPSSLTIIKDSANRYFASFVVEINPESLTKTNKSIGIDLGISTFATLSNGEKINAPKPLKNNLKKLAKFQRKFVKTEKGSKRREKRRLRITKLHGKIKDIRTDFLHKLSTNLVKKYDTIVLEDLFAKHSEGNVSGMVKNRKLAKAISDLGWREFRTLTEAKCEKYGREFRVISRWEPTSQKCSNCGFKGGKKELNVREWTCLNCGTSHDRDINAAVNILEILQPKTKVETKTTENPVQLSLFTEVAEGHWSIIYRTRRKRQTGKPAFFTDVSTRSESFE

SEQ ID NO: 10598 - protein, 437 aa, unknown
  TnpB Polypeptide
VTSTRSRHSATCPGPSPRALARYRHRSIGSSRVIIVRLGSGQRGIAGTPRASAVGGMRVGRFNLDANSINLYIADMKLVVQIQLIPDAEQSAKLRATVERTNTAANWIAGVAFEHRTANVFELRKLAYHEAREKFGLSSQQAQLAIKAVSDAYKRDKSIRVSFRKHAAIAYDCRTMGFKGIDRVSLLTLEGRIVVPFILGKYQRDRIGQAKGQCDLVLRKDGKWFLIVTVDVPEGSPIPPTDFIGVDLGIAAIATDSDGNQHSGKAVDDVRRKHNLQRRRLQRKGTRGAKKKLERVSGKEARFKKHQNHVISKNIVESAKRTGRGIALEDLKDIRLRVTARCGDARNRLGGWGFAQLGAFIGYKARLAGIGVVYVDPRNTSRTCNRCGHCEKSNRKSQSEFACKACGHQAHADRNAAENISALAKSKLATGLVSLTA

SEQ ID NO: 10599 - protein, 400 aa, unknown
  TnpB Polypeptide
MLCRRAYRFKLEPNTEQTQKLYQLAGARRFICNWALARRNEFYKASGKTLPASQLSRELTQLKQQEDRLWFQEADSQLLQQALKDVDTAFQNFFAKRGRFPKFKSRNRGHFAFRIPQRVKVENGRRGAPGRVYCPKIGWIGIRQSQEVEGITKSATFKRDACGDWFVTLTTEFEMPDTALAPPENPVGVDLGLKEFVTLSDGTAIGAPQFFRKSAGTLKKAQRVLSRRKLGSKRRGKAKQKAAQVHRKAANQRGDFVHKVTTRLVQEYDAICIEDLNVRGMAKNHSLALSIHDVAFGEFRRQLAYKCQWQRKHLSVVSRWFPSSKMCGVCGVLNDTLTLADREWTCCCGVTHQRDANAAGNILKEGVRLLEGLRILAVGQTDKQNARGQNVRLATASCSG

SEQ ID NO: 10600 - protein, 380 aa, Gammaproteobacteria sp.
MSAAPSPTISDAPAKVGDPTQTVLVARTLRMKVKREAYRWLNAAATEVNFVWNWSNETSAKAARPFAGKPRWLSEFDLNNLSSGASEYFERIGADTIQCVNREYAAKRRAVRRTRLRWRVSGGARRSLGWVPFKAASLRRRGQAVRFCGKSFRIFEPERLQGVKWRQGCFAQDAVGDWWLCLPVKVKADTTVAPKEAVGIDLGLKEVAVTSDGARCERGGFYRDIEPRIAQAQRRGHRRQAKLLHRRAANRRRDALHKFSRRIVNEYQYIAVGDVSSPRLVKTRMAKAVLDSGWGMLRQMLQYKGEHAGRSVVIVNERFTTRACSSCGCLSGPSGPRQLVVRRWCCSACGVEHDRDVNAARNILAGSRLQTSVSGNESSP

SEQ ID NO: 10601 - protein, 396 aa, unknown
  TnpB Polypeptide
MTHEIKRTYRYRIYPNGGQRQMLARTFGCSRWVYNWALDKKRSAWMDDEKENVTVTDLDARLPELKRQEETKWLSEVSAVTLQQSLRNLSNAYENFFAGRSEHPTFKRKNGKQTARYTGSAFDLREDEVTGKTKLRLAKMDGLVNINFSRDLPSSPSSCTVTKNASGQYHVCLVCTEKVKEFSQVGENKLKTVGVDLGLKHIAITSDGQKWGNPRWYENEYRRLRREQKKLSRKSKGSNNYARQRKRVARIHQKIKDRRKDFIEKLTTRLARENDVIVVEGLAVKNMMANDKLARHIGSAGWRKIISRLKDKCKWYGRTLVIANQWFPSSQLCSSCSWQYEDLSRDEREWTCSGCGCVHGRDVNAAKNLSRVGQTRIHAPGDLDKPDAFTVVGTDR

SEQ ID NO: 10602 - protein, 390 aa, Salipaludibacillus sp.
VLVKKAFKFRVFPNKRQVELINKTIGCSRFVFNFFLGKQKQKDAYWYIVEEMAQNGQLPSNNWKGEFFNKYDSVKAVRHLKEHYPFLKEVDSISLQKSVENLADAYQRYYKKQNDAPRFKSKKNKVQSYMTKQTNGNIAVLDKHIKLPKLGLVRFAKSREVDGRIINVTIRRHPSGKYFVSILAETEVVELRKTNANTGVDLGLKDFAILADGTRYRNNRYFHSFEQKLAEAQQILSRRVIGSSNWNKQRIKVARIHEKIENKRTDFLHKTSTDIIKNHDITGIESLQVSKLMKNKKTAKSIADVSWYQFKSLLKYKAEWYAKTVVEVSKTFPSSQLCSSCGYKNKDVKDQVLREWTCVCGVHHDRDINAGLNLKNEAIRLLTVGATGIA

SEQ ID NO: 10603 - protein, 448 aa, unknown
  TnpB Polypeptide
VKRTNTFAVRPVTDDDERVLHDLLDASAALWNEINYQRLMRYNDEKGFEGDVWDADTGQLEGKYKDVLGASTAQTVRRANSEAWRSFFENKKAYHDESNTSVMEHPEPPGFRGNEDDGRVLKGAVRKDAYTVEWGDRSRLEIVVGEKLRERHNSPKSRFRLEIVGDPNWPDYEDQSRLELWYDETDCTFRASQPVAVSADARDTPLADEKAALDIGANNLVACTTTTGEKYLYEGRRLFQRFRETTREIARLQSKLEEGQFSSKRIRRLYRTRTRRRDHAQEALCRDLLERLYGEGVDTLYIGGLTDVLETHWSVRVNTKTHNFWAFKQFTERLVCTAEEFGISVEVRSEAWTSQECPQCGSTDRTTRHQDTLICSCGFEGHADLTASETFLRRHTEKAVRPMARPVRFEWDDHNWSGIPHPHESPKEQRTDPSTVHRDGNVASGDVA

SEQ ID NO: 10604 - protein, 493 aa, Hydrogenobacter sp.
MYRAIEVSCPTTKRKSTLIAHVLKLYRKTAEIIANFQWSLFFKNGSFNRKANIKHLNCPLSERFKSTIQYHVVVPTLESFIANVQERFKEIVLSSTLPEKTKRVLLYINSREEWLIPKSEKALWIDKDKNKHEYEIVKEERMLAKKIFKHILKSWKKPSFRGVSMLLDSKCALLERPKKAKGFDFWIRLSTHEKRKPIYLPVKLHEYFEERGGKLTNMVQIAEDGKLRLVKEIERKKMAFSGEVALDFGMECFLVSDRGDLFGRKFYSKVREYADKIDRIQREMQRRGKKPTESKRYLRLQHRLSEYVKNEVRRIINRVVELYRPRRLVLEDLRGFLKRVINNFPKSVKRVLIRFGLGEIRRKLKEISEEYGIEVVYVAPAYSSQACSNCGYVDKENRKTRSEFECELCNRKLHADVNASRNLLSRAKWSLHLRRMEQALAKQVEVFIKNLFSERFKCLWSKALGLIERNPYFQSVPKPEVWINVHKRDICLG

SEQ ID NO: 10605 - protein, 303 aa, Hydrogenobacter sp.
MLLDSKCALLEKPKKAKAFDLWIRLSTHERRKPIYLPVGLHEYFKERGGKLTSMVQISEDGTLRLVKEIERKDIVFSGDIALDFGMECLFVSDRGDLFGRGFYLRVKEYADRIDRIQREMQRAGKKPTESKRYVRLQSKLSGYVKSEVRRIINRVIYLYKPQRLVLEDLRGFLQRVINNFPKSVKRVLIRFGLGEIRRKLRDISEEYGIEVVYINPAYSSQACSNCGYVDKDNRRTRSEFECKLCGKRLHADVNASRNLLSRAKWSLHLRRMEQALIKQVELFSRNLFDERHKCLWSKATPVD

SEQ ID NO: 10606 - protein, 367 aa, Hydrogenobacter sp.
MQGSIKRSLLFSLDFANTGKLDFLENLWHEYQKACQYFVDVGYETKTLPSYKHVKSYPYQTWLSKRYLGCALEQAKAILKSIFSKLKKGKNPQKPLIKKPVLKLDNRFYMIEKGRNSFDFWLFLRDTQNQRWIAFPFKSYEYANNYFRDWKLCSDIELLKKDGKWYIKLIFEKGVKLERKKPKGIDIGYRKLIATSEGEVFGKEVREIIEKRIEPKKQGSRRWKRAKHYLKTEINRILKKVIDGSFSPVFEGLKNLKKGKSGVWSRVVNRRFNHWLYGYVLKRIRELCEVVGVQYHIVPPQYTSRTCPECGYQDKLNRSGEYFKCLRCGYEGDADIVGARNVLLRFTRELIVPLPAKPHPVEYFSMG

SEQ ID NO: 10607 - protein, 418 aa, Hydrogenobacter sp.
VGEECGLDFFLTENIIYPMIEKVKQVLSVKVKLILDEEKKRELLRLCKAYKDAMNFVFANSFEKGKKDFRTLHKAYYRILRERFSLPSQYAVNISRKTATIYASKNKWEKPPKRKSLSVDLTFNRTFSIKPDKRVVSITTMNGRLKNIPYLGWEKHYEYLQRGRIGDAVLVYDKANKEFFLHIPVEIEVEKQTPQEVIGIDVGEVNTVALVSSKGNKEIVPRTEEYKRLKEKYQRLRQALQSKGTRSAKRKLKKVVGREKRFVESFMHYVSKYLVSKYPQALFVMEDLTGIRERRKVKRKNTEEIRQSNQWAFRSFQTKLYYKSILYNGISPIFVDPSYTSQMCPVCGYTSKENRKSQSDFECKNCGYKEHADIVGATNIMVRGLVEVQNFYQGLFVNQPNALPYGMEQAPTSLSGSS

SEQ ID NO: 10608 - protein, 435 aa, Hydrogenobacter sp.
MSKAKEETKFLLTYKFRAYPSALMEYRMENWLYILCNLYNHALEERKRAWKEEKRSITYSDQQNSLPELKKKDPTLKLVHSQVLQDCLRRVDNAFQKFFRKEAKYPKRKKLSKYNSFTFPQVWMKQKKRLVELVKLERKNSRFAYLYLPKLGKLKVRLHREIDWTKARTVSVKREPSGKWYVCITLEAELDEILREAQEKAVGIDLGVKNLATTSEGEFIEHPRFLKRLEKRLKREQKKLSRKIKGSNNWEKQRKRVAKVHERVRNARKDFLHKLSRYLVNNYDYISFENLEIKGLVQNSNLAKSILDAGWGTLITFVTYKAVMAGARVVRVDPSYTTQDCCVCGFRVPKTLAQRLHECPECGAVMDRDYNASVNILKKGLARLKGGRVGATRTYACGEGSGGALSKESVSHPSQKQESRAGLPGGTKPYRKLRP

SEQ ID NO: 10609 - protein, 390 aa, unknown
  TnpB Polypeptide
MVKAIKVMLIPNNVQKTKLFQYAGASRFAYNWALAREKESYEKGGKFISDSELRKEFTKLRHSDEYAWLLNISNNVTKQAIKDACTAYKNFFRGLQKFPRFKSKKRSMPKFYQDNVKIRFSNTHVKFEGFSSSRKANKQKMNWVRLAEHGRIPTDAKYMNPRISFDGLNWWISVCVEFPDCRETLNDDGVGIDLGIKDLAICSDGTKYKNINKSQKVKKLEKQKRRLQRSISRSYEKNKKGESYCKTNNVIKKEKLLLKITLRLTNIRQNYLHQTTSEIIKRKPSFICIEDLSVSKMMKNKHLSKSIQQQNFYEFRQQIEYKSKWNNIKLIIADRYFPSSKLCSCCGDIKKDLKLSDRIYKCKCGNIIDRDYQASLNLKKYGENIFKSIS

SEQ ID NO: 10610 - protein, 398 aa, unknown
  TnpB Polypeptide
MGIQDAKSDIFLQIWYNEHIFFLKEEATMKVMRTYEYKLYNSKRNRHLNDAIDTAASIWNYCIGVHKRYYRLYGKHLSVNKLKVHITKIKKRRFAHWNELGSQAVQDVVERIERSYKAFFEHRKQKRPGRKSPPTFRKRRDYRSFTLKQAGHRFHEDSNVVTIMGRNYKYSKSRPIEGEIKTVTVKRNSLGEIFLYVACEQEVNAVIPRTGKAVGYDFGLKHFLTADDGTVIDSPEWYKASLKELRKAHRAVSRCQKGSSNRERALKNFERVYAKVSARRRDWFYKLANKIVAENEVICIEDLNIDGMKRLWGRKVSDYAFAEFVSILEHIALKNGSTVVKIDKWAPSSKMCHICGEKNDSLTLDIREWNCPHCGAHHDRDVNAAINIRAIGEAMLSA

SEQ ID NO: 10611 - protein, 360 aa, Paenibacillus sp.
VLRTYKYRLYPTKDQRKQIEFTLERCRLLYNRLLEERIVAYKSHGKSLSYFEQANTFNERKKHIPAMKQVHSQVLQDVARRLEKAYQFFFRRVKQGETPGFPRFKPKQRYDSFTYPQGGYVLQGNKLKLSKIGVVKIKLHRSLEGSIKTCTIIMKNSCYYACFSCEMELEPLLPSQELIGVDLGLKHLAITSEGETFMASKHYRHSERKLIQLQRSVSRKKKDSHRRKKAVQVLAKQYEKVANQRKDHAHKVSRKLVNRYGLIAIEQLNVQSMIQNRHLAKSIADTGWSQFVQYIVYKAESAGRVVVQVDPRGTSQQCSECGNIVKKSLAERIHRCPCGYTGDRDINAARNILQRALQVS

SEQ ID NO: 10612 - protein, 360 aa, Escherichia sp.
MRPVINTSLTGKWLPGWLSGKTPTETQWLKDSPSQPLQQSLKDLERAYKNFFQNRAAFPRFKKRGQNDAFRYPQGVKLDQENSRIFLPKLGWMRYRNSRQVTGVVKNVTVSQSCGKWYISIQTESEVSTPVHPSASMVGLDAGVAKLATLSDGTVFEPVNSFQKNQKTLARLQRQLSRRVKFSNNWQKQKRKIQRLHSRIANIRRDYLHKVTTTVSKNHAMIVIEDLKVSNMSKSAAGTVSQPGRNVRAKSGLNRSILDQGWYEMRRQLEYKQLWRGGQVLAVPPAYTSQRCACCGHTAKENRLSQSKFRCQVCGYTANADVNGARNILAAGHAVLACGEMVQSGRSLKQEPTEMIQATA

SEQ ID NO: 10613 - protein, 366 aa, unknown
  TnpB Polypeptide
VLKSYKYRIYPNKAQAELIQKTFGCCRFVYNQTLAYRKNLYETEKKSMSKFDCSKYVVQDLKPQFDWLREVDKFALESAVFAMDNAYQRFFEIHAGYPKFRSKHDNRRSYTTCITRENIKVLFDQNKIQLPKLKLVRARLSRPFVGQIKQATVLQTPTGKYFVSVLVETEHKPLPSTDKMVGIDLGVKDLLITSDGERYDNKRIIKQYENKLARAQRRLSRKVKGSNNYNKQRIKVARIHEKIHNARIDYLHKITHKLISENQVIVSEDLSVSNMVQNHNLAKAISDCGWYELTRQLTYKAEWNNRRYIKIGRFVASSQTCHICGYVNSETKDLSVREWTCPQCGARHDRDINAAINILNEGVKQL

SEQ ID NO: 10614 - protein, 140 aa, Klebsiella sp.
MIVIEDLKVSNMSKSAKGTSEQHGRNVRAKSGLNRSILDQGWYEMRRQLEYKQLWRGGQVLAIPPAYTSQRCACCGHTAKENRLSQSRFECLECGYTENADVNGARNILAAGHAVLACGGMVQSGHPLKQEPTEASQAPV

SEQ ID NO: 10615 - protein, 346 aa, unknown
  TnpB Polypeptide
MLLSQKIKIEVSKQDAATLEFMQGKCRGLYNWWMTRLRNRERWNLNAAKKSLQESKADDPDLRFVYGKLLAEVYFRLDKAMQAFFQRVKAGEKKPGFPRFKPRHEFFTLCYPAMYLKVQGNTLVLPTGSRGRNKRYPNIIAHLTETPPEHFREVAVSRDARGNYSCSFVYDDAEQHKEQDSKVYKRVSERKRNKQKDCLHKATHLIAGKLAERAVVIGDLSQRQMVMKNHEEETPKEHTKRRIRNRMVYNDWGLYGFVQMLTYKCLRFGKELSIISERDTTKMCHVCKHKQDMPLWKRTYRCSNENCGLVMDRDENSAVNIYERFLARLGCAVVRDVVSPLQTGGI

SEQ ID NO: 10616 - protein, 370 aa, unknown
  TnpB Polypeptide
MYDQDALLLAATQHAFNAAATWVAHVCWDEGITNTNTAHHRVYGETRTRFGLGAQLAVCARMKAVEAVKAVKARRRETCPQFGSRGSVRYDARSYTLMGHERVSLNTMEGRVTCRLALGERQHELLRDPAWEIGGADLVWRQGVYYLHVTQSQEAPSPSSAPPPEGTLGVDLGIVNLATDSEGQHFSGVKIRVVRARYHLRRQRLQKCGTRNAKRRIRRMGRREARFQRDTNHCISKQLVHKAVVARKALALEDLSGIRERTTVRRVNRYERHSWAFFQLRQYITYKAAWAGVPICFVDPRNTSRTCPRCGYCSKDNRKSQAIFTCVNPTQHCGFTGNADHVGAINVAARAEVKAQWAAVNQPMALPRKG

SEQ ID NO: 10617 - protein, 195 aa, Okeania sp.
TPKKTDVVGVDLGVKTLATLSDGKVFKSVRSYHKFEAKLCRLQYLNRHKEVGSANWKKAQLKIAKLHRKVANIRQDALHKLTTYLAKNHGSVVIEDLNVRGMLANHKLAKSIADQGFYEFRRQLEYKCEWYGSELVIVDRFFPSSKTCSNCGHVQDMPLHLRTYDCPDCGLSIDRDLNASINLRNAVGSVVNACG

SEQ ID NO: 10618 - protein, 241 aa, Okeania sp.
LIQHRPLPDGFQIKTVTISRKADGYYITLSLEDKSVPALTTKVEPTLKNTLGIDMGLKEFLVTSEGESVPIPQYYRSSQKRLKTLQKRSSRKKKGSKRWLKSVKAVAKQHKKIADKRKDFHFKTANELLSKAEVIAHENLNIKGLAKTRLSKSINDAGWGKFLSILTVKAENAGQKTIAVNPKNTSQDCSNCGEKVDKELNIRTHSCPHCGVVIDRDLFAQHSVGNAAINIKNRAVGPRRP

SEQ ID NO: 10619 - protein, 201 aa, Catellatospora sp.
VITNPRHERADRPRLARAQRNLARKQPGSANRAKARVKVARIHARIADRRRDHLHKLTTRLVRENQAIVIEDLAVANMVKNHRLARAISDAAWRQFRTMLEYKAAWHGRDLVVVDRWFPSTRLCSACGALAEKMPLHVREWACPCGAAHDRDVNATRNILAAGLAVTACGDDVRPRRGTSRTGQSSAKQERPRATKGIPVL

SEQ ID NO: 10620 - protein, 363 aa, unknown
  TnpB Polypeptide
VLSHKIQIKNPTVKQEQYFRQACGTSRFAYNWGLVEWKKQYGAGKKPTARTVRTVFNAVKPVDFPWVFNVTKCAAEQAFSDLGTAFKRFFRHIGGYPHFKKKGTHDSFYLSNDQFKLSENQVRIPKLGWVKLTESLRFSGKILSATVSRIADKWFVSICVQMETTPFKKSENQALVVGIDLGVKKLATLSNGETVECAKPLKKLSRRLVQLQRHLARCSKGSKRYIRQKMKIARLHYRISCIRQDGLHKLTHRLCQSVRVICLEDLNVKGMLKNHKLAKAISDMGFYEFKRQVEYKAALFGNWISIVSKWFPSSKKCSNCDNKKEDLTLSERTYHCHHCGFEIDRDLNAAINIEREGTRILVY

SEQ ID NO: 10621 - protein, 412 aa, unknown
  TnpB Polypeptide
MLVFEFRAYAKSVQFTAIDDAIRTVQFVRNKAIRYWMDGHGKSVYDLNKYCAVLAREFPFAKKLNSMARQAAAERAWASIQRFYDNCKGKVAGKKGFPQFQKDCRSVEYKTSGWALSDDRKSITFTDKKGIGKLKLKGTRDLNFYQPDQIKRVRLVKRADGYYVQFCISVDRTEVLPATGNTIGLDVGLKSFYTDSNGLEVENPKFYRAGEVKMKRAQRLVSRKVKVMGGEPAQCSNNRIKSRCKLGKIHLKISRQRKDHAVKLARCVIRSNDLVAYEDLRVRNMVKNHCLAKSISDAGWYQFRVWLETFGRIFGRITVAVNPAYTSQECSSCGVIVKKSLSTRTHACQCGCVLDRDHNAALNILTKAIGTAGHVGTSILDIGIASGDILSTLAGANLQEQGASLKEESPRL

SEQ ID NO: 10622 - protein, 378 aa, unknown
  TnpB Polypeptide
MKVTKSLIVEYEKNEEMKKLLEDFRNMVNFCIEKGLKYGYSLKKLHENCYKELKKRYDYHTMICSTSYRVAQSIIRSWKANKGRRKPVARKKLIRLHKSIFKIDLENNQLVINYKPRQKIFLKLKLSNYHKEQIKNASKIGEALVNEKSVYIPLIYEVNLIKPEKFVAVDVNENNIAFVSSDGKFGKIETGIRELKVCYAEKKRKIQKIRNKRRRKRLLKKYKEREKNRTNDALHKVGKLIAENFKGYGIIMEDLKCLRRTVNRKIKKLNKYNNKIQKVSVNSDFMKFRLNSFPFRKIQFYIQYKSLLNSSPVYFVDPRNTSKICFRCGGLINSSKFCPNCGLDRDINACLNILKMWGLPPPESLFNASMTLPLTIKK

SEQ ID NO: 10623 - protein, 375 aa, unknown
  TnpB Polypeptide
MKIYKFKLYSNHGNRELHKTIDGHAHVWNHCVALQRRYYAIYGKYISKFRLINHISKLKRTNRFAHWNQLPSQAIQDVAARIDKGYCAMFEARASGKRWGRPRFKPRRKYKSFTLLQAGWQLLPGNRIKIGKFTYSYFKSRDVFGNPKRCTIKRDAIGDVYICILTDYEEPDLNRVMTGKIAGFDFGLKRYLTGHNGHDIDSPEFFKNSLNAIKRVNGNHSRKRKGSNNRERARLDLARKHRKIERQREDFHWKLAHQLTDEYDEIRLEDLNLQGMKALWGRKVSDLGFADFVKKLVYIAKRKGVKIKFIDKWYPSSKTCSACRVVNEALNLRDRNWQCKDCGATHDRDCNAAINIFRVGASTHEGEVVSPGSPG

SEQ ID NO: 10624 - protein, 481 aa, Lactobacillus sp.
MIDLPKKTEYIRVRHCRLVTTPQLEKRYVENIDVLNKVYQYTVKYLEKTYGYKHLNRPYPTDKKGKIYVIKDQIMPRFLHDVYHIDKWDGKKVPIHSQALRDEFIVSIMTNFGEYRKVLKKAAKMTKQEKEDYRNNKYGNNPQHRSWYRKGSLAYLRNGKSHTTVSLPSNGQIEVLSAHHIKIQDYGDLQTIDNIKHFKHLTIVTSKIKRKGDGTFELQLVLKDQHRRRKPTKEIGADWNMKDNKIFHTSENQRIYLNPKVSVDADKYEYIINNLKSQRSHLEKFLNHKSSRLVKLTELIRYYNVRRANVLTEAYRHMAKKLFEGHNLIAIEQLDAKEMRRESAAFNKAGNHAKNRKLAKIKPYELSQLLTQVADREGKTLIKVDSYKTSQVEYGTDYQEKHDPTEREWVSKYTGKKIIRDLNASQNILAWALEPKKHIKYRERQAAIHQAKKAGVNEAELPKEIKPNWLIEINSKKNRKH

SEQ ID NO: 10625 - protein, 411 aa, unknown
  TnpB Polypeptide
MIRAEKMILRKTPEVAKWLEEVTAIYNQGLYYYRQELFQARKENRKPDYSKIKLYDILKDMDCWKLATVDHPSKTAALRKVKDNWTSFYRACKAYWKDKGKFTGMPKPPKYLKNGKTAPLVFDKSRLHHRDFENHTLCFPKSKRRITIPKHVDMGKIRCITVVSYYGKVKLFISYDKETTASRLNRDNCVGIDIGVDNIVAITANNQKKSWIVKGGCVKSINQFYNKETARLKSILETVNKTKTSKRLQRMYMKRNQKLDYELHCISRKVIDLCLENDIGRIIIGHNNGWKQNSSLGRNTNQKFVQIPFNDLIWKIQYKAEENGIECVVVEESYTSKTDHMCGEEMVHHDSYSGKRIQRGLFRSSCGRVLNADVNGAIGILRKANALPDGGVAALRNRGDVVSPVVLKYKP

SEQ ID NO: 10626 - protein, 280 aa, Okeania sp.
MLFSVYKLPWITCALPDKNGKTSGRPKFKGKHYYNSFSYPQLSNSHIVKNANGRICINLPKIGLVPFVYNRLIPAGFKVKTGTVIREADEWYISFTIEDKTVPLRRVEIQPTEDNSKGIDLGLLHYAVTSDGEFIEVPKFFRFSEHRLSKLQVRLAKKPKHSHPWKILKGKIAKLHQLIARQRLDWQFKLAYHLFSDCQVIFLEDLQIASLVRRCKAKLGDNGQFLPNGQSAKSGLNKSLQDAATYQFLDILEYVAWKLGKRIITRRPKRYISTLLGMLE

SEQ ID NO: 10627 - protein, 205 aa, unknown
  TnpB Polypeptide
VEEPVVEVRSGEIVGFDYSFEKDSFLVGQESRFDVLAPSFFRVNLKIFQKLSHALSRKEFGSNNRVRARLSLARQYRKSCWARKDYHYKLAYELCNKYSVICLETLDQSKYARTRHGKKVSDRGFGQFLLILQHVAKKVGTKIVFVDKWFPSSQLCHCCGFQNKALRGKFWIRKWTCPSCGVFHSDRDRNAAINIYNEGLRLLAS

SEQ ID NO: 10628 - protein, 429 aa, Salinigranum sp.
MNYSPRFRLFPTTEQRRAMDWQRNIVRQLYNHALKEFNQIPEDEGTLRQRVWMVRDTLPAMKDWWPDLTQVYSTILQKAVERIRDNIQNLGKLKAKGYDVGSLNWKPPRDFRSFTYRQSGFELDKKSGPNGRGLLILKKLKGETREIPIRLHRDLPDHDSIKEVTLKKDPTGAWHVSFCIETGTPEKPAVESIDPDDTVGIDLGVLNFIHDSDGRSVGRVDLDDDRKRLEREQRSLSQKEYESNNWEEQRRRVAKVHARMSNKKHDYKHKLAHFYTTEYDAVFVENLNVKGMLESGDNARNKVDVGWRGFITILEHHGEKNGCHVVQADPRGTTKECASCGVSTDKPLWVREHSCPTCGFEIDRDWNAALNVLNKGLSKLGVVHSEAPPVETATAVSTDGGDYSSIVVDASRVTEAGSPALKEAASAAE

SEQ ID NO: 10629 - protein, 433 aa, Salinigranum sp.
MEVVRTVKVKLDVPTERCEDLHQTKTRFLHCANTTAQWAWRHPHDHCVTSKRKAESALYERLRDETESLHANLVQKGIRRAIEATKSGVARLRKGERTSQPEFDAWSVVYDKRSATFHRDHVSLATVDGRVECDYVLPDDPEGTPIGEYLLNEAYEFRTSTLQYDRSSGEFYLHARMRRTTDEHEQSPADSSDAKHRTVLGVDLNVDGSLAVASTGAFIGNADELTHRRREFEKTRGSMHQTGTRSAHLSIQSMKDREHRWMQDELHRAANQILEEARDHGCTHVAFENLTDIRTRMAAAKRFHAWAFRRLYEYVEYKAEIYGIEVEQVSPAYTSQRCSKCGCTHESNRRSKHQFVCRACGYEVNADYNASKNIAGKLLKRLHSGQTSPSGGAPCQCALTSGTLSLNGEFDASVDSTAEGESTDKPTTSVVGH

SEQ ID NO: 10630 - protein, 388 aa, unknown
  TnpB Polypeptide
MRLRYNYRLYPAPGQRIALARAFGCARVVFNDGLRAREAAYEAGELYLTDAQLSARLTATKATPGRVWLNDVSAVVLQQALAELNTAYRNFFASINGTRKGRKAGKPRFRSRKDHRQAIRFTANARFRVLANGKLRLPKIGDVQVRWSRPLPSEPSSVTVIKDSAGRYFASFVVEDERGPLPEEEPVIGIDLGLGLFVVLSDGRKITAPRFLRRAEKRLKRRQRKLSRKQKGSANRDKARVKVARAHARVSDSRRDFHHQLSTALIRDNQAVAVEDLAVKALGRTRLAKSVHDAGWSAFVAMLEYKARLYGRAFHRIGRFTPTSQTCSACGVKEGPKPLHVRAWQCRACRAWLDRDINAAVNVARAAGLAVTACGARVRPGPGSGAAR

SEQ ID NO: 10631 - protein, 377 aa, unknown
  TnpB Polypeptide
VKKNKAYKFRLMPNKTQADLIERTIGCARFVYNCMLADKIKHYKDTRLLLRNTPAQYKDEFEFLKEVDSLALANSQMNLETAYSNFFRRVKQGKKEVEFPKFKSKKKCSWSYTTNNQKDNIRIENNKIKLPKIGFVKLIQHRRILDDHIIKSVTISKTRTNRYYISILIEYETQIVKKDIEKVIGLDFSMKELYVDSNAYSANFPRFFRLAQEKLTKEQRVFSHRKPGSKRYEKQRIRVAKIHEHITNQRKDFLHKESHKLANSFDMICIEDLNMRAMGQCLNFGKSVSDNGWGMFTTFLKYKLEDQGKQLFVIDKWFSSSKMCNVCGCVNKGLTLADREWTCGCGNIHNRDHNAAINIRNFGIRTVGMTGIAQECL

SEQ ID NO: 10632 - protein, 355 aa, Acinetobacter sp.
MKTLKLRIKDKHCKVLDQLASEVNFVWNYVNDLGFKHLKRKGEFLSSYDIDKYTKGASKECGLHSQTIQAISAELVTRRKQFKKAKLKWRVSNKKSARRSLGWIPFKKVAIKYADGYVQYGKQQFKLWDSYGLSKYCIKTGSFVEDSRGRWYVCLVVDSLKQEKPTATKAIGIDLGLKDVATCSDGTVISNPKFYRKYEQKLGIAQRANNKKRVRALHAKIANSRKDHLHKASSMLVKENALIVVGDLSAKKLVKTKMAKSVLDTGFSALKTMLKYKCENAGVLFEEVNESFTSQICSCCGEITASSPTGRIDLRIREWQCSNKKCLSLNDRDINAAKNILALGHKRLAVGITSV

SEQ ID NO: 10633 - protein, 411 aa, Lachnospiraceae sp.
MVKAIKVMLVPNNVQNSKMFQYAGAARFAYNWALAREKENYEKGNKFISDSELRKEFTRLRNSDEYAWLQNVSNNVTKQAIKDACATYKNFFNGLQKYPRFKSKKSSMPKFYQDNIKIKFTDTHVKFEGFSSSKKANKQKLNWVRLAEHGRIPTDVKYMNPRISFDGLNWWISVCVEFPDCKEALSDEGIGIDLGIKDLAICSDANKYKNINKSAKVRKLEKRKRRLQRSVSRKYLMNNKDTINKNNERNIKNGFVKLSNKNKKKGKYCKTCNIVKNEKLLLKVNHRLTNIRKNYLNQTTSEIVNRKPRFICIEDLNVSGMMKNRHLTKAVQEQGFFEFRRQLEYKCNDNGIQLIVADRFYPSSKLCNCCGRIKKDLKLSDRTYRCDCGNVIDRDFQASLNLKAYGEQFAS

SEQ ID NO: 10634 - protein, 442 aa, unknown
  TnpB Polypeptide
MQIISSYGVELRKQNIPIRQTLEIYRSAVSYLIGIYVQVWEKLAEIPDAKRRFNAAEHLVHTTKKNHACFDFDIRFPKMPSYLRRSAIRHALGTVSSYKTRLDLWEKTDGKSGKPKLVYENHAMPVFYRDVMYREGAEGKDEAYLKLYDGHDWKWFCVRLEHTDMEYLRKCWSGKKASAPTLEKRHRKYFLRFSYTEEVTLTKTPVKEQIICSVDLGLNTDAVCTIMRADGTVLGRKFIDFPSEKDRMYRVLGRISRFQRKHGSAQVKSRWAYAKRLNTELGRKIAGAVTGYAEENHADVIVFEYLEMKGKISGKKRQKLHLWKKREIQTMCEHKAHRYGIRVSRVCAWNTSRLAYDGSGPVSRDPKNHSLCVFQSGKQYNCDLSASYNIGARYWIREIIKTLPETERSSLEAKVAAVKRRTSCVYADLRKLHVEVNNLKAA

SEQ ID NO: 10635 - protein, 375 aa, unknown
  TnpB Polypeptide
LKTILRAYKYRLYPNKKQQELINKTIGCCRFVYNYYLNKKIELYKVEQKSMSYNACANDLKYLKKEKEWLKEVDSISLQQSLKDLDVAYQNFFRRVKNGDKQVGFPKFKSKKNPKQSYRTQNVNNNISIDGNKIKLPKLGLVRFTNSRSFDGKIKNCTISKTKTNKYFLSVLVEEEIEELPRNNNAIGIDLGLKDFLVTSDGEIVENPRILNKYERKLVKLQRQLAKKQKGSNRYKKQALKIAKLHEKIRNTRTDFLHKLSSRIIKENQLIISEDLNVKGMVQNKHLAKSISDVSWSDFCRMLEYKANWYGRVYHKINRFYASSQMCSACGYKNPETKNLSVREWICPQCNTHHDRDVNAAINILNQGLKELSIA

SEQ ID NO: 10636 - protein, 396 aa, unknown
  TnpB Polypeptide
MRFKSNEDKIILCKKIAIHPTKEQIESIERDSFLCKKLYNTYLRQRLEYYNCYGKSMKMSEQRSQIKLLREHNTDYAKVYAKHLHTVCMDLDTDYRNCISKRAKGKKSKLPRYKNKNYFYPLKTPKEYVKIKDNKIKLGFYEFNIDVNEIPKNYGEVWITKVRNKYMLSITYEAEKIENNSNNILAVDLGISKFITGINQDGKVIEIINPRYDKYWNKKIDKVRSMRDKKKKGSRRYKKLTETLNRLYEKRRKQQEHFIHTITKYLVSHNKEIILGNLSQEQMVNKSNIKILNRSIKENWGLGKFKTILTYKAKLHGVNIVYVDEAYTSKTCSYCGEMQDMNLSKRVYRCQCGMEIDRDVNSSINIYNKYKGHKELSYKKINQVITLYFQYGKLVA

SEQ ID NO: 10637 - protein, 420 aa, Lachnospiraceae sp.
  misc_feature (296)..(305): Xaa can be any naturally occurring amino acid
MKQMSSYPVRISRSADIRKTLSATAGIYRKAVDFFISVCMEEWGAVSACKGQTGKVNAVEAFTVKTSKRKTVPYDFGKDFYKFPSYLRRAAIAQAVGKVSSYKSNLKNWESSDPRTRGRIPGYPSAGYAYPAMYRDNMFIRTGTYTASIKVFTRNTWDWLEISLRKGDADYITRHCKNRRECVPTLHKRGKLWYLDFAFEEKIDLPDTEACGRSILAVDLGINSACTCCVMGPDGTVTGRKSLKLSGENDRLDRAVGRIKRAQQHGARRMPRLWARAKGISRDIAVKTAEFIVKTXXXXXXXXXXAQKAHRGRIRVSTVCAWNTSRLAFDGSGRVKRGKESEKTADNYSICEFSTGKIYNCDLNASYNIGARYFIRELLKSLPETAEQLLEAKDPSVSRRSTCTLSTLINLSAALTAAAV

SEQ ID NO: 10638 - protein, 382 aa, Haloterrigena sp.
LTDLSREDERLLFATIDEWRDACNLASDLAWKRYETKSDMQDLAYDRIRDETELGSQHAVLACHEVASVVTSCTEKLRNGKKASKPRFTARSITYDRRSMTVFPAKEQVSLTTLGDHARVRADLALPAEDDGYQYAFLDGEGWEYTESTLHYRDDEWYLHLGFRKLKADNAGSTTENGTVLGVDLGVNQIAVTSTARFFDAGELNHMRREFEKTRAGLQETGTQSAHRTLEARRGRERRYVRHVLHTVANGIVEEALEHGCDGIVFEDLEEIRMQLPEANWHSDWAFRTLKKYVKYKAEIEGLFIETIQPRNTSKQCAECGFTGDENRTGSEFECQSCGNRNHADYNAAKNVAKRYLRRGHQSSRRRGVSQYALKSGSRTPS

SEQ ID NO: 10639 - protein, 430 aa, Haloterrigena sp.
MAWKVTRTVRVRLEVPDDRKSDLHATNDRFHYCANRTSEWAWRYPDEDCITSKSKAEDALYEDLREETDYLHANLVQKAIKRAIKDIDNAVDRLADAENVSQPEYTTFSLVYDKRAATYHRDHVSLATPNGRVECEYDLPENPEGTPHGEYLLNEDYSFSTSTVHYDSEADEFYLNAVMKQEFDVESPEKAEDSKVLGVDCNVDDHIAVTSTGKFVGNADYLNHQRREFEKRRASLQQMGTRSAHLTYQRIGDRFGRWSRDSLHRVSKEIVQEACRHDCTHIAFENLERIREHISDSKKFQQWAFNAVQTQVAYKAEEYGIVVKTVNPQYTSQQCSKCGCTLEENRDGQHFECLDCSYTANSDYNAAKNVARKLALKLQRGQKSPTGGAFCQYALKSGTMTVNASDVASDTYVSAERESTDKPTASAVGS

SEQ ID NO: 10640 - protein, 369 aa, Haloterrigena sp.
MFAEIHSKAAQATVARFHRNLSNLRKKKKKGYNVGRLKRQSPSEYRSITYNQSGFDLDNKRGRDGFAYVRFSKIGWMKIRYHRQLPEHASIKEVTFKKEVTGEWFVTFSLETDDEHVPEKPDVDSLDASNSVGIDLGIQNYIHTSDGKTVDWLDLEDKYERLRREQHKLSHKEQGSNNYEEQRRKVAKVKRHIRRKVLDYQHKITTWLVKEYDAVFVEDLNVAGMLQQNGNARNKQDAAWRQFITLLEYKGNLYGTHVVQVAAHGTTKECAKCGVETAKPIWVRDHSCPSCGFETDRDANAALNVLQRGFSELGLGWPEDTPVETATATDTTQFESVSASRVIEAGSLGVVRDGKPSCDDERVSLSRTN

SEQ ID NO: 10641 - protein, 358 aa, Haloterrigena sp.
MVGVEQGVFHRAASRCGTDLSQHHRPRPTPQQRTQNRGVELEETTRISEFHVRQRGFELDEKSGRDGRGRLILKKVRGETIDIPIRLHRDLPDDAEVKHVSVKQESTGTWYASFDVEQEEPEKPDIEDIDPADTVGIDLGVLNFIYDSDGRSVDRLNLTDDREQLEREQRSLSRKEYESNNWEKQRQRVAEVHMDMRNKKRDFKHKLARFYTSEYDAVFVEDLNIKGMLEADGNARNKADVGWRDFIRVLKHHGRKHGCHVVEVEPAGTTKECSRCGVETEKPLWVREHSCPSCGLELDRDWNAALNIFSRGLEELGVVHSEEMPVETATAVDTVSVSASRVVEAGSPCLKEAASAAE

SEQ ID NO: 10642 - protein, 409 aa, Haloterrigena sp.
MSTTANKTLEATLVSPTAHKEEKLQDTLKTYREALQDAFDSGADTMNGVSEVVTPFDLPYQAKAALCSYIPKLRKTYNARELDDEHPLRLTNQAARFDYSSEREHEFTWWAPRPGRGTNFWIPLRINPEQEDLWHDLLNEDVKAGQIQLQKNRKNWALHVTVEYPVEEPTVDGDTTPVGLDIGETALITACGLKRGTPTRPVLWSGKRTKHLRKEMSTTLQRLQERDAEWRIDERFDYYQNALTDILEKASCEVVEYAGTFENPMIVMENLTYIRENLDYGKYMNRRLHAWAFARLQGRVEDKARDVGIPVEYVSPRYTSQTCHECSHIGKRSTQAELRCTNDHCRVSTFQADISAAASIAQRVDPWGESVPWKSERNDSPRDGSGSDTAVRPPKPSTPTQMTLGDDRS

SEQ ID NO: 10643 - protein, 261 aa, Halomonas sp.
MTKRAYKERFYPTPEQAALLAQSFGCVRFVWNNTLAYRTEAYQERKESISHSEAEKRLVALKAEYPWLKDVSSVILQQTLRDQKAAFDNFFNPTLKARYPRFKAKDGRQSIRLTKAAFRYRDGEIIIAKSKVPLPIRWSRPLPGAPSSVTLSRDRAGRYFISCLCEFTPEPLPATSRTVGIDLGLTDLFITSQGQKSGNPRYLKRYAARLAYLQRRLSKKQRGSNNRHKMRRQVARLHAKIADCRRDAMHKATRTLVNETK

SEQ ID NO: 10644 - protein, 226 aa, Microcystis sp.
  misc_feature (183)..(216): Xaa can be any naturally occurring amino acid
MRDMEKAYSFRFYPTPEQESLLRRTLGCVRLVYNKALHVRTQAWYERQERVGYAETSSMLTEWKKQEELNFLNEVSCVPLQQGLRHLQTAFTNFFAGRTKYPNFKKKHQGGSAEFTKSAFKFKDRQVYLAKCTEPLPIRWSRQIPESCEPSTVTVRLHPSGRWHISIRFDDPTIKPFPVTDKXXXXXXXXXXXXXXXXXXXXXXXXXXXXXXXXXXRMSSHESSGF

SEQ ID NO: 10645 - protein, 421 aa, unknown
  TnpB Polypeptide
MKLNPNNFQKTYFAKCFGCKRFAYNWGAEQYNKNLSEGVFKNGYDLKKEFNALKASQFPFVYEVTKYATQQPFLNLNIAIKDAWKNRKKGRPIKLPFKKKSNHESFYIGGDQIKILTKPNSNKQYLKIPLLDKPLKLTEKLKYNAKILSCTISRIYSLYFVSFTFEMSEEELMKSKAKLANLTKKAVGIDLGIKSTLTLSVPINLHMPKLIKKESKKLIKFSRQLDRKVHPRTKGDTTKKSKNYLKASFRLQKQYLRVFNMKKDFIEKVTSLIVKNFDYICMEDLNVKGLLKNHHLAKAISEVSFYMLRKKLEEKCNMVGKHFLLADRFFPSTKTCSCCGAYNSRIELSNREFNCEYCEVTIDRDFNAATNLYNYLIEKIGRVTAEFTLADLTALENDFYVNHLTTSKVETRNQYNFYSYL

SEQ ID NO: 10646 - protein, 291 aa, Hydrococcus sp.
MYACQPILVNQNNDLISLLKFLCEESHKLTNMGIYYARQLYFKTQKGIGKFDLEQEYKTNRHYKVLHSQAAQQILRTVAESFKSYYGLVKAYKAGKITEKPKIPNYRKKGGVATVSYPKQALKLKDNLIRVPLGKTCKLWFGLDRFFIPMPNNLDFADIKELRILPRNKCFYFEFVYEKQVDSFNLNPKNVLGIDPGLNNWLTCVSNLGTSFIIDGKHIKSMNRWYNKQVSTIKNKKPQGFWNNKLAAITEKRNRQIRDGINKAARIVINHCLENNIGTIVLVGIRGIKPK

SEQ ID NO: 10647 - protein, 373 aa, unknown
  TnpB Polypeptide
MSIKTHKYKLYKTKRLKYIHNTINISGIIYNHCIALHKRYYGIHKKHLNKFQLQKHITKLKKMDKHSFWKQVPSQSIQNITERIEDAYKRFFDYVKGKTKLKAGPPRFKSVRKYKSYTLKGVVGYKIKDNEITLNKRKYRFWLSRPLDGIVRTVIVKRDNIGDFYICVSLDQECPQDRVASGKSVGIDFGMKTFLTLSDSTKVESPLCHLKNLPKQRLLNRSLSRKKRGSNGRANAKLKLAKLHIKTANQRRDYFHKLSTILSTSYDNIFMEDLNIKAMQKIWGRKISDLAFSEFVEILEHKGNVTKIDRHYPSSKTCSSCGHVKESLSLKTREFNCTNCGLTVDRDLNAAINIKRVGASTLAREVVSTASAA

SEQ ID NO: 10648 - protein, 452 aa, unknown
  TnpB Polypeptide
MAHPAPKSDTETATVFNLGFKTKIENPTIAQRIYFAKACGVARFAYNWALEQWQKQYELHKADPEKNPAPSEAALRRQLNAIKPVEFPWMLEVTKCAPQHAIMNLGKAFRNFFRDPEKFRYPQFKKKFRHDSFTISNDQIKIEGSRIRIPNLGWVRMCEPLRFKDAKVLSVTISRGADDWYVSISCELTSLTHLKPAKNQGRVGVDLGILKMAVLSDGHVFEAPMPLKHALARLKILQEIMSRAKRGSRNRQKLRVRIARLHRRIANIRSHAIHKLTAFLASNYSEVVIEDLNVKGMMANHHLARAIGDVGFYEFRRQLEYKMALRGGLLVVAPRFYPSSKRCRFCGGKNEDLTLSDRSWVCPHCGETIEDRDLNAALNLFHYSKDWGSKTSASADVDGSSGSTSDKALPDTAPHDGVPASVADQALRGGDEEGALASPPAMPEEALTPSPD

SEQ ID NO: 10649 - protein, 472 aa, Actinobacteria sp.
VLVRHSTFKFCLDPTVEQSAALGRHAGASRFAYNTNLRLVRHTLTAKRRDESVKVPWSGFDLINQFNGWKKTDAAGRVFAVDTAGDTAQVDAGLRWRTEVCQQVFEEAAVDLGKALQAFSASKKGVRKGRKIGFPRAKRKGKCVDSFRLRNKHPKGGKAAIRVGDGGIPRSITLPGIGTIRVHDDTRKLRRLVLKSRAKILFATVSRRAGRWWVSLNVEAADLHPARQHDPLAAGDGVWVGVDRGLHAFAVAATSDGAEVERICAPGHHKNALTKQRRLSRALSRKQRGSAKRRKAAARLGRHHEHVRNQRHHFLHEVANRLAQHPRVAIEDLNIAGMLANHRLARSISDAAWSELARMLGYKQAWRGGTVTMVDRWFASSKTCSSCGDIKPELSLADRVFQCGSCALELDRDLNAAINLAAWAKAHSARDPQAAGPETNARREERSGHGTRRDETALIEAGTRKHQAADAA

SEQ ID NO: 10650 - protein, 396 aa, Chloroflexi sp.
MVILKAMKYRIYPTKAQAELLEKQFGCARFVYNRFLAVRKEYYLTHKDDPQKNGLNYYDTAAQLKELKKQPEYAWLKEAHSQVLQQSLMNLDRAFQNFFAKRTKYPKFKRKHGVQSIRFPQYFFVLEKHISVPKIGKVKAKIHRPLEGKPKNLTITKTKSGRYFAAVQVEVEVPEPQPKASAVGVDLGLKSFLVTSDGQEITPPKYLLKARKRLVRLQRHLSRCKKGSRGREKARLALARQHEKVANQRGDFLHKASHRLTQEFGLIGLEDLNVSGMVKNRKLAKAISDAGWGEFKRQLAYKATWNGGFVVEVDRFFPSSKRCSACHYINPDMPLSIRFWDCPVCGAHHDRDFNAAVNILQETLTRAGSAQSHAEGVSVSPIFGWAVHAELGSHPL

SEQ ID NO: 10651 - protein, 367 aa, Chloroflexia sp.
MKLVAQLKLVPTPEQATALRHTLERANAACNDISRVAWEQQTFGRFALQTLTYARIKADYGLGAQLTIRCLAKVGDSYKLDRSCQRTYSHHGSIAFDDRILSFKPASQTVSIWTVSGRETVAFVCGERQARLLRTRQGESDLVYRRGAFYLLVTCRADEPAPDQVERALGVDLGIVNLATDSDGESYSGAQVETSRERYTKRRAALQRVGTKSAKRRLKQLSGRQRRFQANTNHVISKQLVAKAKGSARGIAIEDLKGIRERRTVRHPHRARHHNWSFGQLRRFVQYKAALAGVPVVVVDPRDTSRTCSVCGGCDKRNRVSQALFRCRSCGHAAPADVNAALNIAYRADVMLPMVSDLRVQGQAALL

SEQ ID NO: 10652 - protein, 410 aa, Streptomyces sp.
VAAMQLRYAFRLYPDSGQRIALAKAFGCARVVFNDAVRAREDARKAGEAFPTAGHLSKQLITQAKQTAERCWLGEVSTVVLQQSLRDMEAAYRNFFASLKGERQGAKTGAPRFKSRKDTRQSIRFTANARWSVTESGRLNLPKVGAVKVKWSRTLPQQPSSVTVIKDAAGRYFASFVIDTDPAADATRMPDTDHTIGIDLGLTHFAVLSDGTKIDSPRFLRRAEKKLKKAQRELSRKQKGSNNREKARLKVARAHAQVADARREFHHQLSTQLIRDNQAIGVEDLAVKGLARTRLAKSVHDAGWAHFVHLLEYKAARYGRTLVKIGRFTPTSQVCSECGAKDGPKPLHIRTWTCTACGAVHDRDHNAAKNVRTAAGLAVTACGAQVRPGLVLAQRDEAGSHGFPSEDCAV

SEQ ID NO: 10653 - protein, 349 aa, unknown
  TnpB Polypeptide
LQGYSAYIVKSSLQPIETTYKEFFKDVKAGGKLNRKPPRFHGKWTTPPSFPINYISAKVSGDSLFVQKIGWMKMAGNNPYPDGEFKSGRVKYECGDWYAYLTYEVQAEASLPHCIRGVGIDRNIADGRLAVLSDGTKHGGPDLERKIARRKRYQRKMARQVKGSNRRKVTKLRLQKAFQAERFARLNWAHHVSKEIASEYDVAYMEKLNIRGMTKSAKGTVEKPGRNVKGKSGLNRQILASAWGTLELCLDYKMEVCKVNPAYTSQTCRSCGHVDKKNRKGTDFKCTECGHADDADVNAASSWPSGMGLLDVEVATPAGHPATVDLGSVRNGEGWQEILCQLSYIIPHL

SEQ ID NO: 10654 - protein, 338 aa, unknown
  TnpB Polypeptide
MVNNKDLTEDIMWQKEIPYDTRQLAIKEAVTAYHSNLEKMKRGSIDKFELHFKTKNNPVNLFHINDRSCKVQIKNNKKYLSLFPVILQNNSILRTRTRVSKLIPNSIDKDLKMTKDHGKYYIIITTEKDRNKELTKNRENIALDPGVRAFQTGYSDEGVALEFGKRHQDNLKKLHNKLDALRSVRDKTKLKITKRNLKKKIRSVYSKVENVVKDLHYESANILAKNFSRIFLPTFETQKMLIASCICSKTKRMMQSLSHYRFKQRLAHVCYRYGTTLHVVDESFTTKTCGKCGCLNNVGGDKIYKCSSCNYVCHRDIHGARNIFIKVVTEQWAATRAQ

SEQ ID NO: 10655 - protein, 338 aa, unknown; identical to SEQ ID NO: 10654
  TnpB Polypeptide

SEQ ID NO: 10656 - protein, 313 aa, Microcoleus sp.
MIVFEFKVKAKPTQYAAIDEAIQTSQFVRNKCLRYWMDNEGASKYDLNKYCSVLAKEFSFASELNSQARQASAERAWTAISRFYENCRKVETRHGASLQGFLADSNGHTEESPKFYRKSERQLNRANRKKSKKYRKGAKPQSRNYHKARKRYARKHLRVSRQRKEYCKRVAYSVIQSNDLVAYEDLNVKGLVKNRHLSKSISDAGWSMFRQWLEYFGHKYGKVTVAVPPHYTSQDCPKCHDRVKKSLSQRTHVCGNCGYVEDRDIAASLNILQKGLSTVGHTGTYAWGDLPSWAVGAILSSNGKSKNQESPLL

SEQ ID NO: 10657 - protein, 366 aa, Vulcanisaeta sp.
MKAHRTLLIKLPKDKCDTNYIRRLMALTNLAHRGFEVLAPDLLKTIQYQLYDFKNYTKSLVFGTTPKRWFARTWIPLTTLRIYSDDSMKGNRSALVVLDFRGNVIRLRQVCKNEPRYVVELPMPKWVIERIKEGGDVKYAMIGLKNNELYLALVAEREVEPYQPSGYRLVVDVNSWRYGIAWGLIHNGQLVSFKQEKPNLNELLTLYYQAVKRGRKHGALMRIGLHHTTQGKRLRRQAKARRGKIYRVTRDKAYFLAGKLVRKALKYKALLIIDDMTEESRKELLEEKLPPDVIKLLMSNLKRFVHQLETLAQWYGVPYEFKRLPSTICPVCQHELTQLPDRVMVCPNCGYKAPRDLVPIHWAMKL

SEQ ID NO: 10658 - protein, 280 aa, Vulcanisaeta sp.
  misc_feature (274)..(280): Xaa can be any naturally occurring amino acid
VFFLPLLLRRAVAVELEVTRELNRLLCSVESAYLNIVREVVEYAVKNNVTSATQLQGLFYSKYRSEYPGLHAHLVIQAIRQASQIAKSFIEKRRKGLVNKPYPEVKTVSIRFTEFTWSYEEFVKSVAPVRLELSLPGGRTEVWLRLHKRFWLYWWRVLTGEAELASTLLIKRKLNKWYAIFIFEIKPRQELPQSVVAFDINENTVAIGKIDLASTVGMVTNWNRQYVTPELYMIRTDFGRLARRYKAIRNTIIEKLKPEFALPNGKYVNVTNTXXXXXXX

SEQ ID NO: 10659 - protein, 587 aa, unknown
  TnpB Polypeptide
MRTSRPQQPLTYDVRLPDEAQADALRLLGASKVVVNQALTLLWPSLDEFGRERDGPAWKQVGKYMGSPQYHGDRQWRCESETVGRIVRQQAERKKAFELVQPILSDGFIRPKTEKRPAGKNRPAIKEAVTSLQKSLEEDETSFVALQNVIEQACNFFFRTDRFPTSYQELQPLPLLKVGMLTYAGDDGREKGQAYRLALDVEAGVARFRFRYPDEAGSWHWRTVETIIPLPDCLKERLDDGALMAPTLREERRADGERFAVLDFIVEVEKETLPAWESVERVLGADWGVHTLLTATAVDEHNEQVGRPMFLNTGGFDGRQARTRRQIDELKKKAATCEQERDVLPPDHPKRAWFNQRRAGYRREIDRCWRKYEQRNRALAHLASNVLLVLCQVQGCALLSMESLKTLKTTGRGKGVRGRWRNYRNNATIRGEIWRLLRYKCHLLGVRFHTEQPRGTSHTCPHCGKPAKTYRSPTDRNEAVNWGRWLCCEVCGFNGDRDYCASLNIARLGVAYLVQMQTVGKARPCSITDPRVKPVSYTGAGSVLLLPPTGINPARHVRGKICYCPGWLSSAFLQSSQPKAVFLRLCG

SEQ ID NO: 10660 - protein, 376 aa, Clostridium sp.
MIKAIKIRLKPINDQEILMFKSVGCARFAYNWGLSKWEEMNKNGLKPSKAKVRTDFNNSIKKNKDYKWVNEVSAQVTQYAFEDLNSAYDNFFKGLSKHPKFKTKRHSKKSFYVRYDAIKFNHGKVNIEKIGKVKYKTNYNIPNLPKYNNPRCYFDGKYWYLTLGFEHNENQVEINKDLSLGIDLGLMNLAIVNCLEKPIKNINKSLRVRKLKKKLKRLQRKVSRKYEANRQENKFIKTKNILEMERQIKLVHRKLNYIRLNHIHQATNKIVKLRPYRIVMEDLNISGMMKNKHLAKAIQEQCFYEFIRQIKYKCEFNGIEFFMADRFYPSSKTCSSCRNIKENLRLKDRIYVCPKCGLKIDRDKNASINLGNYKLA

SEQ ID NO: 10661 - protein, 184 aa, Bacillus sp.
VKEVKPNSILNAVGIGIDLGIKDFAVRSDGKTHKNINKTVQVKKIEKRLKREQRSLSRKFENIRKRGEQPVTNKRANINKNILRVQQLHARLANIRLAYVKSIVNDVVKTKPMFITVEDLNVKGMMKNKHLSKAVAQPCFYAFKTWLSTKCREYGIELRQVDRFYPSSKICSCCGQKKVGFKAV

SEQ ID NO: 10662 - protein, 401 aa, unknown
  TnpB Polypeptide
MLVQRASLYRLEPTPEQAEAFAQWAGACRFVYNCGLEQRRDWYRHTKLSFAQQCREVTEARAAFDWLAAVPVHALQQALRDLDAAYQRFFAKLGGYPRPRQKDRNDTFRLPDPSYLGFKRLSKRRGAIKVPKLGWIKCRDWRPLGGELRNVTIRRKAGHWYAAIQWQREIADPAPKNGPAVGIDRGVAVFAALSDGTKIAPLNPFRRIETKLAKMQVRLARKTKFSANWRKLKAKINRVHSHASNARKDFLHKRSIEIAENQGVVKIERLNVRGMSASAKGTVEDPGRNVRAKSGLNKSILDQGWYAFATMLRYKLAERGGRLEEVPAAFTSQTCAKCGGVDHENRVDQATFSCRHCGHEANADVNAAINILQARTLAVEPPKRVRIKRAGKRKHLGKVSP

SEQ ID NO: 10663 - protein, 385 aa, unknown
  TnpB Polypeptide
MRTFEYRLYPNKRQRQQLMACLKDSRGLYNEMLEATKQQYAQTGKFLFKYDLTAQFKGRGGDTIPATTVQMLADRLDKALRRYLALKEQGIPCGFPRFKTPNRWHSIQLRQHIKDFRIQADGKHLGVPAKVGLSLKIKMHRPIEGTPQTCHLVLRADGNWYALIVCEPIETEQTHQESAGACAHPDIGLDVGLKVFLADSEGNTVANPRHYRKSLRTLRRKQRTLCRRKKGSKRRRKAARNVAKTHLKIKRQRRDFLFKTAKPYAEGYKHICVENLNINGMLQNHHLAKSIADASWGTFIEILEDMAARAGHQVVKVPARFTSQQCHQCGEIVQKSLSVRTHLCPFCGYVEDRDVNAAKNILTAGAPPSGTVQDAEPDEPRSPLL

SEQ ID NO: 10664 - protein, 456 aa, Dictyobacter sp.
LCASATTGLRRSVSATARTFSSSMMKRSHPKKNWCGMSSPSSRCFLLVCMDCVPTRTPCVQQHGARKSAMIKAHKIRLHPTPEQLAYFSQAAGISRFTWNWALAEWNRHYEAGEKPTAFKLKKQFTAIRREQFPWTWDVTKNASDQPFFDLAKAFTAFFEKRAQRPRFKSKKKSKPSFYLANDQFELKDHHVWIPKLGWVNLAENLRFKGKIMGARVTKKADWWFISITVDIPDEVPQKRPAAVGVDVGLNRLATLSTGEECENQAFLKTNLKKLRQANKRQHRRTPGSKNREKARQQVARLHYRITCKRDDVLQKLTTRLADCYGIIGIEDLHLKGLLKNRSLARSFSDAALGKLLDLLTSKVEQRGGQVVKVGRFFPSTKLCHGCQWKWDEITLADRVFVCQNPDCAYHLFSQDRDHNAGQNILREALHLIGLIDQVVNGSSSDEDANLPVDLG

SEQ ID NO: 10665 - protein, 391 aa, unknown
  TnpB Polypeptide
MSKRAYKYRFYPTPEQARNLACTFGCCRFVYNWALRLRTTAYFQWGQKLYYNDLSEALTALKKGEGTLWLKDVSSVPLQQALVHLDKGFVNFFEGRTKYPIYKKKHSTQSASYTASAFRWDGTHLILAKQEEPLDIVWSRALPKGCKPSGITVSKDKSGRYFISILVEEEITHLPPLDKSIGLDLGLKSFVITSDGETIANPKYYARDEKKLAKAQRQHAKKKKGSKNRNKARLKVARIHARIADQRRDFRHKLSTRLIRENQVICLETLAIKNMLQNHRLAKAISDVGWSEFTRQLEYKAEWYGRTVVKIDRWYPSSKTCHVCGYVMQDMPLEIRVWMCPQCRTVHDRDINAAKNVLAAGLVASACGDHVRPGVAKATSGTGRRSRKPSS

SEQ ID NO: 10666 - protein, 408 aa, unknown
  TnpB Polypeptide
MKRSNLFQLAPTADQHHTLRELGVNCAKLWNEVNYLHHQQYGNYLRLDWNPQLYKKYVPLVGSATAQQVVRKNNEAWRSFLALKRIQKRGQLPPTLKRVVPPGYWKRDGRYLLRMLFRCDSYHIRQGRVNLPHDLSIPFKGELKWAGKQGRLEVVWDSLSKKWRVFQSVQVKPIITPLGSKTCYIDLGVRNLATVWLTEWRQPIAYQSGRLLADWWYWTNRIARHQQRLVALNGRKKSKQLSRLYRIRKRRFRHAVATFARQLVKDLYRQGMSTIVIGELTGIRENSQHGRQGNAMVHNYWSHKYVADRLRWTAEEYGIRIRTISEAYTSQTCPRCGSRNTERILRRFKCLNCGLEAHRDAVGVVNMAARCGEYAVRPMVWPMLLHWDGCGWNRNNGMPTLERIIVEA

SEQ ID NO: 10667 - protein, 371 aa, Clostridium sp.
MILAKKVRLYPTKEQEQKLWQSVATARFIYNWTLNKQEENYKNGGKFIRDNDLRKEITQLKKDELSWLNEVSNNVVKQAVKDCCNAYKNFFKGLADKPKFKSRKKSKPSFYNDTSKLKAKHKSVLIEKIGWVKTKEQVPTDVKYTNPRISYDNKYWYLSVGIEQEQPTIQLTDESLGIDVGVKDLAVCSNGMTFKNINKSKEIKRLKKSLKRKQRQCSRKYEMNKKGKEYAKTKNIAKLEKQIKLIHRRLSNIRLNYIHQVTTKIVKTKPSRIVMEDLNIKNMMKNKHLSKAVAEQGLYDFKMKVKYKCEFYGIEFIEADIYYPSSKLCSCCGSIKKDLKLKDRTYKCSSGLSINRDYNASINLSRYKLAI

SEQ ID NO: 10668 - protein, 368 aa, Nonomuraea sp.
VAQIVKRAYKYRFYPTPEQAGELARTFGCIRLVYNKALEERTRAYTLEGRRISYAESSAMLTAWKRSGDYDFLSEVSSVPLQQALRHLQAGFANFFAKRAEYPTFKSKKKSRLSAEYTRSAFRWRDGTLTLAKMGAPLDIVWSRSLPEGAEPSTVTVSKDSAGRWFVSLLVEEKISPLPPVRQNVGVDAGITALATLSTGEKVVNPRHERRDRRRMAKAQRVLARKEKGSNNRAKARLKVAKVHARITDRRRDHLHKVTTRLVRENQTIAVEDLTVRNMVRNHSLARAISDASWRELLSMLKYKAAWYGRTLVAVDRWFPSSKLCSACGALQDKLPLNIRAWTCACGAVHDRDVNAAKNVLAAGLAES

SEQ ID NO: 10669 - protein, 347 aa, unknown
  TnpB Polypeptide
  misc_feature (337)..(343): Xaa can be any naturally occurring amino acid
VRDQLPDLKNWWDDLTDLYSTVAQAAVMRIEDSIKSLSQLKQNGSTVGSLNWKAPSEFRSFTYVQSGFEFDKKNGQTVLSLSKLADIPISYHREIPDTVSIKEVTIKKERTGEWYASFAAEHKEEPAKPNNLDRCVGIDLGILKDAHDTDGRAVGSLDLQEERERLEREQRSLSRKQHGSNNWEKQRLRVAKYHQRLRRKRHDFLHTLSNYYATEYDMVAVEELNVRSLLESAGNSQNTASAAWDMFTTLLEYKCKREGTHFVEVEPAGTTKQCASCGVESDKPLWVREHSCPACGFKMDRDANAAINILSRGFDRRGLGQSEGTTPVKTALPLFTXXXXXXXWFLQ

SEQ ID NO: 10670 - protein, 393 aa, unknown
  TnpB Polypeptide
MIETIKVQLRPNNKQLAKLFQHAGCSRFAYNWTISREQENYKQGNKFLQDGELRKEFTQLKKQDDYKWLTNISNDVTKQAIKDACNSYKRFFKGQTKYPKFKSKKNSKQSFYQDNIKIKLTNTHVKIEGFATNRKKNKQKLNWIKLCEKGRIPTNCKYMNPRFTYDGLHWWVSVSIETKNNTNSPPNNEGIGIDLGLKDLAVCSDGSTYKNINKTLRVKKIEKRRRRLQRSISIKYNMNKEGVRYKKTSNIVKREKELLKLNKRLTNIRRNHLHQITSEIVKRKPSFICIEDLNVSGMMKNKHLSKAIQQQGFYEFRRQIEYKAKWNNISVIPVDRFFPSSKLCSCCGVIKKDLKLSDRIYRCDCGNIIDRDYQASLNLKQYVENVLKQKSVE

SEQ ID NO: 10671 - protein, 386 aa, unknown
  TnpB Polypeptide
LWRSFESYSQFKKQKVVIRIDISYKFRIYPNKEQMNMIDNICGCTRFVYNHYLAKKIELYKESKKTLSYYDCANDLTKLKKELTWLYDADAVALQQSLRNLDKAYKNFFNGIKKGQKVGYPKFKSKRSPVQSYRTNKVKLEEKYITLPKLKRVRCKVSREVKGRILSVTVSKTSTQKYYVSLCCTDAEVEQYPNTGRCVGLDVGIKDLIITSDGVKIDNPKYIIQSEKQLIRQQRKLSRKTKGSKRYEKQRIKLAKLHEHVANQRNDLLNKISTDIIRNNDVVCIEDLCVSGMMKNHHLAKSVSDVSMYELRRKLQYKSDWYGRQLVVIDRFFPSSQTCSVCGFQNAEVKNLSVREWTCPQCGTHHDRDVNAARNILNEGIRLMAS

SEQ ID NO: 10672 - protein, 403 aa, Lentzea sp.
VIRAYKFLLRPTARQKQALGEMLRDHCSLYNAALQERRGAYRHTSNTRISYSDQSVQLKEIRAFDSECQGRWSFSSQQATLRRLDNAFVAFFRRVKAGQKAGHPRFKGVGHFDTVVFPRDGDGCRWDSTPDDRQTRMRVRGVGQIRVHRHRPAQGRVKTISIKREGTRWYVILACDSVSGDPFPLTGRRIGIDLGVTHFLTTSDGVHIENPEIGKRAGATLATAQRKLRSFPKRRRGRSKAHRAAVRKVAKLHATVRRQRLDFAHKAANFVIRDADVIACERLNISGMTRTPKAKPDLDNDGVFLPNGAAAKSGLNRSILDAGWGIFLSILAYKAESAGRRVIQVDARNTSRTCPDPECAYVAADNRDGESFACLKCGLIEHADRVGAINVNHRAGLVLCTEA

SEQ ID NO: 10673 - protein, 388 aa, unknown
  TnpB Polypeptide
MTVRHVAQRIPFRPNNTQKALLEQCFGARRFVYNQQVEAFDSYDRESNPVPKYPNVTDLKNRFPWLRDCPLPSNAMSQSIRDFAKAKGSYFRKARYEKNRPRFASRNDNIQSFRNCAPIRHMEGNRYLLSRKLGSVRIRKRDRLRYPIENLSSWTVKRENQTYYLTLLFDVDIQPMPKAEGRVGIDLGVKDLITLSTGEKIGYGDRLKKLETDVIRQQRMLSHRMKGSNRYRKQRLRLEHAYVRLRHYRENMRHQLSHRLIEENQLVGLETLAVRNMVRKVKPKKSPDGRYMRNGQNCKRTLNRLIHRASWSGFVSKLVYKAEWYGRTLIQVGRFYPSSKLCHECGWKYKELKLSEREWTCRNCGTRHDRDVNAALNILAEAERLAAS

SEQ ID NO: 10674 - protein, 233 aa, unknown
  TnpB Polypeptide
VDLGLETDATCSIMDKDGTVYARKFISFSKEHDQLNTQLGRIKRNQKRGSLHNKTLWRSVSGISQDIADKTARAIFEFGKEHGVDVFVLEYLDFNGKKAVKRAHFWRYKRIYKVLTQKAHQYGLRIARVNARYTSRLAFDGSGWAKRGSEIAPATSYSTLQFSTGKFYNADLNASYNIGARFFIRHLLKTVTVTQRLALEAKVPQVAKRSTCTLSDLINLRSALAVLTAETQA

SEQ ID NO: 10675 - protein, 422 aa, Trichocoleus sp.
VLSLTYEYKAIPTPGQVQIIEHTLNVCRQIWNFALRERKDWINSRKCQINACSITSEYIVPADAIYPNYYEQANALTKAKLEFPELKTVNAQVLQQVLRKLETAFVDMRRKGAGFPRFKNRYRLRSYVYPQLGKAQFLRDNQIKLPQLGWMEYIKSREIPEGFVVKQARIVRKASGYFVMLTLECDVNVPATMAHGHPVGVDLGLDKFLATSDGLLVDRPCFFQVLHRQLKLLQRRLKHKEKGSNNRHKLNQKIARLHQRISDTRKDWHFKLAHKLCDGAGMIFVEDIDFRVWAKGMFSKHTLDASFGQFLKILQWVCWKRGVYFAKVNKDYTSQVCPQCDTHTGKKELSDRVHSCPECGYTTHRDVAAAQIIRNRGQSEVGRILDSKKNACGDGLTGTGNSLVKSPRSKKKGGEARLESAS

SEQ ID NO: 10676 - protein, 218 aa, unknown
  TnpB Polypeptide
LSYTEDIEVQVTNLPDYTEGVGVDLGIKTLATISDGTTVPNIKTFRRVRILEKRLKRLQRKVSRKYLINKCNKHNKTKNIIKLERQIKLIHRSIKNIRINHIRKFVSELVKTQPEFIAVEDLNVKGMMKNKHLAKDIANCSFYTIKEHLIRKAKERKIAVRLVDRFYPSSKTCSYCGSYKQDLKLNQRVYPCDNCQEKIDRDLNAAINLANTDKYVLA

SEQ ID NO: 10677 - protein, 444 aa, unknown
  TnpB Polypeptide
MHKRKYTVVTQLHEQTNKDLIEYVEVARHAYAKAVRETFYCIKNSKDLNKSSFNTYLQQTYGITRRTANSILLDAQGRINALKELKLYEKTQLERKIKHLETSVIPKLEQKRDDNSTMLRLGLPVSLVSQRNLRRKIVAKKQKLNRLKQKLVNLTYQIETSSFEFCFGTKHLLQRDYTAFVNQRDSQMSFVGSKVEPSCNQQFQLRYNPKNNQFELKARKDFGGFKELKGSDRYAFGKVYFRHHKDKLVRILKEKTSPLSFKIIKRNNRFYLHCTFEVQLDSEDFLTRSTHGTIGLDFNKGFITLSETNQYGHLVQTQVLPYRFKSGNKTKTDLQQVVSKVINLSLYKGKDLCIENLNFNNNKAKTETKQGKKYNEMLHSLAYSQFIDLVESIAYRNKVFIRKVSPAWTSWLAKQKYCPQMKLNVHVGASFVIARRGQGYKDTV

SEQ ID NO: 10678 - protein, 240 aa, unknown
  TnpB Polypeptide
VRVKAHRQPTGIIKNATISMTPTGKYYVSILCETEISPLPKTNTSVGIDLGLSDFAILSTGEKIGNERFLKQLSEKLAKEQKILSRRALAAKKAGRKLSESKNYQKQRVKVARIHERIANMRKDFLHKLSTYLVKNHDILCIEDLSSKNLMKNHKLAKVIGDVSWSEFVRMLEYKADWYEKQVSKISRWYPSSQLCSDCGFSSGKKPLSIREWTCDNCGSYHDRDINASINILNEGLRLA

SEQ ID NO: 10679 - protein, 713 aa, Actinomadura sp.
VKLVVRVKLLPTPEQAAALAETLHACNSAAGFVSRAAFERKVFSRAGLQKLVYGEVKARGLSAQPALHVIRKVADAYTVLHAQIAVGLLGKPGSRRRARAEGRPVRFRPDAAQPFDDRCLSWRVDARTVSIWTVRGRMKDVAFTGEPSQLKMLAEHRRGESDLVHRDGRWFLAATCEVPEAPLNADPADWIGVDRGVVNLATTSDGDNHQGRGLDRYRRRMARVRAELQARGTKSAKRKLKRRARREARHAAHVNHTIAKTVVADAQRTGRGIALEDLRGIRDRVRLRRHQRATHSSWPFHQLGEFIAYKARRVGVPVLEVDAAYTSQRCPRCGHVSRTNRPSRDAFCCVVCGLAGPADHIAAVNVRARARTAWAFVNTPDAAVSPSYRRGSHEPQTRLLEGVVDVDVTQVTALGIGELARLTGVPVRTIRFYCDEGILEAGRTYGGHRRFGPDAVERLRTVRRLRALGLGLPEIGRVLAGERSLAEAVAAERAALDAELADLAWRRASLRAVEEADPAERARRLDLLAAAERGAAARDALVAFWRGLVVAQVPPGLMEAFLHGTVPDPPPDPTPAQVVAYAEMVALAADRSLARTLRAGVRRAAAEIADEGALMLGAHEASAMVRPAVAAGRPPAPGPALDLFVEAHATARDTRDTPGFRRRLLRTVSAGQDERMDRYWRLHGEVTGDPVTLGAAQSWLVAALATTCPPPSE

SEQ ID NO: 10680 - protein, 384 aa, Actinomadura sp.
VQLRYNFRLYPTAGQRTALARAFGCARVVYNDGLCARREAHERGLPYVSDGELSRRVITEAKKTPQRVWLGEVSAVVLQQALADLNAAYRNFFASITGRRKGPKIAEPRFKSRKDSRQSIRFTRNARFTVTAGGRLRLPKIGDVPVRWSRSLPSEPSSVTVVKDAAGRYFASFVVEVGDEPLPEAVAEVGIDLGLTHFAVLSDGRKITNPRWLRRAERRLKKAQRALARTAKGSNNRTKAAAKVARAHARVADARRDFAHQLSTRLIRDNQAVYVEDLCVSGLARTRLAKSVHDAAWSQFVAMLAYKAARHGRYFGRVGRFEPTSQTCSTCKVKDGPKPLHVRAWTCPVCGTRHDRDVNAAKNILATGRADRLNACGGAVRPAA

SEQ ID NO: 10681 - protein, 395 aa, Nostoc sp.
MEQAFRYRFYPSPEQEILLRKTMGCARLVYNRALAARTEAWYERQERIDYLKTSSLLTQWKQLEELQFLNEVSSVPLQQGLRHLQKAFANFWAGRAKYPNFKKKHHGGSAEFTKAAFRWKDGQVWLAKCVEALPIRWSRELPDGCEPSTITIKLDPSGRWHVSLLVDNLSIRQEPKSDKSIGLDVGITSLIATSDGDKIDNPKHFRRLRSKLKKAQKSLSRKQKGSNNRHKQRRKVAIVHAQIADSRKDFLHKLTTQLVRENQTIVVEDLAINNMVKLPLLAQSISDASWGELIRQLTYKCEWYGRTLVKIDRWFPSSKRCGNCGHIVEKLPLNIREWDCPKCGTNHDRDINASKNILAAGLAVAVCGANVRPDGRKSKGQLRKTSDGKKQKPKS

SEQ ID NO: 10682 - protein, 206 aa, Bacilli sp.
LLVEKVIPTNIVGIDLGIKDLVITSDGIKYCNEKVLTKYEKRLKRLQRKLSRQVKGSKNYLKTKEKIARIYSKIKNYRKHYLNEIANEIVDEHDIIVTESLLVKDMFKDKRKAFNKSLSDACVSTLRSLIEWKCKLKGKIYYKINTYYSSSQICSHCGYKNSKLKDLSIREYDCPNCGSHNDRDINASLNILFEGLKLHYNLVSLL

SEQ ID NO: 10683 - protein, 381 aa, Caldiserica sp.
MRKAYKFRLYPNTEQQAMFAKAFGCARFVYNQMLADKIVQYKTDKTVLHNTPAQYKGRFKWLREVDAFALCNAQLQLQTAYTNFFRHKSVGFPNFRSRKSHRDSYTTNLIHDNICIENGHLKLPKTGLVCIKLHRQIPVDHKIKSVTISCTSSGRYYAAILTEYEFTPPVVALDESKALGLDYSSPHFYVDSQDTEADMPHFYREAESILNREQRRLSRMVRGSNNYARQKRRIAVMLERVSDCRKDWLHKQSTELANKWDYVCVEDINLRGMAGSLKLGKSTNDNGFGMFRLFLDYKLAERGKRLVTINKWFPSSKTCHVCGAVNHALTLKDREWDCACGAHLLRDLNAAINIKNAGLSLVNTNRGVHGDSSLILSRSCS

SEQ ID NO: 10684 - protein, 380 aa, Lactobacillus sp.
VTLKGIKVRIYPNQEQQLKIKLNFGYNRFVWNQMLNMMIERYKNNPEAKFLNAFALNNLLPALKVEYPWLKDAESTSLQSTTHDLVEAYKKFFKLHKGFPKFKSRKFPKQSYQSKMGIKLIDKHHLKLPKLGTMYFKSGKQPQGKIKNVTIRLSATGKFYAALLVDTDIEPLAKTSNSVGIDMGVADLMITSDGVKYPTIRFDKLLSKKKHYWEKRLARRRLQAQKEIAWDKHNKVIEPRELSDFKNYLKAKRMVAKYNEKIANQRNNYLHNLTKALVEQYDVIKIEDLKTKNLLKNHKLSRAIANQSWRGLRSQLEYKCEWYGKQLVTVNPRKTSQICSSCGYDDGKHTLDIRQWTCPNCGINHDRDINAAVNILQATA

SEQ ID NO: 10685 - protein, 291 aa, Microcoleus sp.
MIGNCQVRFLGEEGTATFPSLPDKTTGWRLADDRKSITFTDKQGIGKLKLKGTRDLHFYQRSQIKRVRLVRRADGYYVQFCVQVDRTEKIEVTGNAIGLDVGLKEFYTDSNGVAVENPRFLRKGERRLKKAQRRVSKRVKGSQNRRKARVVLGKRHLKISRQRKDFAVKLARCVIQSNDCVAYEDLRVKNMVKNHCLAKSINDASWYMFRVWLEYFGKVFGRITIAVPANGTSQECSSCGTIVKKSLSTRTHTCRCGCVLDRDWNAARNILSRGLSTVGHTGRDSFARNYE

SEQ ID NO: 10686 - protein, 419 aa, unknown
  TnpB Polypeptide
MKVTRTERTIISETHPHYKLLKDFCHESKNLYNYGNYILRQKWNEKDWDWFSKYGLRDYLRKNQETEGNPWNRQSTSHAAAETILSLTNAWKAYFSSVKSYNKTPEKFKARPKPPSYLPKNGHYIITLDTTNAKVKDGFVKFPKTYNGLTIPFTKADKIQCVRIVPHWNNITIEVVYLLDVPEAKPDNGRYLSIDIGIDNFATITSNIVGFQSLVLNGKGLKSINQYYNKQKAYYQSIADSQGQRKQTDRLQRLTEKRNRQINDFMHKASNYVAELAQQGDVSHVVIGYNAGWKNEVNIGRINNQKFVNIPHLSFINKLRYKLENIGIELVVTEESYTSKSSFLSGEFPDKKPQYSGERKYRGLYIDKSGIKINADCNGSYQILKKVFPDAYSNGIVGVSLHPVKVSVSDVRKGRKALA

SEQ ID NO: 10687 - protein, 396 aa, Thermoanaerobacter sp.
VRFKKNEEKIILCKKIAIHPTKEQIECIERDSNLCKILYNTYLRQRIEYYNCYGKTITMSEQRSQIKLLREQNTEYAKVYAKHLHAVCIDLDTDYKNCLKKRANGKKSKLPRYKNKDYFYPLKTPKEYVKINDNKIKLGFYEFDIDINEIPKNYGEVWIIKSRNKYMLSITYEVEKIENNSNNILAVDLGISKFITGISQDGKVIEIINPRYDKYWNKKIDKVRSMRDKKKKGSRRYKKLTKTLNRLYEKRRKQQEHFIHAITKYLVLNNKEIILGNLSQEQMVKKSKMKALNRSIKENWGVGKFKTVLTYKAKLHGVNIVYIDEAYTSKTCSNCGRKQDMNLSKRVYKCQCGMELDRDINSSINIFNKYKGNKELNYKEISQVTTLHFRYGKLVA

SEQ ID NO: 10688 - protein, 454 aa, Methylophilaceae sp.
MAETLSQWIGCARVIYNGKCDEDRYLRKFASKYLPIGTFPEVNKTASQFKDPELTPWLSDCPSQILRNSATIWANTYGRFFKGLGGRPQRKTKAKGNYIWLTKELFRIRWENSMCMLTLGTMANPIGTVRVKWNKSRIPKQTPNSVWIRKTAHRWYLSFSHDDGNLVQEVQSKDHLEHLKRFSATELEAMITPVDRGVAKPLHTHNAIYVMTQSETEKLAARECKLRRYQRLMARQVKGSNRRKKTIQRIASIHEKTANVRENFWHQTSRALVDNSQVVVIESLQLKNMTRRAKAKQDEHGRWIKNGAAAKSGLNKAILGVALGRFEVLLKYKMDKACKPFFKVAPHHTSQECACCGHIHPGNRRTQADFECLACGHRDNADHNAAIVIRKRAIDLILHSGTELVGASKNVLQPRANANPRKTLAAKAVNATGCLSKKKVTTKQSLEARCFISE

SEQ ID NO: 10689 - protein, 472 aa, Escherichia sp.
VKRLQAFKFQLRPGGQQECEMRRFAGACRFVFNRALARQNENHEAGNKYIPYGKMASWLVEWKNATETQWLKDSPSQPLQQSLKDLERAYKNFFRKRAAFPRFKKRGQNDAFRYPQGVKLDQENSRIFLPTLGWMRYRNSRQVTGVVKNVTVSQSCGKWYISIQTESEVSTPVHPSASMVGLDAGVAKLATLSDGTVFEPVNSFQKNQKKLARLQRQLSRKVKFSNNWQKQKRKIQRLHSCIANIRRDYLHKVTTAVSKNHAMIVIEDLKVSNMSKSAAGTVSQPGRNVRAKSGLNRSILDQGWYEMRRQLAYKQLWRGGQVLAVPPAYTSQRCAYCGHTAKENPKSAAGTVSQPGRNVRAKSGLNRSILDQGWYEMRRQLAYKQLWRGGQVLAVPPAYTSQRCAYCGHTAKENRLSQSKFRCQVCGYTANADVNGARNILAAGHAVLACGEMVQSGRPLKQEPTEMIQATA

SEQ ID NO: 10690 - protein, 468 aa, unknown
  TnpB Polypeptide
MSIIVNGREYASEKNAQIALTRNNTRKRRETQVCKVYDLKIDMSKLTQEQEKALKGTFLEAKWIYNAALNTGKPTKYVPGKTVEVKNRDGEFETRKLEYIGSQVKQSVITSIGSSLSSLKAKKEKGYKVGKLKFARRVKSVDLKQYNATYRIFPENDKVRVQGVPGKMKVYGLHQIPDNAELANAKLIQKSSGYYLKVTAYLPKDDESLVNDYVPGTVEGIDMGVATHITLSNGVKISTTVVEPPRLKRLQRKLDGQYKRAEKLQKAQGLNYLPLSQNYYDTLEKLRKEYEKLNNRKDDLAKQIVSVLMRNETVFFQDEMLTSWKKWFGRQLHHSVLGRVKTLLKDHPRAVMIPRSIPTTQWCKYCEQNTKHELKERIYQCQYCGYSEDRDIHSADNMIYFGLSDVDNVPMERRELTPVPMDQYLKLGPLGCIVKYTERVLNLGELESSTLGIPPSVKQETHPTLVGG

SEQ ID NO: 10691 - protein, 177 aa, unknown
  TnpB Polypeptide
MYHIGWDKVRKSKDNEKEWEKAVKTAKATVTQGKRQQQLPEEEKRNCNMHEKIRNTRKDYLHKISHEIVSENQVIVSENLQIKNMVKNHHLAKSISDVSWYELTRQLEYKSKWNGREYIRIDTFYASSQLCYTCGYQNTATKDLSVREWICPNCGTKHDRDINAAKNILAEGLRQIA

SEQ ID NO: 10692 - protein, 391 aa, Halococcus sp.
MSEVTKTLELKLVSPNAHKRRKLHETTDTYRSALHAAFDAGCSTQSAANDVVVEYDLSGYAKNALKKYVPQLCGGSYDADELHDEHPVRFTNEGVRLDHKPQNAVEWYVKVPHHDDYHLWIPAQPNPEQRSWVEAVLAGDADMGECRLFNRDGEWFLHMVATREVEQRPTDSVSDETPIGVDIGESALLTVCHRDERGTPTAPTLWNDEGKEVRRLRKTYFTATKRLQERKSERIAESFGDRLWRQIDHILHSVTDAVVEHAASAENPVLILEDLTHIRESMGYGAYMNRRLHGWSFAKMHAQLCYKAAERGIPVEAVNPAYTSKTCHVCDETGYRPEQAEFRCTNDECWVSEYQADVNAALNIADRYSSGERAVQENTRTAMTRLGMGRV

SEQ ID NO: 10693 - protein, 389 aa, unknown
  TnpB Polypeptide
VKLVVQVKLLPTLEQARALEATLTVCNALATSISAIAHENKVTSAFSLHHLTYHQSAGSGVSAQPRVRTIKKVADAYKTLRANLAAGNYGRVGSPKRLKVEGRPVVFRPDAAQPFDDRCLSWQHQATTVSIWTTTGRMRGLAYTGLPAHLELLATRRQGESDLIRRGRNWFLVATIDLPNVAPADPAGGFVGVDLGIENIAVTHNPTTGEHRDWSGGAVTARRHKNRVLRTRLQKKGTKSAKRLLKARSRKETRFAADINHQISKTIVAEAKRTGCGIAVEDLTGIRQRVRLRKPQRATHSSWAFAQLGSFLTYKAAREGVLLLQVDPAYTSQQCSACGHIDRKNRLSQADFCCRACGFSLGADRNASINISMRGKDQYVAAVNQPNAA

SEQ ID NO: 10694 - protein, 325 aa, unknown
  TnpB Polypeptide
MRLEECLCYLEGDHVVLVIEPRSKLYIPFQPTSHLKQLKTQKHGEITLKLNPDRTMDIFIPFTREVQPREVKSLLFIDTNERSVDFLLVNETSAQIKSLDTSQLSTTHFTYSLKRRNIAQKIAQDSKYQPQKRKELLDKYGKRERHKTANIMHEVANEIAEFVEVNEALVVFEDLTNIRQSSARQKNLKSRQQKKSKRMRRRLNRWNFRQFQTYLEYKVKATGHPVKYINPRYTSQICLQCGRRTKCWGQTFTCKHCGFTMDRHVLATLNIGEVFLKTQNVARSDPAERSRMTMMERAVRNCKETIIREASQCNEIIGIYPLLST

SEQ ID NO: 10695 - protein, 565 aa, Mycobacterium sp.
MTELKLREWRGVKPVATATGVAIGTRLRTSAQDEPVLDAVAAHLGRLRRADLAATSRREPVDPTLGSQARQQVRRTRLNARKRALTAHSSARWANAIIAANDDQYRLARDAGYRHIVGLRAAIATIEKRLAAPAADTLTPAERTARRKAHATKGYASQQERFTKQQRLQRLRAQLAWVENDRAAHRVHVVEGGKRLATTRHHLEDAGLSVDAWRDQWAAARYRISANGSPDEPFGNLTITVTPAGEVSVRLPKPLEHLANAARGRYVLSCPAVFAHRSQQWEERITSGNSVSYTITRKPGRSGRYLTATWSVPSSPSSVGHDDQSDDGDGCASGPLVAVDLNDGHLALRRLDSHGNPIGAAHRIDIDLTGSTSRRDAQVRHAITGLIHYAQRYGLATIAVEDLDFTDARTTGRETMGRGQRGKRFRRAVSGIPTAVFRNRLTTMCPRAGIDLFAVNPAYSSIWGAQHWQRPYPNVTRHQAAATVIGRRAQGYSARRRKGVTPTRPEDRAVRATNQAVHEQSRVSGNRHRSGIRGTQSRPPNRNERGDPRRATVTPAPANSGQLQL

SEQ ID NO: 10696 - protein, 250 aa, Bacillus sp.
MKKTPPEFAYTYENSVKVFFCFNTSVHHPEEILWKVNEMTKQNKAYKFRMLPTEEQAYLMRKTLGCVRFVYNRMLAERKEADEKYKDDKEQLKKQKPPTPAKYKAEFEWLKEVDSLFLANAQLNLQTAYKNFFRGHNDFPTLKSKKDRKSYTTNVVNGNIMLLNGHIKLPKLKMVRIKQHREIPQDHIIKSCTISLTPTGKYYVSILTEYEKEIVRKEVETVGGETLRRIDYTLVPRMRKSIILSSFVTC

SEQ ID NO: 10697 - protein, 688 aa, unknown
  TnpB Polypeptide
MAKDIILTRQFVTDLDLKPSVFKDNQNIVNFFIEDLRNNSQIFLPEDFENKGNTSVKSLYNKYKKYLNNNNRVIPYPGYLERVYRCNFQYAYFAIRNYHKRRELLFSVGKRLLPHPWWEDWDSISKIISKKKLNVLETSNVVRQYRRLLQNIIKDSKFLDTTQTKMDFIEFTKIYEPDLDEKTYKKLLTGFKQRVGKILKKSLNNLKKNPDKQGWGEVLVSKISSDFTQWQRDKKIWWKSKNEELKNVSRENLLNNFSFTDSIPEFDEIVNRLFFPRKARGRVTSASIAGFEEYIRSYLNAQCKYAFIAWLGKKYHNKIKKMENELVNSFSQYYPDTLKLPEFRSNSIPFGMDDGRIYKIDDTVHSFKLLKGTDFESVSFDNDERYTSLIDTGWTPKRGVLRLSRGKIILCLPFSKKVPDKLESTLVAGVDLGLKDGMVISVYDIYSEREKKRIFMDQQEIAGKKGEWFLKKPFSSGKQKFPNLKNKLFKLRHEIKLIQSERMQLENNGQSNSHHHWLLETEEKMRWKKIRGIHKEMVNQYATRLVAYCLYYKIGFIAFENLKWSTHSLKEKVGSFLAHWQIHWFFAQIQERAEQLALSNGIGVTRVNPKNTSQKCHRCNKKGQRNRKRFHCKKCDWKGDSDLNAARNIAKRGIPRAMRYLKTNTGNYMFPVMVPVGYGVICASLLMW

SEQ ID NO: 10698 - protein, 359 aa, Chlamydiae sp.
MKTMRSSRCSLKFLNKNKRQVLEEVLQEYGRVVNGFIDLFWENTPKKTELLKPIVDSVNTWMTFRLRKVAAREAIDMVLSAKNREDDKPPVKPRHAGKRMCVSSTIAELQLSKTKEFDAWIHLASIGKGIILDVPIRFHKHFNRLSSRGVRLNSYIITNKNVQFSFEVETGPKLPKDHCVGIDTGINALASVSTEQQFGKDIKKCIDRIKRCKHGSKGQKRAVRALRQRMDEVAKEITGFSSLVVVENLKNITKKTKVKRRLNKSMRRSIGRWNVRYWLNRLEMTCQDRNVSFRTVSPAYTSQMCSACGHVDRGNRNGEVFKCLKCGHEANADVQASKNILARFLTGPYGAGCKPLVLV

SEQ ID NO: 10699 - protein, 280 aa, Bacillus sp.
MSGGLHPPLISILKQVRVIPKYNEYVVELVIDVPSEQQMIEENARYMSIDLGIDNLATIVTNTGIKPVLVKGKHIKSINQYYNKMKSHFTSILRNGKQTNEGPFTSKRIEKLHQKRYLKIKDVFHKVSHRIVKLAQEEEVCKIVIGQNKSWKQKMNMGKRNNQSFCHIPHSLLIQMITYKANAVGIQVVVTEESYTSKASFLDNDFIPTYGENDQNTTFSGKRIKRGIYRSANKTLINADVNAAANILRKVIPNAWTNGIEGLGVKQLANVLTPLTLIVR

SEQ ID NO: 10700 - protein, 642 aa, Tipula sp.
MKRLIEINKKLEKITNQKCFLSNFCKSSIVFDAINKQVIEMSNFVIEASIYCHYKLNTYLLQGKVDVLLQSSRFILDMFYELKQKSKAKYQLEPDYEFIRNDYNLNKYKVVCGNSMNFLATQYETILKNNIWMHAYSRIRKFFKNATKVDAHVYTPTVIYQTLDTLFNKKSQHSTNEYLIELLKNELQFDIGNFHDIEKYPLKYIPLFYNLQKYNELNNIKNFKLFPQITAGRKYIRYDSFALFSLLASLKLLERGHTTWYGFAPEAMNYWRKYFKVEKFETGNKKFGKSISTDGIGVSIQLVREIIHATIDDDDDETMKKKRKIKKPKVSYQQDYNNLNLDDFTRYLGIDPGERLMLGGIIKNKEGVFTPLKCKSTTFRYDTGEISRRNRLIKYTTDHDIKQYEKEHENITQTNEPYNKVSDTMQKFINDSIKAKRKKKQKPSPKNKSLLDMENINEKLKVNISYNPSNYINYTKWRLKWLLYLQQLYCKKKVARLKMEAYMRIEKTLHKYKEQLAPSNEKTLIVWGDATIAANSPVKGYIRTPKNKLLEILKQNKNCKVLMQDEFRTTKLCCKCHEPLNISTDKHRYAVCPNCHTVFNRDVNAGANILKLVITRLKKEITHKNFCRSVKLTTITGSSFIV

SEQ ID NO: 10701 - protein, 339 aa, unknown
  TnpB Polypeptide
MAEIRTNTLRIAPSREEATTLRVLGERVSRLYNAGNYLCRQAFIAGKPIPSYATLCKRLPVEYEADYRALPSDIAQEVIKKLAEAWTSFRALRQAHSAGTLKHKPGLPRYRKNRDGSRPFNYIPIKSARSYAVTDTVSIALPAELRSKGRLSMKYVGGERYRGAKKRAELLWDKARERWYLKYAVEVADKVIHGSNRGAAIDLGVRIAASLSTEGVEQARHFVAREMLKDWDYWGRRIAQHMQELAGRGRKCSHPLSQLYAMRGALAPRVAGHRARDRHDLPAAVCGHRVYRLAEGYPRGACLLEKVGRTDTQLLGVRCVEPDTAGRARTPGHPGQACR

SEQ ID NO: 10702 - protein, 381 aa, unknown
  TnpB Polypeptide
MNSVPAKTTRTLRLRLKDKHAVFLREQAREVNFVWNYCNELALKILQREARFCSAYDLHRYTAGATKEGLSLHSQTVQAIAEELVTRRRQFKKRRLAWRKSGGARRSLGWIPVKASALRYKNGQVWYGGRALSLWDSYGVHSYELGTGSFSEDSRGRWYLNVTVKLKRAVRSTTSRCVGIDLGLKEFATLSEGRKLEAHRFYRDLEPALRVAQRANKKRRVNALHAKIANRRKDALHKFSTALAREYGAIFVGNVNASALAQTGMAKSVLDAGWSAFRTMLQYKCADAGVWFEEINEAFSTQTCSCCTSRTGPKGIAGLGIRQWECSACGTLHDRDINAARNILATGMRQAHARVGELPDGLASTHAAAGRGRLAEGITVL

SEQ ID NO: 10703 - protein, 429 aa, unknown
  TnpB Polypeptide
MAEIRTNTLRIAPSREEARTLRVLGERVSRLYNAGNYLCRQAFIAAKPIPSYATLCKRLPVEYEADYRALPSDIAQEVIKKLAEAWTSFRALRHAHSAGTLKHKPGLPRYRKNRDGSRPFNYIPIKSARSYAVTDTVSIALPAELRSKGRLSMKYVGGERYRGAKKRAELLWDKARERWYLKYAVAVADKVIHGSNRGAAIDLGVRIAASLSIEGVEQARHFVAREMLKDWDYWGRRIAQHMQELAGRGRKCSHQLSQLYAMRAARWRHAWQAIAREIATTCRRQCVGTVYIGWPKGIREERVYSKRWGARIHNFWGFDASSRILQAALERQGILVKRVGERGSSSTCPVSSCASKKVTRKPRHILRCRTCDTTIHSDQAGSRNILAFNHPGTSWDAVKTTARPDTLRWNKQRWVDAENRNDRTLLKAA

SEQ ID NO: 10704 - protein, 236 aa, unknown
  TnpB Polypeptide
MARTVGPQSTWVCASPPAFPLKASSRPGISWPVRCSRTGITGAGGLHSTCRSWRAGAASARTRSRSSMRCAARWRHAWQAIAREIATTCRRQCVGTVYIGWPKGIREERVYSKRWGARIHNFWGFDASSRILQAALERQGILVKRVGERGSSSTCPVSSCASKKVTRKPRHILSCRTCDTTIHSDQAGSRNILAFNHPGTSWDAVKTTARPDTLRWNKQRWVDAENRNDRTLLKAA

SEQ ID NO: 10705 - protein, 493 aa, Caldivirga sp.
VPGVVPFSSLDEPVGRYPTVFTTLGTQSSSTPKSKGRKSRNGNEEIRTVRLRLLPSGAQERRLRRIADITARLWNELNYVRLVQYRATGKIDFKGTEHELYHRYKSVLGVNAGQVVRLNNSAWKSYFELLRLYKQGKLPKFMGKPSPPGFWRDKVLGRRLLRILVRNDRYYLEPINGGEGYIVLKDWGLRVKYAGRVKWSGKQGMLVIKLEDNRWFAYVPITVGEKPAKTNPKGYVKGIYDRVQIENPKGGNKAFIDVGLNNLFAVVFNHTDVAILIKGSTIKAEYYWWKREVKTYQAVRDWLRNRGFNAWRKYHMFYLHAEYKQHERLRHYYRTAIRFLAKTLHGMGVDEVFVGYPYLVGQDNGNEYNVNIWWFNKVIRWLGEVLQEYGIRLNVVNEYGTSKQCSICNTNHENGRVKRGLYICPVTGIKINADLNAARNIAKRVGYEVPIPKKILSYIITTNGVKPITPMEGVTPETPTVKPSPKKARRGSY

SEQ ID NO: 10706 - protein, 369 aa, unknown
  TnpB Polypeptide
MTVRQKAYKFRLYPNQEQKQFFAKTFGCSRAIWNMMLADKIKHYEETKETLYNTPAQYKKEFPWLKEVDSLALANVQLNLQTAYKNFFRSGFGFPKFKKKSHCQSYTTNSQKGSVILENGHIKLPKVGWVRVKVHRQLNGVIKSATISMTPTEKYYVSILCETEIAPLSKTNSSVGIDLGLENFAILSTGEKIGNRRFFNKLSKKLVKEQKILSRRALVAKKEGRKLSDSKNYQKQRIKVAKIHEKIANQRKDFLNKLSTTLIKNHDVICIEDLSSKNLMKNHKLAKSISDVSWSAFVRMLEYKANWYEKQVSKISRWYSSSQICSDCGFSSGKKPLSVREWTCTNCGSHHDRDINASINILREGLHLL

SEQ ID NO: 10707 - protein, 138 aa, Lachnospiraceae sp.
MNGKVRGSKKQKLKMWRSQEVQSVVTNKAHRLGMRISHVCAWGTSKFAYDGSGRVLRGKDGGFSTYELCRFQNGKTYNCDLSASYNIGARYFIREILKSCSVTDRLGIEAKVPQCAKRSTCTFSTLISLNAELTPLAV

SEQ ID NO: 10708 - protein, 430 aa, unknown
  TnpB Polypeptide
MLTFNYSYRIYPDTAQETALLEWMEIARKAYNYGLREIKDWCNSRKCQIDRCSIESEYILPIELKFPNEINQLNNLPKAKKEFPKLVELPSQVLQQVIKQLHKGWEYFLHRGFGFPRFKKYGQLKSLVFPQFTKSPISEKHIQLPKLGAIAINLHRPIPSEFVVKQVRIINKADKWYASVNIQCDVSVPDLMPHGHPIGVDIGLEKFLATSDGVLVKPPKFFKTLQSQLKSLQRRLSRKSKRSKNYEKQRIKVARLHHKIANTRKDFHFKQAHALCDSAALASLRASAGDMVFMEDLDYRTSAKGMFGKHMLDGGFGQFRTITKYVCWKRGKFFAQVDARGTSQECPECSAEVRKDLTVRIHHCSSCGYFTDRDIAAGQVIRNRGIAQASTAGLAGIESVCAVGLPGAGESQSRQVAKSRKGTTRKNQPC

SEQ ID NO: 10709 - protein, 414 aa, unknown
  TnpB Polypeptide
LKLQNLNQRDVELLDRLFLEAKWLTNYVVSDIQNRLTPDTWKLKEVEVKVKDNFEKREITHLGSQIKQSIIERIKDDLDGLSESKNKGNKVGKLHFKREVNSLVLKQYGNTYAIDFKTNKVHIQGIKKEFRVLGLHQIPDNAEITKGELIRSSSGYYLYVTVFLNEEPATVKTKKNKIKEKNVEHFNKPLGIDFGVKEQLTFSNGIKVKYEVGESKKLKLLQKKLSKKQGFKKGEVKSKNFFKSLNKIKREYGKLSNIKKDIENRVFAFIKSYEKVYMQDENIKGWKRGLFGRNIQHTSIGGITSRLKNNLETLLLLDRFIPTTQTCSNCGHKQKMSLSDRVFKCESCGFEIDRDWNSARDMVLFGEKTPLKNLPEDFWEVTPVEREATARILESNPYIIVSYTSLIQEALSLN

SEQ ID NO: 10710 - protein, 396 aa, Paraliobacillus sp.
MIRAHKTKFFATKYNIDRLFECNRISGEIWNDVLEIAKFYYVSHGKWVNKTQLQAETKGNYPIHSQSIQAVCHKYLFSRDATKKARDKGFKDTKYPYKKKKHFNTKWVDLGYKIYENGKIELSLGRGRKPIIVWVKPDNLPEGKIKEIELSYDNGLWLSMSYDDGKEEKENTNTNRVAIDPGEIHSISAFAENGQATIITGRKVRSIKRLRNKKLGELQKKMSKCKKGSKKWKKYNRAKRYILSKSERQLKDALHKTTRQFVEWCKENEIKEVAIDDVEGVQRNTSKRKKNKKKRRSRKTNQKTAQWQFGQIYKYLEYKLHAEGMSINKQEESYTSQTCPVCGKKKKVSSRNYKCKCGYECHRDIHGARNILSKYIYKDIRDLKIDIENITYLRIA

SEQ ID NO: 10711 - protein, 362 aa, unknown
  TnpB Polypeptide
MKRSLKFSLGSSNTNKLKNLSKLAQEYKGAVNYFLKRLFRKQGLSEEFLKSYNSLLSYRYKQCAKRQAFKLFKSWCRNKKKGTKPELRNLSLVLDYRFIEVQEGKNSNSFDYWVKIATLDKGKPLLFPIKSYDYAELYFKNWQPLKGGRLLKQNNHWLLELTFQKETPAKKEKGKVIGIDMGIKKLIVTSEGKEYGKDIEKLMNKIQRKQQNSKAFKKALKERDYYINQAVKELPFKKIKCLVMEAIKNIKRNIAKERRLRKSFRTKFQRWTYCQLFKRIKLTTEAAGVHLQLVNPAHTSQACSKCGFVRKQNRINEIFKCRNCGYTLDADYNASLNILNLGLAQQPMVAGSIKALNGISVH

SEQ ID NO: 10712 - protein, 386 aa, unknown
  TnpB Polypeptide
LKVLFIYHPKERLTMTTNNNEKDKGMYVSIPISLNPNAEERELLQEMFDGHVKACNKLSAKLHAEALRKRDITICSNLGWARSLVQGIIKTDLHSVHSESVAKIVVKAYEKAYEKAKKHGCLDLSQPILFGGEDEKDKVKIHTVYLSRPATIKVNFKTKICELDLAKERHEIPFVFPKGVPVPPDSWKACQGLLKKYGDSWDVVADYNGKMAEINAQNVSQVVGVDRGQNNVATTYSDAKGAKRYHWGECYDNSNGQSEVDEHRAWLDKDRLIAQEITANELEGTVFVLEDLQFDHIPRRWTYLTLGDWFSYFACLRHQHIIYCDPRHTSQKCPNCGSTDTKREFHHLICNNCDYTEEIIVNDDENAARNIKKRGEMILRKKYNVK

SEQ ID NO: 10713 - protein, 432 aa, Desulfurococcales sp.
MTRVARTVIVRSIKLPRKMFRVFVELEGMYRNMVEQLVMYAVRNSIRSFTKLRALKYRGMRSLYPRLPSHYVYTACQDASTRVKSFLKLKKLGLAEKDYPEVKRISIWLDDHLWKPNGYTSIKIATHKGWVTVEFESHKQYWKYINRGWNLTSEAKIKLDKRNKRLIIYLTFIKDVEEYKPKGYLPVDINENNVTIMDDGVAYLFETSTEKLVLGYYYRRKKVQERYDKLYGVMSRIKRKILKKLKEKKRKSDTRWKIANIIARIVYEKQYAIVLEKLSKHVANSMIKRIKDKQLKHRIFQASFRGIQRAIEEKAREYGVPVVYVNPRSTSKLCPIHGTLITYNNGSRIGKCSKGGELWHRDVVACWNLFLKALRGDGSHAPSPAGLNVDVSPVPLGMKATHDPIGIPKSLWARWKSLPQIHYAIVLNRMKW

SEQ ID NO: 10714 - protein, 547 aa, unknown
  TnpB Polypeptide
MVMDSKYTKVFKSNGLTRQKYDELYAFAVMLRDHKNKVSEYVNNNIEHYLEYSKLDFLKEMRATYKDAIPSSFDVQLYTQVFNCYQNKFDAIRKHLDFEVVRFVGFEFYKRDTKKNKKGDLKKVVTEKSKTPLSICLTYLARYGNENTIDYITKQLETCDDKKREFYNNILRCCEKFGFDRVMKLALRKRNRIIKRYSEHPIEFKCLSFGGRCRKTRIIDYNKKFGSVINSFVSLSGIGRKSFDIPVKFNKDWHGSMKEYRKSNPDYEYVLTFNEKHHQVNINLCKDGQRYIPEAGDNVVGIDVNCKHNLFSLSNETTYDYNRQLVNDFCKLSLEVDKLKKGKNYVVGKRKQQKLDTLKMKMLKSEQELISKMCKSLVVDGVNHIVMEDLDNGFGRCYVKDKDNEDINYNRKVKFLGLSSLKDEVEHIARKYGIALSTVHASYTSKMCPVCGCIADENRPNQETFECVECGHTDNADFNASKNIRNRVTATVLREQLLKQLGNGAYEPRKLKREKVKDVLLSFRRSLMDKSDGERSENNNLNTFDYV

SEQ ID NO: 10715 - protein, 405 aa, unknown
  TnpB Polypeptide
MRLVYKFDIKHNEKLYELCKVSKNLYNQALYIVRHELKENNKWLGYGQLNTILQDTFNLDGEINYRLLKAQVAQQCLRALDKNIKSYVKSIKDFSKNPSKYKGRPKLPKYKKEANQLIYTNQCSTIKDGYIHLSKELKIRIPQYGKYGKELVDFQQIRVAPKMDKTFTVEIVYLSERNTDTDLDYKQYASIDLGVDNLATMILYGEEPMLFNGRQLKAKNQYFNKITSELKSKLTNGQKTSKRIKRLYIKRDNQVTDMFHKLSRRIVNLLIEHKVGNLVVGYNKGWKDSINIGKRNNQTFVGIPYAKLIYFLRYKCEMCGINLVVNEESYTSKCDALAMEPIGKHEEYKGKRVKRGIFQSSTGKLVNADVNGALNIMRKAVGDSECVTRIIDSGRLFRPVRINIL

SEQ ID NO: 10716 - protein, 375 aa, unknown
  TnpB Polypeptide
VLYTLKIRLYPSSEQAAQLLKTMERFNAACNVISKAAFENKTFGKISLQRLCYYTIRNEFKLSAQMVVRAIGKVAESYSDKNVRDCLHIFKPHGAIVYDDRILTVKSFDMVSILTLDGRILVPISVCEYHSCIINNARRVRGQADLGYINGKFYLFLVAECPDRPENTFDGFLGVDLGITKIATTSDGKYYSGSKIKNLRRRHFKFRQKLQSKCTKSAKRLLKKRRRKESRFASDVNHRISKKLVEIAKGTGRVIVLEDLQGIRKRAKKGTRQTVGKTMRQALSTWSFYQLRRFIEYKAKAAGVPVIFVNPRNTSRTCSKCGHVDKNNRKDQEHFVCTACGYAMNADINAAINIANRGAAVIQPNVANESSAASS

SEQ ID NO: 10717 - protein, 369 aa, unknown
  TnpB Polypeptide
MTCTTIKVRLIPNREQERLLRRHAGTHRYAYNFAKSYSEEYYKTNGKGISTSEIAKTFRRGYSDIPWIKDICKDVSSEAIRDYGRARDNSFRNHKDGYHTRYKSRKDLTQGFAVDARKLKFRGKVYLPKIGWLSVNQTPKKRLYKNPRVIFDGMYWHLTLGMEITPKSVELTDEVLGVDVGLKHLVHTSQGEIYENINKNKTVRKLEKKRKACQRQMGRRVKDSKNYLRAKREHLKVCRRLSNIRDNHLHQVSSALVKTKPKVIVLEDLQIRNLLKNRRLSRAIQDASWYKLRLYITYKAERQGTEIVLAPTSFPSSQLCSNCHERFDTVAQKRTWGLDIRNWRCTHCGETHDRDLNAALNLKWYYNNK

SEQ ID NO: 10718 - protein, 212 aa, unknown
  TnpB Polypeptide
  misc_feature (146)..(177): Xaa can be any naturally occurring amino acid
MTCYDSENGNTFILGRKYLGLERYFHKEIARVQAQWYGQQSGKGVKHPTTSKHIRKLYKRKHDSVTDYLHKVTRYLAEYCREQGITCVVAGDIRNIRREKDLGHRTNQKFHSLPYNRIYIMLEYKLKRYGIRFIKQEESYTSQCSXXXXXXXXXXXXXXXXXXXXXXXXXXXXXXXXVGAYNILRKYHSVSGVKKELSVTGLKTPEIIKVAV

SEQ ID NO: 10719 - protein, 418 aa, unknown
  TnpB Polypeptide
MMKRVEHHRLKPSSPFYAMLREFCHRSKNLYNHGNFLIRQAFLEDSKWLRYGEVDRLLKADVKYPDYREMPTAQTAQQTLRILDKNWASFFAAIKDWKAHPEKYKGRPKLPKYKPKDGYFPLVLTNQNCKLKDGVIRFPRVFQGFTVKAIFSSQPDAVFKQARIIPHGGEIDLELVYEIPEVDEKADNGKYAAIDIGIDNLVALAWNTGKRPVLFKGTPLKSVNQYYNKQMAKRRSICERMNGCHSSKRIARLTAKRNRKVEDYLHKASRKVIDLCTEQDVSVLVIGKNKGWKQEANLGHRVNQSFVQLPFARFIQMLQYKAESIGMKVVLTEENYTSGTSFLDGEAPIKACYDKSRRVHRGLFLANDGQRINADVNGAYQIMRKVFPNVNADGIEGVALRPAVVTLSMSARRSSGCA

SEQ ID NO: 10720 - protein, 369 aa, unknown
  TnpB Polypeptide
MKRIIPIKLDEDVDLRATIESYRIIQQHVSEIAYNSKKNLSALELHRVAYPKVKGKLKSQLICTAIRSVASEYAKLRKRRKRVCGPIHFNKARALFLIGKGKRDACPPRSETIRIWTSAGRKGIRYSIPKRFAPLLKRVKSYDAIAVRIKNDRLVATLSITLVPLENHGSLPAGVSINNKSEIGVVDSSGRSMRIITIAQNVMEETSQKTKRRLNKRLAARKADGLETRSVRRVLKRLSRRRYMRIKTFCHTAANKLIEWVKRGTILAIEDLRLPPPSKRRRACNRPHFYEILRRRIEEKSELAGIPIYYINVAKSKDRCSMCGDAGNSTNYKFHCKSCGNKEPASKNAALNIRNKFTVTRPWAAVNQP

SEQ ID NO: 10721 - protein, 366 aa, Nostoc sp.
VLLSIKTQLKLNSKERVLMSKHAGIARFTYNWGLATWQALYKDGYKPNHRFLRTFFNNHVKTNPDLFWLKENGICQKITEFAFENLGNAYKRFFKGLGDYPRFKKRSKSLGSFTINSGGKPINVGGTRIKLPTIGWVKTYEGLPHTSTTKFTVSERAGNWYVSFSFEQELPKPSIKIPIIGVDLGIKVLATISSGVVFHNPKARDRMKKKLAKQSRQLSKKTRGSKRYLEQKLRVAKTHKRVHDIRLDATHKATTTISKNHAKIVVESLNVKGMMSNHKLAGAVGDANFYEFRRQLEYKSKKFGSEVINAFPFYPSSKTCSNCGHIQDMPLSVRIFDCQSCKVSLDRDWNASKNLEKLGLQHFLLL

SEQ ID NO: 10722 - protein, 438 aa, unknown
  TnpB Polypeptide
VVEETFKYVATPDDNATATAAWSHIQTCREVYNHALTQEYRPRPDYDKPSYRDMQNRLTGSDGWKDRWPEWKRVYSKCLQMAVRRIKQSEHVLDSLKTRGYNVGRLKWKAPREFRSIVYNQSGFDVDHNTDRTGHALVNFSKIGVFHLTYHRPLPDDGDITQVILKQEKTGNWTVSIVVDYDPDYPDKPAVEDIDPEETVGIDLGITKFIHDSDNRSFESLDEHRDRERIDRRHRELSRKEHGSNNWQKARQSLARAYERLYNRREDHREKLAHEYTTRYDAVFLEDLDVKALTERRGNSRNVAAMSWRQTIQAFKRHGEKKGCHVIEVPPGGTTKRCSQCGCSTEKPLWVREHSCPACGFEADRDYNAALEIKRLGLEKLGVEAHTDAVGQGMAESTPVETALPGDTETTVDDMSVKRVVETGSSCLKERPAYAVSE

SEQ ID NO: 10723 - protein, 400 aa, Symploca sp.
MEKHVLTIVCKINPTPKQVVKIEATLQAFADACNYINEVVEPKITHNVTIQNQVYKEARERFGLAANLAIRAINRVSSNRKTAKRMDKPVKKFLPTSADYDARIFSFREKDWSVSLTLVGGRERFGVDVGSYQKGKLSGSTPTSATLVKHKNGTYSVNIQVKTDAPNPQKSQGVIGVDLGRTDVAVTSDGESFSGQQITKIRDRYSRVRASLQKKASEGTRSTRRRARQILQRLSGRERRFQSWVNHSVSKYIVGKARQSGRSIAIEDLTGLRERTNEQPRNKTERRRSNSWAFFQLRMFLDYKALGVGVEVIKVNPAYTSQTCHKCLHIHPVKGKSYRSGKTFNCRHCNWKGDADLNGANVIKLLGASVNSPGGSYLSCELPRKVEYFQPSLFDLVQGC

SEQ ID NO: 10724 - protein, 477 aa, Symploca sp.
VAPRGYSLNIAKKIKEVIFILLNYQYRVYPNTQQKLELTYWRRLAQYWYNWQLGERFKWWEQNRCAVNSCPLVCHLPELKDNPNYFSQKKLLPGKKKDLTLVYHSGELLDFTRLPSQTLQDVCARTKKACERFVKGDRNRKRSGRPRFKSSTQYRTLKIEGQVVAIKRIEKRWLWISISKLSGWLKIRLHRPLPDGFKLKNVLLTKKADGWYASLALEDPTVPVFNPNEIVPTWDNSMGMDAVLHEEDYLATSENIKLPSLKSFRKSQARLAKILKRKAAKKKGSKSRRFLAKRESREHQRIARARKDHAYNTAHKLISQGKSVFFYEDLKLKNLIKRNKAKQDENGKYLPNGQSAKSGLNKSWLDAAFGQFFDLLDYIASKAGAVTVKCNPAYTSQLLSYRDEFVFTDGSIREWYDNQENLLVDRDVNSAVNLKRVGLGMFPTIKRRRGNPVIVATITNSTSKEVLESLRSQKPTL

SEQ ID NO: 10725 - protein, 405 aa, Symploca sp.
MLVLEFKAYGKQTQYSAIDEAIRTGQFIRNKCLRLWMDTPKTGKYDLSKYCAVLAKQFPFAKTLNSQARQASAERAWAAISRFYENCNKQIPGKKGYPKFKKSTRSVEYKNSGWKLSPDSKSIEFTDKKGIGKLKLKGTWELWRYDQKLIKRVRLVRRADGYYVQFGVKVEVKESLKPSHTNVGLDVGLKEFYTDSKGNTQPNPRFYRIGEKRLKFYQKRVSRKQKGSSNRQKAINRLGRTHLNISRQREEHAKRLARYVILSNDLVAYEDLRVKNLVKNHCLAKSINDAGWYQFRKWLEYFGERFGRITIAVNPAYTSQKCSSCGEVVKKSLSTRTHVCSCGCELDRDHNAAINILERALGTTGHVGTWMSDPNAMPRFAHHASQTGDLSATVVGVNQPQQLES

SEQ ID NO: 10726 - protein, 368 aa, unknown
  TnpB Polypeptide
MVTKVHKTYQFKLKPNKTQANIFHQWLGTCRYLYNSALEHRISYFKDTGEGVSKYDQYNELPQIKRELPFVAKVYSDVLQEVLDRIDKSYKLFFKGGGFPKFKNKYSYNSFTYKRNYKINENKVKLPKIGWVKFFNSRPIKGKPKTATLIFKNNSWFISIVCEQEIQSKPIDDSQAVGIDVGIAKFAYLSDGSFIESPYFLEPNLGKLRLLQRKLSRQKKGSNSIEKTKRQISKLHNKIKNQRKDFLHKVSTNIEQFYSSCYVEDLKISNMTKLNSTLSRRMLDNGFYSFRLMLEYKFKHNSKHFLSVNPAYTSQMCSSCGAVDKKSRLSQSEYLCTNCGFVDNSDLNAAKNIRAKGISFGTKRKVLA

SEQ ID NO: 10727 - protein, 405 aa, unknown
  TnpB Polypeptide
MHIKKAYKFRVYPDAKRQDEIDERLILAQQLYNKLLEKTKSEYEKSKNSKINKSTLNRYMKEVINENGGFLKLYSQTRQEVFIRLQKAFQNFFRRVKEKELGKKVKAGFPRFKSRDRYRTLIYPQDNGSFSIEKDRLRVARIGTMKIELHRKIEGRVKTLIIKKEAGNYYAIFTTIKEAEVPKIEDTKSVGIDLGLNSFIALSDRKMIEKQKFMQEKKKRIARWQKIVAKRHKGSKRREKAKFKLQREWGYINSQSNDYLHKLSNMLVNSGYTSFVVEKLNIQSMVKNHNLALAIYRASWNKFIRLLSYKAESAGMKVIEIDARDTSKQCSNCGNIQDMPLSKRIYIYNRCGMQMDRDVNASINILKRATSGQEGSHAWGDSVRPHQEAVIAEPRTYSADCRGSP

SEQ ID NO: 10728 - protein, 359 aa, unknown
  TnpB Polypeptide
MRRAVKIKLVNEPALIETIRQYSKIKQITCDVGLKKKTYNKNKLHKWLYKKLRKQFPNIPSAILQTARDVASESLRKTKLKKKIKGKEYSSMRLDKRNLRVNLQYKMISISSVDGRKKMNFQDNNPILNRYKDWGVKAGQLCFKNNQLSLNLIVEKENPKKTIPSRILGIDRGINNILVCSNNQFFSSNHLKAIKGKYQWLKSKLQTIGTPSAGRKLKKLSGRERRFVCDINHRLSKVVANSEYDAFALEDLHKFKQDKGRMFNKKIGNWSFKQFERFLIYKAEELGKTIIKVNPKYTSQICSNCGYKDKMNRNGNKFECKRCGFELHADLNASRNIANFGKSEISRLSVNQPTVTTLS

SEQ ID NO: 10729 - protein, 445 aa, Natronomonas sp.
MKRTNQFDVHPRSAKEREVFVRWLDASASLWNETNYARRQAFLEDDESVWDADTGSLEGKYKGVLSSSVAQQIIRKNSESWRSFFSSNEKFHAGKLDEKPSPPGYWGNEEDGRVLRTYVRNDQYTIEYGNRSRLEIPIGSELKDELGLNRNQRLRVEIAGDPKWDGEQGRLELVYDELADTFRAYQPVAIDDSRLDSLLASEEAALDVGANNLAACTTTTGQQLLYEGRDLFEQFRETTEQIAHYQSLLETQCESSKRIDRLYRKRTNRRNHAQDSLVRDLVERLYDEGVSTLHVGDIKGVLSTHWSPRVNEKTHNFWAYRRFINRLKDVCEEYGITVNEASEAWTSQECPECGERKETVRHEDSLTCPCGFEGHADLVASESFLRRQNNTIGLMARPVYLKWNNHEWREHHNPLSLAVETTANEEYTNQSTATRGNIALGDSDD

SEQ ID NO: 10730 - protein, 411 aa, Solirubrobacterales sp.
VHRTYRYRLYPTRRQREALESQLRFACSLYNAALEQRRDAYRRLGKSLGYGDQSAELTELRRSAPELCPPEGMNYWSAQEVLRRLDRAFGAFFHRLRRGEKPGYPRFRSHRRFNTLAWTQKGNAGGVEVTEQGRLRLQGIGCVKVKWHRPIPAEATLGEVRVTRKETGARARYHVSVTAKLPIPEPRPGTGAAVGIDMGVRRLVSLSTGELVCGPRAGRANAKRLRRGSRKLARRKRGSARRAKAAAQLARHREREANRRRDAAHKLSRTLVERFDLIAVERLRVANMVRSASGTLAAPGANVAQKRALNREIADQGWGQLLSYLAYKAEEAGRRVVAVEPADTSRTCCGCGAVDARSRAGPRFRCLACGHAEDADVNAAKVILARARAREGIERPGRGRQAATAALAAVV

SEQ ID NO: 10731 - protein, 432 aa, unknown
  TnpB Polypeptide
MRLTRALTHIRLCDANHAKIAALDALAAEYLRLCQAYTTYFCTEAQPDKYAAPCFESPLSQRWQRVAIQHAAGIAQSWRSNYAAAYQDSLDLCQEYQEEPEGDPPEWKEWNTPVLKETVIQANANVALLQPSQDSSFDYWLRLSTLEQGQPVFLPVKLAAYHRQALAGKTLNTSTVLARKADGWWLTLSYEEHVPVVTPQDAPVIGVDVGIANFLTTSTGQQYGTFTGKLAERHKRDRAKRRRKAKLRACLKKRGVTRLPSTRNKKLARQVRQEINRAVNELYRDHPEAQFAYEQLNVAGMKFKARRMHAYLYASNLAHIPAQLAWGAAKRGIRARKVKSAYSSQECHRCHHVSRENRPNQQTFCCVVCGHTTHADVNAAENLASRLGDQELAACADRKAIRTLLASRHQDWQNLQRLAVVQPAAELSRQPA

SEQ ID NO: 10732 - protein, 420 aa, Tupanvirus sp.
MKKKKKEKWIPKLSDHYNEIETESWFDIREYQKNPNYHSSMVCFSDRIFIRAEKIILYPNKKQVNILQKWFNLSRKMYNKTTDFLNKKIFINKKISQINVKKYVNFRKLRSNYLKEAKESLCLNNINKHILDQSIARCVAMYKSSLTKIKKKQIKDFRVRKIKKDKRYKTLLIEGCLFSKVKNGFCISVLGEIPSNESLENISETCILSYDKYNSKYTLSVPKYIEPKEYETRNLICGIDPGVRTFLTVYSKEDVYQIGNDIDFNKYFYKIDRLNQICDSKESKQTRKYKRAIGKVYDKINNKVKDMHFKVAKFLCTRYKILKIGNLSTSKIVSNETSVLKESTKRLLYSLSHYKFREKLINQAEKYGVNIKIVSEYLTTKKCSKCEKKNEVGKNKIYKCGKCNLKVDRDINAAKNIRYV

SEQ ID NO: 10733 - protein, 383 aa, unknown
  TnpB Polypeptide
LFYTSITRLTVTVKLSPADPDGLRRTLQTANGACDWISEQAWHHQTFRHLALHKLVYYQVRQRFGLSAQMAVRGIAKVVDAYALDKRTKRKFRTDGAFPYDARILSWDLESETVSIWTVAGRRRMPFECGERQRNLLERQQGESDLIYRRQAFYLATTSNVDVPEPQAVDDFLGVDLGVANVASDSDGRRYSGSEVKNVRWRNRKLRARLQAKQTRSAKRRFKKLAGGESRFARHVNHCISKQIVRTAKGTGRGIRMEELNGIRTRVKVRHGERGVLHSWGFWQLRQMIVYKAALAGVLVEFVDPRNTSRTCSECGHCEKGNRRNQSEFRCRSCGREAHADINAAENIRQGRSKPAERDVVENRLSHSFRFRRLSAAVTSPRL

SEQ ID NO: 10734 - protein, 520 aa, Glycomyces sp.
MHQCSRSGRGLPYRASPVPLQNASGCDQSDLERRARIRRGRNLAYRRHLRERRSLDLLSEFQRSGRGGARMKVVKAYRFALDPRSDQVVAFLSHCGGRRFAYNHMLALVKANLDQREAERSYGIAGPELTPYLDWSAYGLRRTWNARKDSAAPWWKENSKEAYSSGCADLAAALKNWRGSMQRERAGRPMGFPRFKSRRSRLSCSFTTGAIRVEDDRRHITLPRIGTIRTCENTAKLHRHLRRGTGRILSAILSRRGDRWFVSFTCEIEHRERAPERPTAVVGVDLGIKHLAVLSTGEFIPNPQHLDKALTRLRKAGRQLARRRGPAPGSAPSARWLRARAGLNKAHARIAQQRSDALHKLTTNLARTYGTIVIEDLNVAGMVTNHRLARRISDAGWGELRRQITYKSAWNGGSTVVANRWLPTSKTCSNCGTAKAKLSLSERVFRCQHCGMVLDRDLNAARNLANRVRTAVDLELPGDAKTARQKPHKTSPAGSGTAAGRRAARARQAEEAQVSVRSEV

SEQ ID NO: 10735 - protein, 401 aa, Glycomyces sp.
VQLRYRFRLYPTAPQRSALARLFGCVRVVYNDAVAARKRAHETGEPYPTGSLLQRQLITEAKRTERRAWLTEVSNIPLQQAVRDCDRAYRNFFDSLKGTRAGARTGPPRFKRRSNRQAARFTRNGFVLRDTGRLYLAKIGEIRVAWSRELPAEPSSVTIVKTAAGRYFASFVVAVDDGAELLDPVDQETGIDLGLKDFAVLRGGRAVENPRFFRAMERRLKKAQRTLARKQKGSRNAEKARIAVARVHEAIGNRRDDWLHKQVIGILRENQAVYVEDLPVHGLARGRAAKSVFDAALGRFLVLLESKARRTGRTFVRVDRWFPSTQLCSACGALTGPRGQAGLPVRRWACGCGAVHDRDRNAEANIRNEGRRLVAARHAETRNASGGPVRPGVPGAARNPR

SEQ ID NO: 10736 - protein, 239 aa, unknown
  TnpB Polypeptide
VFVKKTKLPEKMYNAHVTFDGKYWYLSYSYNTEVTERTESQGVVGIDLGVKDMACTSDGVVYGNPNNLDSIKRLERRKRFLQRRLMRKPTAKQAKGCSNNVLKLRRKIASIDRRVANIRQDARHNMTKELASTYSEVHMEDLNVCGMLRNRHLAKSVSGVGFHEIRRQLEYKTQMYGSRLVVVDRFFPSSQTCSCCGERNVGVRGFENLRVREWVCSACGVRHHRDINAAKNIASWNPT

SEQ ID NO: 10737 - protein, 197 aa, Streptomyces sp.
LPGSGGLLAPPKGSKAKTDEYAKAASLKAREANRRKDWCEKTSTMLARCYDLVRFEKLDIKTMTRSAKGTVERPGHNVAQKSGLNRAILAQGWGLLRQRTGHKAPGRVEDVPAPYTSLRCSACGWIDKNSRKSQAEFVCSSCGFTCNADTNASINVAAGQGGIPRPRRTAGAGGTTPPNQRPNVREPQPQRVGIPRF

SEQ ID NO: 10738 - protein, 436 aa, Leifsonia sp.
MPHMNALMIRRYRYEIMPGPAAQQSLARAFGCARVVFNDYVAANRARHLNNQPFLSDVEAQRLLITAAKKAPEREWLAEVSVVLLQQSIRDAGTAYRNFFNSLSGRRKGRRVGLPKFKSKHQGEQSIRFTVNGFSIRGGHTNTHPDNPTPGRLYLAKIGTIPVRWSRALPSAPKSVTITHTPDGRYFASFTVDVPEKAAVAPAHPGRVAGIDLGLNEFAAVVYSDGTREIIDNPRFARAAARRLSRAQKSLNRKVKGSKNRAKQKRRVASLHRHVANQRLDHAHQVAARLIRENQTIAVETLSITGLARTSLAKSIHDAGWGQFLSILGAKAVEQNRTVAAAPAGFPSTRACTLCGTNSGAKPLHVRIWTCACGAVLDRDYNAATNLLMVAGGHSETLNACGADVRRHLARPRSDRDAAIRDEAGTRPTRTPSRVR

SEQ ID NO: 10739 - protein, 499 aa, Leifsonia sp.
MAQAVVRKTRVRVRPAGTTPVRYRYRAYPNSEQEQTLARLFGCVRVVFNDYIHSRTTAYQAGLKAPTHGELSAGLTAAKRTPEREWLAEMPAVALQQAQRDADQAYRNFFSSIAGTRRGRRVGAPKYRSKKDNRHTARFPTSASTVLVRRVGKNRGRLTLTGIPGELTLAWSRDLPSAASSVTVIREADGRHYVSFVVDRAAQEQLPATGRVVGIDLGLTDLATIIDEDDQSRKVDAARLFRKAEAKLAAVQKESARRKARADRASARAKTAGSEAPVVDPQQRRGGSSVREAAARRKVANLHRGVREARLDAHHKLARQLVRENQVIVLETLGITGLARTRMAKSVHDAGWGILTRLIEEKAAASGRTVIRVPRNFPSTRMCSAPGCTFVWGEALSLDVREWDCPDCGATHDRDVNAAANLRNYYLSPQDDVETINGRRDNDPGTANPRGDQATVNDTANQTYSATAAQGKESPGFSPRDDVKAFTSIDRPDSERIIA

SEQ ID NO: 10740 - protein, 380 aa, Neisseria sp.
MLILKTFKFELMPNGEQIRKMKQFCGCSRFVFNRALAYQNEQYQQDNSFKFSYTKIANLLPEWKRELDWLKDCHSQVLQQSLKDLESAFKNFFAKRADFPKFKRKGEKDSFRFPQGCKLEQQNNRIYLPKIGWVRYRNSRHVSGSLKNVTVSQKCGKWFVSMQTETEQEIAQPNGGETGIDMGVAKFATLSNGQFFEPINAFKTLKGKLAKLQKQFKHKTKFSKNWQKLKAKISRLHHKISNIRKNYLHQISSAISQNHAIVYVEDLQVANMSKSAKGNAVQHGKNVAAKSSLNRAILDQSWFEFRRQLDYKLLWRGGHLVAVPPQNTSRCCPACGHTAKDNRQTQANFECVQCGYQNNADIVGAINVLKRGQEILAAQK

SEQ ID NO: 10741 - protein, 421 aa, unknown
  TnpB Polypeptide
LKLVQQHIIKPSHKDYQELDHLLLLAKNLYNKALYEVRQYYFQAKDDPSVKYKYLNYYALDKLLKERNDNDYRALPTNNSQEVLKLVNQNFCSFFKLISMKRERISSYLNRVQIPKYLDKVKGRQVLVYNRTQLSQKLLKQGIFRIPKTNIKIKLNCSDKISQIRIVPKNSYIVIEVIYEIQEKELLKDDSKYLSIDLGINNLATCSSNVIEPFIIDGRRVKSINQFYNKHKAELQSSLRGNKKSSKRIQHLSNKRNFKILNYLHKASKFIVNQAVSNTLNTIVIGYNKGWKQETNLGKKNNQNFVQIPFEKLVSLISYKARLQGIQVFLQEESYTSQVSFLEGDYIPIFKKDDNKKNPSGKRTKRGLYSSPKGLINADVNGSLNILRKFLSSNNEGFNDPIGKSHVDWPVRIKNPQRIKL

SEQ ID NO: 10742 - protein, 462 aa, unknown
  TnpB Polypeptide
LITIKLKYKTDEKSSIKLKEYRRQYSSVFKVYFNRLLEGIPSKEILHLELNNVELISSSFKGSALQEARTLLKAWESKKSQDKNHLIFGGRKSFLDRIKGNISKEELKERRLQKLCCIGQAEKHGNVMFSIQEDFNILFKPTRQEHIVLEFLESQKKRYARELKAIYIKSFLEKKYPITYHLDNEFVYLTFDEIILKNENKELETISNRVMALDLNPNYIGWSIVDWVSSSEFKIVKSGIYNFKSLNDKEKELKDLKLDSSHPKRKYLNNKRRTEVFEVSKNLINKALYYKCQIFSVEDLNIQTKDTNLGKSFNKLINNQWIRTDLILNLQKRCNIFGIKFLKVKPEYSSFIGNFLYRSLNLPDMVLASIEISRRAFEYYNQYVSKKFEIRKNIVRPSLVDFRSLYLKSLEEFELQPIYKDLIELYYFFKKSKMLYRLSLDKFSLKFSSCFSVKSQLSHISF

SEQ ID NO: 10743 - protein, 547 aa, Thermus sp.
MSAHREFTGLQALLVFPREEDERAVRDLMRRFSAAVRYAYKRLLEGKAREELKKADGPLTTRFRLNTRQADDAVLKAKAVLDSAKERGQDPRKVVFGGRGLFEALKRRHLSGKRYLALRRRWREARQGSLYARGDASKRGNPNLRLGVEGGVLWLEVNLGERGKKARALVRTSHPHLDRLLERAYSGLPYTVELSLKDGRVYAHFTWAEDLPQPRHTRSGGVLGIDANAHPYGLALALVGPDGNLKAHRTLSLEEVDRAPNRGAKELVLWEVAHRIVAAAEAHGAAIATERLKRLRKGRRGDGSGRRFRGLQHRFAHASLLGKVHALARRRGVEVVEVDPRDTSTIGMLKYAPLLSLSKDVAAAYVIGRRALGLKEELPKAYRALLGDEGFKARAVAFYEGLIRELEERRKGEKNPYLKRRWSREIGKARKAVSQLSSLQGSPGSRWGATEGRNPPGANPWRVLRVGPKLSPYGLTFLPLLGREVPRDLSPLKPILNVARSGLTKTHGSWKGWKTGLGPHPDGGPPPVAHADPVANPAVGVGNGGKS

SEQ ID NO: 10744 - protein, 372 aa, Firmicutes sp.
MQTVTLKIKLLPPNKEKLEKMARMLETYRQACSWFLEQAEILNTTSRAHLNHQTYRQAGKLFDLNRGTLQCAMLKALSARRSYLSRKQRGKKASLPKFEKTVPVMVRQDCYSLHQLPSGTWVIKFPVSSGRSQIAVPLAASAYHARRLQDLAGGSCRQGSMEIWRGKDGKWYVSISIVYQTGFNEPGSIIGVDFGIVKLAVLSNNVFFDGRQVRWRKERWAERRKALQRAGWLSRVKKEAGRERRWMRYINHCISKRIIEIAKAEGKAIALENLLGIRERVKGSKKFNRMMSGWNFRELASFIEYKAALAEVPVIYVDPKETSKTCPRCGNVSHYNRKTQGWFRCTKCGYQSDADRVGALNIAARALDALGA

SEQ ID NO: 10745 - protein, 152 aa, unknown
  TnpB Polypeptide
MEVEKINHVIIEHTPAGKYFAVLNVDFEPEPRLNAGGTIGIDVGIKAFYSDSNGNTVSNSRYLERSMRKLIREQRRLSRKQKDSHNREKQRIRVARVYEKVTNQRNDFLQKQSTMLVRENQTICIEDLNVKGMIRNHKLSRSIASVSWAKLF

SEQ ID NO: 10746 - protein, 395 aa, Coriobacteriaceae sp.
MLEAMKVALDPTPRQERALLSHAGAARFAYNAALAHVKSQIEAGKRPDWSYYSLRRWWNAGKDGLAPWWRENSKEAYNAGLESLGRALKNYSASKAGERKGRRAGFPRFKTKDGAAPSYSYTTGSFGPIDGDPKALKLPRVGRVHCFEDVARRVGDAKVTRMTISRRAGRWYASLSVERPGGVPAPVRGRPSVGVDLGVKELATLSDGTVVPNPHAYKARLSGLKRAQRELSRKRKGSARRERARLKVARANARIADSRSDATHKLTAGLVRTYGLVAIEDLNVSGMMRNHHLAQAVADASFGEFRRQLEYKAERNGVQVAVVDCFFPSSKTCSRCGAVKAKLPLSEAHVPMRGMRTDHRQGFERGNQHTRRRECPGDAKRARRVLRWGARPRGR

SEQ ID NO: 10747 - protein, 258 aa, Coriobacteriaceae sp.
LSHCPPKDYSSDVARRVGDAKVTRMTISRRAGRWYASLSVERPGGVPAPVRGRPSVGVDLGVKELATLSDGTVVPNPHAYKARLSGLKRAQRELSRKRKGSARRERARLKVARANARIADSRSDATHKLTAGLVRTYGLVAIEDLNVSGMMRNHHLAQAVADASFGEFRRQLEYKAERNGVQVAVVDCFFPSSKTCSRCGAVKAKLPLSEAHVPMRGMRTDHRQGFERGNQHTRRRECPGDAKRARRVLRWGARPRGR

SEQ ID NO: 10748 - protein, 494 aa, unknown
  TnpB Polypeptide
LREFTRREIATCGGYSTRRCTWFGSPFTSTSVAPKPSQTSPKISFMRERCLLAKMLRRYLGMKTKCAWILETTWRPCRISLASTMDQSYHGSVIIRKGYVFRLKSDAATESRIRQTAGSCRFVCNRTLAIQNERMDQHVGVQSYDAMCKALVTWKNDPEMAFLKETHSQVLQQKLKDLRRAFDDFFDPKQPLKKHPVFKKKIDGRDSFRYPHGFKIDNRRIFLPKIGWVGFFKSREIEGTPKNVTVRQHAGHWYIAVQAEIEVADPVVRLSPLVGGDLGIARFLTLSDGTKYKPLNSFRRLEKKLAIEQRRLSRKVKKSANWKKQKARVARLNATIANARHDYLHKVSTTLAKNHGVVVLEDLTIKNMTASAAGTIENPGKNVKQKSGLNKSILDQGWGMFGWMTGYKLAWSGGRLIFVNPRNTSKTCSVCGHIMSKMPMSCREWQCPICGTWHDRDINAAQNVEAAGQVVLACESNQIAGRKQEPPVAAPCAA

SEQ ID NO: 10749 - protein, 256 aa, Rhodococcus sp.
MPCRDTRLKAVRYVCAPWQRALLEHRCGETDLVFRDNMWFLHATVDVPAPEPVVVEEFLGVDLGIVNLAVTSDDTAASADWSGGAVTARRGKYTRTRRTLQKVGSKSAKRKLRRRREKEHRYATDINHQISKTIVAQAQRTGRGIVLEDLSGIRERVRLAKAQRQQLHSWAYAQLRDFVTYKAASVGVPVEVINPRNTSRTCYPCGHVDKANRITQDRFVCRVCGHVDQADHNAALNIAYLGYVKYMTTTHGYWAA

SEQ ID NO: 10750 - protein, 413 aa, unknown
  TnpB Polypeptide
VKVSFKYYAKLNQLQQNIIKELSYHTTKLYNIANYENRENGFKNYYETEKLYKQNYHTQFLHSHTYQWCLKMLEQDWKSYFASIKDYKKNPNKYLGLPKPPKFKNTNNKKNEIIFTTAGIRYKDSILKLSLSKAIQDKFQVQSLNFDMKNVKIPVKLSKIQQIKMQWDNSSKVWYLLIIWDKEVENRVTGNNVMAIDLGLDNLATCVFKDNPQCIIFSGKHIKSKNAYYNKEIARLTSIAMKQCKNSKHFRRTKQIIKLQTKRNNYIKDQIHKISKNIVELALTMDCNTIVIGDFSGIKQENHTKSFVQIPQQELVNKIKYKTKLAGLKVIMVNESYTSGCSAIDLEEINKTNYNKSRRITRGLFKTNNGMLINADVNGALNILRKYIKGIPKAVQTVRDNGRLDSPLRIRIA

SEQ ID NO: 10751 - protein, 390 aa, unknown
  TnpB Polypeptide
MIKSIKVRLHPNKKQLTKLFQYANCARFAYNWAINREQENYNDGNKFLSDNELRKEFTQLKHQKHDWLKNVSNNVTKQAIKDACNAYKLFFKGQCRHPKFKSKKRSRPSFYQDNVAIKFTDTHVKVAGFSVSKRRNKQKLNWIRLCEKGRIPIDCKYMNPRFTYDGLYWYVSVSIEVDDIDSVVANEGIGIDLGIKDLAICSDGNKYPNINKTHKVRKIEKRKRRLQRSISRRYEYNRKGNSYCKTRNIIKRHKEFLKVIKRLTNIRHNHLHQTTSEIVKRKPSFICMEDLNVSGMMKNKHLSKSIRQQGLYEFRRQIEYKSDWNNINVIIADRFFPSSKLCSCCGTIKKDLKLADRIYRCDCGNIIDRDFQASLNLKKYGEAVLQQSTA

SEQ ID NO: 10752 - protein, 393 aa, unknown
  TnpB Polypeptide
LIETIKVQLRPNNKQLTKLFQYAGCSRFAYNWTISREQENHKLGNKFLSDNELRKEFTKMKKFDEYKWLNNISNNVAKQAIKDACNSYRRFFKGLSKHPKFKSKKHSKQSFYQDNVKIQFTDTHVKIEGFTISHRKNKQKLNWIKLCEKGRIPTNCKYMNPRITYDGLHWFVSVSVELDDNTNAPPKSEGVGIDLGLKNLAICSDGNTYTNINKTNKVKKIEKRRRRLQRSISRKYNMNKEGVRYNKTSNIIKREKELLKVTKRLTNIRRNHLHQTTSEIIKRKPSFICIEDLNVSGMMKNKHLSKAVQQQGFYEFRRQIEYKSTWNNIPVIIADRFFPSSKLCSCCGEIRKDLKLSDRIYRCDCGNIIDRDFQASLNLKQYGENVLKQKSTV

SEQ ID NO: 10753 - protein, 390 aa, unknown
  TnpB Polypeptide
MIETLKVQLNPNNKQLTKLFQYAGCSRFAYNWTISREQENYKQGNKFLHDGELRKEFTKMKKLDEYKWLNNISNNVTKQAIKDACNSYKRFFNGKSKHPKFKSKKNSKQSFYQDGVRIRFTDTHVKVEGFTMSHRKNKQKLNWIKLCEKGRMPTNCKYMNPRITYDGLHWFVSVSIDVEDNTDIPSNEGIGIDLGLKDLAICSDDNTYKNINKTHRVKNIEKRKRRLQRSVSRKYNMNKRGERYKKTSNIIKREKELLKLTKRLTNIRHNHLHQITSEIVKRKPSFICIEDLNVSGMMKNKHLSKAIQQQSFYEFRRQIQYKSEWNNIPVILADRFFPSSKLCSCCGMIKKDLKLSDRIYKCDCGNVIDRDYRASLNLKQYGESVLEQNL

SEQ ID NO: 10754 - protein, 393 aa, unknown
  TnpB Polypeptide
MKAYKTEIHPTQAQIELIHKTFGCTRYIYNRYVSENLENLTLGKDFISAFNYSKKVNNDPNTPSWLKEVPSKAIKQALIYADRAFKDYFSKRRGKPTFKKKGKASSFYLIGTIKVERHRIFVPKLKWVRLKEFGYIPKNIISVTISMKNGRYYISCLCKEEKDERVTLSKESMGIDFGLKDQFITEDKTIPSINHSLRIKKLEKRLRREQRKLSRKYKANMIDKMYYQSGVKKGQLKSFRWIKPLSKCKNIQKQKLKVARLYERMTRIRTDYNRKALRSLVLARKPSSITIENLAVRNLMKNRHLSKAISKAQWFQSRLYLKNLCEKLGIELRLADKFYPSSKLCSTCGFKYKDLDLKERFWTCSNCGSEHDRDKNAAINLGQCSTYTVLTAV

SEQ ID NO: 10755 - protein, 412 aa, unknown
  TnpB Polypeptide
MTIIQQVEKHIVKKRHPHYSMFCEYTHLAKNLYNHANFLVRSEFVNTGKWLRYQELDKILKQDITYPDYKNMPAAKSAQQTLRLLDDNWKAFFNSIKDWSKNKNKYSGRPKLPKYKPKDGRMVFILTNQQVKRKDDLLYFPKSFQGFTLKPRCIRLDNFKKINQVRIVPNNQVFCVEVVYSISVDDTLLLDNGRYMSIDLGLDNLATIVTNTGLNPVIVNGKGLKSNNQYYNKKNAYYRSVAKHMNDKFYTNRLYRLTQQRNFKIEDSLHKISKFIVTSALSNDINTIIIGNNKEWKQSISLGKRLNQSFVNIPHQKLIEKILYKAKSVGINVILTEESYTSGTSFLDEESPKKEFYDKKRRLHRGLFISNQGVRINADVNAAYQIIKKVFPNVFADGIEGVVLHPVRVDII

SEQ ID NO: 10756 - protein, 399 aa, unknown
  TnpB Polypeptide
MEFTDYRTQTYLIDMSDELYEMCLASKSLYNQALYLLRQHFFETDRTLSLSALDKLVKKTNEYHYRKLYVQSAQATIINCRMNVVRYFKATKVFYESWDASQKLPKFPMYLDKQDLYDVILTNQLIKLVDGHVYFSKRLGLEPLKLKQVDGKLLEVRLKPIFYQEHDTRKRMVEAQVVFEKTLDVDDLNGKHVAGIDLGLHNIVTLVSTSASPILISGDKMIRYQHQFNRKLSRIHEIGGAQSVRAQKLYYKRKQFMNTELHKITKTIINYCVDNDISTLVIGRNKTLKEDTYHRIFKQLPVHRIVEILEYKTKEYGITLHVTEESHTSGTSFLDDELPTPSYYDKSRRKHRGCFISNDGIRINADVNAAFQIIRKVFPNIEFDLQTKFRSLNPKLLKI

SEQ ID NO: 10757 - protein, 433 aa, unknown
  TnpB Polypeptide
MTNMRKVERHWIKENHELYSICDELTFKAKNLYNAGLYQIRQSFFERERSENKENHTILSWITIESNFRKEKQEDMIELPSKVASAVLKSLGNTISSYYQLLKRFYDKSNTSVTRKPRLPRYLHKVSGRRMLEFNNQTISKKRGENGEIIICPRDLNLMIPTKVDKPKCVRIVPKLGAFIIEVIYEVEDTPLNSTNKYAAIDLGIDNLASVTFSNGVNPLLVNGKEIKSINQGYNRLIAKAQSKLPNKQRISKHIHRLWRNREMKLQSELHVITSFLSQYFDEMCIEKVFIGKNVGWKNNVSMGKKTNQKFVQIPFNTFISQLKYKCLLRGIEVIEQEESYTSKASFVDNDEIPVYGKIDCEPQFSGKRTHRGLYETKDGFRLNADINGSYNILAKGLQSIGKIVDRSDVSYHTRTFRSSYNKSVRDLVLDYM

SEQ ID NO: 10758 - protein, 462 aa, unknown
  TnpB Polypeptide
MPHIIVYIFQSHAFDRFIFVRYMFFMEQVVIQKTTRGKVVNLSNGICLTIDFMLRDQKRLWNWIHELNVKQYEHLGNFIFYKEAASLLTQKRQAGIFAEGSVVAQQQCLRSYEKALKDSFPRNNKRKGFPSSKKHTNDCSLRFPSHDISTVRTGNKLTHVKLPKIGLIRIRDLTVPIGSKINSYCLKKQADCYWLSVQFEVSDFKSINNNPSIVGIDAGLSVMTTFSDGEQIPALKPLKRNLKKLRTQQRSLSRKKRGSVNRRRQAKKVARVHVKVKHARRNAQHQLSSRLIKEHGTIAIETLSLSGLKRLKHQGFAWSDIGIGELYRQIRYKAKWAGVEIYEHPKFSRSTGCCPDCRHIGERLDLRIRTWTCTQCGAKHDRDIAAAKWLALCAKDNKTKVGAVCPEPVRSTKTKSPKRGRLHTAVQPVAGMRSEPPGHPVHDGSPANIPSDTMCLAHTLAV

SEQ ID NO: 10759 - protein, 389 aa, unknown
  TnpB Polypeptide
MKSYKTEIILNDTQKKIFYQTIGVCRFVYNFYLAHNQERYKNGDKFISGMDFSKWLNNDFIPSNPEYLWIKDVYAKATKQSIMNADKAFRRFFKGESKYPRFKKKKNQDVKMYFVKNDAKTIIQCERHRIKIPTLGWVRIKEKGYLPTNKIIKSGTVSQRSGRYYISVLVDDVTHLKSEHFNDGIGIDLGIKEFAILSNQNKPIKNINKTSKMKKLEKSLKRQQRKLSRKYESSKKQNKHKKEVSATRQNIRKQVLKVQKLHHKLSNIRENHINQAINSIIKQKPRFITIEDLNVRGMMKNKHLSKAVAQQTFYEFRRKLEYKCKWNHIELRIVDRFYPSSKLCSCCGFKKKGLKLSERTYECENCGMTIDRDINAAINLKNAKVYKVA

SEQ ID NO: 10760 - protein, 367 aa, unknown
  TnpB Polypeptide
MLEFNLTNRMAKAIIRTAKNRLKLLKESARYQFNNLYKRRRTLYKKMGKLKFLLSLSSTSFKQRKLVKLRLFWTQMKLNKVNQLLSNGLKIHLTFGTRHLLKTNKEKFLAKRDNQVVYIGDKNETCGNQQFQIKFNFKYNRFEYKLRVDNRWVQSSNKYIFGSFVLKNKDAKLSILKTLSNNKSNPLTYRISKEKDALYLQIIYRRETADVTRSSRGVLGIDFNKGFISVSEISSDGKLQSSTRYNYLHTGKSTKTKTSMLELVSKLVAQAVNVGKDIVIEDLVSLDSNKKQEKTKSKDYNRMINSLKFGLFKRCLLSKATKEGVSIHSVNPYNTSKIARASYTDRMKLNVHDAASYVIARRFYQYD

SEQ ID NO: 10761 - protein, 377 aa, unknown
  TnpB Polypeptide
MAKIRQKSYKFRLYPTEEQRVLFLKTFGCSRAIWNMMLADKLAYYKETGKLLNNTPAQYKKEFPWLKEVDSLALANVQLNLRKAYKSFFQSGFGFPNFKSKKKMSHQSYKTNNQNGAIRLSNDSNNNKIKLPKVGWVKVKTHRKLQGNIKSATISMTETGKYFISILCETEIQLYLKTNSSVGIDLGLEHFAILSTGEKIQNPRFLVRASKKLTREQKILSRRALVAKQRGKSLNDCMNYQKQRLKVARLHEKISNQRRDFLHKLSTTLIKNHDRICMEDLASKNLMRNHKLAKSIADVSWAEFVRMLEYKADWYEKQVSKISRWFPSSQICSNCGFNSGKKALHIREWACESCGLHHDRDLNASINILNEGLKILA

SEQ ID NO: 10762 - protein, 401 aa, Nostoc sp.
MVGCKNIHEFERMLTLTYEYKLKPTKQQIQEIENTLAVCRKVWNYALRERKDWVNSRKCKVNACSIEYEYIIKANELFPNYHVQAKRLTEAKKNNPELKSVNAQVLQQVLRTLDRAWEDMKSRNFGFPRFKKYFRMKSFVFPQLKGEIVKAGRVKLPQLGWVKFYQSRPIPDGFVVKQARVVRRASGYFVMLSLQLDVNVPNIPFRGHPIGIDVGLDSFLATSEGQLIARPKFFNALHRQMELLQRRLKFKKLGSNNRNKLNAKIARLHQKISDTRKDFHFKTAHNICAQGDSIFVEDIDFKTWAKGMFCKHTLDAGFGQFFTILSYVSWKRGKYFGKVNKDGTSQICPNCDAHTGKKTLNIRIHSCPECGYTTNRDVAASQVIRNRGISAVGQMVLENAY

SEQ ID NO: 10763 - protein, 419 aa, unknown
  TnpB Polypeptide
VGRKEILLPLLKRREVHKGNLNLRLVNLDNQWHLRINLGDGEYVWAKVIRNAKRNKDKWIDFTWRLLEAEKSGEWFAYNVRLKVRNGKFYAQVSWEEKTVEPIITKAYGVMGIDINAYPFHLALAYVSTDGNLEKFERIDLREMEGKTQNQREHIAWRIARQVVERALENGKAIVVEDLQKVPKGRRGDGLAKLRRKLHKWAYRSVLEKIEVYAKRLGVQLIKVNPAYTSIIGKLKYSPMLGIDKDVAGAYVIARRGLGFEEKLPKNYRELLKDKEFLAYAIAKVDERINNLKSELKKETNEYKRNALKGRIKRLRRYLELLLSYTRDSGKSEPSTQQAVNRERKPMRGRAKSLQKSWRVLSVALAALLATTCLEWCRDHSPLKRVLISRDWVRVAGKGSPSLPGQGTAASNCSFIHFG

SEQ ID NO: 10764 - protein, 535 aa, unknown
  TnpB Polypeptide
LTDAAKIDEIEVVCRLSQDLRRETVYKYWPFEFLPTVLHNPKSVVTARRHNGEAERNSLRSHQQGQAVLSGLGVIRGSWEQCFAAVRSKAARRKNTGLFSEAEAHEINWLLRWPEMLVLILRGQTVVPDPKRKDGTENLDFTGNDHSKLCRWLKGALEDSRPGQSSLKHKVFMEIEGGTYRARLSKKSTRFPIWLSVPGLIKGETIKIPMAGESLEFLEGSGNLSVFVVQDSKGIKRLLFRKAVKIEIEDVPDTKTEEVGLDKGANNAIVATGSDAEHAQFFGTQMGEVLRRCSDRSFRRGRSQFQSRADNLSGRFTPKGRFHGNPNPTEAQKRTARNIRRNNLGTTRRDNEERRAHAQIQNLNGRSARELMEAYPNARIFYEEQLDFVGENLSRGKDINRKTNRWTKKELSIAIESHVSAGRASRQLVKAAYTSQACPLCSWTDRGNRSDGRFECQHCGYSGHADAVASSNVLTRGRDQTISLFTPYKEVKKSLLEQHAKWRASAGTDARCASWGCGLEESLVSPNVLDSQESF

SEQ ID NO: 10765 - protein, 535 aa, unknown; identical to SEQ ID NO: 10764
  TnpB Polypeptide

SEQ ID NO: 10766 - protein, 509 aa, Sporosarcina sp.
MLGIRKSVTRKVLKPMARKRTPTYTIELPLAIPVWQQHRLEKKFKIARNVYNSCLGEALKRHNRVKVDKKYRALLNEPKSKERSKQLSDIRLSYGFSEYGLHDFVKSVQHKFKENIGSFEAQKLATRAFQAVEKLHFRQAKNVHFKAFNDAISIENKSNTTGMRYADGHILWGDKPTKKHPKPKNWLCMPIAPKARDKYAHLALLDQTKYVRILKVEIRGKVRYFVQLIQEGYPPIKSKRKVANDEAKRVGIDIGTSTIAISSENTVALRELAPACNVDEAELRSIQRKMDRSKRATNPDNFNENGTVKKGRHIWNFSYRYRKLLKKRKEHYRKVAVQRKMSHEKLANEILALGSDIRVETMRFQSLQKRAKKTTRNQKNGKINRKKRFGKSIANRAPAMLLEIIDRKLGYQQRSIKKIDTYATKASQFNHLTGEYTKKQLSERWNGVGGLRIQRDLYSAFLIGNTTEKLNSIDVDVCNAQWDNFVNLHTREIARLTQSSSQTLRWFVA

SEQ ID NO: 10767 - protein, 373 aa, Clostridia sp.
  misc_feature (82)..(82): Xaa can be any naturally occurring amino acid
  misc_feature (94)..(96): Xaa can be any naturally occurring amino acid
  misc_feature (107)..(107): Xaa can be any naturally occurring amino acid
VQLTITAKIRIYPDEQQAAILDQTMRAYQAACNYVSEFVYNVSETDYYALHTQFYGELRSEFGLGSQMAQSVLKTVAARYKXLESNNHPWTQIXXXVPCADLVQGRXYSFPKGCVSVGSISGRQKMPFNTKGMERFFDSKVFRFGTAQIVHKKNRKKDLWFLHIPVTFEVPDCDQKNPAAIVGCDLGINFTVTAFGSDGRTVFFPGRALKDKRVQFKILRRDLQKRGTPSARRRLKRIGQRENRWMQDVNHCVSKTLVSSYPSDTLFVLEDLTGIRSTTEKAHHKHRYVMVSWAFYDLRQKITYKALMAGSAVMTVDPRNTSQQCPVCGHTERGNRNKPKHTFRCRKCGYQSNDDRIGAINLYAKGADSVLKA

SEQ ID NO: 10768 - protein, 208 aa, unknown
  TnpB Polypeptide
LKEYYTDSNGVMVENPKFLLRSEKVLKRCQRRISRKVKGSKNRGKARQILGKRHLKINRQRKDHAIKLARCVVQSNDLIAYEDLRIKNMVKNHCLAKSINDASWYQFRIWIEYFGKVFEKVTVAVNPQYTSQECSSCGVIVKKTLSTRTHVCQCGCVMDRDFNAARNILSRGLGTVGHTGTLALNASNALGESTSTLTGEILFEQVGS

SEQ ID NO: 10769 - protein, 403 aa, unknown
  TnpB Polypeptide
MKQTFRYRANPTHTQEAWLFAELRHQKQLQNYMLQMRNQMWEYGRKSVSMYDQTNHLKNLRACTSHYCDHPQDMQVSTIKRVNAAHEHFQRRCREGAEKKGYPRYKSSVRSLSWNLRRHTLKTGERVRQNPIRETGKRHNMLKVPKLGEVKIRQHRSLLGDPKEVTLKKTARGWYCFIVCEVPDTLKRVPKSACGVDVGTHDFLTTSDGEKTPNPRFYRQAERKLAKLQRDLSRKTYRSKRWYKAKDALAKQADIVACQRLDFLAKTAYKLFHHKEFDAVVAEKLKPSNMIKNRYLAKSISDASWGMFFDWCHWVTKRDGKHFHQVSPQHTSQTCSECCQKLPIKLKLSERVFHCKSCGLELDRDHNAALNILHRAACALRGEVWDTILYETRNPLLQQACWS

SEQ ID NO: 10770 - protein, 405 aa, Sporolactobacillus sp.
MQQGLTLKLKIKPTLPEARQLHTMQTAYAHACNHVSRYYFDHQFGRSRRQLHDALYRELRAVFNLKSQMAESVLITVLARYKTVQTLMKRKPYRFKDTYTNQWHQVMKDLAWLRQPIRFKRLQVDLVWGRDWRFLKNGQISINTLDQPIKVDGSLNYFDRYMHQGWKLGTAKLLQVGHKWFLHVGATKELPDFDPYQVQHVVGLDRGLRFLATCYDESGKTRFFSGQAILTKRRRFKRLRQHLQAKGTKSAKRRLKRIGQRENRWMDNVNHCLTKALVDTYGAGTVFVLEDLRNVRFATEQTVKTHRYEAASWSFFDFEHKLAYKAVLSGGTAIKVSAEYTSQRCPKCGSIAKGNRDHSRHHYHCGACGYQSNDDRIGAMNIQQLGALWVSGGTRPRFEKLTAVE

SEQ ID NO: 10771 - protein, 317 aa, Mycobacterium sp.
  misc_feature (272)..(314): Xaa can be any naturally occurring amino acid
VWWPECSKEAYADGIGGAVDAYWNWQNSRSGKREGKTMGFPRFKKKGRDQDRVTFTTGAMRVEPDRRHLTLPVVGTVRTHENTRRIERLIATGRARVLAISVRRNGTRLDASVRVLVQRPQQPNVAQPGSRVGVDVGVRRLATVANEAGAVLEEVPNPRPLDAALKELRYASRARSRCTKGSRRYRERTTEISRLHRRVNDVRTHHLHVLTTRLAQTHGHIVVEGLDAAGMLRQKGLPGARARRRGLSDSALGTPRRHLSYKTGWYGSALVXXXXXXXXXXXXXXXXXXXXXXXXXXXXXXXXXXXXXXXXXXXQVA

SEQ ID NO: 10772 - protein, 461 aa, Mycobacterium sp.
  misc_feature (360)..(461): Xaa can be any naturally occurring amino acid
MPKFEVPDGWTVQAFRFTLDPTEDQAKALARHFGARRKAYNWTVATLKADIQAWHASGTVTAKPSLRVLRKRWNTVKDDVCVNTETGVAWWPECSKEAYADGIAGAVEAYWNWQTSRAGKRAGKRVGFPRFKRKGRDQDRVSFTTGAMRVEPDRRHLTLPVIGTVRTHENTRRIERLIKAGRARVLAISVRRNGTRLDASVRVLVQRPQQPKVVHPGSRVGVDVGVRRLATVATADGTAIEQVENPRPLGAALRELRHVCRARSRCTKGSRRYRERTTQISRLHRRVNDVRTHHLHVLTTRLAQTHGRIVVEGLDATEMLRQKGLPGARARRRGLSDAALGTPRRHLSYKTVWYGSALVXXXXXXXXXXXXXXXXXXXXXXXXXXXXXXXXXXXXXXXXXXXXXXXXXXXXXXXXXXXXXXXXXXXXXXXXXXXXXXXXXXXXXXXXXXXXXXXXXXXXXX

SEQ ID NO: 10773 - protein, 405 aa, unknown
  TnpB Polypeptide
MLYKAVVFRIDGELPTEAKMLMEDFRLAVNHAIRVGLQAKVSSRGALVKLVYKAFREEHPSMYAQHLVCSLEVAGSVLKNLRRRWAKNGPCRIPYVKKLMMKAENQAYKLDRENGVVDLPIKARCHVKLRLVLSDYHRRFMSDPSLSLGSLTLLPDRVIIAFRKEAKRPYEPGTALSLDTNERSLDGVFTDEGTATPVKVDYADVAVVQRRHHDRRKRLQTKKAHDRRTSRRLCKKEGTRERHRIEYGMHQVANAVLDFAEKNRSAVVLEDLEGMSKPKRSKSLNRRLNMWPRRKLHQFIEYKAAWRGVPVVKVDPYNSSRRCPICGTIQYSRMGAIFECECGWRVDKHVNAGINLLQTAFPKGMAGGLWFSPGAFQHDVMMVLYAPVRGARPEPNGTSHLAGRS

SEQ ID NO: 10774 - protein, 249 aa, Clostridium sp.
  misc_feature (5)..(5): Xaa can be any naturally occurring amino acid
  misc_feature (195)..(214): Xaa can be any naturally occurring amino acid
LTESXEEPIIELTDESIGIDVGVKDLAICSNRMTYRNINKTKKVKKLKKTLRRKQRQCSNKYEKNRKGKEYVKTESIAKLEKQIRLLYRRLANIRSNHIHQATNKIVKTKPSRVVMETLNIKGMMKNKHLSKAIAEQCLYDFKIKLKYKCEFYGIEFVEADRFYPSSKTCSECGHVKTKLSLSERTYICEECGYXXXXXXXXXXXXXXXXXXXXAFSEMGHVEQGIKHCFIEFYKVLATEEWFDSTIKR

SEQ ID NO: 10775 - protein, 392 aa, unknown
  TnpB Polypeptide
MSKKTKRAYQFRFYPTAEQKITLAQTFGCVRFVYNWGLLTRKTAYFQHGESLSYNDLAARLPALKHAYPWLAEVSSVPLQQALRHLDRAFVNFFEGRAEYPTFKKKQHEQSATYASNAFTWDGKALTLAKMQVPLDIRWHRSLPKDAKPSSVTISKDRANRSFVSILVEEEIKPLPTTPKMVGLDLGITSMVVLSSGESVGNPRYFAKEEKRLAKAQRRLARKKKGSKNRHKARRKVARLHARIADRRRDYQHKLSTRIVHENQVICVESLAVKNMVKNHSLAKAIADVGWGEFVRQVEYKATWYGRTLVKIDKWYPSSKTCSTCKHVLDSLTLDRREWVCPECGVVHDRDTNAAMNILAEGLSVAACGGSRRPVRAKARQATPVETGNAHL

SEQ ID NO: 10776 - protein, 372 aa, Methylococcaceae sp.
MQAMSTEIQTQTKTLSVRVRDKHAPLLRQWAFEVNQVWNAANEESAELSWVPVPGVGWMNFGTSAFDLQKTIQPIRAARAPSLHSHTYQEVIASHAKARKQFKTNKLRWRCSGGPRKSLGWVPFKVGSAVWKNGQVRYNGHFFKVWDSYGLSQYKFRSGSFSEDVRGRWYFNVVVEVPIEPNGKTSAIGIDLGLKDYATCSDGTKLEARQFYRELEAKLAAQQRAGNKKQIRNIHAKIKNRRKDALHKFSHALVEQHGAIIVGDVSSSKLAKTNMAKSVLDAGWFMLKTQLQYKAIGRGVWFKEVDEKYSTQVCSCCGVISASSPRGRAGLGVRNWVCPDCGAEHDRDINAARNILNFGLGCQAPVAGISRL

SEQ ID NO: 10777 - protein, 341 aa, unknown
  TnpB Polypeptide
MLKKRYKGLDQAPKFISRTTTLNYQRDYSFKANRAVSLSTLNGRIVVPYDGYNKHIDLIKNGVKIGAGKIVYQRESKIYYLMVSLEVELPDIDPNRITRVSGVDVGQRYLSVETDLTNQCKFYSGKAVRHKANCYHKARQSLQRQGTRSAKRRLIALSGRERRFIADVNHQISKQIAKPNSLIGLEDLTRIRERIKSKTGKKASKKQRKANRNKAKWSFAELHSYIDYKANLNGSLVTKVPAHYTSQSCVKCGHTSRANRPNKGLLFRCECCGYQLHADLLGSRNIALRALLVRQDWMSTGILSASPNMSDDETKAEILQRFSELRWSLDASSDLSDSGSE

SEQ ID NO: 10778 - protein, 410 aa, Fervidicola sp.
VPLITLKAQIHADPQTEAVLKDAMFCATKVYNGLLWHLWKEHKETGRVDISRKNLNRILKELPRAKGYYSMSVQLTRDEVREAYKSFFALKRKGLTRHEAPGFRRKNCLSPLKYVQSGFRVDGERVTLSLGTSREDGVRQVSFRISHRPDIEYERVRELSIIYDKVSGRIEARLVVEVKARENKGTGRAAVDLGENILMAAVFDDGMVMLYSGKLIKAIRRYWQKVRANLKQNSRRWKQIAHREKKQVEHLLHMATSHFIAECVRRGVKEIAIGDLNGIRESIDYGDQLNQRLHVWPYRKLIDMLKYKGVLAGILVRDDINEGSTSITCHACGKVMASNRRHRGLYACSCGWKAQADINGALNIYERAYQVSPVKGSSGRVARPAVVSYHLGWHGVAEPKRRDKTLCASA

SEQ ID NO: 10779 - protein, 436 aa, Actinobacteria sp.
VKFNRKIEVIFTEEDKRTLDGQSKICNWLYNHLLELCKLDYYENNNKNKLLSGRNLRNQVPGLKEDFPFLRTVHSSVTKNAALRLMDAYKKSFQEEDINPPKFRAWKKKWFSLYYDEPGKGFKILKDGNLQITLGTDENNRRLKVLGDLKEPLNLRKPDKILTFRLCKQQGDRFYAVFTVERQPVKKKSQNRDRWVALDPNHKNFFTAIDYQGNSFEFSRLPQLKYWDEAIDKLKSKRDKALRKSKRRISKGGKVYYLPSKRWEILNKALNRAYHCRREQLKQAMYAIANDLAKRYDYVAIGDYTPSTNTAVYDNMHRSMLNQEVIGQFRGILLWVFQRSNKQGTVIDETGTTKTCCICGYEEKKDPGVRSFICVGCGTNLSRDINSAVNIAIKDNLLPGSGHVDWDLSQSICIAGWSYQSCEIYLTDTSSMDMSA

SEQ ID NO: 10780 - protein, 440 aa, Thermoplasmata sp.
MSGYVKTVKIPIHYDTTNKKLSYLDNLTARQTYAVQLFCDKLNEEGIVPKNRAEVREFSDYVREETGLSAGFIQQVEDKVLWMYKQYKRSHDKWEWSMDNAKEGTRWYIKLEEREPSVPNPKKSNNKVPTPFDNRTGEVQRTDSLDLTEWVVHISTLKKGNTIDVLVNPSDWHEEQLEEAENLKTFEIVHHPERECEYMVHIVCEYQSDTVQTGSVCGVDLGIKRDLSAVLIDNNGVQQFTILQNHKAERLKELDDRIAHLRREEKYEVLKKLRNKRERVAEDYDRKLAKQFAELLPDGTTVFFGNPRDIRYNKYKGNGDKVGRKLLQHWSFGRIIDQCVLKLNETGKNGEKITEWNTSKLHYRCGKQVERPYNNSFQRIRCSTCDDELDAEFNASVNIAVKGISQYSDKSIEPNTFWQNMAGATDDIARTGDDLEAKIQ

SEQ ID NO: 10781 - protein, 285 aa, unknown
  TnpB Polypeptide
LTISWRSTWFEHRVRDWTVGEVIIKDDRIVIPFKSSEEIYVRRVIGWDSNELSLDGYEPSIGFIHVDLKPLQSMKITYERKKAIAQSRGKGELYEKYVRRERNREKDFINKPSAGLRMLFPNTIHVFEDLDKEDLVSRKRAKNRRKRNARTPWKRIHKRISEVALTAHVDPRNTSRECPRCGYVVETQEGQILECPRCGLKMNRHKVASINIRRRYLEGKRKKKRKTRMRGFPHSNEPEASMMVELWVGVTPSGRSPAIWIPMKRDPEGDEAKGRGLEIKPYQAQ

SEQ ID NO: 10782 - protein, 407 aa, Gammaproteobacteria sp.
MREGVEIRAVRYRVLPGTRAKARCLNRIAGACRYVWNVTLDDQQVLHDTARMFGASAPFPAFFTLGKGFTDLRNSNGHEWLKELPFAVVRYTLKRQADAWQRFFKGQGGRPRFKSRHSGMGFTVPGDVRIRSGHIAVPRMGDFKLRRRGGNPHPNGVPKQAVFKPEGGKWFCTVFYEVRADAREEEGTAVGVDRNVGQCALSTGEIIRMPDVARLEARKRRYQRRMARQVKGGGRRRRTGTKLSRTCRRIAGVRSNWCHQASRRIADVAHTVVVEDLNTKGMTRSAKGSTDAPGTNVRAKSGLNRAILSSGWGALERNLGYKAGQVVLVNPAYTSQACHRCGASDPNSRIDQSTFRCQACGHSANADVNAALNIRRQGLAQLDGEGRGCSKARPMTRQTGGELRQAA

SEQ ID NO: 10783 - protein, 377 aa, unknown
  TnpB Polypeptide
MRKTFKYRLLGNKATFSRADEWLVLCQRLYNMALEQRIYIYRNNRQTISCYDQSKQLPELKEAFSDYQLVGSQVLQDVILRLDKAYLAFFRRVKNGDRKAGFPRFKSRDRYHSFTLTQAGWKLNGQYLTIRNVGRFKLRLSRPIEGNIKTVTISRESTGQWYVCFSCDKVPEHKLAPSVNTIGIDVGIKSFCVDSEGHSEFNPAYFRQAEKQLRVRQRVLCRRVKNSNGRKHARTLVAKAHAKVYNQRKDFLHKVANHYVTNYGVIYIEDLNIGGMVKNHHLAKSISDASWGKFFELLSYKAEGAGIKVVKVPRFEPTSKTCSECGAINQELTLNDRKWVCKSCGTSHDRDYNAAKNIRRVGQTLQEQTSGTGQSVS

SEQ ID NO: 10784 - protein, 419 aa, Arthrobacter sp.
MRGLVSEVSSLRSATAALQHRIAAPVGQKIGGNRGYNSEMERFQKTRRLAQLLDRLAVAQEALAAGRPTIAVGSRRLWKTRNHLDAANLTRDDWDRQWSAARMFLAADGESGQIGGNLTIRVTAAGILSVKVPAPLVPELGNHLVLSTPVTFNRRTEEWADRVTDRRCIRYEISYVTSRGRWYVDASWGCGDMPVLGLEVLQLSGVVGVDMNADHLAACHLDASGNPVGAPVTIRLDLAGQNAGTRDGRLRSAITALLDVARDAGATTIAIENLNFQDARDTGRETMGRGVHGKRFRRTVHGIPTAKFRNRLVSMATNRGLHVIAVDPAYTSKWGGQHWQKPLQTSGGTVTRHHAASVAIGRRALGCKIRRREDGPRTRQRTGAGQPSPRPHRAPEGAAITTGLVRPAATSRLGPPGTS

SEQ ID NO: 10785 - protein, 432 aa, unknown
  TnpB Polypeptide
VKLCKAYKFRLKTNSEIEEKLLKTSGYARFVWNKALSLNKERLEHKIPVMGYNDLAGLLKLWKQSEEYRFLKEAHSQVLQQTLKDLDKAIRDAFKKSKGFPKFKKKGIHNNFRYPQGFKIQSNRIYLPKIGWVRFFKSRDIQGTPKNMTVSKENNHWYASIQTEERIRDPVHPALDSIVGIDVGVVHFASISDGTGREQFIDFPSPLKRYGKELVKAQRNLSRKKKFSKNWMKQKKKVEKVHEDISNTRKDYLHKVSTTITKSHGIVGMEDLKIKNMTKSARGTKENPGHNVKAKSGLNRAILDQGWGLFKQMLKYKLEYSGGMLVAVPPRNTSLTCPMCDNVSKENRDSQAVFVCKSCGFSHNADWVGAEIVRQRTLKQLGLVVSLNYPAVGHTVEACGGKGQESPCEAGTRRKERSSTAPMGTSELKSAE

SEQ ID NO: 10786 - protein, 539 aa, Bradyrhizobiaceae sp.
MPAIVRTFTTRIESHPALAARAELESRVERKLYAALRSKREFRGDLATSFYQQFGISAKALDGIHRQLQAKLKSISELAKAHVAELGIMIETKRKRIATSQKTLRRPTGRGEVRPPGLRRSLHQQKRRLAVLESRYAAARMSVDNPRICFGTRKLFNAQHRLEEAGFADRADWLRQWQTVRSAQFFIEGAARLPSGNPFARLTAKEDGTFDLELRLPDTLGYLAQTEAVPSGHVVRSTHFARLRFAHGDAEIRQALTTMKPLSYRFLRGEGGSWFVSVMLQQEFTDPSVRDFSNGCLGVDLNVDHVALTLTDATGNPLTTVKDAPGNPVMTRRIDLPTFGKTRPQRLDMIRKAAAEIAALAMQLGVPVAAERLDFKRKRAELETAVGRKRARMLSSFAYSSFVEALSRVCIRKSVRLVLVNPAYTSLIGRVKFAPRYGSSVHAAAALAIARRAMALSERLPASGEGIPVLLASGDRVTLPRPARIAGRHVWSSWSQLSRGLSAVHAGHRGARRRVRSDGASNLAVATGTGSRRPFSGPG

SEQ ID NO: 10787 - protein, 411 aa, Bradyrhizobiaceae sp.
MLVQKAYKFRIYPDATQEELFRRTVGCCRRVYNLCLDQKRLERERSNPRRLTAFDQMKDLTSLKREFPFLKEPPNHPLQQVIHDLHKAFKNFFEGRAGFPRFRRKGEHDSFRYPDAKQVKISEDRLFLPKAGWTRMVMHRPIVGKVKNVTVSEIAGDWFASIQVELEVPVVPVNRGVEIGIDLGGVQPIVLSDSTVIDMPRISKEDRKRLADAQRVVGRRTKGSINRAKAQRRVARLQARHARRRKDAVHKATTMIAKNHGVIVIEDLKIAAMTRSGRGTVENPGTLVQKQANQNRSLLDVSPRTIRTMLEYKAPWYGSRIIIVDPAQTSQCCSACGTVDAASRISRSNFVCTGCGSIFDADVNAAKNILRIGFSPTGGLLGMACESSQNIGRKQEPDVRESGSSALQGRE

SEQ ID NO: 10788 - protein, 432 aa, Calothrix sp.
MVTKRVTFRLYPSKIQSDKMHYWRRLHKDLYNSCVEHRRTSYKKFGKSVSYFGQQNCLPAFKEEWVEYKELGSHALQDTVKRVDFAFKRFFKLKSGYPKFKSSRYYKGWTYPCNSGWKACTDGRNGYLKITNLGNIKMRGQARDWGKTKTCTIIFKQGKWYASITVDCVPTRPQTDTGAIGLDFGTHHAIADSNGNLIDNPRFVKTAQSKIDKIAKTIRRKRPPQKRGKASRRWKKANKAIAKIQSKVARHRLDWQHKVSTQIVSCNSLVATEKLNLKGMTRKSKGKRKRQKSVLNRSLLDVGIGNLKDLIKYKVTEAGGFYIEIPTTKVKPSQTCPNCGHKKKKTLADRIHHCEKCEYQCDRDVAAAIVMLNYASGKCGLGVSPSRAFFQDRGMERASTDDDGSTSTWCGSFKQVAQMKRQKLTPQRSRGE

SEQ ID NO: 10789 - protein, 398 aa, unknown
  TnpB Polypeptide
MKVSRVEQQIIKKNNSIWEVVDQHCFYSKNVYNQANYIIRQEFINNGNKLSAYEVQKIMQPMDCYKECGSQAAQKSIQLLDKMWKSYFVSIKDWKKNPSKYLGMPKLPRYLPKDGRQVFMLKNIQCSLKDGLFRISYKPFKQYTVPTHANGKLIQCRFVPKPNYYVMEIVYEIEVPDILEERNRICSIDLGTENLITMVNNFREQPVIIKGGDIKSANQFYNKKKAELQSQLKKETGKDWSNKLQKLTNKRNEKIKYLMHCVSKQVIDYCVLYNVDTFIIGLNKKWKQENCSKQNFTYIPYDMFINQLKSKCEENGIAVITTEESYTSGTSFIDEEQPVKENYNKDRRVHRGLFISNQGKKINADVNGAYQIMKKVIPDVFDEGIEGAGLHPIRLKAV

SEQ ID NO: 10790 - protein, 396 aa, Nonomuraea sp.
MAVRRSYKYLLRPTSKQAAALTQCLEDHRQLYNAAMEHRRTAYAKAGASIRYGEQSADLKHIRADDPGGQGRWSFSSQQATLRRLDKAFRAFFDRVRTGRTPGFPRFKGRGWFDTVEWPKDGDGCRWDSQPEHPAASYVRLQGIGHVRVHQHRPVKGRVKTISVKREGSRWYVVLSCDDVPAEPLPATGAVAGVDLGVASLVTTSDGERLANPRHLAATADRLAAAQRDLACKKRGSKRRREAVARVAALYRTVRRQRLDHAHKAALALVRDYDLIVHEDLRIANITRSASGTIDAPGRNVAAKAGLNRSILDAGWGVFLTILAHKAESAGRELIAVNPANTSRTCARCGHVAKENRLTQAEFACTACGHAAHADVNAAVNILRAGLALRQAAEAA

SEQ ID NO: 10791 - protein, 220 aa, Limimaricola sp.
MLSSGEALNIPGKLRLLNRKKRKAQRVVARRKRGSVRRVKALRRVARISARAGRIRRDWQHRVTLDLARRFGTVVLEDLKTKNMTRSAAGTADAPGKNVRAKAGLNRAILEQGWHSFETLVAYKLEERGGYLCKVDPRHTSQTCSSCGAVDRESRKSQAAFACTTCGHRAHADHNAAINILRRNTASMLVEEGHWLSGEARTGRGLATSENPPALTGGRC

SEQ ID NO: 10792 - protein, 306 aa, Bacteroidia sp.
VGAARWAYNYFIEQNATQYQLYKNGQAANGYISASEIKKQTVAMKKSTHKWLKDVGCNVVKQAINDADKAYSDFISGKCGKPHFKSRRYSKPSFYVNYETLKRVGNGFKGEKLGVVKTAQPLPKLKEGEHYSNPRISYDGKHWYLSFCYPVTPEKQTLTNTVLGIDLGVKTLATCSDKKVYKNINKSKRVRKLKKRLKREQRKLSRKLESNTKCYKQVGGYPVPVYERPLKDCKNIERQRMKVNAIQKKIANIRTNYLHQTTTEIVRTKPSRIVMENLNVKGMLKNRHLAKAIHEACFYEFKRQMI

SEQ ID NO: 10793 - protein, 372 aa, Bacillus sp.
MDMPKQNKAYKFRLYPTEEQAHLIRKTFGCVRFVYNKMLAERIEVYEKYKEDKEELKKEKFPTPAKYKTEYEWLKEVDSLALANAQLNLQTAYKNFFSGQSDFPTFKSKKSRKSYTTNRVNGNIMLFHGYIKLPKLKMVKLKQHREILPKHIIKSCTISMTPTGKYYVSILTEYEKEIVQKEVQTVVGLDFAMAELYVSSEDEKANYPRFYRQMLEKLAKAQRVLARRVRGSERWNKQRIRVAKLHEKVANQRKNFLHHKSKELATSFDVVAIEDLHMKGMSRAFRFGKSVADNGWRMFTTFLAYKLQEQGKQLVKIDKWFPSTKMCSNCGNKKEMPLCERIYACLCGLTIGRDYNAAINIKKEAIRLLVLA

SEQ ID NO: 10794 - protein, 563 aa, Lachnospiraceae sp.
MKITVNSGRYYAEDMAPGAFDACMSALSVYNTAKIKLYNAMYEHRYHEGSDHDVLGKPGVTYASFLKECAGLNAYDAASLYSDVSGILSSQREFRKWYLQTQTEDLKARKAKTASLAKKLDQLLAVKQTLVTYAKTGRFVRPYKGCQLKISGQKACPYGKKTFPLADYERSVEQQIRRTKARLHSVRAAMKRKEARLERFAGEPPARVLFGSKAFYKTKDTVGCDDTWKKTFHERRTRSMMAAGRHTSKSCNFVVKPDGAGGLVWNLPAGLGAVTFPAFRLRRYHKEWTDCLQQNAENRQAVSYRMKRMRDGHGREYLIVSATFMLPEHEAPADLSDGCIACDLNVDHLAWAELDKSGAMIRYGIIPYHLEHLSSTQRDQIIGDVVSRAAVLNKETGKALVFEDLDLTAKRASLKYGNKKSNLLISAFAYKSFRAHLDSQGFRKGFSAVYVDPAYTSFCGKVIFMRKFGVSIHVSAAYCIGLRSLGILDDLTIPDHLGHLMDTKKEQGPYYVAEKISSLYTKLKNIRTHAFYLDLPDVGTVTKLKTWLRVNDQNKPAWYAADF

SEQ ID NO: 10795 - protein, 441 aa, unknown
  TnpB Polypeptide
MYACQPILVNQNNDLISLLKFLCEESHKLTNMGIYYARQLYFKTQKGIGKFDLEQEYKTNRHYKVLHSQAAQQILRTVAESFKSYYGLVKAYKAGKITEKPKIPNYRKKGGVATVSYPKQALKLKDNLIRVPLGKTCKLWFGLDRFFIPMPNNLDFADIKELRILPRNKCFYFEFVYEKQVDSFNLNPKNVLGIDPGLNNWLTCVSNLGTSFIIDGKHIKSMNRWYNKQVSTIKNKKPQGFWNNKLAAITEKRNRQIRDGINKAARIVINHCLENNIGTIVFGWNKGNKTQIELGKKNNSEFVIIPTARLKYRITQLCEQYGIQFIETEESYTSKASFLDGDYLPIYGEKPNDWKPSGKRTKRGLYRVGCKWWYINADCNGAANIIRKVNRTLSIDLSRLSRGVLTRPQRIKLWSASGNVGRRGFSPSEDIRLEFPSEAVL

SEQ ID NO: 10796 - protein, 489 aa, unknown
  TnpB Polypeptide
LYRTIPLKAKFTDEEKAFWVDQCEHANSLINCAIYETKQAHYASLQESENAFTTYWRGDELRYGWKCYQCKTTYPELDKILKDNPHYKAMAAQSAQQTLKSVGESITSYNGLVKKYYRGDVDKPSLPKYRKRGGLAAVTFPRQALTYKNGCFYPSISKETKPQLLTEITLHLPGFIDSDWVKEVTVRPYLGELWIDWVIDDGKEPIDINPNLDYTQAWSFDHGGTNWLTGVSTRGKSLIIDGRKLKSMNQGYCRLVAKCKQGKSDFYWDSNLDRVQRKRNNQMRDAVNKASRFIINQCLNDQVGNLVIGWNDGQKNGSNMGKRGNQNFVVIPTGRLIERLKQLCPEYGIKLTITEEAYTSIASYLDGDSLPKHGEKPEGWKPSGQRVKRGMYKSRHGHFINADCNGAANIMRKVATQLGLTLVEVGRGILTVPQRYDLFTRLNKSYRKRCVREACPLGTSAARSRTSQHQFRIPLLLARGDVKKLLADF

SEQ ID NO: 10797 - protein, 206 aa, Firmicutes sp.
VKVAKIHAKIADRRQDFLHKLITRLIRENQIISLESLQVKNMIQNHPLAKSIADVGWGELVRQLEYKATWYGRTVVKIDKFYPSSKRCYDCGHIVPKMPLNIRKWTCPNCGETHDRDINAAQHLSRRACGVSLWRGRKTRSKAEKSTRRQASTKQESQLAIVGIPRIYPWGGYQRARKSRYTAHGLEITMQPRGVLDDITGDTKKR

SEQ ID NO: 10798 - protein, 240 aa, unknown
  TnpB Polypeptide
MLRYRDTYKLEECNISKIYNVTISKTPSGNYYASISAEVDITAFEKTNRSCGIDLGLKDFLIFDTGEKINNPRILATLEKRYRKLAKAVSRKQLKSNNYQKAKIKLAKFHEKVVDIRKDFLHKLSTQLIKEYDIICIEDLCFKGFMRTNKAKSYQDVAQSEFIRQLEYKAKWYGKTISKINRFYPSSQLCSECGYKNPDLKNLDIREYDCPVCGTHHDRDINAAINILREGLRILEEEII

SEQ ID NO: 10799 - protein, 385 aa, Mycobacterium sp.
LWNLIHAHHTFYEGSRRWPSWSDSDAAIRQARKDIDWLAVLPAQAAQQVLKAYKHAWLNYWNGTHGRPMWKTRRARRAVDVPQARDLNLTRLNRKWATVAIPKVGTVKVRLHRAVPERVTGARVVREASGWMLVVRGENRVAKPRRRRTARGSAGIDRGVIHTLALSDGSFIDQAATLASGEKKRLYRLERRAARQRARALRSRTASRRLLRTYAQIAGLKARQARRRYDFAHQATAALVATGVATLVVEDLRVKDMTRSAKGTVEDPGVNVKQKSGLNRSILNQGWTQILTLLTYKADQAGARVIRVRPHSTSQTCHRCGSTAEGQRENQALFRCANTACGWTGNADTNAAIAIKNRGQEVALQDVEPNATGQAVKRQNPKTAA

SEQ ID NO: 10800 - protein, 197 aa, unknown
  TnpB Polypeptide
VEKRPAERFLGIDFAMQGMCVFSTGERAGYPMFYRKAEKKLAREQRKLSHCEKESRNYQKQKKRVALCHEKIKNQRKDFQHKLSRELAERYDAVCVEDLNMKGMSGGLHLGKGVQDNGYGQFLFMLGYKLEECGKHLIKVDRYFASSKICSVCGHKKKELALSDRMYVCECGNRMDRDVNAAVNIREEGKRIYKECA

SEQ ID NO: 10801 - protein, 168 aa, unknown
  TnpB Polypeptide
LSGATTSSLQVRIAAQRPAGTADAPGKNVRAKSALNKAILDQGWYEFRRQLDYKLAWRGGRLIVVPPQNTSRTCPCCGHVSSDNRQTQAWFECVACGYENHADVVGAINILSRGIQLLRDEGQDTADAAVGMRVGEPPVSARMACGSNCTGGRKQEPAETTAQGAIHA

SEQ ID NO: 10802 - protein, 441 aa, Sarcina sp.
MKITSSYGVEIRKAGGALSATLKTYREAVRVLALFYDTVWEDISAVEGEKKRFNYAEHLVHSTKKNHAVYDFDSLFPKMPSYLRRSAITHALGAVSSYRTRLVQWEEGGRKGKSPVLGEKTHAMPVFYRGNMYREGEGDAALLKLYNGKDWVWVSASLLHTDMEYLRKHWTGVKASAPTLEKRHRKYFLRFSYEENRELVSRPVQEQRICAVDLGLNTDAVCSIMEADGTVCARKFIGFADEKDRLWKVLNRIRRKSRGHGPKSVGSLWKYAVRCNEELSKKTAAAIVRFAQENHADVIVFEHLDMKGKIRGKRKMRLHIWKKRGIQKTCAHMAHREGMRVAHVCAWKTSALAYDGSGKVERDPDNHSLCTFRNGKRYNCDLSASYNIGARYFIRELTKPMPVTAWSVLEAEVPAVRRRSSCVYADLVSLHTVMCENGWTA

SEQ ID NO: 10803 - protein, 374 aa, Chromohalobacter sp.
MTKCAYKERFYPTPEQAVLLAQSFGCARFVWNNTLAFRSEAYQQHGKRVSHSAAEKRLVDLKAEFPWLKEVSSVILQQTLRDQKAAFDNFFNPKLRASYPRFKRKEGRQSIRLTKAAFSYRDGEITIAKSKVALPIRWSRPLPSAPSSITISRDRAGRYFISCLCEFGPEALPITPKMMGIDLGLTDLFITSDGAKSANPRHLKRYEAKLAYLQRRLDKKRKGSNNRHKLRQKVARLHAKIADCRRDALHKATRTLINENQVLCIESLNITGMVTNRHLAKAISDAGWGEFVRQLEYKAAWAGRQVVKVSQWLPSSKVCHGCGHKVEKLPLSQRHWHCDGCGQPIDRDINAAKNIQTAGLAGLACGATGAGVAA

SEQ ID NO: 10804 - protein, 391 aa, Chromohalobacter sp.
MLKATKIRLYPTAEQRGFLNRQFGAVRFCYNTGLRIMSHRYKRHGQSLSAKHDLKKLLPVAKKSRKYGWLKEADSIALQQACINLDHAFQRFFDAKQKAGYPRFKSKRGKQSSCHCVGVKVGNDWIKVPKVGLIRAKVHRKIEGKLTSITLTRTGTGKHYASLLFDAEQAVPEPIQCVEANKILGLDMGLSHLSVDSMGRKVANPRFLKEAQKNLRRKQKALSRTKKGSARRAKARRLVAKAHERVANTRNDFQHKLSRQIVDDNQAVIVETLHIRNMMKNRKLAKHIGDASWHALVTKLAYKAEQAGKRLVKLDPWYPSSKTCHACWHKMDAMPLNIRSWECPSCHTHHDRDINAAINIKHQGIIQLKAEGLSVSAHGGSRKSGMSPVAA

SEQ ID NO: 10805 - protein, 560 aa, unknown
  TnpB Polypeptide
MQMKGRSNQSKMEQDNASTTLTPTKKMEASAQSSAIVESVVPSKKTTSKDKLNLFGSDTPTQKLSKILDRDSTSIENDCKPYWSDLCAGISLQLLLPIETSKADSDLNFSSLWQNKTVDRSWFSQILFTAQSPSSQPIFLPSFMATVVECTKSEVTARKSKKIRLFLKPEQKAILKQWFGVSRYVYNTTIKYLQQPNTKANWMSIKTGILNGLPDWAKPVPFQIKSIAIKDACATVKKAKADFKKTGKICVRKFRSRKDTKQSLYIPKSAIGSKGIYYTKLGQSKLKEALPKDFSDGRLTLAYSEYYIVTAYPRFMEFCRDTAMPCPYGDLSIRDVLHQRGICCISEEVQPRQTDNQGRVVTLDPGVRTFMTFFSEYSYVWLGNDSNLLIQKLCFRLDKLISRMSKTSSQQRQRFRKAADRLKSKIQHLVKELHHKTAKFLVDNFDVILLPSFESSRMVSKSRRKIRSKTVRQMLTLSHYQFKKHLEWKAWEQGKVALTSINEAYTSKTISWTGEVKKIGGSRTIKDSDGNQMNRDLNGARGIFLRALVDTPWLKSFLAI

SEQ ID NO: 10806 - protein, 506 aa, unknown
  TnpB Polypeptide
MSGRLVKRVLTIRLSSKYRAKVRSFIYDVAQFQNLLRVFVLEWDKKTGDIFRLFNSSLLYSLLADRVYSNKSEWQRKELEEVKAIVENDGELKGWIEKLKDQKKKVNEAGICAKVMNQEVRNLKSWANAVKEYKRNPEKFRGKPGLPKPRKLRSLVRFTVVVPHVNVGRKLLLKLRKGEKPLEVLLPEGFDYKVKEVKLVYDMGWIEVHIVYEKEISIYSVGMYQAGIDVGLDNLFSVVSDNPKLKSFIISGKELKSYNRWFNKKVAEIRSHMDRILNMMKEEEDEEKRKVLEEHYLWLKRYLWNLYKARERKLNTWIHQVTRRLADLLYETGHRVVYIGKDAIDKDGISFSKVVNQNYVYIPHRKFVDVLKYKCQELGIEVVEVNEKYTSKCSPINDDVVEMQTKKANGEEVQFSGKRIKRGLYKDLKLNKVFNADLVGAMNILKVGAKLRRLVLDLKTLFVKLCNPVKFRVWDWIYKSKPESLLMEVGIGNSKPAVKQEALASV

SEQ ID NO: 10807 - protein, 502 aa, unknown
  TnpB Polypeptide
MVVKRVLPIRVSSKYRSKVRSFIYDVAQFQNLLRIFILEWDKKTSDIFRLFNQSVLYSLLADRVYSNKSEWQRKELKEVKAVIESDEELKGWIEKLKEQKKRVGNAGVCVQVINQEVNNLKSWARALKEYKRNPNKFRGRPRLPKPRKLRDLVRFTVVIPCMRVGRKLWLKLRNKEKPLEILLPEAFNYYVKEVRLVYDMEWIEVYVVYEKELNIDRIGVYQAGIDIGLDNLVSVVSDNPELRSFIVSGKELKSYNRWWKKKVAEIRSHMDQILNMIKVEKDEEKRKVLERHYWWLRKYLWNLCKARKRKLETWMHQVTRRLADILYETGHKVVYVGRNAIDKNGINLGRKVNEQYVFIPHRKLIDMLRYKCEELGIEVIEVDERYTSKASPVSDDIVEVQTKKTNGEEVQFSGKRVSRGLYKDLVLNKVFNADLVGGLNILKVGAKLRRLLLDLKTLFVKLCNPIRFKLFDLIYKCNPESLSIETGIGASKPAFRQEALAL

SEQ ID NO: 10808 - protein, 508 aa, unknown
  TnpB Polypeptide
MVVKRTLSVRLSSKYRGRVRSFVYDLAQFQNLLRIFILEWDKKTGDIFRLFNSSLLCSLIADRILSNKSEWQRKELKEVKGIIEKDEELKSWIEKLKEQKKKVGNAWVCQKVVIQEVDNLKSWAKALKEYKVNPEKFRGRPGLPKPRKLDSMARFTVVVLFERIGRELMVKLRKGEQPLRVLLPEEFDYKVKEVKLVYDMGWIEVQVVYEKEINMDVVGVYQAGIDIGLDNLFSVVSDNPVLKSFIVSGKELKSYNRWFNKKVAEIRSHIDQLLNLVREEKDEEKRKALEKHYLCLKRYLWNLYKARERKIDNWVHQVTRRLADILYETGHKVVYVGKNAMEKDGINLGRRINEQYVGIPHRKFVNTLTYKCEELGVQVIEVDERYTSKCSPISDNVVEIQGKKANGEEVQFSGKRVKRGLYKDLVLGKVLNADLVGAMNILKVGAKLRRLLLDMKTLFIKLCNPIRFKLFDLVYRCNPKSLLITAGIGASKPAIMQEALALDGRAMF

SEQ ID NO: 10809 - protein, 502 aa, unknown
  TnpB Polypeptide
MIVKRALQIRLSSKYRSKVKSFVYDLAQFQNLLRIFILEWGRKTGDIFRLFNYSLLYSLLADRIYSNKSEWQRKELEEVKEIIESNEELKSWIEKLKEQKRRLNEARVCAKVINQEVNNLKSWARALKEYKVNPGKFRGKPGFPKPRKLKSLTRFSVVVPHVTAGRKLFFKLRKGEKPLEVMLPEWFDYKVKEVRLVYDMGWIEVQIVYEKEIDMNVVGMYQAGIDLGLDNLISVVSDNPELKSVIVSGKELKSYNRWFNKKVAEIRSHIDQLLNLVREEKDEEKRKSLEKHYLQLKRYLWNLYKARDRKIKTWIHQITRRLVDLLYETGHRVVYIGKDAIDKDGIPFSKVVNQNYVYIPHRKLVNALKYKCEELGIEVVEVGERYTSKASPITDDVVEIQARKANGEEVEFSGKRIKRGLYKDLVLGKVFNADLVGAMNILKVGAKLRRLLLDLKTLFVKLCNPAKFRMFDFIYKSNPESLLMKAEIGASKPVIGQEALAL

SEQ ID NO: 10810 - protein, 400 aa, unknown
  TnpB Polypeptide
LAEKHNVRRNNLNWKQIDSLCFLSKNLYNASLYTIKQHYQETGKVLRYNTLEKIMRDNENYSLLPNNTSQQILMLLDKNIKSYFELLRKWKKNNKSLNGCPKFPKFKDKIKGRNILVFTSNQFKIKRNEVHFPKKTKLKPIKTRVFESKIAHVRIVPQSDSYKIEIVYEKAEKECIKIEKWSSIDLGLNNLAVIALEKPIIINGRPLKSINQYYNKQRAKIQSQLEKNHGKKSSRKLTRLTSKRNNKIEDYLHKSSRIVVDCLVKNNVSDLVVGYNKEWKQDINIGKRNNQNFVQIPFYKYIQMLEYKCKLEGIGFHTREESYTSKCSALDREEVRKHDTYLGRRVKRGMFKSSKGIRINADLNGALNILRKETGDKAEAILQTLSSRGQVVWPATVNLC

SEQ ID NO: 10811 - protein, 208 aa, unknown
  TnpB Polypeptide
MDLGLITLATLSNGEKIKNPHHLKLHEEQLAFVQRELSKKKKESHNKKKAKLRVAKFHERVSNTRLDFLHKTANQLLSAYSLIAMEKLASQDMAMQGYGKGINDAGWGMFANMLSYKAENAGCKIVFADPRNTSKECSGCQRLVEKTLWERQRNCPSCGLSIDRDVNAAINILTRAAVGITGSNACEDGAMVPSMKQEAIILPSGRLV

SEQ ID NO: 10812 - protein, 366 aa, unknown
  TnpB Polypeptide
MKKTFQYRIKSNQKTEQQAEKWLSLCRQLYNDCLNERIVASKENKKSISQYDQMKRLPQLKKASPAYQKVNSQTLQDVIQRLDRAYQGFFRRVKNKEKAGFPRFKGQNRYDSFTLKQTGWKLQNNYLEIKKIGRFKLFLSRPIEGEIKTITIRRDSTNKWFACFSCDNLPQKLLPKTNKEIAIDVGCESFLTDSNGQKTDNPRFFKKSQDILATRQQRLSQKIKNSNRKNKARLLVAKIHEKIFRQRKDFHFKVANKLVKENDKIYIEKFRAFRSFKGLNRSMRDAAWFQFFNILRFKAAEAGREVIEVPAKNTSQMCSKCGQIIEKNLSIRIHQCPCGLKIDRDWNAALNILRLGQSLRLTPRIS

SEQ ID NO: 10813 - protein, 412 aa, unknown
  TnpB Polypeptide
MKRGFKFRFYPTDEQAAELSRTFGCVRLVYNKALEARTAAWVQESRRVGYAESSALLTGWKQTEELAFLGEVSCVPLQQALRHLQGAFVNFWAKRAGYPRFKSRKKSRLSAEYTRSAFTFRDGVLKLAKMAEPLDIVWSRPLPEGTEPSTVTVSRDSAGRWFVSMLCEDASVHVLPPAPNPVVGIDAGITALVTLSTGEKVENPKFEKQDRERLTRAQRELARKEKGSKNRDKARVKVARVHARIADRRRDHLHKLTTRIVRENQTVVIEDLAVRNMLGNHRLARAISDAAWSELRAQLEYKCAWYGRDLIVVDRFHPSSKTCSDCGYQVTALPLNAREWTCSECGAVHDRDVNAARNLQAAGLAVIACGAGVRPQRKPPGGHSAVKQETQPATAGIPSLQGGEDVNSSSTG

SEQ ID NO: 10814 - protein, 509 aa, unknown
  TnpB Polypeptide
VKYYDTVTRHRFTTKNGVDAKQVERDLAQMVVWMAEAEQEVLANQEFHDLALGVLRGDRPTGSLNSWGRKRLSRYDFSFQKHNMNEILVSNVVGTLELYAMSVGLFQVMSTHPKETKPERILSCYRDTYPDAPQPTSGTVRAHLRRYHLKGERKASLPGVSAKLNLAVCDTHFAPKTVRDDSDPLNVIVQVKTSSYGTTKIFLRLPENAERFGRGKVCRPTIRLNNKGQVVFDVAIEHEAQKRDTKKIVGVDLGKVEPFVATIIDPMNKHRSAPFHANYKRRLGSLVRAEKKRRDLASHLYERAEVYSIHNRTERADMLRTEASRVSAKATRIKHDISQCVASQVVSVANQNDAHVAVENLSWLDAKGGRWPHAEIQHRIENTAKRYGLKVIKVSAKDTSRTCSRCGGKVSNNSRTRVGTCTTCGFELNRDVSASREIGLRAVSNTRNRERMRSLLRQRALERSSAVTRQSKPVTVLGGIQGHTGTSERKTEATLMMVREILDSSESPT

SEQ ID NO: 10815 - protein, 364 aa, unknown
  TnpB Polypeptide
MLLINKAYNYRLYPTIKQEVALNKTVGCCRFVYNYFLKLNINQYAKNKTFVFNYQMSNMLPLLKKEYPFLSEVFSQSLQTSVRNLSDSFKRFFNKQNNFPTFKKKGKHDSFTCPQKFRIEEELNRIFIPKIGEVKYRNSRLIEGKVKSITVSKKCSHWYVSILTEQEIQEQPKTFVNPVGIDVGLKEFAVFSTGEVIPNPKFYHTLEKKLVKEQRNLSKKDKTSNNWKKQLVKVQKIHLKISNSRKDFLHKLSTQIVNNHDIIGVEDLNIKGMIKNHNLAKSIVDSSWGIFNNFLEYKSTWQSKTYQKVERYYPSSQLCSKCDSKQIMPLHLRTYVCKNCGNVIDRDFNASLNIKLRALQLTLS

SEQ ID NO: 10816 - protein, 405 aa, Clostridia sp.
MIIKTILLKIKQPNVLEFKTIRKTYSKVCNSGIDYLSMQWPNKISHSQLYAYLKDKLVIPSSVLNEAVRLIRSRWITFCKQRKRHIEISIPHFRNTMAISFNNQNWSIKKDGHKYFVGFPVNGSKPYFELALSQRQKDVLDKLLQKQVLSGNGQLLERKGKWYFIISIKFPEPKQVSNTNVLGIDLGLNNIAVCYDKEQGKTTFFSGKEIRYRRTKYASRRKSLGKIKKLYAIRRSKDKERKWMKDFNHKLSRKIINLALKIKAGIINLENLKHIRTTAKTSSKQRKRLGNTLHNWSFDQFKQFIIYKAREQGILVNSIDSAYTSQECPICHHIDYSNRNGIYFHCRACDYKSHADRIPILSGQPGDVVTASLPEIVDPSRDGLLDIAPNLRVARNGNGQKALTT

SEQ ID NO: 10817 - protein, 389 aa, unknown
  TnpB Polypeptide
MRQIYTLKLKLFLSQKDKGLLEKTISVYRKACNFVSVYVFKTGIDDRKSLNDQLYRVVRDRFNLGAQMTQSIFRQVLGEYKTIKSQRNDRKIPVFISGRCDEVYGRDYYFLQNGKVSIGLCKGRLKPSFSKKGFEKYFSKEYRFGTAQILRDRKNNYYLSTSVSKEVSDAKLLPSNSIFVGIDRGIRYVMVAHSSDGNTLFYQGGSIEKRREQFEKIRKDLKKRNTPSSRRRLKAIGSRENRYIRNENHVVSKALLNSFPCGTTFILEGLSGLSKNINKFSFQPLKRALVSWSYYDLEQKLVYKARDKQDPIVYVPPKNTSITCPKCGFVDYHNRNRPNHVFICKRCGFSANDDEVAATNILNLGIAKAKNDRVQSVNSVPTTPRCNAV

SEQ ID NO: 10818 - protein, 376 aa, unknown
  TnpB Polypeptide
MRCSYKYRLYPTARQGGAMQGQLNIAREVYNACLEERRACYRSTGKSLTYYDQANQLKAIRQECPDVATVNFSMLQATCRRAQRTYDAFYRRMRAGLKGGFPRFKGHHRFDSITFPSYNDGCTLADGRLKLQGVGRVKVKLHRSIKGAIKTVTLKREGDKWYVIFSCDIGAITPLPATGQSVGIDVGLTYFLTTDTGATVENPRPFKKARGHLRVAQRALARCKRGSARRSKVRRRVALLHQKVANARRDFHHKTARTLVDANDAIYHEDLTITNMVKNRHLAKAIHDVAWGQFIAILTSKAEEAGRRIIAVDPYSTSQACVCGERVPKQLKDRWHECPVCGLSLPRDQVSAILIKEKRPGHGLQAPTQRIAAYVA

SEQ ID NO: 10819 - protein, 397 aa, unknown
  TnpB Polypeptide
VIQLSHKIELDPTVAQAQYFARACGVARFSYNWALAEWQRQYKAGEKPSEVALRRQLNGIKGTEYPWMCEVTKCSPQQSIKNLGSAFKRFFKKQGKFPRFKRKGVHDSFRADNGPVDKQSHAVDVDRTHVTLPKVGKVRLKEGLRLKGRILSVVVSRVAHKWFASFSVEIEHLVPVRENQAAVGVDLGIKSLAVLSDGTVFDNPKALRSNLVKLKRLSRSLARKQKGSANRKKARNKLARLHYRINCVRKDALHKATMFLTKNFAVIGIEDLNIRGMIKNRKLSRAISDVGMHEFRRQLNYKAILYGCRVVVADRWFPSSKTCSSCGCIKPQLELSERSWRCQDCGAEHDRDHNAAKNLKILAESTSVTACGESVSPGATAAWQSSLKQELGKSYAT

SEQ ID NO: 10820 - protein, 383 aa, unknown
  TnpB Polypeptide
MRAYKFRIYPSKKQEELLNNHLWLAKNLWNELLEHCKQTYNDFGYFPTKNTLQLMVKNYGLYSQTQQEIAHRVSNAIFRVFKTKKKGKKIGFPRFKSFDRMKSLHYPQYEFGFSLDKKLKVTPFGEIAIKKHREIKGKIKTLTLKREASGKWFAIFCVYTPKEIPKENRGKAVGIDLGLMTFATFSNGMRIDNPRHFKKHEDRLALIQRELSKKKKGTTSRKRAKIRVAKLHEKISDCRRDFLHKISTELVNDYSLIALEKLASQEMAEENYGKQIHDAGWNMFANMLAYKAEGAGCRVVFVDPKNTSKMCSRCGNIRDDFTLWDREYNCPECGLSTDRDLNSAVNILTKATEGHSGSNASGNATIVASLKEEAHTFYRGHVT

SEQ ID NO: 10821 - protein, 546 aa, Chloroflexi sp.
MSKKQKQPPKREQTEKEPRRKTPTFLLELPLEVHAGQAKRIRGHLEAGRQFYNAVLSEGQRRLRRMRDDPAWQAARALPRTRKHERAAAFRALREQYGFSENALHEYAKRARQAWIADHLDAVLAQTLASRAYDALNRVCLGKARRVRFKSRGRGLSSIENKRNDTGLRFVLHKPAEGNQGYLIWKDDQLAAIIDWHDPVVKYGLDHRIKYVRLVQRKASSPQAKAADAQGYHYGVQLALEGVPYRKPKHAVGSDTVGADVGPSTIALVPQQAAASLEVLCEDLVPDEKEVRRLQRQMDRQRRAANPDNYDEQGRIKKQGQKKLHWKVSRTYEKTRRSKATKERKLAAHRKSLHGNKVHEIVAVGNTVILEKLSYKGWQKQYGRSVGLRAPGMFVELLKRTVASTGGILIEVPTRSTKLSQFCHGCGRCLKKPLSQRWHQCACGIGPVQRDLYAAFLAAYLDPDHLLPSCAQYVIPWEGAEARLQAAHEQVQQRANDGQSLPRSMGIPRAGARRPSSLSEATPEPAFLLTQGRLEAWKRRSEPPLL

SEQ ID NO: 10822 - protein, 382 aa, Nitrososphaerales sp.
MLTYKFRLYPTDVQEAKLNSTLEACRYVYNYFVRNDYKTRNDMNYALTELKEQKPWLYDYHSKMLQMVSTQVAGARKALKELKKKGHDAGILQCRKRDEHNTFIYNQSGFDVDASDSILYLGKIGRIRMRMHRSIVGTVKQIAVKRRAGRWYACLTTDNNYRMIGSMLKPIDFRKSAGIDVGIKNYAYDSDGNAIPNPENIKKMLKPLIRAQRKVSRRVKGSNNYKKAKRWYQIVHERIANKRKDFLHKLSAYYANKYDVVFMERLRLTNMVKNHNLAMSIMDAGWSIFKDMLEYKAKMVIEVPAQDTTIQCSRCGNKVPKSLAVRMRRCDVCGLVLDRDYNASLAILKKGLQVLPMEDREVTPVEILMGSRKQETIALRHW

SEQ ID NO: 10823 - protein, 410 aa, unknown
  TnpB Polypeptide
MKTEYEYRGRVLNFSASKSTIKKLYELNRISAEVWNHCLDLVEHAQASEHIVTKNFLQSHTKGQYPLHSACVQTVCIRFAESRKACYEARQMGHNNKYPTYRKTSFPTRWNETGFSLLNTGPRAEEHGDNYKGVLKLSTNIAKSFLYLKVKGISHGDMIYVDVIERYGKLMLSIIERFPKKQTPYSSNQNIVGIDMGEIHSFSCYDSNHNACIVTGRQLRSLNRLRNKQLGEIQNLQSASTKGSNRWEELQKAKMKILERNSNQQKDLIHKITRNTIDWCIQHGITKIIIGDIVDIARNTKNEKKLNRKNRQKISNWATRKLLHNLAYKAKSEGIMIEVIDESYTTKTCPSCGNHKKPKGRIYKCSCGYEFHRDLHGARNILLKGTRGKIEIYPSDNVPQNPVTFEYINS

SEQ ID NO: 10824 - protein, 388 aa, Escherichia sp.
  misc_feature (259)..(334): Xaa can be any naturally occurring amino acid
VKRLQAFKFQLRPGGQQEREMRRFAGACRFVFNRALARQNENHEAGNKHIPYGKMASWLVEWKNATETQWLKDSPSQPLQQSLKDLERAYKNFFQKRAAFPRFKKRGQNDAFRYQQGVKLDQENSRIFLPKLGWMRYRNSRQVTGVVKNVTVSQSCGKWYISIQTESEVSTPVHPSASMVGLDAGVAKLATLSDGTVFEPVNSFQKNQKTLARLQRQLSRKVKFSNNWQKQKRKIQRLHSCTANIRRDYLHKVTTTVSXXXXXXXXXXXXXXXXXXXXXXXXXXXXXXXXXXXXXXXXXXXXXXXXXXXXXXXXXXXXXXXXXXXXXXXXXXXXSKFRCQVCGYTASADVNGARNILAAGHAVLACGEMVQSGHSLKQEPTEMIQATA

SEQ ID NO: 10825 - protein, 527 aa, Streptomyces sp.
MKVLALVGEHLGNQQRADLAARVRIGNVPAKQTERAGRKKRLTSVSSSRWAGAMTRASEDQYQLSMRCLIDERASLRRRIRKIGQRLAVGCGGKRGGVRGYADQAERWQKQRHLTRLETRLAVVERRIDQGHPPIVVGGRRLARARHHLADAGLTEAGWRRQWDAARLFLTADGESDAPYGNYTITVDPASGQVSLVLPDPLRHLANAPRGRYQLPSTVTFPHRREEWLDRVNTHRAVRYDIVHDPMRDRWYLDASWSAGKTVQPTPEEVRAAGHRLLGVDLNADHLAALVLDPHGNPIGGPVTVPIDLTGPTSQRDGRLRAAISDLIRIAHDHGCSGIAIENLDFADARATGRETMGRGKRGRKFRRAVAGIPTARFRERLRSMAFHAGLVVIAVDPAYTSVWGERYWKTPLQRQNQQATVTRHHGASVAIGRRALGHRARRRPGVTAHDRRIVTRRAAGQAVPVPRARGTASPPRTASTPHAGGKTRPDRGDQLALFPDLEDRSRGHRAITGPGCDSSAITGQQR

SEQ ID NO: 10826 - protein, 409 aa, unknown
  TnpB Polypeptide
MLGVFKENFDNRGTTSIPTPAGLKKDYPFLKEVDSLALSNVQQQFNQTKNQFFKSLKGERKGEKLGFLKFKSKRNLKKSYTTNNHGDTIAIQGNKIKLPKIGQVKAVIHKLPKENWKLKSATILCDVDGHYYISILFEFEQKIKLKNEVNSAIGIDYASNGFGITSFGDQLKYSKHFYENQEKLALEQRKLSRKHLHSKSWYNQLKRVNKVHKKISNQRKDFAHKLSYLLAEEFDLVAVEGMNLKNIAQTLNLGKSTNDNGFGMFRGFLKYKLAERGKYYYEVDQFTPTSKVCSCCGTYHKDIVNSLAVREWTCPDCGTHHDRDINAAKNILQHGLNALNELEIKIELGQERPDGYADFVREVKEHLQTTGSLRAVEQTPLNKEKSSVRRSYFLKSSDRSTEELDARNL

SEQ ID NO: 10827 - protein, 402 aa, Shigella sp.
VKRLQAFKFQLRPGGQQECEMRRFAGACRFVFNRALARQNENHEAGNKYIPYGKMASWLVEWKNATETQWLKDSPSQPLQQSLKDLERAYKNFFRKRAAFPRFKKRGQNDVFRYPQGVKLDQENSRIFLPKLGWMRYRNSRQVTGVVKNVTVSQSCGTWYISIQTESEVSTPAHPSASMVGLDAGVAKLATLSDGTVFEPVNSFQKNQKTLARLQRQLSRKVKFSNNWQKQKRKIQRLHSCIANIRRDYLHKVTTAVSKNHAMIVIEDLKVSNMSKSAAGTVSQPGRNVRAKSGLNRSILDQGWYEMHRQLEYKQLWRGGQVLAVPPAYTSQRCAYCGHTAKENRLSQSKFRCQVCGYTANADVNGARNILAAGHAVLACGEMVQSGRPLKQEPTEMIQATA

SEQ ID NO: 10828 - protein, 421 aa, Symploca sp.
MKARYRYRIYPTVGQQKSLAKLFGCCRVVWNDALAFCLSQYKAGEKKPKNAELQKQFITQAKKTVERQWLTEVSNIPLQQSLNDLEQAYQNFFKSCKGHRKGKQVLPPKFKKRDAKQSARFRQGGFKIGQTFVKLAKIGKLKIVWSRPLPAEPSSVTIIKDAAGRYFGSFVVEITSKALPRTENSVGIDLGIATFATLDDGQKIDAPKPLKKRINRLRRLSKNLSRKTRGSKRYERARKRKAKLQAKLKDTRTDFLHKLSTQIICENQTIVLEDLNVAGIVKNRKLSRAISDLGWRQFRTYLEGKAEKYGREFRVISRWEPTSQTCSCCGFRGGKLELSIREWTCLNCGATHDRDVNAARNILVAGGHSETQTGRGGKRKTSVKEAVSRVSEADAALASKRQPTESTFSYRCSTLLESPCL

SEQ ID NO: 10829 - protein, 468 aa, unknown
  TnpB Polypeptide
MSVVVKRTNTFAVRPLSDDGEQLLCDLLDASAALWNEVNYERLMRYNDEDGFEGDVWDADTGRLEGKYKGVLGASTAQQVIRKNSEAWRGFFENKQAYHGESDTSVTEHPEPPGFRGNEDEGRQLKTVIRNDAYSIEWGERSRLEIVVGQDLKDEYGLGYYERLRLEVAGEPKWDGKQGRLDLWYDETDSTFRASQPVTVSDDARETPLADETAALDIGANNLVACTTTTGEQYLYEGRALFEQFRETTAEIARLQSKLEESRYSSERIRRLYRKRTRRRDHAQEALCRDLIERLHDEGVSTVYVGHLTDVLETHWSVETNAKTHNFWAFRTFVNRLACTAEEYSISVAVRSEAWTSQECPQCGSTDRTTRHQDTLTCTCGFEGHADLIASETFLERHQNSESSDWRTRRGASRQRHTEQAVRPMARPVRFEWDDHDWSGRSHPHERPKEQRTDLSTTDGKFAFGRSA

SEQ ID NO: 10830 - protein, 439 aa, unknown
  TnpB Polypeptide
MAKATRIAFSKGLNARKYDALVEQARRLGVLRSEVWQRYGSIAGVGVRSRDVRDQWLCEKRVFDVSANAWKETLRDTMDDIKAHREAAKVKVRQAIRRHTSDNDEQKLLYALLKSDKWVKDPYLRRMMRKYWHRGHSHICNQIIVRSDNYRTFQRGGHAWVAIPGLESGKRVHIPLNTTVAPSGTLRLILRDGKVEIHHVIDRPVVDDCGDRTIGVDKGYTEVLVDSDGDHHGVELGPLLTDKSNKLKVKYQRRSKLKAIADKSDPAKAERIFKNNLGRNKLDRQNKKDKQQIRDVVFKAVHAVVDKASTVVVEDLASPIAGRKFGRNYNRRMSSWTKGTIAEALDSVSHRRGSSVVLVNSAYTSQVDSKTGCFTGIRKGDYFYREAGEVLQADENAALNVLARLFDSEISRYMPYRKVRDAIQGRTKRYRLGLLNQDF

SEQ ID NO: 10831 - protein, 391 aa, unknown
  TnpB Polypeptide
MKAMRAWKFRLYPTKTQAKELQTHLWLSKELWNDLLEFTINLYDNHQMFPTKRTLREIVKNSGLYSQTSQELVDRLTDALHRKIEMKKRGQLGGFPRFKSMDRMKSLVYPQSGFSFKADKMKLKVTPFGEINVKLHRPVKGTIKTLTLKKEATGKWYAILTSEIEVKPIPKNNGSEVGIDLGLINFAVLSDGTTIKNPRHLKKHQDNLRAKQKALSRAKPGSSNRKKAKNRLAAVHEKVRNTRRDFLHKLSRQLVNAHPLLALEDLASQEMAEQRLGKSINDAGWSEFISMLSYKAEGAGSRVVLVNPKNTTKECSRCGVLTDKALSERQHNCPSCGLSMSRDLNAAINILTRATGGTPERQACGEETTTGYKHNWQVSSSKQEAHAFRRG

SEQ ID NO: 10832 - protein, 468 aa, unknown
  TnpB Polypeptide
MQTGRSFAAHFEDDASREAYLMWSAAQMIVYNAKVDESNYFWKFHCKFWSPEPLPKPDQKYAHLVNPDTVPWVKEVPSAVRGIGAYRFFQAMTRFMRGLSKRPHRKPIRNADRQLTLTSDYFSVKPVSQKWWELTFGSKKKTAGRIRFRAHRRFEMPAMVMITCTNQCLQLGFSYEDELTEFPETEEEILARLRKLTPEELAERTVGGDVGVKIRLQLSNGESFNLSEIEKTRIARKDFGRRRHQRRLARMKPGSGNYKKQTRKIAKTYAYEKNVNNNFCHQTSHKIAVMEGIEVVALEDLNVTGMVRRPKPKYDDKGRAQPNGAAAKSGLNKAVTKSRFARLRTSILYKCRRNGKVAVFVNAKNSSRECSKCGYTAKENRPSQAVFCCGREGCGHEENADLNASRVIRKRGVKMILEGLVKKKESKKLLRVPRAKKRNIGVDRPESMPAEPSVCSCVLHGVVESWRL

SEQ ID NO: 10833 - protein, 139 aa, Okeania sp.
LITHACIDLGLLYYAVTSDGEFIEVPKFFRLSEHRLSKLQMRLAKKPKHSKPWKILKRKIAKLHQLIARQRLDWHFKLAYHLFSDVSVIFIEDLLLANLVRRCKAKLGDNGQFLPNGQSAKSGLNKSLQDAATINSLMF

SEQ ID NO: 10834 - protein, 480 aa, unknown
  TnpB Polypeptide
MQLTLRGALIELEEEDRTQIDDLMRIYQSAKRYSFNRLLEKQNLNDLKKDVMAKFGLNARYSYAAIVDAKATIESQKELVRDEIAETKEKIKKSKRKLKKVKNLLKRKGVLMRIDKLNNKLKKYEHYRDTKTIPKIIFGGRKNFMKLQEGEITEEEWKDLRSNAFYSIGGRIDGGNQNLRVTHMNDNYFRLRINAGERRWIYLVLWVPDRYVDPLRRVIDREYSVRVIRKDKDKYEVHISSDHPETDLDFSHGVAGFDINTDNLSVTIASKDGNFRASKVFPCPELCYARSNRREWLLGNLVKDAFGWLKQFNVKTIAIEDLKFRKTHDTNKKYNRKTSNFIHSKATELIKSQAIKEEIGIKEVNPKFSSFIGEYKYSSTYGLSVHQSAAFVIARRAMGYMERVPKQLIMFINFVKKRDPLVKPMEGFRKWGLLYGVMKRAANSRIRKVLHAFSSSLGLDDAETANSVLHGAIPCPTRRS

SEQ ID NO: 10835 - protein, 368 aa, unknown
  TnpB Polypeptide
LRDESPLNLIMLLAIKFLGESLMKARKTIKAKILELRKGKEELLRREYENFQRYLHGDKSVPLYSATKQQAERLLKRIGKPKERKEYPLILRHDVYRARTKLTQYWLKIPIHGVRGGINVPIKPHTPIAEDMVCREAKIVRRKGEWFVYITVEAEIPEKNPSNVLAVDLGIHNTATTINSIDKKPKFYGKKLRAIRGHYFHLRRNLPNRKAVRKVGNHEKRIVNHELHEISKAIVQEANRTNSVIVLGELKGLRKNGNGKGRRFRRKLNSFPYYKLASFIEYKARWLGIPVLEISEAYTSQICSRCGQKGSRVRGLFTCPHCGLNLNADYNGARNILKRALGKLHKEPLSSAGAGLTQPELLAEAKSQ

SEQ ID NO: 10836 - protein, 417 aa, Microcoleaceae sp.
MLRIHANRKVYNNAIAYLNQHQGKFTYYTINKKTNQPVIKASGKQAFRSFCKTLGHEIIPEWCKDLGIAHGLDNALFEAYTAWKKTDKQSAQIGKGKNAKPNPLVGLKIARFRSIRDQKQTIQFDPGDYKNGHLMINASKGLEKPLWTGQNYCSINYHQAVEVTYNKGRWFVNMPVETDIPEPKNGGKTIALDPGLRCFLTGFDGNSFTEFGKYDLGKIARLCQHLDKMQSKRDQLKGNKFSKLRYRLKQAMERVRTKIKNLRSEAHKQIGSYLARTYDVIYLPTCETSQMVARGSRKLNSKSARAMMTWAFYQFSQTLEHLCNRYGMRYAQATPTRLVRVSEEYTSKTCTKCGHVHRKLGGSKIFKCPNCGHEIPRDFNGALGIFLKALWDTTMLSEVSDGCAILGLSQNVGDCQN

SEQ ID NO: 10837 - protein, 387 aa, unknown
  TnpB Polypeptide
MSIRTIALTLAPTDPQRAAFLRLRRAFADACNHISTVAWDTGTFNRVRLQQATYGEVRATYGLMAQHTCQAVSVVAQAYRADKDTKRVFKPTMAVALDTPRLYRLDGNHVDITTLDGRLRVKLNIGGIQREWLKGAMALKEADVVCDRKGRWRLMVSTVYSDPPTIETDGVIGVDLGRTDIAVTSDGDTFSGRQVTAVRDRYYHTRRMIQRHVSKGTRSSRRRGRATLARLSGRERRFQAQVNHTTSKRIVTQAVASRRAIACEDLIGIRERTNTQARGKTERRRSNSWAFYQLRSFLAYKCQAAGVPFVLVNPAYTSQMCHCCLHIGKRLGKRFACTNPDCLWSGDADYNGAANIAVLGRSLNAPHGPLLCCLYQPGRRALEIPRL

SEQ ID NO: 10838 - protein, 399 aa, Anaerolineae sp.
MSDSSKSVKVFKYRLYPSKAQEKNLLWVLECARHLYNMALAERKYAYQLEGRTVTLADTEQLAKHYRATFPYADQMHSQTAQSVVKQVDEAYQSFFRRLKTGEKSGYPRFKSRNRFHSFEFKQFGKSGAFLDGKRLKLYGIGRVPVRWHRPLQGTIKTVRIMHSAGKWYACFTCEVPTPEPLPKMGRVVGVDVGIAALLTTSDGEKVENPRWYREAQAALRRRQRKLARARRGSQNRRKRLLEVQRQHEHIANQRRDYLNKLVYALTLHYDGIAIENLAIRNLVRNHHLSKRILDAGWGYFKARLTHKAASAGREVALVDPASTSKTCSNCGALFQDFDLSTRWVTCACGLSLDRDHNAAIAILDRAGWVTSVSHNVAPLLFSHRGNGKRRRAAEAARL

SEQ ID NO: 10839 - protein, 127 aa, Kurthia sp.
VFQREDFLHKLTTAFIRQHDVICIEDLNTKGMLKNHKLAKAISDVSWSSFVQKRMYKAKWYGRTIVKTNRFFPSSQLCHVCGHRDGKKSLEIREWVCPACHAILDRDVNASRTILAEGLRLFETTQP

SEQ ID NO: 10840 - protein, 514 aa, Clostridium sp.
MMIFKTLMLQLYKPGKQKRDLMDTALLRYSQALQFLMDTYRNEIIELSKSETDITQHLILKMIDRETAKSLNRFDIQPFKDSLLLEFSAVAASYLARRKNHPKTGYPLPFLDAQSYSRAMSDCVAQFDSGEIGPQRFQHRSFKLVDKAGKLRSVYFGRYATNRDYCLLYDEFKDRFYAKLYLMNRANSIPGGYCASGLSLKYVWDGMPFMSNLPGQRRYIVVPLAFGKEQYADLKEALKNPRLLHSSRLVKKDRQYYLMVNIECSRQITREAVTTMGIARGVHGGLSYTICDKGGGVRERKRISACLKQSGAPDFSNTIAEIAAKNRAQVVLEANGGKNDRMPVPAQNRELCFSVRDYLLLAQKLKYKLPGKGLPPPVEVSSNGLFLTCPRCGTRTQRNRVTEELFACIRCGYAAEFETVGSENLAKRLDKYHSDKVPITVSKKEDGFLCCNKILGFRCELPPDTTDYTPMFEELDRFIGRMRETYIDDSKRYAVWKKLAQAPDLRKSVHLLLR

SEQ ID NO: 10841 - protein, 380 aa, unknown
  TnpB Polypeptide
MNTYRAYKLRIYPTDLQRELIEKTFGCTRYIYNNFLAERKNKYEESKIKINVYEQLKELTDLKGEKEWLREIDSCALQACVYNLDDAFQGFFRGKGYPRFRAKGVHESFRTNNTLNTYKDKKYESIKIDFNKRVITLPKLKEVRFRGYRTTNEIVGKIKSATISKDANKYFVSILVEVPFVKYSLNPTSIVGLDLGIKDFIVTSNGEKLKNEVKINEKRLKGLQKWLSRCKPGSKNRYKVKLKIQRLYLKIRNARKHMIYKLANKILKENDIVAVETLDIKSMYQVHSIAKNLKNLPIGDFLNVLKYKADWLGKKVININKYYPSSQVCNRCEYKNEEVKDLSVRKWICPRCGFEHDRDINASVNIMFEGLKIYMKECII

SEQ ID NO: 10842 - protein, 497 aa, unknown
  TnpB Polypeptide
VVLRAYRFAVDPTPAQARVLASRCGAARKAFNEGLAHVRRCLDQRAAERSYGVPGQQLTEVPWTLPALRRWWNLHKDELAPWWAENSKEAYNSGLDALARGLGQWSGCRSGKRRGARTGFPRFKARRRARVSCRFTTGAIRVDDRCHVVLPRMGRVRTHEPATALSGKIGAGTARILAATVSFDGRRWYCGFTVEAGREPGRPAHAGMDRAHPVVGVDAGVRDLLVVAAPGGGGVARVGAPRALAAAQARLRVVQRRAARQDGPDRRAGRRGSKRWQRIAQRAGRLHARAANLRRDALHQATTRLAQRHDVIVIEDLNVAGMMRRKPGAGKGGRGLNRALADAALGELRRQLAYKNTWYGSQLVVAGRWYPSSKTCSACGAVKAKLALADRAYRCEHCTMVLDRDLNAAVNLARLSEHATRVGGRPAGSGPAAGRGAIRKTSPPIGPRQEATKRQPRTTASQPPVRRGPPLRKDRLPDYQTQVDGSGNGLSVPGSCP

SEQ ID NO: 10843 - protein, 435 aa, unknown
  TnpB Polypeptide
VILSDQEIFINPHERIPPPSWWRRKRVMTRALSRNNLLIYLPPYMNLLRAVSVKLVEGADLLPTFRAYTQAYNTCCKIGWDAKEFNGVALHHLTYPLIRDTLPAQLAISARMKATESLKSAKVRVKVKKKTSCPESKLCSIRLDANSYNVWFDRKEVSILTINGRQKGIKFQTYDYFDQFKDWKRKSADLIYRKGKVLLTFIFEKIVPDIEGTSETFVGVDRGIRRIAVTSDKQFFGGGHVKAISNRYHRLRADLQSCGSRSAKRHLQRIAQKENRFRRNENHCISKKIVQSLPVGSTIIIENLKYIRERCRHHKDQRGEFHNWSFFQLEYFLTYKAEGRGQRVVYVDPRYTSQKCSHCGHTSKTNRKNQTQFKCTHCGYMLNADLNAAFNIRNNYLDSIGHPSRAPVNEPTVSGHVPRSAGGLVTSRRARPGGG

SEQ ID NO: 10844 - protein, 405 aa, unknown
  TnpB Polypeptide
MKEHMITYNLAHTIRLYPQKAQETFFRKACGCARVAYNYGLAEYKKQLDAGNKPKVFDIKKQFNQEKKTQYPWMSETNKDANQQPFANLQSAFNRFFKKQGRFPVFKKKGIKDSFYISNDKFGVEDKKFWIPKLGWVKGAESLRFKGKVTSATIKRKANYWFVVVSVETENTHATCENQAVVGVDLGIKILATLSDGKVVESVSPLRKKLGRLKLLQRWLSRKVKGSSNRRKAIQRVSKIHYEIACLRKDVLDKLTTYLCENYQVICVEDLNVSGMIKNHKLALSISDMGFGWFRRQLEYKSILNGNTLIFADRWFPSSKMCSGCGHIKDTLSLSEREYVCDVCGKVIDRDLNAAINLRNYGLKQLRVVNPEVTPMEMGALACRAASETTVDEVGISACTEEMYM

SEQ ID NO: 10845 - protein, 218 aa, unknown
  TnpB Polypeptide
VYFSCETERPNPLPKTGKIVGINLGLITYVQCSDGTKINKPRFFNLEQGALAQAKRRENITFKQEHKKVLAKIHERIKNKRDDFCHKASKKLVDKYDLIAHEDLNAKGMLEQKKFSKSISDAAWSTLILFLTYKAASAGRTIRAVNPRGTSQRCSQCGTVVNKDLSVRVHHCPHCGFRTSRDLNSALEILRLGLESVERPMPRRKAKARVRAHGSPRL

SEQ ID NO: 10846 - protein, 447 aa, Bacillus sp.
MTRKKAIKVLRKQKKTENIQRFTQKQNLGRASLTAKEFRLLQRMTHSSKALRNVGLYAIKQCSLNNNRMATVKEVDTAMQTDVNYWGVQSNSVQAIRRTLFSEAKSFFKALEQWKKNPEKFTGRPRFPKYSGSTEKRIIEIYQIPKADKDGYWSIPMNVEFRKRFGSIKIRMPKNLLNQKISYIEIKPKQKGRFFEVHYTYEVQIAQMKKQPTTTVNALSCDLGVDRLLSCATNIGDTFLIDGKKLKSINQYFNKAISNLQQKNIENGISKRVVTNKLAGFWNKREHQINGYFSQAVGLLFKKVKEFNIDTIVIGYNAGWKQECDMGKRNNQQFVQIPFQKLISAIENKCLKEGIRFLRQEESYTSKASFLDKDTLSVWSKDDKTTYKFSGKRITRGLYQSKSGQCIHADINGALNTLRKSEVVELDENFKVKTPILLKVQKRKAVV

SEQ ID NO: 10847 - protein, 411 aa, unknown
  TnpB Polypeptide
MSRYRLYPTTAQEAALLEHCAHARFVWNLAVEQRLWWKPGRHPTPGFTQQCRQLTEARAAFPWLADGSVIVQQQALRDFHAAWARRYSALGQWRSGTIKRLPDARPSPPSPPSWRTRNVHEGFRIVATGPRGGARRLNRRWGEVLVPKLGWVRFRWSRPVPDAKSYRVTRDHAGRWHIAFAAIPPAIPGPGTGEVVGVDRGVAVSAALSTGELLSVPGLRPQERRRLERLERRKGRQRKGSNRRARTRLAIARLKARETARRRDWTEKVSTDLIRRFDRIRIEDLDVQAMTRSARGTAAQPGCNVRQKAGLNRAILANGWGALLNRLEDKAPGRVERIYPAYTSQRCSACGHVAPGNRESQAFRCVACGHHAHADVNAALNIAAGHAVTARGGEPLGAPTNREPTTLGAVA

SEQ ID NO: 10848 - protein, 357 aa, unknown
  TnpB Polypeptide
MTETVLRVWKVKVPSRLALRLEDLHAPSLLVARRMLKNRHESSSSFYHEIPCVISKSLIDKYQRNRRCKNIRNLVLPVCGDKGKQIKLVDGGIRVPAIFHKEVLPIVFPLPVHGFIRCVEFFKREGQWYASVCYNTPKAKTIDCCGVVGVDRNSVGNIAVMADVQTGKVLKLGFSPAPTKRAMRGRRSNLQRARKFRLLAKIRRRQRRRMTHENHRVSKSIVNYAAEHRLAVAIENLAGVRKPGSRIRKYSEKNQWAFAQLETFLRYKCALRGIPVIAVNPAYTSQDCSRCGSRHKPSGKIFHCATCGHNSHRDVNAAYNIGARALSVFTTGGSSSGLNVSGLGPIGSPQGGKEFAS

SEQ ID NO: 10849 - protein, 373 aa, Actinomadura sp.
VQLRYAFRLYPAQRQRQALAQAFGCARVVYNDALRARQDARAAGLPYLKAAELSAAMTVAKKNPERCWLGEVSAVVLQQSLRDLEAAYRAFFDGLAGKRPRIGAPRFKSRKDARQSIRFTANARWRITERGKLALPKIGEVEVRWSRALPSVPATVTVIKDAAGRYFASFVVQAADDPLPETGAGEGLGIDLGLEHFAVLSDGRKIASPRFLRRAEKKLRKVQRAVSRKQKGSANRGKARTRVARVHAEVADARREFHHRLSTMLVRENQAVYAEDLCVKGLARTRLAKSVHDAGWSQFIGMLEYKAARHGRTFARVGRAFASSQICSGCGFRDGPKPLHVRAWTCAGCGAEHDRDVNAARNILNEGRRITTG

SEQ ID NO: 10850 - protein, 397 aa, Streptomyces sp.
MACVKRAFKYRFYPSDAQAAELSRTFGCVRKVYNLALAARTEAWARQERVNYNQTSAMLTAWKRTEELAYLNEVSSVPLQQALRHLQAAFAGFFGKRARYPRFKSRKRSRKSAEYTTSAFRFRDGELWLAKMHEPLDIVWSRPLPDGATPSTVTVSQDGAGRCFVSMLCEDPSVQPLPGTDGAVGIDVGLDHLLTLSTGEKIANPRHERTDRARLALAQRRLAKKAKGDGANRVKARRVVARIHARITDRRRDHLHKLSTRLVRENQTLVIEDLTVRNMVKNRSLARAISDAAWSEFRSMLEYKASWYGRDVVVVDRFFPSSKLCSHCGTLARSMPLHVRVWTCEGCGTTHDRDVNAARNLKAAGLAVTVCGAGVRPQRRTPGGQSATKQKTPRREP

SEQ ID NO: 10851 - protein, 412 aa, unknown
  TnpB Polypeptide
MLRAVKIKLYPTAYQVIQINKLLGSCRVVYNQTLDRKIKQYKEHNISENRTSLSYWFHHELLNNPDFEYLKEQNTKVLKQSIMDMLTAYDRFLKLHTGYPKFKSKHDNKQSCRFEIGAISKRNDYTTYKLSLANIKNIKFSCNKKYTEYLQKNKANIRQATLSKLPCGEYNLSILVDGDLTHKGVKDTNNCIGIDLGVKDFVITSDGEVFNNLHFKKNETNKLKRLQKQLSRKQKGSNNRNKTRIKLAKVYKKINDKKQYYLHEVSNTLINENQVICMENLNVKGMLKNNKLAESISEMNFGEFKRMLEYKARWYNRKLVFVDRFYPSSKACSHCGYKHKDLKLSDRFWICPQCNTHLDRDINAAVNILNEGMKLVGSSTTEFTLVDYPPMDDRPVMDLKSSDRVKQEVNKE

SEQ ID NO: 10852 - protein, 342 aa, unknown
  TnpB Polypeptide
MLDKEYNNMRDILELYAQQLDFTDLFNKIPVYAQTKYKNLWVFKSKNQSIELHNKSFRIEKNKTTISKYWLRFPTKQKRGGIWLAIKPHQQIPEDVKLCDSKLIKKGNTYWFYLSIKKEVPEILYSNITAIDLGEKVIACVCGTSNKRPLFLGREVRGLRRHYAWLRKRFGERKLMRMIKKVGQKEQRRVDEVLHKVAKEIVEISLASNSIIFLGNLKGIRKSAKGRRFNRIVANMPYYKLTQMIEYKAAWVGIRVIKINERGTSKSCSRCGLDGLRRHQGLFKCHNCGYEVNADFNGVQNILKRSCEQVLQDGAIAFSPETNLKRELVSTINVQRGGLRRK

SEQ ID NO: 10853 - protein, 450 aa, unknown
  TnpB Polypeptide
MPKESFALKLEIIVDEQSSYILDGQSRICNWLYNHLLTKGFELKESFLVSQDKESAKTLYSERGLRNLVPAIKQEHPFLKVVHSSVLKNAALRLSDSIQTHQKSKKGTRKKTGWPKYRSWKKKWFSLFYDEPTKGFKVEGKSLILSLGMGKDRKQRSISVELKEAHLLKEKTIRNLRITCDLGIYYAIFTLKKELPERKTISKVIAFDPNHKNLAYGVDTENTAIEIASPIWLKVYDKRIDELKRKRDHCQKKSKKIPILDEKGEPTGKHYFLASKRWIRYDRTIKKALYKRREQTKTFMYTSANDLFKRYDCVAVGDYTPSGQGVNSAMRRAMNNRSLIGRWKDILSWVAIKSGKTFMEFDERGTTRTCHHCKYIEQQGIHVSLRIWECPACQAVHIRDENAAINGLEKVLRDLLVKYGRENLPTVSCSDLAFIQKRWAWSVLPSVSLF

SEQ ID NO: 10854 - protein, 859 aa, Streptomyces sp.
MVEQVKRAFKYRFYPTDEQAAELSRTFGCVRLVYNKALEERTRAWYGEQRRISYVQSSAALTQWKKTEELAFLTEVSSVPLQQALRHLQTAFTHFFAKRAQYPRFKSLKESRASAEYTRSAFTWRDGRLTLAKMAESLDVRWSRLLPEGVEPTTVTVSRDAAGRWFVSMLVEDAIAPAPATHAAVGLDAGITSLVTLSTGEKIANPRHERRDRARLARAQRELSRKAKGSANREKACRRVAKVHARIADRRRDFLHKLTSRIVHENQVVVIEDLTVRNLLKNGALARAISDASWSGLRMMLEYECVWYGRELVVIDSFFPSSKLCGSCGTVAAKLPLNVREWTCTCGAVHDRDVNAARNILAAGLAASACGDGVRPQRESSRTGRSSVKQEPQRRPLESPAFRRGRKSNPQQFLDDLAGGIARHLLDELHPSRPLVRREQPRHVCEQLRGVRLRARLQGHVGQRHLAVVLVGHADDRRVPDRRVGHQGALDLGGVDVLTRADDHVLGAVHQADAALVVHEAEVTCPDPAVAGDLVGGLRVVPVALHDARPAHHDLADLAGRQFPACFVDGAGGHARHDPSARDAGGHVPGRGVLVGTERDERAPHLGHAVHLPEAAPEPFDRVGVDVERHGGGPVQHLPQGGQVGVPGRLRLEHEAQHLRHQPHVRGVVPLHRRQRPLRSESGHQHDRRAGRQVGEGHDHAAVVQRAAVDHDDVVGGAGHHQPAEGDRAEGRAVDRAPLGLPGGRRGVQYGDGVGVGDVRQLPLFGQGAQRREGGLVEGDPQAHRLRQFGVAVQQFGLAEDGHRADPLDDPGDLGLGQAVIERHEQRAEAGQREVALQDLDPVLGEHGHPVTPPDAQLS

SEQ ID NO: 10855 - protein, 538 aa, unknown
  TnpB Polypeptide
MRKKKDKKPNLMSILYTSKYFNTSKGNEIKKMLETVSDYKNMLSKYVYENRNLLLTSDGIKTLKANYNIVKDDTILAWNIQKEHHMIVDKYADALRKHMKNLNIRVQDKIVIARYSKNGKRHKKGETKYFEIKFKSTKLTKLIKYLVYLDFSKDIELQITNSAVKDLLNYYKTKTYFDRILNLAKDIQNRLLSKIKFIDFSNDYSLRLSSQINDARIEIDNTNSLYKHWFIFKMKGDKEYRLPLEINKDYHNKQIIGKEFLLYLSLKKNKINISTTYEGEELSFKLFNKAVGMDVNIKHNFAKLSDDKEIDYDREFFKNIVKDLNKLDKIGYQNLSEKELKKLQKLYRRLDWYVELLIHNILDYCEKNGITDLVVEELNLKDKSNIINEEFNMKYSRLVKLLHLSNVKNMLLRQGEKRGIRVHIVHSEWTSLGCPECGNIDKDNRTTQEVFKCTACGYKDNADHVGSTNVLDRFNLFHWLGVQANKLYSIDKYGRISPKKVSRYYLRNILNQYYKARGFLHHPVLPSKVNSVRSVVKA

SEQ ID NO: 10856 - protein, 394 aa, Symploca sp.
MLKVLVLECKAVVQKTQVIAISEAIRTSQFVRNKVLRYWMDHRGIGKKELYQYNTQLRAEYSFVKELNSHACQASVENVERAINRFFDNCKKGKPGKKGYPRFKKHSRSVEYKQSGWKLHPTKRRITFTDKKSIGEVKLLGKWDIHTFDKKLIKRVRIVRRADGFYVQFCVKVDNTQLAPKTNAKVGIDVGLQYFYSDSNGNHEENPRFLRKAEKDIKRSQRNIYKKTKGSSGRRKARGVYARKHLRVTRQRNEHALRLARNLCLANAMVVLEDLNVSGLVRNHKLAKSIADASWYNFRQWLEYFGHKFGREIIAVPPHYTSIECSNCGARVQKSLSTRTHSCPHCGYIEQRDVNAAKVILSRATTGGHPGSNASGDVSSTLVGRKTCRSKKRR

SEQ ID NO: 10857 - protein, 560 aa, Hydrogenobacter sp.
VHNNITKEQKKKMITLHCKLTFENNKDKEALMDIMRKFSSCFRYAYNKLLEGHSRKDLKKHLQKIFNINSRYVDDAIFKAQSLINSCIATYQSPSKVIFGGRRLFELLKNKHINGERRNKLKQKWEERRKHCLYSRGDKTKKGNLNIRIELEKDKLTLRINTGDRNWIKANIKRTANRQNDKWINFIADLIRAEETKEYFPYSVEVRKIDNDFYAFISYQDVKIEEPTITKDNGVIGIDINASPFHIAMASVKTDGNLEKIRRISLHHLLGKTKNQREYLSWQITHQITDMAKEENKAIAIEKLSNIPKGERGDGNGKLRKRLQQWIYKGLLEKIKTLAKRKRIQVIEVNPAYTSVIGALKYAPQYSLDKDTAGAFVIGRKALGFREEIPKNYEKLITEKEYLKFAEERIRQEKERTQESLKEEKNQYKRKPIQKKLKELNKNLKIIQSLYSEPQAQEPVNRWKQQVRGLSWTSYKLWQIVKVALAIPVLGKSLSRDLSPLKGIIVSGAWDRVARRLAPVSWDRGYGMDKYRQLGTCPYLKEAGYKYPSPKCGVLYPRFG

SEQ ID NO: 10858 - protein, 546 aa, Hydrogenobacter sp.
MITLHCKIAFESKKDKEKLMKLMRRFSSCYRYAYSRLLEKQERKDLKKELQKIFYLNSRYCDDAIFKAQSLINLCKETGKNPEKVIFGGRKLFEKLKKKHLNGQQLEKLRQKWEERRKGLLYSRGDKTKKGNLNTRIEFEKEKLTLRINTGDRNWIKADIKRTATRQNDKWINFIADLIRAEITGEYFPYSVEIRKINNNFYAFISYEEVKLEEPIITKDSGVIGIDINASPFHIAMASVKPDGNLEKTKRVSLAALLNKTKNQREYLSWQIAHQITDMAKEENKAIAIEKLQDIPRGERGDGSKKLRKRLQQWIYKGLLEKIKTLAKRKRIQVIEVNPAYTSVVGALKYAPQYSLDKDTAGAFVIGRKALGFKERLPENYKKLITDKEYLDFAMERLQEEKQKTQESLKEEKNQYKRKPIQKKLKELNKNLKIIQSLYSEPQAQEPVNRWKQQVRGLSWTSYKLWQIVKVALAIPVLGKSLSRDLSPLRGIIVSGDWDRVARRLAPVSWDRGYGMDEYRQLGTCPYLKEAGYKYPSPKCGFMHFG

SEQ ID NO: 10859 - protein, 393 aa, unknown
  TnpB Polypeptide
MLYAIRVRLYPNASQREFFAKTFGCCRWVYNDALAYCQRQYEAGTPRPSAYDLMKRLTQLKAEYPWLAEADSQALKQACADLDGAYKNFFRRVKNGEAPGFPRFKSKHRGDATYTATAATGIALEQARLKLPKAGWIRCRGGRAWEGKIKRATVRQSPTGKYYATVLIDDGRDLPAQPTTNLTPLGIDVGCKTDGFTHQFAALSTGEIVSAPAEYKRQMKRLRRAQRRLARKQKGSVNRAKQKRRVAQLHERIGNVRRDFLHKLTHRLTCENQALAVEDLNVKGMMTKPAPVPDPDKPGAFLPNGAARKRGLSRSLASASLGEFFRQLEYKSAWRGVALLKVGRWEPSSKRCSCCGEINTLLTLKERRWQCPACGAELHRDINAAMNIAARAV

SEQ ID NO: 10860 - protein, 207 aa, Escherichia sp.
  misc_feature (12)..(14): Xaa can be any naturally occurring amino acid
  misc_feature (189)..(191): Xaa can be any naturally occurring amino acid
MRPVINTSLTGXXXKKRGQNDAFRYPQGVKLDQENSRIFLPKLGWMRYRNSRQVTGVVKNVTASQSCGKWYISIQTENEVSTPVHPSALMVGLDAGVAKLATLSDGTVFGPVNSFQKNQKTLARLQRQLSRKVKFSNNWQKQKRKIQRLHSCIANIRRDYLHKVTTTVSKNHAMIVIEDLKVSNMSKSXXXPGKIRFKPFDTGSGLV

SEQ ID NO: 10861 - protein, 228 aa, Cyanobacteria sp.
MRNVVKVRLYPTDDQKQALAKAFGSVRWVWNYCLALNNQTYKATGKGISGMELKKQLPLLKKQEETAWLKQTYSQCLQQAVLNLSQAFVNFFEKRSGYPRFKSKHGKQSIQYPQNVKIDSIGVKFPVLGTIKANIHRIFEGKIKTVTITKTKTDKYYAALLIESDEPEKPISTRGKAIGIDLGISHFAVTSDGSKYHNPRHFKKHERNLKRKQQKLKILNRGIKLEGL

SEQ ID NO: 10862 - protein, 402 aa, Cyanobacteria sp.
MLRVVKVRLYPTLEQQQLLEQSFGNCRWLWNYCLNLINETYKHTGKGLSGYDVKKLIPQLKKEYEWLALTYSQCLQQVCLNLGVAFNNFFEKRAKYPRFKSKHGKQSIQYPQNVKVANNCLTLPKIGQVSAIVHRPIDGKVKTVTISKNCSSQYFAAILFDDGKDKPLSKVEGKAIGIDLGLTHFAITSDGSKFDNPRILAKHEKNLKVKQQQLTRSQNGSNNRVKARKKVSRVHRKIANCREDFLHKLSRRIVNESQVVVLENLNVKGMMQNHCLALSIHQAGWGMFCTMLKYKAEIEGKMYVEVDRFFPSSKTCHVCLNQVGSLPLNVRNWTCKHCHTTHDRDINAAINIRNEGLRILTSGTGDKACCPDVRRSSRGRKKSTTALSVGQEAHTDPLGQCG

SEQ ID NO: 10863 - protein, 148 aa, unknown
  TnpB Polypeptide
MKGETTRQNIQKQVVKVQKLHQTLSNIRTDYVNKTVSELIKQKPSFITIEDLAVSNMMKNKHLARAVAQQKFYEFRTKIISTASENGIELRIVNRFYPSSKTCSSCGAYKKDLKLSDRVYKCDNCNTEIDRDLNASINLADAKKYKIA

SEQ ID NO: 10864 - protein, 413 aa, unknown
  TnpB Polypeptide
MHLTYQYRIKPSAEQTTVLDNWMELLRRHGNYALGQRLDWLNLTRCQIDRCSIVSEPIGKIPAQVDYYTQQAALKETKQLFPEYKEIYSEVQQLNLQRLDKAWKRWLIPDKTGNRGGRPRFKKKGELRSISFSRVNNPKAVCFLEGSILRIPRLGMIPVVLHRPIPDRFTPKTATIVRKADGWYLCIVIEDASVPSAMPVDDVKSVVGVDVGLKEFLTTSEGEAVPVQQHYRLAQRHLAHQQCCLSRQKEGSNRYKKQQNKVARIHQRIARQRQDFHYRTAHDLVKKYDLIAVEDLKVKNLARNSKLAKSIYDVAWSAFITILEAVAVKRGVHVVKVPPHGTSQDCSGCGVKVPKTLSIRTHECHKCGLTMDRDENAAINILHRALNAVGLMVSARGGFEDTQPVKRETSTGS

SEQ ID NO: 10865 - protein, 561 aa, Rhodococcus sp.
MTGPGSTVPRQFAFTTRAHVAVDAVTGEPIGLDDVDIRVRWLLDLIAAAARLGWNPTYPDGVYVPSRVTRVVTAQLMATLRTLTYRDTAITALSQRFDPATGAVAPETGSPDYVPPGFAWGVRRQLAARARGGGAPAGRLRITDLQGPPQTSAMARLSAADRQLAQLAVIGDELVLTVKLPTCPTPTGRAQWRRVRLTAAIPEHLHGRAITDWHLPTLVLDRRGLLWRCAATELVPADDLDSAAVAVGVDWSPSTLGAAAITAANPDGLVSDYRGWTYDDRGLGIKLARLQTEGQLLHRKAARLAQLAATAPPPEVRAQLDAKIAVLDGHRTAVGVKRGKINRELAFHFARQVTGYAADAQAQLIAVEDLTTLETRGHGRVNNNRAAQSARRQAVAALAHTAAGIGITVVSVPARGSSAQCPGCDEPLARPGGYHAAGCSPCRVGGNRDHMAGVNLAKRALLGKNKTTRRREQLPAIRVAEHAPVRQCRDKKGPTPSRPRHRRVRHSLPTVTPRMGVNPKQHVPAPQASVWDTVKPTPQHDEAGSRDTRLSPRPPRKQQRT

SEQ ID NO: 10866 - protein, 320 aa, unknown
  TnpB Polypeptide
MILTYKIKHEQDFTEELKKAEQVAKYALEHKSLSSKDVKHIGLKSIISNQILRKYSRNKKLKRIKHVNLTIPNQGIKVDKNNREIRIPSLKFSFNYCFPNNFTKVNQIEINSEYVFVSVTVPEEAPMKTDNWIGVDLNTTGHIAVIANPQTGKVKKLGKKAKHVHEKYKHIRKRLQKAGKYRELKKVGDRERRIVKDLNHKISRVIVNIARKAKSGIRLEKLKGIREGTKTRKSFRYSLHSWSFYQLQKMIEYKAKLLGVPVEYVDPYYTSKKCSRCGAIGNRNGKIFECPECGHVDHADVNAAFNIALRTQIDPLQTGM

SEQ ID NO: 10867 - protein, 468 aa, unknown
  TnpB Polypeptide
MWEVDAVLYGYLSFKAQRYILVLDCTSYGFEVFFLDHLFKVLRRTVVLECYANRVAREALRDIVEPLKTMISEMVKYALKHNASQKTLHRVFYERYRREYPWIPTRVIKGAYRDAVRRAKSFRERLRKGRARTSKPKVRRVTIVYSDNQDWRIENGSLKIRTHRRWVELRYANNRQLHRYLYGGWIPASELKLKTDGGRRVLAYITFVKVYTVFYDKKNVIAVDGNENNITIAVFKNGVLVEVIRIETGLGGIVIAYAVRRKRISKDKSTKTREVKKKLRKLREGGRKKDILYKIVNFIEELARENNAVVAIGDISGDDKERMERNKGRKLRHRIHQWSVATLIKLLEDRPVHVVRISERGSSSVDPFTKKRINGYSPLVIRTAVRGANGRYKVVKVVLRVACVDGRIVERDVVGAINIGLKYLSLNGSPMALGSTGAHEVWVKLMIPHQGPTPLTEIQVFGNTIKYR

SEQ ID NO: 10868 - protein, 436 aa, unknown
  TnpB Polypeptide
MKLTGDLNALETSIIIFREALRILIPIINDNWEILSRYEFVNQKYNCIEKWVHNTQTNQAVYDFDEQFPKLPTYLRRSAIAKALGIVSSYRSNLANWEKDMKGQVPQLSLTHYDYPAYYKGNLFRNFDPIRHTIELKVFKNGDWVYEVYQLKTSDCTYYQTHLIGKKQNVPIIQKKGRRFYAVFSYEEETNLMPEESISKICAVDLGLGTDATCSIMDQDGTVYARKFISFSKEHDQLHTQLGRIKRNQKRGSRHNKTLWRKVAGISQDIADKTVKSILDFGNEHGVDAFVLEYLNFKGKNIAKRAHFWRYKRIYSVLTQRAHQTGLRVARVNARYTSRLAFDGSGWSKRGREIAPETPYAEMQFPTGKTYNADLNASYNIGARYFIRSLLKTVTVTQRLALEAKVPQVAKRSTCTLSHLINLRSEFAALASKTQA

SEQ ID NO: 10869 - protein, 321 aa, unknown
  TnpB Polypeptide
MPRYKKSDLTTVIITNQDAVLYRDDIGMSLKLPLQKQRLYFSNLFSDPVLKEVKIKPYYGRFLLCLTLEEPDVAFDPSGSHVCAIDLGTDNFAAIVCDDYSSAIYKGGAVLSKIQWFHKQRAKYVSIITKGHEKKHAVSKRLRDLSFHYANFVKDQCHKISRSIIDFCMEHQCGTLILGVNLLWKQRSNMNKINNQNFVSMPITLLRTMITYKALNAGIRIIEQEESYTSKADLIANDRIPTYGVDDKDASFSGKRIKRGLYRCSNGMILNADCHAAANIMRKAIPDIWKDTRDYTFLSAPDVYGFHKLNLKGIPVKGIAA

SEQ ID NO: 10870 - protein, 303 aa, unknown
  TnpB Polypeptide
MSITFTDGFGAGTFSLYCNGEARQDILQHKINRVRVIRRADGYYAQFCLDVEHKEPGKYTGQVIGIDLGLVHFYTDQNGNKVDCPKFLRRSERRIKQHQRRLSRKFRKGIKPQSQNYHKQRKRLGKVHLKVQRQRRDWVIKLARCVVMSHDIVVYENLQVHNLVRNHHLAKSIHDASWSLFTRWLDYYGKVFDKVVIAVPPQYTSQDCSGCGYWVQKTLSTRTHQCPRCGIVLCCDVNAARVILIRGLEMLGIEWNNGTLGHKGTASVPSTEGTLGEMSTAVVDGQPDTVSAVAEPRTRIPCP

SEQ ID NO: 10871 - protein, 421 aa, unknown
  TnpB Polypeptide
MSKNENIQKGLLELKARRKTQQIKVYELKVNVHSTSKEDFAKFNSMFLQAKWVANDCIASEDIFTYKYNEHKRIINFDKDGNKVERTITLNSGIHQDIIRQIKQDIVNLSRKKKKGGKVGGLKFKRQVNTINLRDLKVLNSKTVSIPGFRKLKVYGLEQFINIPDFEIASPKLVRKASGVYLKVPVCIPKETSKRKPTNKEVGLDFGIKDNITTSDGEKFNCSVQETEYLKFLQRKLHKKQKNSKRYYKCLNQLQKEYEHLTNKKNDDSNKLIAYLLKGYDVIYFQDEQISKWKKFNKGFARNIQHSYLGRIKAKLIELQKTGRSFEISKWSPSTKFCPQCGSLNDGIRLSDRIFKCSCGYQFDRDVHAAKNVKLFGSTKRAECLEQASVDSLVTTALEFSKTANQEVEAKKEAVVPLETQ

SEQ ID NO: 10872 - protein, 310 aa, Oceanobacillus sp.
MFKQLSSNQTKIKVFLNNDWVWVTIAFHHKNLKNRGIAGWKENNPTLVKTGKKYFIHFSYEKKITLNKTKLKEQVIVSVDLGITYSAVCCAMRSAGTVIGRKFINQPVEKDRMYTKINKLKKAQRHSGYVNAPNYWRRINGLKKHIVHHTSSEIIKFAVDHQADIIVFEYLGKMKHPEGMYGAKKLRHKVHHWSKLGIQSKAEEMAHYKGIRIRRVSAKYTSALAFDGSGEVKRNHKKDLAAYQNDKVYHADLSASYNIGARYFIREFLKSFSEKKRLLLEAKVPSLVTRTRLTLASLISLHQALRTNGA

SEQ ID NO: 10873 - protein, 429 aa, Deinococcus sp.
MLSTYLSLRAAGHSTRLVDAATNPGSLPSLPSPETTVVVPPFPVAELQAEFRQARDALGWARDVPASVYHQVVADTARDWRAFAGRAVRVSELPPAWGPERPLELHLNGAAQPLDQITVEVASLGKDALILGDLYLLPGPYRRALHHRQQRRLAHEAQRLQQFEQAWLAGDDLNAAGQAYRLRARHLAAGVVLEDQRPPLALGPGEPRSLDRAVIRQTTGLNGQPGWEISWAFQIAATPWTTDDCLGLDPGGRHVVAYAAHTGCGVIQRPLRGAWQLPALPAPRGLLEVPLDETRARIYHRRALFLKMLPTYDAFLALALQFRVVALEDTSWHVLRHRGSKFPAYAEAVGLRAALRWLMDLAPHHGVQVRLTPPYNSSRTCPACLKVGRRPWSGRPFACHTCGHTETIGDVAAAQIHRMRALSGSWRAP

SEQ ID NO: 10874 - protein, 506 aa, unknown
  TnpB Polypeptide
MKQTIKFRLYPTLPQEQKLREIFTIYNKVKRVGYKLFYGLKDTDLKKNEKRGLVQPQLMDLCHNNPYVNSILIDCETKLAQQQTWFEKRERYLTHQVSTILETIEWIKETDKKDRRLKGLYSRLSSVQDKFFNLRFKPVVFGTKRLFRLRILGRINREEFRIRRDSSFCCVGKKKGINLNLKIFPSMTLRVRTFSKEKGKKWLKIPLKVNYKQEKWFNEILGLKLYQVEVIRRLHKGNIRYFAHVSYETPEIEPIHDFEDGAIGLDMNYNFVSLSNVDKHGNFKSYHEIYFRNLHSYRKNKRSDYASFKMDKVVNYCINKKKGLVIENLSFDQEFSYGKKRNRKLSNFRTSALNLLERKCLKKGIIIKKVHPAYTSLIGKYKYSRLYNLSTHILASYVIARKGLGFKEQLPTNYKWLLAQVGDAIKPRLKPSSPYRDWAKLHDFFKHSGITSFKTSEVMLKALQMKLVLNSVTSAQPDNLKAGLSSKGKVDDWNKFWNFIEITNFL

SEQ ID NO: 10875 - protein, 415 aa, Halobacteriales sp.
MEVRRTVPVKLDVTDSDAALLHDTIDQFRDAANYVVRHARDDDGYVITSKRRLHDRTYEDVREATDLHANLVQAARSRAAEALKSVVAKWKRGKKASLPRFTSPFLEYDQRSATFNDDHASLSTVGGRITAEYVLPGENHDTPHSQYLLSEDYETTGATLHYREPAGEFYLHVRTKADVDAPEPPENGTVLGVDLGVKNIAVTSTGVFWSGDELNHWHREYEKRRASMQQKGTRSAHEAMKRVGETETGRFEQLFHRVANGIVREAVEGGCSHIAFEDLTGIRDRMPGAKRLHEWAFRRLYEYVAYRAKERGVAVKQVDPQYTSQRCSRTGCGFTHPDNRPSQDSFCCQKCGYKVHADYNAAKNVGFKILRSLHKSSDGDAPVGVRINTGTLNTSGFTTAPDSVRVGVHGESPAL

SEQ ID NO: 10876 - protein, 251 aa, Clostridioides sp.
MYCGQHIKLPKLGMVKIRDKQVPQGRILNATISKEPSGRYYVSLCCTDVDIEAFENTNNHIGLDLGIKEFCISSCGEFIENPKYLKKSLNKLAKLQRELSRKTIGSLNRNKARLKVARLQEHIANQRNDFLQKLSTKLIKENDIICIEDLQVKNMIKNRRLSRLISDVSWSEFVRQLEYKANWYGRKIVKVGKFFASSQICNKCGYKNEEVKDLNIREWICPSCNETHNRDINASINILKEGLRLITIQNK

SEQ ID NO: 10877 - protein, 411 aa, Ruminococcus sp.
MKEPETGKKENTGKSGYSITTWRLHLWCRHPEWLRTTQEFYNRIAEFYYNLLLDHTDLWELGSQQTLRELEIMSIPGRGGRIPSDPLPWQKVPLYFRRAAANEGIASAKSYLSRFTQDEKSGRAEKLNAAVTYYKGMYQDFSAKEITLRVWTGDTWTWMHCRLSGRDFPENARLMSPSVVFEYKYDMLHVPVRQNNENTATVRQRMQAGCRILCIQFTNSDAFAAGVVLDGTGQEIAVKFWKGGKEYSHHCRKLLEKIQKSQEATGGRQTGRVDQKYWMHLKHLSEHYGHQVTSQILRFAVEQDVSVIVLTRYNQEYSRNVMKGSGNWGPLHLNTRIRQYLDYKAWKNGIIVIEVYATGISTNCARCGAEIIRTDTRTELCCCANGHQTNRYLNAVRNLGKKCLTQFGRRA

SEQ ID NO: 10878 - protein, 450 aa, unknown
  TnpB Polypeptide
MQQLYTYETELKPKHNQEIIDYFNDYTTLFNKIVRNVWQYYNHQDALISQRSKLNTLIQNQFGVSQRTANSIMLYASGRYNALKALKKYEIKTNSSKIKKLDDLISELALKLDVMAMKAHHNQLKEKELIKYRGLKAKFVAIKKAKDRLLKENIRAQKQLNDRHFSLCFGSKAIFNHQYSEADHQNWYEKFKTARDGSISFVGSKDETCCNLQLQLIYNKKNNQFTIQLRKEYAYQANNKDKYLYGQVYFSYGNKELQKVLKTKSSPITYKIIRRDNRYFLQVTITIEKNDIVEQDRYMGVDFNKGFVAISEVKEDGNLINTDKIYYRCKQGNKTTNDLRQLALNIVTRCKENNMSLAIENLDFGKKKSKTSKYKKDEKYNEMLHSLAYSKFNEYISRACFSNGVWFSRVNPAYTSYIGKKKYNEIKKLNTHTSASYVIARRGMRFKDAA

SEQ ID NO: 10879 - protein, 376 aa, Sulfobacillus sp.
MKLTLTAKVQLYPTAAQTVLLQQTVEAYRQGCNWVSGIVETTHCLQQADLHTEVYRPLRAQFGLRSQMAQSVIKTVIARYKSVLANGHPWTRVQFNKPALDLVWNRDYSLKARGFSLNTLAGRVQVPFAHQGMERFFNGAWQFGTAHLVHRHGRWFLYVPMTQEVVQPDWTAIRQVVGLDFGINFLVTAYDSQGQTTFFSGRAVKARRAHFKILRQTLQRRQTPSARRRLKRLGQREHRWMTAVNHQVSKALVARYGAQTLFVVEDLTGMRGATERVRRRDRYTSVSWAFYQLRQMLEYKAALHQARTVAVDPRYTSQTCPKCGHVAHGNRDKRRHRFECQQCHYRSNDDRIGAMNLHRQGIEYRVTGAIAAGPRS

SEQ ID NO: 10880 - protein, 423 aa, Hymenobacter sp.
MEYKHLRLKLKPDKNQEELLWLHANHSRALRNILVEYVNKVKKETPKTSISKTLLYEKYSDLRKDTKYSWLLEVSESSLNTVTRVLYEDYNNYFKGRRRKPKFHSKKYGKQYFYPRTGKGRLYIKDSFLKIEKVGRVTISKRDLYNKHDIIYKIQKEDKFYRSVVYHDGLDWFISLTYKNSISNDNQVKHTTVKDKQGTLGIDLGINKLATCSDGTIYNNVIMTSYYNKLTRKLKRLQRQVSRKYSMNKDYLVVYLLDGKGKPKLDKYGNHKFKYARKTQNIIKLEHKIKKLQNKMKNIRKNQTHQVTKKIVDTGSQTIVIEDLNVKGMMKNKYRAYYISNSNFFLFRKYLTYKCADRGIDLIVADSWYPSSQTCSSCGYRLEGKERQRIKNGRKTFECPKCNHTQDRDLNASINLSKYNLNR

SEQ ID NO: 10881 - protein, 369 aa, Hymenobacter sp.
MITKKVRLKPTKQQELKLYKSSGTARFIYNWTLAKQQENYRQGNKFIQDSVLRKEITQLKKTEEFKWLSEVSNNIPKQAVKDACNAYKRFFKKQSSFPRFKSKKKTRPSFYNDSQKLKVKENLVLLEKVGWVRTSEQLPTNTKYYNPRITFDGKYWYISVSIEGENRYEELTNESLGIDLGIKELAVCSDGTIYGNINKTIKVKKLEKRLRRLQRKVSRKYQKNKEGSTFVKTCNIVKLEKQIKLLQRRLSNIRKNYLHQTTTSIVKTKPRRIVIEDLNVNGMMKNRHLAKAVQKQGFYEFRRQLEYKTKRKGIELVIANRFFPSSKTCSNCGKVYKNLKLSDRILKCDCGFSIDRDLNASINLANYNI

SEQ ID NO: 10882 - protein, 409 aa, Oscillatoriales sp.
MQLAERHIIKSTENRFVEIDGLAFRSKNLYNAANYVIRQSFVYGWGYINYNEMNRLMKYHQAYKELPAKVSQQILMILDKNWKSFFEAVKAYKIESTKFTGRPKLPKYKHKVKGRNILVYTIQAISSKELKKGIIKLSGTNILIKTQIKPERICQIRLVPKCDSYVIEVIYNACTEPESTLDENKKKLVASIDLGLNNLVALTSNQPGFVPLLINGRPLKSINQFYNKRKAQLQSQLKGNRQTSSRIQRLTRCRHQKVDNYLHHASRQIMNLLKSQEIGTLVIGKNLQWKNEINLGKKTNQNFVSIPHSRLIEMLKYKAELLGIKVIEQEESYTSKSNFLNLDPIPVYGNIGAQDVTFSGKRIKRGLYRTSCGRLINADVNGSYNILRKAIPNALCNGIRRGRSSAKAG

SEQ ID NO: 10883 - protein, 470 aa, Methylacidiphilum sp.
VCQAGFSGLQGIVHGTRITGMERVRIFPLKGISRRQETIIREGQVEAARVWNLCLGMHLAARRENLPWPGKRQFHEATKGGRFALHSQSIQHVFRAFDAAVQSARENRKAGRKEIRYPYKDKRFFPLMWPAQAIGLEEKRIVLLMGRGRPALDLARPQWLTGKAACKVVWNGVHHELHIRVEVENTAPTASQGATQKRATVDLGQIHQAAVVTNEGDALVVSGHGILSLKRLHSKQLGEIQGKRSRCQKGSRSSRKLGWARAKLTLRYNRRVRDLRPKGIRVVADFCKERGIEALFVGNPDGVRRKHAGRHHNQRMSQWEYGKDISYLEQKLEQDRIVCFTGEEQGTSSQCPVCGHRHKPKGRNWRCSACGFEGHRDIVGALNMHAIAFGQVVSFPKRITYLRPGHLRRSSRLDTGQSCLARFASVKRRAGNGAGSLRERPTACEMWLEAHPLQGIWECHLSCLGYWSTI

SEQ ID NO: 10884 - protein, 511 aa, unknown
  TnpB Polypeptide
MFVTLRFKIIPKNGEDYRELLKLMRLYGSALRYAYNRFLDNYNRTEIYRLIRKMFKDLPSWYVNSAIEEAKKILKNIKSKGINPRKVIFGGKRNFEKLCKHHLQGWRLEEVKREWYERRKGRLLSIGHTISDGNQNIKFALENNGIYLLITSTKRRKPIKVKVKRKVKNKKDKWIIFISMLLEGKKFPYTVELKKVNSKIYGYVSFQIPTPEIKITKENGVIGIDINAKPFHLAIAEINKDGNLISYKRIKLGYLNNFSKNRKEYEEWLVAHKIINLAKEKNKAIVIENINNLPKGKRGDGNKKKRKILSRFSYKRILEKIERLCKLSGIEIIKINPSYTSIQGKLKYSPQLNIDKDISGAYVIGRRGLELKEKVPKNYKKLLNDKKFLEYVKESLKQRQKQLEEKLNKETNIYKQNPIKTEINKIKENLKLLKSLQSESEGLPGAYGRNSGNHKNLWQVLEITLTTLLPERRCLSPLKPILVEGKWEKVVSRLGPLCLGGPSFQKAKFHN

SEQ ID NO: 10885 - protein, 442 aa, unknown
  TnpB Polypeptide
MKIISSYGVELRKQNIPIRQTLEIYRSAVGYLVKVYESVWEELAKIENSKKRFNAAEHLVHTTKRNPARFDFDFCFPKMPSYFRRAAVQHALGSVSSYQTRLEHWKAEGQKKGKPYLESKQYAMPVFYHDVMYRKNTEEKDAAFLKLYDGRGWKWFAVRLKHTDMEYLRKHWSGEKASAPILEKKHHKYFLRFTYTEEVSLNKTPVKEQTICSVDLGINTDAVCTIMRPDGTILGRKFINFPSDKARMYRVLGRIRRFQREHGSRQVQGRWAYAKRLNTELGKKIAREIVFYASENRADVIVFEYLEMKGKLSGKKKQKLQMWRKRDIQKRCGQQAHRKGIRISRICAWNTSRLAFDGSGKVDRDIQDHRLCTFQNGKRYHCDLSASYNIGARYFIREILKPLPETERSLLEAKVPAVKRRTSCVYADLIDLISEMELRKAA

SEQ ID NO: 10886 - protein, 420 aa, Microcoleus sp.
MLLTYQYRLQPNQEQAATLIHWGELLRRHWNYAVGQRLDYLRRTRSSIDRCSLISEPIGEIPARVDYYSQAANLKETKSLFPEYKDIYADCQQQNLMRLDKAWQRWLVPDKSGKRGGKPRFKKQGDICSITFPRVNSAKAGAHLTSSALKLSKIGEIPVILHRPIPDGFDIKQATIVSKADGWYVSFALEDNTVPTSLPVDKIKSAVGIDVGLEKFLTTSDAEAIAVPQFYRKAQAVLARRQRKLARQEKGSNNYQKQANKVARLHLHIARQRKDFHYSVAHYLCTTYDLIGFEKLNIKGLARTRLAKSILDVAWRTFLNILQAVAVRRGKHTQEVDAKGTSMECFNCEERVVKDLSVRIHNCPNCSVCLDRDLNASLNILKRTVGQPFAACGGLVSRQPVRQELSFVNLRSPRQTAFSG

SEQ ID NO: 10887 - protein, 384 aa, unknown
  TnpB Polypeptide
MFKIGSCKLLITNRNKVRKINRAIKIRIYPDTNQRIQIEKTIGCSRFIYNCMLADKVEYYTKEKKMLRNTPARYKKEYPWLKEVDSLALANVQMHLESAFRKFFREPSTGFPCFKSKKSSKRSYTTNVVNRNVFLEGKRLKLPKMSAVRIKLHRPIPEEWKLKSVTVSHEPSGKYFASLLFCCENQTVEKIPAEKFLGIDFAMHGLGVFSTGEKAAYPMFYRRSEKKLAREQRRLSKCQKGSRNYGKQKKRVALWHEKIRNQRKDFQHKLSTSLAEIYDAVCVEDLSLKAMAGGLHFGKGVHDNGYGQFLSMLEYKMEERGKYLIKVNRYFASSKICSVCGKKKAELSLSERIYYCECGNRMDRDVNAAVNIMNEGKRILAECA

SEQ ID NO: 10888 - protein, 431 aa, unknown
  TnpB Polypeptide
MHQEDAMSSVPNIVVVAHRPNYIIHMQRLQAFKYELMPDGGQQRQMRRFAGSCRFVFNKALALQKTRHAQGEKKLGYAGLCKLLTEWRNSAETPWLKDAPTHPLQQMLKDLERAYANFFAKRADFPRFKKKGQQDSFRYPDPKQIKLDQANFRLFLPKLGWLRLRHSRDVLGTVKNVTLSQSCGKWFVSIQTERELEQPLPHGGAVGIDMGVARFATLSDGTFYAPLNSFKRHEAALRRASQAMSRKTKFSNNWKKAQARVQRIHSRIGNARRDYLHKTTTTISQNHAMVCIEDLQVRNMSRSAAGSSEQPGKQVRAKSGLNKTILDQGWAEFRRQLDYKLAWNGGHLIAVPPRNTSRTCPCCGHVSADNRPTQARFRCVECGFEENADVVGAINVLRAGHARCACEVSGEVRPPAAGTRRSDSGAAQCRA

SEQ ID NO: 10889 - protein, 766 aa, unknown
  TnpB Polypeptide
MGEDVNLPSSERVIAVGIREVVPQLLHQVRIEDAVNRIHRITIDATELVARHVARCIHEGIRLPTVSKDYYKMAMMLVTVGNGDLKSVDVALQYTRNTMTSLHPVSRVNLNQLMMAQSISLSAAFNTNLQLHFRKRVARYVRLLRQPEPDAKEEKKVRKLENLMIASDVCKGKGRTFESPDALHSMVRMLRERLETRNFESDFMETNVKHFQAEIIRATHRMNAAFEADEQHCLSVCPLRRRVTPGFIQIDTTGIQQVLGLDRTDYERERDRKATKRRKLHALRDARNRELRSAMDFAVIPRVKAKTLEVEVDRTTARAAAKRIQRAWRRVAHVDVCRIARKRPLMLRKVQMVISEWAGKQKEERRRCAEGLLQCKESVWKDVLHLSRKTVRSRKDDVFAGSLRTDGVSVRLFFKSSPGTSGTSSDDATTNKKRKRGDTSGKKKKPPSPIGSSDDPVPSRGLYVVDELKHLSRMKVAQIIGADPGKRELLVCVDADSPKFTNEKRRRLPSARYTMAQRRKEMQSDRHTAERVATTPESISTAMHAMADTNSRSASFDSLEQYFIRRREWLGDALTHFQKSQHRHRRWQRFMSEQSSFASFMSRIRALRHDNSTPLVIAYGAWGGIAGRPGAVCNRGHPPCIGKGLRHKLSKHFCVISTPESMTSKTCSLCESVCGPCTEVDAFHRAKKIEEAGSDADAVSRAQHFSVRGLRRCSNVECAAHLNRDYNAAINIQRRCKSMLSGGQPPAMDSIDEKLDALQMKIQHGG

SEQ ID NO: 10890 - protein, 554 aa, unknown
  TnpB Polypeptide
MSRQKKQRKSLESTGEHSAGGKPKERSKQSKRRQDKEDTTCSPIQLELNLFGQQLSTQELALAPSNLTLIDKLPLSPPFIPMPKSSQKLEADLTSSEKSFKPYWCESCKALSSALLWHTKTDLPDLVLTTSNGSVASTGVKSWYSTKQHSVLNAKWLKMCLPSSTVSVADYTDLENTNLRCRKIQIYPSPELNKIWKHWDAACRYVYNQAIAYQKKNGSVGKLKLRDIIMQSDLPEWVKDTPCHIKQNAIFDAHRAYKASSDCKFRSCRAPRQTIKFNDSNFSQGTWYPRLTKGLAFIASEPIPSECNQGTQLIKCKNRWFAVFPESAPIAPTKSDKVIALDPGVRTFLTGFDGSKFLEFGAGDMGRITRMCQHLDKLVGRIAKCNSRHQRQKMRHAAGRMRTKIQDLVNEVHKQVSCYLTQNYRVIFLPTFETSQLVAKVKRKIRSKTARAMLTWAHYRFKLFLKQAAHRRGCTVVDVTEEYTSKTCTRCGHVHSKLGGSKKFKCPECGFEIPRDFNGAFGILLKALRDTSFTISDDGVAIASLPDNMSRCTA

SEQ ID NO: 10891 - protein, 389 aa, Salmonella sp.
MLRATKVRIYPTPEQAEYLNAQFGAVRFAYNKALHIKKHAYQRHGVNLSPRNDLKPLLSVAKKSRRYAWLKEFDSMALQQAVINLDVAFSNFFNPKRKARFPTFKRKHGKQSSYHCVGVKVLDNAIKIPKLSPIEARLHRELHGKLKSITITRSATGKYYASILCDDGLEAPVKPTLISTVTGLDMGLEHYVIRSDGAKIANPRHLINASRNLRRKQKALSRKQKGSANRKKARIRLAALHERVANARADFQHKLSRTIVDENQAVIVETLKTANMMKNHNLARVTGDAGWHSFITRLEYKAAEKSAHLVKLDQWFASSKTCHCCGYKMSEMPLHKRIWRCPECGIEHDRDINAALNIRQKGILELKAAGLVVSAHGGQRKSVAQTVVA

SEQ ID NO: 10892 - protein, 431 aa, unknown
  TnpB Polypeptide
MALKLYLYKKGVVRIYLTVKQKVKHLSKDEYKSIKKLSHIAKNLTNEAIYNIRQYYFNEGLYLNYEKNYTLLKNSNNYRLLNSNMAQQILKEVDGSFKSFFGLLKLAKKGKYNFKDIKLPSYLDKNGFTTLVIGFIRIKDDTLLIPYSYLFASEHKRISIKIPTILKNKKIKEIRIIPKLKARYFEIQYVYESKIEKLNLNKENALGIDLGINNLCTCVMNNGETFIIDGRKLKSINQFYNKRNASLQALKDTKKKIKEKIKLLQAKIIIKRNNRVNDYLSKTAKTIINYCIENNIGKIVIGYNVTFQRNSNIGKINNQNFVNIPYGKLRNKLEYLCDMYGIECILQEESYTSKASFWDKDEISIFDENTNKKYKFSGRRIKRGLYRTSTGYEFNADCNGALNILRKSNVVSLEALYSRGELDTPKRIRII

SEQ ID NO: 10893 - protein, 397 aa, unknown
  TnpB Polypeptide
MSRYRLFPTPAEQVVLKGHCGHARYVWNLAVEQHAHWRPGRTSAPAYLEQCRQLTAARAEHPWLAAGSQMVQQQALRDFARATADFFAGTRRRPTWRKAGRDEGFRVVAVKPGQVRRLSRKTGAVWIPKAGWVRFRWSRAVPPGAKSYRVTMDRAGRWHIAFAAIPDPIPAPGNGQAVGIDRGVAVSAALSTGELLRVPGLTARERRRLRQLERKLARARRGSERRGRVRLAIARLRARETDRRKDWAEKTSTGIARRFDVIRVEDLKICNMTRSARGTAGKPGRNVRAKAGLNRGILRSGWGLLARRVEEKAPGRVEKIRPMYTSQRCSACGYVDADSRESQARFVCTACGFADHADVNAARNIAAGHAVTARGGDGVTRPANREPQLLASLAGRE

SEQ ID NO: 10894 - protein, 383 aa, Nocardia sp.
MSEMGVKVIKRAYKYRFYPTPEQVDQLARTFGCVRYVYNRALAERSRAWTREQRRISYAESDKMLTAWKRDPETEWLTEPSKGPLQASLRNLQGAFDKFWRKQTRYPQFKKRGRSKDSATYFANCFIYRDGRIKLAKQAEPLNIVWSRPLPTGGRPSQVTVSKDSAGRYHISILVEATIAEHASTDATLGVDAGITSLYTFSTGEKVSNPGHEKNDRASLVKAQRGLAKKQKGSRNRAKARLKVARIHARITDRRMDHLHKLSTRLVRENQVIAIEDLSVRNMVRNHRLARAISDASWSRFRTMLEYKADWHGRTVVAVDRFYPSSKTCSTCGRINDMMPWRVREWECPCGARHDRDVNAAKNILAAGLAVQACGDGVRPPRG

SEQ ID NO: 10895 - protein, 379 aa, Lactobacillus sp.
MTLRAIKTRIYPNITQQDKIISNFGCCRFVWNQLLNMQIKRHNNGGSYVNEFGMNYLIKCLKQEYSFLKQAESTSLLHVSRDLNQAFQKLFKEHAGYPKFKSRKFPKQSYQSNAVNHNVTQTNQCHIRLPKLGNIAFKSGRQITGKIKNVTIRLSATGKYYAIVLVDNDVRKLPKTKQSVGIDMGVSDLMITSDQVKYATIRFDKALSRKKHYWEKRLARRRLQAMKEIAWNHHNKVLAPRELNDFSNYRKARTMVAKYNEKITNQRRNYLHNLTKQLVAQYDVIKIEDLKTKNLLRNHKLARAIINQSWRELRSQLEYKCDWYGKQLVTVNPRKTSQICSSCGYDDGYHGLLIRQWTCPKCGVSHDRDINAAKNILSA

SEQ ID NO: 10896 - protein, 294 aa, Clostridioides sp.
  misc_feature (9)..(71): Xaa can be any naturally occurring amino acid
MHMKNSLKXXXXXXXXXXXXXXXXXXXXXXXXXXXXXXXXXXXXXXXXXXXXXXXXXXXXXXXXXXXXXXXNATISKEPSGRYYVSLCCTDVDIEAFENTNNQIGLDLGIKEFCISSCGEFIENPKYLKKSLNKLAKLQRELSSKTIDSLNRNKARLKVAGFQEHIANQRKDFLQKLSTKLIKENDIICIEDLQVKNMIRNRKLSRLISDVSWSEFIRQLEYKANWHGRQIVKVGKFFASSQICNKCGYKNEEVKNLNIREWICPSCNETHDRDINASINILKEGLRLITIQNK

SEQ ID NO: 10897 - protein, 354 aa, Vulcanisaeta sp.
MMGSRLIGSKEALENFQFVTINGRVEFEDIGRISRIAYYYSKAVKAGINLALRGVPLDDAVKELYKIIPYAFYAETAYKQALALVKNNGNKVEVRRRWIACRGNKSDKGNRGIKFHVSEDHVEVKVKDPWGTWIVGRAYFGRKYLPLLRESEDLASRREEGYGAVISFKERPMIHLQIPLWLYLRYLSSPKPPGYGLVAGFDLNSDRLNVVVINRDGGVITTKTFWYSDVTRPGFPKERAKALRLNALSEALNFLSRIGVDYVVFEDLFLVKRRKFTRSKSGNRKVSRFAKKQLLTHGVIKALRLGFNVVLVNPKGTTNSEEHEKVMREKGYDRHTASAYLIALKGLEVIKNNE

SEQ ID NO: 10898 - protein, 469 aa, unknown
  TnpB Polypeptide
MPLILLLISQSRLRMKQLWWSWIVRRRIDCWLYFRTYSSSVFSDTRHLVLVSPSTRKEGSSMLIAKKIKLEVSDQDAATLEFMQGKCRGLYNWWVMHLRDGEKWPGWKEAKKTLQESKEYDTELSWVYGKLLHEVYFRLDKAMQAFFRRVKNGEKPGFPRVRPRHCFFTLCYPAMYIKVEGDKVTLPTGGGGRHGPKHFPDITATLTEEAPTDYKEVAISRDGQGHYYASFVHEVTDGVREQDGVLAIDLGIKTLATGVNEQGRFYHIGGFKGGRWYTKQLDKLRSRRDRCKKGSRRYKHLSKVYQRISQQKRNKQQDCLHKASHLIAHKTVERTIVIGDLSQRQMVTKAHLERNKYLNRAVYNEWGLYAFVQMLLYKCALSGKELIVLDERDTSKTCSGCGKKQPMPLWKRTYHCPNEDCRLVMDRDENSAVNILKRFLARLGPHTDDSVRCTDVFTGTDNVNTFEHI

SEQ ID NO: 10899 - protein, 436 aa, unknown
  TnpB Polypeptide
VDELLFLFDGRWSTPRSYPAICGEPEEGLRPSNKASKGGCTSPRSKPLRRHVSLVVLGLCTTIFWLFLKTDLLTKSKRRPTQRSLELTRLKTEIPWLQEVNAQSLQQTGRALDTAYKNWLDSLTGKRPDKVKPPKFKKKSKRQSTRFTEGSFRFENDTLRLSKIGDLHIPWYRRVMGEPSSVVLSRTPSGRYYVSFQVEQQPLRDVGGAQNQVLSVDLNTKAFHCFNGRTWTQVELPRPLLAALSRLRTAQKHLSRCQKGSKNREKARIKVAKIYQRVSDIRTDFLQKLSTQLVHENQVICVETLRTKNMLKNGRLARAISDAGFGGFLGMLEYKCKSYGRTLVKVDPFFPSSKLCCICHEKNAELKLQDRWRCPHCKTEHQRDENAIVNIFVEGLRILAEGRSVAACGGTVRPKREPRRAPVKQETSLETSSNAA

SEQ ID NO: 10900 - protein, 233 aa, Lactobacillus sp.
LVHNRGKWFLHIGITKEVPDFEQQGNPQIVGIDRGLRFLATAFDSKGETLFFDGKKILHKRKKFLEIRRQLQSKGTTSAKRKLNQLAQRENRWMTDINHRIAKTLVVAYGSHTLFVLEDLTNVTFNTDDLPKALRNSHRSWSFFQLESFLTYKAQAIQSKVVKVDPAFTSQRCPKCGLVEKANRHHETHEYRCKQCQYRCNDDRLGAMNIEMLGQDWLSGVKHPKIKKLTTAG

SEQ ID NO: 10901 - protein, 362 aa, unknown
  TnpB Polypeptide
MQIAYKLRVYPNKAQKELLAKTFGCCRFVYNHYLSIRIERFKETLNYYACSNDLPNLKKEYEWLKEVDATALQSSLKDLDTAYKNFFRDKKTGFPKFKSKKTNNYSYKSRQVASIKYLDKKIKLPKIGWLKTKQKLRPNGRILNATVSQESNGHYYVSLCCEIELGNLPKTDKIIGLDLGIKDFCITSDGNKYKNPKYLHKSLKKLARLQRQLSRKQRDSNNRNKARIKVANLQAHITNQRRDFTHKLSSKLILENDIIFIEDLQVKNMIKNHKLARNIADVSWSEFIRELEYKADWYGKRIIKIDKFYPSSQLCNCCGYQYSNTKDLNVRDWICPNCGDKHDRDVNAAKNILDEGLRMLAS

SEQ ID NO: 10902 - protein, 431 aa, unknown
  TnpB Polypeptide
  misc_feature (340)..(380): Xaa can be any naturally occurring amino acid
MQRLQAFKYELMPNGEQQRDMRRFAGSRRFVFNEALGLQKKRHERGETKLGYAGLCKELTAWRNGAQLPSGRTAPWLADGPVHTQQQSLKDLERAYTHFFAKRADFPRFKKKGQGDSFRYPDPKQIKLDQGNSRIFLPKLGWLRYRNSRDVLGEVCNVTVSQSGGAWFVSIQTEREVAPAVPTATTAIGIDVGIARFATLSDGTYIAPLNSFKKHQQRLAGYQRAMSRKVKFSSNWRKAKTKVTKIHVRIANVRKDFLHKATTALSQNHAMVCIEDLQVRNMSRSAAGTAESPGKNVRAKSGLNRAILDQGWGKFRRQLDYKLAWNGGQLIAVPPHHTSXXXXXXXXXXXXXXXXXXXXXXXXXXXXXXXXXXXXXXXXXGSSSLYRRTTPVRPVRPANTYRKTIAAPKRTSCASNAATPTTPTLSARSMF

SEQ ID NO: 10903 - protein, 540 aa, unknown
  TnpB Polypeptide
MEENETVPCFILKLPLRVDSAGRCLFARDFEYARNLRNATLNTVLKKDRAMKQLAKWKEICELPKGPERNKKFQEIRKEYGLYSANDFEKILKEHAKKSGRKKQLNSNLGQIIADDLYRSYTDWLFHKKGRPRFRGRNRGLHSLRGKNNATGVVWKHEERSVRYGKKLYKAVIDPKDRYVQEALADPKDPSKPRRVRYCALVRKQIRGKEVFYVHLVLDDVPPARTIPAPKEECMGIDPSLRTMTCVHSNGTVAKIDISAPEEDAKEMRRLQREMERSRRASNPDNYNEDGTVKKGAHKWICSKHYLALQAKFADLKRRNVETRKNIHGRVIRILVGSAGTIKVEENNWKALQKGRYGKSVLSGAPSEFIERLRRTAESAGSKVILVNPRKLKPSQHDPMSGTFVKHELWERRCRLGDTSFFVDRDVMAALNLLHADVTTNTYDSEALARALQTSKQYWLDAGVVVELKTANRTSEREQRRFLRRGLKSVSVERLHPHSFLRGVGPHSLANGVIVSDACPEEASSDADAGQERPPTSETL

SEQ ID NO: 10904 - protein, 381 aa, unknown
  TnpB Polypeptide
MRIIGFKYRIKPTKGQEKLLMDHISHNRFAYNKLVDYSWIQYLNGIKNQNLVTLGRYLQQLKQEHEFLYEIDSNSSQQVIRHFLSGIKNMFKGISGKPKHKKKGIDDRSFRAPMRINIKLNFNDKFNSSIKLPKFNKPIKLIYHRNIPDGSRIVSYTVSRKCNGEWYISFQCEVPDSYFKKSKGKNIVGIDLGIKTYATLSDGTIIKNPKYMELAINKLKQLHKKYSKYKKKDKLNPKLNKYKINRHLRKLQNQYVKVHNQIMDFIHKMSAKLINDSQVICLETLGVKDMLERKGVDSSLKRQIQYANWGACLNILKYKADWYGVEIRLVPKNFPSSKLCSNYHNKDDTVTLRDRTYECKKCGHSMDRDLNAAINILNNAK

SEQ ID NO: 10905 - protein, 401 aa, Streptomyces sp.
VTQIKRAFKYRFYPTDEQAAELSRTFGCVRLVYNKALEERTAAWNSERLRMSYGQSSARLTEWKKTAEFAFLCEVSSVPLQQTLRHLQTAFTNFFAGRARYPRLKTRKRSRATAEYTRSAFTWRNGHLTLAKMTTPLDIRWSRPLPVGAGPTTVTVSRDRAGRWFVSMLCDDAIASGTDTDLSVGVDMGITSLVALSTGEKIPNPRHERRDRARLARAQRELARKAKGSRNRDKCRHKVARIHARITDRRRDFLHKLTTRLVRENQTVVIEDLAVRNLLKNGTLARAISDASWAELRSMLEYKCAWYGRDLIVVDRWFPSSKMCSVCGALTAKIPLHVRTWTCRCGATHDRDVNAARNTLAAGLAVAACGADVRPQREPSRTGRSATKQETQRATAGIHCL

SEQ ID NO: 10906 - protein, 429 aa, unknown
  TnpB Polypeptide
MLTTRRVTFRLYPTQRQESQLHYWRRLHANLYNAAVANRITQWKRFKHSVDYLEQQNCLPEFKKVWPEYVECGSHALQSTLKRVDFAFQRFFKGKAGYPKFKASRRYSGWTYPDIAGWKAETNGGSGYLNLSKLGRIQMRGQARTWGTPTTCTILCRNGNWYASITVQCQPNRQTGDGAVGIDLGCKDAITLSTGEKIAKPDFIKEGQRQVKVASKKLRRKRAPNRNKKLKGSRRWKRERKVVSKHIRKVARQREDWLHQTTSNIVSGNSLVAGEQLNVKGMTASAKKGKRKRQKAGLNRSILEVGFATIGQLFSYKLAEADGFYLESRTRELKPTQRCVKCWELTPKTLADRSHVCSNSDCRHTSDRDVNAAQVNLTWARGQKLSSSGVESSSSTSCGSMRQLGAKKCQKLHSADGKLETPSSRSSLG

SEQ ID NO: 10907 - protein, 482 aa, unknown
  TnpB Polypeptide
VTENYGSQLILIDLPPFETEVLKFICQRSNSLYNQAIYFVRRNHEMTHPGLLPNIPYSVLCSELKDLWNYSMLCAQAAQQTLKSVHEGLDSYKGLMSLWLTGGLESRPREPSYRERGGLFPVTYPAAACTFYLDRSEVRIPLGNGVKDDSGLTELFIPCPYGVSPERIKEVQLLPRNGQFYAVYVYSSQSFTSDVDITKALGIDPGLSNWLTCVSTDGKSFIIDGRKVKSLNQHYNKRVATLKEGKAQGFWNDELAAITEKRNRQLRDAINKAARFIINRCLADRIGTIIFGWNQGNKDGINIGNKNNQEFVQVPTAKLKDRIAQLCKQHGLRFVETEESYTSQSSFLDDDFLPTYGGEIPAGWKPSGKRGQKQKSVPHNLGRGGYQTADGSRINSDCNGAVNIIRKVATQLGLNLSKVIRAALTLPQRYNLDSLSRSYREKHEEARQQKSLVVTSQNPPCFNRRRSQECSLILNLNPYVFR

SEQ ID NO: 10908 - protein, 408 aa, Fervidobacterium sp.
MLLKEYITKSFVFDLSRKTDKKLAIIFGHLTYSASKLWNVANYEVEKNGVSIYELEHKLKDNFFARNLHSQSAQAVLQKLQVAWKNTFDRHTKRPRYQPKDGHFPVTWKENGFKVVGHKLRLSLSKQTKDYLKSAHGIESEYVWIELPRTLSLDSVKIQQVELVPYQAFGHISYSLRIIYREPIQDFKDRPQLNEHKVLAIDLGVSNFATCTDGAKSFIIDGRVLLSKLRLVNKKTARLKAVLDRQKLKTSKRLHRLYRYRQNYVNDFVHKASRSIVDYCFKNGIGVIVVGKLNHGIANIDIGSQNNQKLHQMPYGKFLQKLKYKAKTYGIQVIQIDEAYTSQTCSCCGAVDKNNRKHRGLYVCSSCGMVLNADVNGALNILKKVSPSSVAGVGVGALASPVRLRLVS

SEQ ID NO: 10909 - protein, 420 aa, Streptomyces sp.
MYVIRPRAEASFRTSANWRRASATESSLDSSFMYTTVQAPHSCTLMYMQLRYNFRVYPTPGQRTALARTFGCARVVYNDALRIRQEAHSQKLPFPKTGDLSKTLITQAKSTAERAWLVNAPVGVMQQALRDLDTAYRNFFDSLSGKRKGPKIGAPRFKSKRDNRQVARYTKPTGFRVRPDGRLYLPKVGGVAVRWSRPLPSDPSSVTVIKDAAGRYFASFVVQADPTETLPETDGEIGIDLGLTHFAVLSDGRKITAPKFFRRAERKLRKAQQNLSRKAKGSANRKKAVIKVARAHARVADARRDHHHKLSTTLIRENQAVYVEDLAVNGLARTRLAKSVHDAGWSQFVSMLEYKAVRYGRTFGRVDRWLPSSQTCHVCFVIDGPKPLDVRTWTCAGCQTTHDRDVNAARIVLAAGRADN

SEQ ID NO: 10910 - protein, 514 aa, Ammonifex sp.
MNLTALGLKLQEQVLGTYWSPEGLEAVASSSGKAWKLLDTELSRPQDVYIPSRVWRCILESAGRLLRSMAERKRIFELLLPLFNGKARDAAKELYDLLKKDGEGEKFGYLFNVAEAMASFYAEHERLPQDFFELQKKPAPKKFTLTVSADDGPERGQVMKYECDGRVLRGRVKLPTCPEPKKEEDWQWFSFEVRLPEELKEKLAQGGKLHAPDLRLKAKPSGKLVALLDVKVEVPEKAPSGERDRALGLDWGQRKLVTGTVVSREGQLTPPFFVFWQALKAKLFRIRQQISRLQEMRDRFERKSPEWKKYNRMIASAWQKYHRIQHQLAHQVSSLLVLLAKAFDCRYIFVEWLLTLRGKKGRPKDLNWWVTTTVRGLLFRLLRYKARLLGIKVVPVPPGGTSTVCPRCLKEGKHVKSPSEPEEKDSGSWFFCPSCGYSADRDYVGSLNVGRFGSRLKRPLSYRVGGAAQPFPSQGASREEAMTLTTLGYIGSVFLANLTTLIRLLCSGVLPSIT

SEQ ID NO: 10911 - protein, 384 aa, unknown
  TnpB Polypeptide
MRKTFKYRLYPTKEIEQRLFWTLTRCRELYNAALSERKDAYKYAGKRVNYYDQQNDLPEIKAEIREEYQTIAAHVLQDVLRRLDKAFQNFFRRLLNGENPGYPRFQGRNRYDSFTYPDGAGWKLTVKEQGKKLKGTLHLTKIGESKIILHRPIIGKIKTVTIKREVDEWYVTFSCEVEEPEKLPTLSNGEMIEHPRYYRKAQKVLEQRHQALSRKKRGSHRRDKARKAVAKAHRMIARQRRDFQQKAAKKLVERYQVLVFEDIQTGNLTRKPKPKQGENGTYLPNGASAKGGLNKSILDAGWSQFVQVCTYKAAWAGRTLIKVDPKFTSQVCSGCGQARRKDLCERWHSCDCGTELDRDVNAAINILERGRRQQGAISVEAFCL

SEQ ID NO: 10912 - protein, 229 aa, Cyanobacteria sp.
VKLALERYLKGNSNGSRSGKPRFKSLSRYQTFTFPQLKQDCLQGKHIKLPKLGWLKLIKHRPIPDGFKLKTASITRKADGYYLSLSIECEDVPNSNPDVDWSKAAGIEVGLKNFLTTSEGDTVSIPNCYRRAERKLKRLQRQVSRKKKGSNNRKKAVARLAKQHKKVADTRKDFHFKTSKWLLNNYDVVAHEDLNIKGLAKSRLSKSVNDAGWGNSCLFFQSKPKMLGC

SEQ ID NO: 10913 - protein, 434 aa, Streptomyces sp.
MRWAVVRLCKFAVREAGGAGQAATDARAGGGAGGDPARLQRSGHLGQRRSVREGREEQLRAARAHLPSDQGPLGAGGTGRPARHQEDLRRVRDTEGRHEGGESGQAGFAAVPQGGGEAGRLPPARRAALRRPDAVLADRPAPHLNLDHRRADEGRGVHRRAGAPGHPGAPPQGRVRPGVPGRHVVPQRHLRGARSRAEHRAGGLPRNRPGHRQHRHHLRRPDHGRTCTQPPPRPGTHAAHQAPEEEHPVRQTPPEEAAPQGGPAGTGHQPQDRETCGGRGRTHRSRDRPGRPHGHPRAGTASQAWGAPPAGGWGRATHSSWSFAQLGQFIAYKARRAGVPVVHVDPAYTSRTCAQCGHIDKANRVSQAWFACRSCGFVDHADRNSSRNIRARAWALWRRGAQSTAPAPLPAPESGTGRKRSTTASGARCASPGP

SEQ ID NO: 10914 - protein, 542 aa, Streptomyces sp.
VGVLRELSAPFVVLGPSGVAIRTRLKGLSVGDEEVLRLVGVHLGALASRDVKQRCAEGLRHSPETWAARKRALTGESSSRWAGSITKATHDQWALSRRAQCAHIQTLEAGVRTIAHRLSLPVGAKGTKRTPGGYRTRQEWFAKTRRLHILQDRLVAERADREAGRVRVVRGGKRLARIRHHLERAQLTEAEWRQQWEAGRWFLQADGESGKRLGNETIRVTPDGEVSIRLPAPLAHLANARHGRYVLTGTVTFRHRGMEWADRVSAHRAVAYRIHLDVARHRWYITASWTIPPVKTVPLAQARAAGLVGVDTNADHLAAWRLDEYGNPVGDPRRFSFDLNGAATYRDAQVRHALVRLLHWAKRHSLSIAIEDLDFQTDTTREKHGRRKRFRQLISGMPVSRLRARLASMAAELGITIVAIDPAYTSKWGAQHWRKPLTSKKRKTTRHDAAAVAIGRRALGHPIRRRTAPPPHDQSDRAGHRTVQAASAVPGREEARPRVPGPRTRCVRTGRGANAGDQGAQHRPGHAAEHGFWHQDSLPLSL

SEQ ID NO: 10915 - protein, 350 aa, Streptomyces sp.
SPGPSRPRPAPGWARSPRLCSSSPCVMPRRPYKNFFASLKGERKGPRLGAPRFKSRKDARQSIRFTANARWSVTGNGRLSLPKIGAVKVTWSRTLPTTPTSVTVVKDAAGRYFASFAIDTDPAADATRMPNSGQAVGIDLGLTHFTILDDGTKIDSPRFLRRVEKKLKQAQRELSRKQKGSKNREKARLKVARAHARVADARREFHHQLSTKLIRENQAIGMEDLAVNALARTRLAKSVHDAGWSQFVAMLVYKANRYGRTLTKVGRFVPTSRTCSYCGHVDGPKPLHIREWTCPACGALLDRDINSARNVKRAAGLAVSACGAPIRPELVLAQRNEAGSHGFPPEGRAA

SEQ ID NO: 10916 - protein, 472 aa, Streptomyces sp.
LLEPQHVPGHPPVVQHRPLDHGVVAEEPVPALVEGDPVVRVLGGEGRHPVGFDVPVVVEEDREVVPVHRTQPHPGSAHRESFVDTPAFRPGRKRSSCGAGQGVYNKALEDRTRAWYGEQRRLSYVQSSAALTEWKKTEGLAFLTEVSSVPLQQALRHLQAAFGNFFAKRAKYPRYKSRKRSRASAEYTRSAFTWRDGRLTLAKMARPLDIRWSRPLPEGAEPTTVTVSRDSARRWFVSMLCEDTIAPAPATGAAVGLDAGITSLVTLSTGEKIANPRHERRDRERLAKAQRELSRKAKGSSNRAKARVKVARVHARIADRRRDFLHKLSTRLVRENQTVVIEDLTVRNLLKNGTLARAISDAAWTDLRMMLEYKCAWYGRELVTIDRWFPSSKLCGACGTVREKLPLNVREWTCDCGAVHDRDVNAARNILAAGLAASACGGGVRPQRESSRTGRSSVKQEPQRATAGIPRL

SEQ ID NO: 10917 - protein, 386 aa, Streptomyces sp.
MVLAPGYASTATRTRRRQAAALERVGGVDGNVSNLAVVSFPATGDPGDGPVRSARIILTGQEQRTWAAARKKARGRQRALDRSRRATNPQQYRPSRRQQTRGERRRAAGLPAKAMTVPAGPRHTAATGKPQQAYRRDTLSTGYRNLRARHSAAAASAAAASHHRARKIAAALVAAHGPNLTIEDCDIRTWFRLWGRACSATTPGRLISALAAECTATGGRLLRASTFTTALSQHCLCGRRLPKSLRQRTHHCDPAEGGCGLKGDRDLVSAALAAFTTLTAPDVPTTARLDHTRARTAQILFTQGLQEALTESTAPKSAPSGRTRAAAEPPGTTLPRQRTASARRNAGPRTVATPDETRPAPQRPKAHAGTTRPHTGRSRTHIRDKS

SEQ ID NO: 10918 - protein, 543 aa, Streptomyces sp.
VLRELSAPFVVPGPSGVAIRTRLKGLTVGDEEVLRLVGAHLGTLASRDLKRRCAERLEHSADTWAERKRVLTVESSSRWAGSITKATHDQWALSRRAQSAHIQVLEAGVRTIAHRLSLPVGAKGTKRSPGGYRTRQEWFAKTRRLHLLRDRLVAERADREAAHVRVVRGGKRLARTRHHLEQARLTEAEWRQLWEAGRWFLQADGESGKRLGNETIRVTPDGEVSMKLPAPLAHLANATHGRYVLTGTVAFHHRGQEWADRVSANRAVAYRIHLDVARYRWYITVSWTIPPVQTVPLAHARAGGLVGVDTNADHLAAWRLDEYGNPVGDPRRFSFDLNGPATYRDAQVRHALVRLLHWAKRHGLSVAIEDLDFQAEKTREKHGRRKRFRQLISGMPVSRLRARLASMAAELGITIVAIDPAYTSKWGAQHWRKPLTSKKRKTTRHDAAAVAIGRRALGHPIRRRTAPPPHDQSDCAGHRTVQAASGTPGREETRPRIPGPRTRSVGAGYGAKAGDQGAQHRPGHAAEHESWHQGLSPLSHEER

SEQ ID NO: 10919 - protein, 425 aa, Streptomyces sp.
MTFSQRVSISSVNTVLFVQLRYNYRVYPDASQRRALARAFGCARVVWNDCLRDREEAHAAGLPFVTSAELSRRRITQAKRTTERAWLSEVSAVVLQQSLRDLDAAYKNFFDSLKGTRKGCKVAPPRYKSKKDTRQSIRLNTNAFAIRTNGTVYVAKIGSIKVTWSRPLPVAPTSLTVTKDCSGRYFISFVVDTEPDILPELDAEVGIDLGLSTFAVLSDGTRIHSPKFLRRAEKKLKRLQRELSRKARGSKNRTKARIRLARQHARVADRRRDWHHKASTQIIRDNQAVYVEDLAVSALARTRLAKSVHDAGWSAFVNMLEYKAARCGRYFGKVGRFEPTSQICSVCGVKDGPKPLHVREWTCRECGTVHDRDDNASRNTLAAGRADRLNASRSAGKTRTKVPAQRVEAGSHPDGHTTVVGIPGS

SEQ ID NO: 10920 - protein, 478 aa, Streptomyces sp.
MHMVGLAVELGQLRLEARAHVSPDLLAARQMVIGEDVMPKLRHENQKYVREENAVPTSSDVPTLSHNPSTYGDDVQLRYQYRVTLTPGQRISAARVFGCKRVVWNDALALQKPRKTANKRLGKPQHRMAEGPYWAIPKAAELGKLLITRAKKTPERAFLTQAPVGVLQQTLRDLDKAWKAHEDSKTGKRKGPKIGPPRRKSRKDNRQTARFTVSDRFKITEDGKLRLPKIGDVRVKWTRDLPSVPSSVTLIKDRSGRYWASFVVETDPADDVFAPVGGDQGIDLGLTRFAVLADGSHIASPQYLRRAEKKLKKRQRELSRKKKGSNNRDKARIKVARAHAQVADARRNFHHQWSHRLTSENQTVFAETLNVRGMARGRLAQSVHDAGWAQFVSFLDYKATRRGRTFIKVARDFPSSQICSACGYRDGKKPLQVRVWTCPGCGVRHCRDWNAGKNVRHEGRRILAATAPPTPGPGASRR

SEQ ID NO: 10921 - protein, 537 aa, Streptomyces sp.
VSETDAAVLAEVGLFLGTLAAGDLAVRSQQGLEHGSKTWAVRKRELTGTSSARWAGSITKATHDQWALARRGQRAEMAWLRKQIASIQARLARPLAVKADKREGLPRGYGSRTEWHAKSRRLHALRARLARLAEAWATGRVRVVRGGKKLARLRHHLDQAGLSEQVWRERWRAARMFLAADGESGKPLGNETIRITATGQLSIRLPATLARLANAPHDRYVLDATVAFHHRREECLDRIASNRAVAYRIHHDVPRGRWYVTASWQRAPVPVLPLEAALARGVVAVDMNDDHLAAWRLDRHGNPVGEPRRFFYDLAGSAQHRDAQIRHALTRLLHHTRATGAGAIAIEDLDFTDGRCREKHGRNKRFRRLISRFPTTKLKARLVAMAAEQNIAIVAVDPAYTSRWGAQHWQQPLTTSNRKVSRHDAASIAIGRRALGHPIRRRTTPPHDDQSDRAGHRTAQARPDTRRREEPRPRHPGPRTRAVPPGSGAKAGDQRAQHRSEHAAEQQSWTQDSVPLSLEERSYQLPMCRLGASGKRS

SEQ ID NO: 10922 - protein, 511 aa, Streptomyces sp.
LLFVKLVVQVRLLPTPVQAAALEATLRACNEAVTWVSGVAFEKDVKSNFALREHTYRQIKARWGLGAQAAQHVIKKTCDAYATLKAAMKAGNLGRPGSQRYRRAVEKPVAFHPQGAQPYDDRMLSWQIDQRRISIWTTAGRMKDVEFTAAPEHLATLALHRKGESDLVCRDGMWFLNATCEVPEAAPNTEPVDFLGIDLGIVNIATTSDGQIMAGRALNRLRARERTLRTKLQKKNTPSARRRLKKRRRKEARRARDINHKIAKHVVAEAERTGRGIALEDLTGIRERVRLRKPGGHPRPEAGGGPPTPAGPSPNWGSSSRTRPAEQGCRWCTSIRRTPPAPAPSAATSTRRTGSPRPGSRAGAADSLITQTGTAPATFAQERGHCGDAGRSQPPQPHSPHRKVGQDANAAPQPVAPVVQARDLSPEWLTSDGSLTKSHRRWRAASAGGLISTWTQPPATTSAATAAAHPWAAASCSACSVSAPPGWPSRPGRSAGWRARSARWQTRTPPG

SEQ ID NO: 10923 - protein, 399 aa, Streptomyces sp.
MIRAYKFLMRPTVRQSQTLSEMLRDHCSLYNGALQERRDAYRHVSKTTVRYGQQSAQLKAVRAFDPERQGRWSFSSQQATLRRLDKAFAAFFRRVKAGEKPGYPRFRSVGRFDTVDFPKDGDGCRWDAAPHDPVTRVRFQGVGHVRVHQHRPVVGKVKTVSVKREGKRWYVILTAEQAQPKPLPATGSVAGIDMGLAHFLADSDGGFVLNPRHGRKAAAKLGAAQQALSRCKRGSKRRRKAVQVVARLHRKVRRQRLDHAHKTALDLIREHDVIAHEDLTIRNMSKAPTPKPVPGKPGAFLPNGASAKAGLNGSIADAGWGVFLAILNAKAESAGREVMAVDPRNTSRRCPECGHTAKENRPTQEKFHCQECGHQAHADTVGALNVLRAGLARREAQPA

SEQ ID NO: 10924 - protein, 536 aa, Streptomyces sp.
MTPLRAERERLVSRRLPLGEGEAGRAACARVLLRAGVVEKTGEALSTAVLARRVGWTVDLVCAMAAELLAEHWNTADVDTLASGADPGGRKLPSNAWMALRRLGWTATPARGVRVNDRIVRMAQEQAGRALRSANWRAGLTSAVLRTWPRDPDKRTPQEWDQVRAAIPGGEYLPSSVIRSRTRQVVSFERRNGRRAADVFELEPAPRVARMLLLAACDGQQATIERGEDDRQRALLRLQLPTRPDPRTYADWAWVACPITLPPTIPPNAILHLPTLRMTDAKVRADLAYTHPVPQARRIGHTVALGVDWGLGTLLSAGAARLHDDGRITTLGAGAQFRAAGVLAKQHRLRGICERLHAKTDHYTRLADQSLDAKATVLTEEIRRVSERRSNLNDALAWSAARWSVDQAIAAGATVIYLEDLRSMEAGGTGRTHNTRMSQTVRGQITDRMRHLAAETGIAVVTVPARNTSKHCPCCLTPLRHRKAPDRPTTAGWKWAICPNTECGWQGDRDQGAWRRIAARGLTHQNKTVTDRANGP

SEQ ID NO: 10925 - protein, 538 aa, Streptomyces sp.
VAAPFVVPGPTGVAIRARLRVSESDAAVLAEVGVFLGALAAGDLAVRSRQGLEHRSQTWAVRKRELTAVSSARWAGSITKATHDQWALARRGHAAEMAWLRKQIASIEARLARPLGAKADKREGLPRGYGLRVEWHAKSRRLHALRARLARLGEDWAAGRVRVTRGGKKLAHLRHHLDQAGLSEQAWRERWRAARMFLAADGESGKHLGNETIRITATGQLSIKLPATLARLANAPHGRYVLDVTVAFTHRGQEWRDRITANRAVAYRIHHDVIRGRWYVTASWQRAPAPILPLEAALSRGVVAVDMNDDHLAAWRLDIHGNPVGEPHRFFYDLSGSVQHRDAQIRHALTRLLHHTRATGAGAIAIEDLDFNDGRCRERYGRNKRFRRLISRFPTAKLTARLVAMAAEQDIAIVAVDPAYTSRWGAQHWQQPMTASNRKVSRHDAASIAIGRRALGHPIRRRTAPPPHDQSDRVGHRTAQARPETRRREGPRPRLPGPRTRSVPPGSGANAGDQHAQHRSGRAAEHGFWHQDSLPLSL

SEQ ID NO: 10926 - protein, 262 aa, Lactobacillus sp.
MSKTMAKLPYHYGVKVRVFPSTEQKRLIKHNSDACRFIYNEMNGMNRELFMLKQVKLPIAVVQTRIETLKQRLKKPSTGISNIHGWLNDPDLDSLMKANAIQNYRAAWNLFRKVHQSGVPVFHKRKTEQKYQTSCIYAGKLNVANMVNGSVRLIDKRHLQLPKLGTMRFKGIPDKIYARRYDTRIGTTTISMDATGRYYVSLQLASEQPFVEINHVKQSPIGIDLNIDNFLTDSNGRVVANPRYYRSIKKLFEVFERRLNFR

SEQ ID NO: 10927 - protein, 398 aa, Microcystis sp.
MYKAYKFRLKPNTEQEIALAKSFGCCRWFWNYSLNLCKETYKTTGKGLTRNYIQGLLPSLKKEYEWLTDAYSQCLQVVALNLSQAYQNFFEKRARLPRFKSKHGKQSISYPANVKFEGDYLKLPKIGLVYCVRHRKFEGTIKTVTISKNPDGKYYASILVDDGQSPPALLDKAGAEGGGIDGKAIGIDLGLTHFCITSNGSKSNNPKHFAKHQRNLKRKQQKLSRKKKGSNNRQKARRKVAKVHSKISRCREDFLHKLSRKIVNENQVIAVENLNVKGMVRNHNLAKAISDCGWGMFCTMLKYKAEWEGKTYIEVDRFFPSSKTCHVCLNQVGSLPLEVRSWTCEHCQTTHDRDINAAINIRNEALRILSLGTSDTAYRGDIRPKSGRKSVLRQSPVK

SEQ ID NO: 10928 - protein, 384 aa, Ruminococcus sp.
MLLMQITTTAKIQVQVAPEQRELLNVTMDTYRSACNFVANYVFRTHDLKQFSLNKALYYDLRERYGLKSQMAQSVIKTVIAKYKTILENQKAWIKPDFSKPQYDLVWNRDYSLTHNLFSVNTLGGRVKLPYYSGGMEKYFDHDTYSFGTAKLVRKHGKYFLHIPVTRDIPEIMDLDVCNVVGIDRGINFVVATYDSKHKSGFVSGRAIKQKRAKYKQLRKELQQRQTPSARRRLKAIGQRENRWMQDVNHCVSKALAYSNPKHTLFVLEDLSGVRSATEKVCHKDRYVSVSWSFYDLEQKLKYKAVLNESLVINVDPRYTSQTCPVCGHTEKSNRDKKKHIFCCKSCGYTSNDDRIGAMNLYRMGINYLAKDRQVPDTVSPQHV

SEQ ID NO: 10929 - protein, 431 aa, Escherichia sp.
  misc_feature (64)..(64): Xaa can be any naturally occurring amino acid
  misc_feature (271)..(271): Xaa can be any naturally occurring amino acid
VKRLQAFKFQLRPGGQQEREMRRFAGACRFVFNRALALQNENHEAGNKYIPYGKMASWLVEWKXLERAYKNFFRKRAAFPRFKKRGQNDAFRYPQGVKLDQENSRIFLPKLGWMRYRNSHQVTGVVKNVTASQSCGKWYISIQTENEVSTPVHPSALMVGLDAGVAKLATLSDGTVFGPVNSFQKNQKTLARLQRQLSRKVKFSNNWQKQKRKIQRLHSCIANIRRDYLHKVTTTVSKNHAMIVIEDLKVSNMSKSAAGTVSQPGRNVRAXANIRRDYLHKVTTTVSKNHAMIVIEDLKVSNMSKSAAGTVSQPGRNVRAKSGLNRSILDQGWYEMRRQLEYKQLWRGGQVLAVPPAYTSQRCACCGHTAKENRLSQSKFRCQACGYTANADVNGARNILAAGHAVLACGEMVQSGRPLKQEPTEMIQATA

SEQ ID NO: 10930 - protein, 273 aa, unknown
  TnpB Polypeptide
MQIERYHNGGKFVSEFGMDYLIVQLKKEYPFLKKAESTSLQHVSRNLNNAFQKLFKEHSGHPKYKSRKFPKQSYQVSYNKNICQVDEHRLKLPKLGAVYFKSGRQITGKIKNVTIRLSSTGKFYAVVLVDTKVNRLPKTADEVGIDMGVADLMITSDGVKYPTVRFDKILANKKHYWEKRLARRRLQALKEIAWDHHNKVMEPRELSDFKNCLKAKHMVAKCSEKVANQRSNYLHILTKQLVEQYDVIKIEDLKTKNLLKNHKLARAIANQAW

SEQ ID NO: 10931 - protein, 382 aa, Spirosoma sp.
MKVRYTYRIYPTISQKQALAKVFGCTRYVYNWALRERETAYKRGEKMNYNQSSAALTILKKSPGFEWLNEVSCVPTQQALRHLQTAYTNFFEGRAKYPSAKKKRHRQSAEFTASSFKYENGILSLAKIGPLKVRWSRPFTSKPTTVTVTKTPSGRYYVSLILDEPAPVHYPKTGNSIGIDLGINKLATLSNGETIDNLKSTKKYEKRLAKAQRTLSRKTKGSGRWNRQRIKVARIQEKIADTRKDHLNKVTTDLVKRFDLIAVEDLNVKGMVKNRKLAKHISDASFGTFVSMLDYKCNWRGKRLVKIDRWYPSSKTCSGCGHKLAELPLSIRSWQCPACLSEHDRDINAARNILYFSAEGHSVPARGATVRPCIVRARCGEA

SEQ ID NO: 10932 - protein, 238 aa, Azotobacter sp.
MEERAGLSQRPLLQGLGQLRPGPVPFSLGPLQRGARGRWYFNVVVEVDVHPSLGQGAVGIDLGLKDVATCSDGTKLESGRFYRDLEAKLAIAQRAGKKARTRAIHARIANRRKDALHQFSRQLVNRYGEIHVGDVSPTKLVKTPMAKSVLDAGWGQLKTLLAYKCAHAGIVFKEVGEAYTTRTCSSCGSLSGPQGVNGLRIREWTCCECGVAHDRDVNEARNILAVGHGRPAVGIPVL

SEQ ID NO: 10933 - protein, 348 aa, Azotobacter sp.
MLRRQAFKFRIEPTGEQQRKLRQFAGAWRFVFNKALALQQANREAGGKFIRYVAMARQLTAWRNGEETPWLKEAPVHPLQHALKDLDRAYQNFFAKRADFPRFKKRGQHDSFRYPDPKQIKLDQGNRRIFLPKLGWLHYRNSRPVLGTLKNVTVSLSAGHWYVSIQTEREVASPLHASPLAVGIDLGVVRFATLWDGHKETVLEPLGSFARHQQRLARAQRQMARKTKFGHNWLKAKAQVQRIHRQIVNARHDYLHKASHAISKSHALVCVEDLQVSNMSRSAKGSAEQPGRNVRQKAGLNRSTGPRLGRVSPSVGIPALPAWLRAKREGGEDVNRCRCMRFRKIAFH

SEQ ID NO: 10934 - protein, 453 aa, Azotobacter sp.
MHFDAPDPQDRPAPDSRAGGLLRPSLWYGSKSVELGTGRVEQAVRWRWQAERNGAEEAVQRHQVRTVPMAQGHSPGRACPAVHPSGQGLEHLLFRPQGRQAGARTAPQEERTLPGQLLLKKKGRCLDSFYVANDKFSLDGKSIRLPKIEIVAMTETLRFEGRILGATVSRTADHWFVAVQVEVPEHQALRRRSGHGTVGVDLGIKSAATLSNGESIQAPKPLKAALRRLRIRSRRLSRQLEAAKLAVGLAPGARPPRGTRLPVSNNRRKSAASLARLHARIANLRADFTHRLTTRLCRENQAVVIEDLNVRGMLANDRLARAISGVGFGMFRQQMNYKAQRYGTRLVVADRWYPSSRLCSVCGWKYEALTPGERTWACADCGTHHDRDHNAARNLERLATATALPVASPAGNGGAAAGMVPAVVGKVTPVSHECGQQGASGQEERCEHLCSPF

SEQ ID NO: 10935 - protein, 535 aa, Thermofilum sp.
MAAEKAERPAVAPPLLGGGGGAKGRKSRRKRCQRGRAAPAPPGPGAEGEGPVTSTMTGCSPEDVEAVRAVTLRLHLTPEQERELEALADLCTKMYNQANYELRQLFFAGRLTKAANEVLKRWYNIYRPRLGSYVSDAVVKQLLIDWSNFFKLLEAKKQGRVPGWLKPRPPGYKKDKVTGKREKIFFVRDRGYRVIPLSPKRGKLIISIAGRRLTLEYSGRLRWRGRQGTLVIRKLNGRWYAHIPVEVGVPAPREKKYSYMFINGERDKVQLQGPRGREKAFIDLGVNNIITCVTTGRRALLYRGGPIKAEYEYWSKEASLWQRVHDKCRNAGLPTERWHLLLKKAYEKRQRRVRNLKRAAVRHLVRELWLEGVSEIFAGYPYMITHSKGNKWNNNIWGYRQLLTWLAVAAAEYGIRVHVVDEHKTSITCSRCGYEDKEARVFRGLFRCPRCGLEINADINAALNIARKAGYTPPTPTRIETYTPTHQGVTPLNEKKKSTRPETITPRRVTGSRPPVSQGGCIDPLNVRKGAAAGI

SEQ ID NO: 10936 - protein, 510 aa, Thermofilum sp.
MAAEKAEKPAKAPPRARGGGGAKSRASRRKKRDNRPVRAPAPPGPSGGEESGPVTDEMCAPVETGGVRAVVLRLKLNPEVERELEALADATAKMYNEVNFILRKLFFTRNYTDEKVSRIIRVFYRAYSRGLCGRPRLGSYIADGVKEQLQQDWQRFFGLLKAKKEGKLPGWMKPRPPGYKKDRLLGKREKVLFVEGRGYRVVNEGGRRGKLIVSVAGKWISLAYRGKLRWRGKQGTLVVKEVNGRWYAYIPVNVGVPAPRERKYSYMYINGERDRIQLQQPRGGEKAFIDLGVNNVIAAVTTTGRALLYRGGPIKAEYEYWSREAKTFQSLRDKCKNHGLPWHRWHLFYARAVEKRTRRMQNLKRNTVKHLVRLLWEEGVDTIYVGLPYDIIHEKGNKWNSNVWGYRKIITWLAEVASEHGMKVFVVDESKTSITCSHCGYEDKEARVHRGLYKCPRCGLEIHADINACLNIAHKAGYTPPTPTRIETYTPTHQGVVAAKRGEKSTSRKQ

SEQ ID NO: 10937 - protein, 381 aa, Thermofilum sp.
MEKKFGYRVWKISASKEVRTKLLGFRCSFLNEPKDNLKKYWQAWQKAFEEAREKSKKRTRFKSPPLFLPVRFQLGGVVRGNHNAPVVIDLRSQGELRISRAGIRFPLKPSLTRALREENSLTPRPEFIAQITSQGRLRIIAFRRPRAELRLPIRVIGVDINSRHGITVVSLDIEATGARLVSRLRLKPPNHGWRKRLTSELQRHADTGRGEVPLALPFVLTTERAGRLARKMRHREKGLNAAFVQHVLALLRRLIREAVGRGYSVLVAMDPINPETLRGTGLQGTLLRVVRRVENLALYEGVALALFGRNGNGVSGKLCPLCGGKGVEVAPRRYQCPHCHIEWNRDYNASFRAILLVLQKRAPESAEALRRWLQEHPRALL

SEQ ID NO: 10938 - protein, 491 aa, Thermofilum sp.
MSRKKESGIAVAPPLQGGGGGAKSRASRRKRTRRTNIVKLVVDKNVHERLVELAVHTAKCWNTVNWLRMQQFKERRKIDFTKTEKEVYERYKHILKVNAQQVARKNAEAWRSFFELVREKREGKLPKWFKPRPPGYWKDENGEYRLAVIVRNDRYEVDEEDRTIYLKDFKLSLEFKGKLKWHGKQGRLEIIYDKTRRSWYAYIPVEVKNVAENKGELRASVDLGIVNLATVYVEDGTWYIFKGGSVLSLYEYYSKRISVVQKVLARHKQKGSRKLKLLYDKRRRFLKHALNSMVRKVMEELQGKGVREVVVGYPKEIARNHGNKLTANFWNYNYVIKRFEEIGEELGIKVVKVSEANTSKLCSLCGEAHEGGRVKRGLFRCPRTGKVINADLNGAINILHISLHIPESLGSGSRGELPVRDRGNGLKTQPVVYRWTSGAGWVRCAPTSNEAVKMKAVNHKPMIRPEGTLALQGGEEVSFLRLHANSASDHL

SEQ ID NO: 10939 - protein, 382 aa, unknown
  TnpB Polypeptide
MQRTIRVRLTPAPAQAETLAETLQHFTSAFNQAVRIGWEARVSNATKLHYLAYYPVKSEHPTLVSDLINQARVKAAEALRSAFALQKQGRKVSRPVSDACPPRYNNHTYRVDWASQTVRMSTTSGRQTIRFDVPPYNAHYAGYPVDTADLINRGGVWWLHVVVSVPAPVVERTDEVMGVDLGIAQPAVTSNNRFLGKPAWKAIEGRLFYLKRQLQRKGSKSATRHLRKVRGKQARFRRDCDHVLSKQIVRAALPGATLVLENLTDIRKRSKIKKQTKTSRRIHSWSFAQIKGFIVYKAEERGCTVAGVDPRHTSQTCSCCGHVARNNRRSRGRFVCRVCGFELHADLNAARNIAAKYHASGGRSPAGGSLSTDQSYPSDSSE

SEQ ID NO: 10940 - protein, 485 aa, Streptomyces sp.
LIGLTCCSEDRIVGEGFMQESAKKPKPKAVKGEEAKRIKRETLGIGDRRKHHARKATPLKGHAKEPDTQDRLYRFRFYPTEEQAEQLQQTFGACRWVYNEGLALRSNAWEQHRVNVGFAETCRALTGWKRVEETAWLKEVSSTVLQQSLRHLDQAFSRFFQGTAKYPSRKKKGRSRDSATYVSTGFKWVEDPERPGTGLITLAKQSEPLDIRWSRALPAGLVPVRLSVTRDRAGRYFVSTLVEERIAPLPVVFLPGSREPKAVGLDLGLASLVTLDDGSKLDHPRLLKRYAEKLARLQRELHEKVKGSRNRNKIRQKIARLYALISDVRRDLLDKFTTRLVRENQVLVVEDLSIVTLLRPARGKGRRRKARLNEAIVDAGWGELLRQLRYKCEWYGRTLVIVDRFFPSTRRCSACHAKGPKMDVSVREWTCAECGVVHDRDVNAAVNLRDEGMRLYWSVAAALPPEKKVPTVIKASELEKCLLAA

SEQ ID NO: 10941 - protein, 387 aa, Chloroflexi sp.
MRTFEYRLRPTKAQEQALMRTLIASRKMYNACLEELITHYKETGKYLHLYEQDKHHGKEAHPDLPAVLVDTTLKRLHRSFTNFFRGLKEGRKIGFPRFKSANAWNTMQFRDAANCLDHGRFKAPLQCGGRLRVIVHRPLEGTLKFARIVLRPSGWYLQCVCETPPHPLLKKENAVGLDMGIRSLVADSHGHLIDNPKHARKTAKRLAHAQRTLARGKKGSHRRKKAKKKVARIHEHIANQRKDTLHKASRYYVDGYQAIVIEDLHVSNMVRNHCLAFAIADASWGMFRQYLEAKAESAGRQVIAVRPHYTSQKCSSCGEYVEKSLSVRTHVCPFCGYIADRDENAARNILQRGLQVLARTGPSSSRREGPEPSGESPSALKREAAGL

SEQ ID NO: 10942 - protein, 375 aa, unknown
  TnpB Polypeptide
MLKAYKYRIYPNREQALLIEKHFGCSRFVFNWSLALQKRYYAMFKKSLTRTQIQSQLVKKKKKAKYAWLNEVNSQSLLNALLNVYTAFTGFFKGSAQFPRFKSRKIPQRSYQCPQHCTLDFVQGVIHLPKLKGIKAVFSREFVGKVKTVTISKTATGKYYASVLVENDEVLPTPTTIEPNLTVGIDLGIRHLLTLSDGSKFDNPTHLAKAGKRLAIQQKIFARKHKASKNYQKQKLAVARIHEKVRHQRLDLHHQITHSLICENQATSYALEDLGVKNMVKNRKLAKAMSDTGWGQFVTLLTYKAKWYGKNILRVDRFFASSKICSHCHHKLERLPLSVRVWTCPGCHARHDRDINASNNIRAQALADVAGLATA

SEQ ID NO: 10943 - protein, 384 aa, unknown
  TnpB Polypeptide
MELRNVKILLIPTKEQRQKFYDFSYYADLMYNQAIDWNNELYDSEGIFYSKFDLINMLPAFKEEHPEFASVDSFVLKTAVTDFRTALNRMKHGAKYPRYKKIGKQLSFGTRNDRLKVFENKVQISSIGVVKCKHCHWLTKTKTDEELACMSWHNPRVKFDGKYWFLSVGVEVDLTSDEVTDEIIGVDLGVRKTIYTSNGITKPNINNSRKVVNLEKRKKRLQKKVSRKYELNKHGKKYIKTKNIKKTERQIRLIDRKLSCIRENYNQTITNELIALHSKRIMIEDLNVSGMLKNKHLSRSIQQQCFYRLRQLLIEKALNTTTTQIGVVDRFYPSSKTCSRCGYINRQLKSEEIYKCPKCGLIIDRDYNASINIRDCKDYKIVAN

SEQ ID NO: 10944 - protein, 376 aa, unknown
  TnpB Polypeptide
MLLAVKVRLYPTSDQKKYLAGLFGAVRFCFNKGLALKTHYYKVKGRSLEPVHDLKKLLPIAKKSKKYAWLKDYDSIALQESLRNLQKAFQRFFNRQGGFPHFKSRRGEQSSYHCMGVSVDQKSIKVPKMEPIKAVIHRKIDGKVKSITLSKDCCGDYWASVLFENDEAEAAPEMAVHESQILGLDAGLKTFCTCSNSKKVKSPKPLKRAMKKLKKAQRALSRKKKGSKNREKARKRLAKLHRKVARIRADFNHKTSRRLVDENQALIFETLRIKNMMKNHHLAGAIADAGWGEFMRQCEYKAKREGKLFVKINTFFPSSKLCSHCLRKLSALELSTRAWVCPYCGTHHDRDINAALNIKQEGIRNLKAAGLTVLRS

SEQ ID NO: 10945 - protein, 414 aa, Acholeplasmatales sp.
MYTYKVMIHPNNKQETKIRRTLNKCIECNNIVYDYLDSFVRNEQRLPNISDVKAWFTIQKSIKDEETIGKREGLTKKEMIENHLDTLFYDVSNDALKQEVKNTYNSFIRYFKELSAYPVKKGYQAYKKSFYVDPIKIKFTDRKVKLEKIANSQKKNRRVLNLISLAEKNRIPTDVTYYNPRVVLEGDRFYIVVAVDDEFAPKKKKEKNQSKTIGIDVNIKSIVTSDNVVYETVTKTPSYKKANKQFKRAQRKMSKKLEVAKSSNKELRYSKNYQKSKRKWRKYKDRLLHLRDDHITRIINDIEKISPYKICVETLDVNSMKKREKGKRKTIAQGIQENPFRKFLKTLEERLKKIGIQIIYADKWYASSKKCSQCGYIKKDLKLSDRIFLCPKCNIKINRDYNAAINLNKYLKTK

SEQ ID NO: 10946 - protein, 360 aa, unknown
  TnpB Polypeptide
MQKGIKIRLYPNKKQIGILNKIFGHTRFVYNYFLNYSKKSKDYKYTNWSKILTSLKINTDTTFLKEADKFALQNSLKNLSQAYDNFFSHRAEAPVFKKKHNEQSYRTNYTNSNIILYEKEIKIPKLGLVKCKYDKDIRNNKIVNVTVKRLKCEYYEASIIYEEEVKSLSKTGKSVGIDLGVRKLITTSENETYISDLDMDRMNKKLKKEHKKLSKCKLHSNNWEKQRKKLAKIYRYKDNYMSDIIHKATKAIVTKYDVIYMEDIDVKELVSKQKLKKHKRKMLTSSLGKIRILIEYKCEHYGKIVKKINRYYASSQICSNCGKTYAVKASEIYKCPHCKLIIDRDYNAAINILNYGITHN

SEQ ID NO: 10947 - protein, 493 aa, unknown
  TnpB Polypeptide
VRVLKTSPAQGFGILLRGLGIPPFDPTSFTFHRWRKGRPPGSPVRSVDPRRALVFPLSPERDSIPPPLRARMDEFRLLVNLCLREALSTRVTSRRALSRFAADRALEAQVTGSIGLAAADIARSLASGHRRRLRKRVASRVPYVRTPFVRIPARSFHFDPDSGKLRLSVRQGEWCSLTLPVSEYHRRVLANPDHRVTQVHIGLRRAVLIYARRPPTPYVALSLVALDTNESSLDGVRVAPGVAEYVRLPFPEIRAIQARHVKRRQNLGRKRAHDRRVSRRLLGREGRRERHRTRSRLHALTRSLIDQLATQHAILALEDLTAIPPPRRRRGGSRSPPRFRSQSLRRRLSSWPQGELHRQLAYKAVDRGVPVVWLDPFRTSRTCPRCGEVSEHRKRVGTRFDCGKCGWSLDRQLNAGLNLGLTVLRRTAGLGGLRLDPDALSEDAVRPLYGSGNGRFARVERREREGRGGNGNPVGNSPLGGPSPQDPKAQTQT

SEQ ID NO: 10948 - protein, 472 aa, unknown
  TnpB Polypeptide
LSPTSVLNTYKATRTCRGASTFPNLPRRRTGEIGEPHCNSPRDMIQYAPSRRWNTYDKRENRFCRLRNAHEPKGSCIPSLRGRFCFDMTTYRYKMYDRAKDGRLDALVNRYGILYNHVVALCRRYYKLFGKTASKFAVMGHMAKLRKRNKKWRELTQGMDAQAMQNVVERIDKSYNAFFRWVKNRNSKRFSPPKFKKVRKYKSFTLKQNGYKFDFSRGRVWLKGKWYGYFNSRAIQGKVKTVTIKRDSVGDFYIYVVTDYVKSEGVPQSGKSVGYDFGMKHFLTDNDGSTIDAPLFMQRHRKGQKKLHRALSRKRKGSRMWNKCKERLARFNRKVARQRDDFQWKLAREIVKKYDLICVEDLNMAAMARFRFGRKVGEYGFAGFVSKLEYLAAVTGKRVVKVGRYYPSSKRCSVCGWKYDGLTLKEREWTCQSCGTHHDRDVNAARNILSEGASSVGEGLSKTDSLRKEVAA

SEQ ID NO: 10949 - protein, 226 aa, unknown
  TnpB Polypeptide
VWNLAVEQHTHWRSDRKGAPGYLEQCRQLTAARAGYAWLRAGSQTVQQQALRDFAQAMAAFRDPRNPAGRPTWRKAGRNEGFRIVGGGCQWDVRRLSRKVGCVWVPKAGWLRFRWSREVPPSVKSYRVTMDRAGRWHVAFAAVPEPVSAPGNGQVAGIDRGVTVSAALSTGELSYVRGLAAREPNRLQRLERKLARARRSSLRRKEVKLAIGRLGARENDRRKDWA

SEQ ID NO: 10950 - protein, 394 aa, unknown
  TnpB Polypeptide
MLAVKAVQQHYVPRPEILQMLEQFRQMLNDCVRIGLAENVTSLKSLSTKAYSQLATYDIMSYYKLCAISKATGILRNHRKARRKNTETKEPYARRLQLTTCYGFKIKTIEKALSLPFKPKHPLSIQLNAHVLHVLSEPNIQIRSVTLTDQQLSISYAKEVEPIQPRGLIAIDRNLDNVTTAHSDGQITRNVDFAKATEVKATYREIRSHMRRNDLRIRQRVTEKYGRKQHEKVKQILHHASKQIVLDAKRKEFGIVMEKLTGIRKLYRRGNWQGRGYRGTMNSWSYYELQRQIEYKARWEGIPVIYVNPYGTSVKCSICGSKMKPERNRQLKCPSCGFTVDRDVNAARNILARGVRFAPIALPTEAMVQKPRTAGNPESRWERVNMLKLHEPTS

SEQ ID NO: 10951 - protein, 315 aa, Escherichia sp.
  misc_feature (281)..(281): Xaa can be any naturally occurring amino acid
VKRLQAFKFQLRPGGQQECEMRRFAGACRFVFNRALALQNENHEAGNKYIPYGKMASWLVEWKNATETQWLKDAPSQPLQQSLKDLERAYKNFFQKRAAFPRFKKRGQNDAFRYPQGVKLYQENSRIFLPKLGWMRYRNSRQVTGVVKNVTVSQSCGKWYISIQTESEVSTPVHPSASMVGLDAGVAKLATLSDGTVFEPVNSFQKKQKTLARLQRQLSRKVKFSNNWQKQKRKIQRLHSRIANIRRDYLHKVTTTVSKKHAMIVIEDLKVSNMSKSAAGXRSRNAKYSDCIPVSQISAGTTFTKSQRPSAKTTQ

SEQ ID NO: 10952 - protein, 380 aa, Desulfotignum sp.
MRKTFQYKLYQAKRNKHLHQQIDIAAGIYNHCIALHKRYYRLYGKSLNKYQLQKHITGLKKQEKFKAWNQVGSQAIQDITDRIDRAYKLFFDSLKSERKVAPPGFRKRVKYKSFTLKQAGYKLLGGNKVKIGKRIYRFHHSRNLEGMVKTLTVKRDPLGDLYLFFSCDIKDQTIDRIMTGKSAGFDFGLKTFLMPSNETDPIQSPLFFKQGIKAVKKANNVLSRKKKGSNHRKQARKHLARVHRTIANKRKDFHFKTAKALVSEYDLLCFEDLNIKAMQLLWGRKVSDLGLFSFLRTVEHYCRQEGSELVFVDRFFPSSKMCSSCGHINKELALKDRSWVCSECRTDHDRDKNAAMNIHREGASSLGLGDVRPALQAVPA

SEQ ID NO: 10953 - protein, 346 aa, Catenibacterium sp.
MAQQILKEVDGSFKSFFGLLKKATQGKHALKDCRLPRYLPKDGYTTLVIGFVRLKGNKLILPYSNSFRKTHKAVEITVPPILLDKKVKEIRIIPKADARFFEIQYIYETECIQRNLNTTNALALDLGINNLVTGVSSKGETFIIDGRRLKSINQWFNKKNARLQSIKDKQDYGRKPTNRQKALARRRNNRINDYMNKTARRVIDYCIDHDIGTLVVGYNETFQKDSNIGRRNNQTFVNIPYGKLRDKLEYLCELNGITLVMQEESYTSKARFWDKDVIPVYKSDDTEEHHFSGKRIHRGQYRTASGQVLNADVNGALNIMRKSSVVDVNILYSRGEVDTPIRIRIA

SEQ ID NO: 10954 - protein, 375 aa, Virgibacillus sp.
MLLNQKYEIFPSDVQKETLDTWLSYCRQTYNSALLDKQRKYKLSKESYSRSAMQTQLKRDKLAWTYLKDMPSQPLQEVFRRLDHAFIKFFRKEARYPKLKKYKDYNSMTFPQFGHKPNSHYCYAASFAINGDLQLSKLGNIPIHLHRPIDGTIKQLIIKRRGTRWYAIFRVERQVYPAPINRNLAVGIDVGLNKYAVLSDGSYHENPRFLRQTEKKLKRAQQRLSHLKRGSVNYKKQVTKIQKLHEKVSNQRRDTLHKLSFNLAKKYSVIAVEDLNIRQLVKNKRLSKSISDAGWGMFRNMLSYKCERNGGLLIKVNPHFTSQDCSNCGTRVKKSLSIRTHICKGCGTILDRDYNASLNILQRGLEQLDKMPVII

SEQ ID NO: 10955 - protein, 369 aa, unknown
  TnpB Polypeptide
MKRTVSIPVDLPHERFLPLMGFCADIFNQHVDWALKERTWNKNKAHKALYADLRAQYPDVPSALVQTIRDNAMEAVKATKFKRTPRKKPTSGLRYDKRTMTLRGYQLTLSCIGKREKLILNVPEHFKEIFETWEFCAATLTYSKHSKQFWVRLVFETETPQQITQGKVLGIDRGLYHMVVTSDGQFFSSSQVRATQRRYLHNRKTLQQKGTRSAKRRLKAMSGREKRFMRDVNHCVTKKLANLPDVAVFVLEDLSGIRKNRRGKKMNKWLGSWSFYQQDLFLVYKAEALGKRVAFGDPRYTSQKCNVCKHIRKTNRTKSRFHCRNCGNRDHSDWNAAKNHRDDYILSSTLLGTVEQAAVNLPDVTTLAG

SEQ ID NO: 10956 - protein, 436 aa, Dehalococcoidia sp.
MQIMSFNNPRREVPSLQVGDERRNFSRGEIVVIPTRYYETMKRTAKYRMYPNKTQKRTLSDTLAVCCSIYNTCLEQRKMLLGDRNKRISRTEQQNQLTEAAREDPYLKKVHSQVRQDPTFRVQRAFDGFFRRVADPKCKNPGYPRFKSRRRYDSFTYPQATGFDIRTTRKRHAKLRLGKIGSINIRYHRPVPEDATLKTCTVRRKNGRWYACITYELPDVPVRDDLPEPVGIDVGLENLFALPNGYLQENPRHYREAEARLRIEQRKTRRMRKGSSNWNKQQRKVAILQEKTASRRHDNLHKITRKLVDTYPYIKVERLRIDNMKRNHKLAKSISDASWGTLFFMLDYKAEGAGGLVERVDPRGTSQTCPCGEPVPKELKDRVHRCKRCGFTADRDVASAMVIGSRVGTTRLARGGDGDPTSVGVTSSEKREAPSL

SEQ ID NO: 10957 - protein, 451 aa, Nonomuraea sp.
VKSIQAYRFALDLTPGQERVVLAHAGAARVAHNWALARAKAIMDQRAAERTYGVPDDQLTPALSWSLAGLRKAWNAAKAQVAPWWGEVSKEAFNTGLDALARALQNWAGSRTGKRKGRPVGFPRFKSRRRATPSVRFTTGAIRVEPDRMHVVLPRLGRLKLHESARKLARRLEAGTARIMSATVRREGGRWHVAFCVEVERAERSPARPGSVVGVDVGITHLAVLSTGELVDNPRHLSTAQQRMRQLSRALSRKIGPDRRTGQHPSSRWRRAANRLGRAHAQVAGLRRDGLHKLTTRLAREHGTVVVEDLNVTGMLANRKLARHIADAGFAEIRRQLAYKTGWNGARLLVADRWYPSSKTCSGCGAVKTKLTLSEREYHCEECGLVLDRDLNAALNLAALAAQFDTAGSGPVTARGADQKTRTRGRVAVKREPGTASADQTGTAAGQPAAA

SEQ ID NO: 10958 - protein, 229 aa, unknown
  TnpB Polypeptide
MVKAIKVMLIPNNVQKTKLFQYAGASRFAYNWALAREIENYEKGGKFLSDAELRKEFTKLRHSDEYAWLLNISNNVTKQAIKDACTAYKNFFRGLQKFPRFKSKKRSMPKFYQDNVKIQFSNTHVKFEGFSSSRKANKQKMNWVRLAEHGRIPTDVKYMNPRISFDGLNWWISVCVEFPDCKETLNDDGVGIDLGIKDLAVCSDAVKYKNINKSQKVKKLRKTETQITA

SEQ ID NO: 10959 - protein, 280 aa, Clostridium sp.
MSLGVGERQTGASWAWVKFYLRGPKLPEGWETQSPYMVIRKDKAELHIPVQKEIGKVRKVKEQIADEETVICGIDLNLGDREAVCTILKSDGTEITRKFIKGGDFLQHRRKRLLGKIAVSRSKYGNVPDNLRDNVRRWNKIRNVEENEAHRISRRIADFAKQNGATIIVFECLDKLVPDKGKYSKKSNTKRSYWLKGRIYRYTKYKAWEDGIITTRVNPKYTSQTCSKCGKKVFRHQFGEEEKAEYIIGAPLFTCESGHRSNSDLNAARNIAKRLLQKAS

SEQ ID NO: 10960 - protein, 461 aa, Chondrocystis sp.
LIYNYQYRLKPTTEHKLVLNDWLRICQYWYNRQLGERFDWWEQNRSYIDRCLLVCHLPELKDKPEFYGQKKQLPVIKQDLVIVGWSGELLDFNSVPSQTLQEVCKRVKLAFERFIAGDSKGKRSGKPRYKNTARFRSIVFDSFKLHSCSVGGKWLYLSLPKIGIINVRHHRPLPNGAVLKQAQIIKKSDGWYINLRLQDDSVPDFKSNITPSWNNSLGMDAVLHEDDYLATSEGVKLPSLKSFRSSRDKLAKVSKRKSTKKKGSKSRRKLAKREAKLHSSIARARKDHAYNTAHALLKTGKKVFFHEKLNLVGLSRRNKAKTDTNGKFLPNGQSAKSGLNKSWADAAFGQFFNILKFKAEKAGALVIPVNPQYTSMLLPYKDEFVFTDCGIREYWDEELNLLIDRDVSASINVKRVGLDLFPTIKRCKGNPVVIASTTNSTLKEVLSTLRGLEKPALYSKS

SEQ ID NO: 10961 - protein, 392 aa, Chondrocystis sp.
MLQVVKVRIYPTEQQKVSLANAFGTTRWVWNYFLALTNQTYKETGKGIAKYDLIKQLPKLKKQEDTEWLRQTYSQSLQFVCLNLSRAFINFFEKRAKYPRFKSKHGKQSLTYPQNVKLGQNKIYFPKLDWIDAVIHRPIEGKIRTVTITKNSCDQYFASLMFEDGQELPKPSSKGKAVGLDLGLTHFCITSSSQKFDNPRWLKKHEKNLKLKQQQLSRKQKGSNNRNKSRVKVAKVHNKINRCREDFHHKLSRRIVNENQVLVLENLAIKNMVKNHQLAKAISQVGWGQFCTMLKYKAEQSGKIYLEVDRFFPSSKTCHVCLNLAGSLPLDVRFWTCSSCNTHHDRDINAAISLRDEGLRLLTCGTRDKAYCPDVRPSSGGRKKSTTRQSVG

SEQ ID NO: 10962 - protein, 459 aa, Chondrocystis sp.
VKLNYQYRLYPTTEQKLTLNQWLRICRYWYNRQLGERFDWWEQNRCYSNSCPLVCHLPELKDKPEFYGQKKQLPELKQDLVTVGWSKELLDFNTVPSQTLQEVCTRVKLAFNRYVAGDRNDKRSGKPRIKSASRFRSMVFEGAKLHSCSVGGKWLYVSLPKIGIVKARHHRSLLDGAILKSVQIIKKADGWYINLRLEDISVPDFKSDIAPTWDNSLGMDAVLHEDDYLATCEGVKLPSLKSFRKSQHKLAKVSQRKATKRIGSKARRKLAHCEARVHQRVARARKDHAYKTAHKLMATGKKVFFHEKLNLAGLSKRNKPKQDFEGKYLPNGQSAKSGLNKSWQDAAFASFFNILKYIGEKTGTSVVGVNPQYTSMILPYKDEFVFTDVSIRRYWDEELKLWVDRDIASSINLKRVGLDLFPTIIRRKGNPVVKASTTNSTSKLALSILRGLEKPALYV

SEQ ID NO: 10963 - protein, 436 aa, Chondrocystis sp.
MVKLYNAQVNRLPSNRELSAVLEYLCSESNKLYNCTTYLARQIYFKTGKYANKFWLASQMKANPHMKSLYTSAAQQTCISVGEAFKGYRELLALYRKGELANKPKLPKYRKRGLFQISYPKRWLKFTDKGVRVPLGKSCKIWFDLSETFVPFPSNLDWSTVKELSIVPRAGYFDAVWVTKSELKDNQKLNQNNVLSIDHGLDNWLTCISNVNTSFIIDGKHLKSVNQWYNKRVATIKEGKSQDFWCNLLDKITSKRNRQMRDAVNRAGQLVVQHCLDNNIGTVVFGWNKGQKQNSNMGKKNNQKFVQIPTAKLKKRIEQLCNVHNIRYLETEESYTSKASSLDLDLIPVFGEKPKGWKPSGRRVKRGLYRSAQGIEFNADINGAIGIARKVAKQYEFQFDPRGFARGVLTMPRRLRFWCKSSNLSSAVKESQSIYS

SEQ ID NO: 10964 - protein, 233 aa, Okeania sp.
MRIAYKYKLRQTKEQAEKIDQNREILRLQYNYMLAQRFDWWEQNRCSINACPLICHLPELKEQPTYYSQKQSLTQLKVDRPWYKEVHSQVLQEVPKRVELAFNRWLKSDASGKRLGKLIFKGKGQYKTFTYAQFKQHWFVNKIVKSSKIGDVKVIVYRPIPDGFVIKTVSVTRKSNGYFVTFSLEDKSVPEIKPDIRRGKIVGIDVGLIDSVDGKVFIQQRSLNQKRELLLNT

SEQ ID NO: 10965 - protein, 238 aa, Escherichia sp.
MMMLILKAYKFRLEPTHEQSQRLRQLCGCARFVWNLGLAETKRVLGSGEKLPSAFELNRMITVWKKMPEYIFLQDAYTDNLQQKLKDLHTAWKRCFDKKLAAKAPVWKRKNEGRDSIRFVNFEKYCCLENRRVKLPSGLGWVKFRQSQRVNGKIKNATISQLAGQWYISFQVEIETAEPNHTSTTIVGLDAGVAKLATLSDGTVFEPVNSFQKNQKKLARLQRQLSSCEKCHGQPVQR

SEQ ID NO: 10966 - protein, 514 aa, unknown
  TnpB Polypeptide
MQTKESSKKSGCQRHENVSLTMTRSLKRDGRAHCSPLSPATTECQGEPLPTKKKSSKELVQLTTANNQFYDDTCKEISPLLLSPTEIDSAVSDLSCLTSSSRGEEVKSWFSINQRIVHSVKSRKICSQYFKPSREECTDLSVTQIKTRKIRIYPTKEQRTILRRWFGVQRLVYNQAIQHYNDKEFEVRHWMKLYAIVFSELDMDYVKEVPYAIRLNAVKDAYTSWSTNCKKAKKSGTPFSLKFKSRKDKVQSCYIKKTSISTLGIYHTKSGRMKFSETDWFANSEISDCRLICDHGRWFVSIPRKITTQSTSETQGGAVAVDPGIRNFGTYFSTDGRFGWVGQRAFERILKLNIRIDKMRSIIATTEDKLYKFRLKRVVDRLYHKIRDLVDELHWKFMNFLTKEFSVVIFPPFNVSDMVKKSGRKIRKVVVRSMMALRFYEFKERLKNKCKERHVLFIEQNEAWTSKTNSFNGEVMENLGGRESFNYQGLRINRDVNGSRNILLRAMRDSSANS

SEQ ID NO: 10967 - protein, 380 aa, unknown
  TnpB Polypeptide
MLRAIKVRLYPNKAQEQELNKVLGCYRFVYNHMLAKRKTAYETDKTNLSVNDLSKWFYGTLRKDEQYTWLKEQNTQVMAQAIRQMDDAYQRFFKQHNGYPKFKSKKDKQSALFPRNAISTRNMFETKHITLIKSLKNLRFRCSDLYHRRLQKHKDSIRSATLSKTKSGNFFLSILVDIPEAECAKFDKTNKEVGIDIGVKDFIITSDGNVFENKRFFSSAERKIARLQRQLSRKMKGSNNLNKQRIRLAKAFEHLTNKKENYIHSVVNEVLKLYDVVFMEDLNVQGMLRNHNIAKAIQEVGFYRFKEVLQSKSLVNGKQVVLIDRFYPSSKTCSCCGYKKQDLKLSDRFWTCPECGEHHDRDINAARNIILEGQRKLQAG

SEQ ID NO: 10968 - protein, 408 aa, unknown
  TnpB Polypeptide
MRKIRRTYKFRLYPTKAQAELLAKHFGCARFVYNYFLNQRQEQYRMTGKSDNFYAECKSLTELKKQEETAWLSEVSAQSLQFALRCLETAYTNFFKKRAKFPKFKSKRTKNSFTASQFASIEGDKLFIIKFKEGIKCRVHREVKGKIGKVTITKTPSGKYFASVHTEEEYQTTFGKTNKSVGVDMGLKDLLVTSEGEPFKNKNYTKKYERKLATAQRHLSRKKKGSRGFEKQRLKVARLHEKISNCRMDYLHKCSIELVRRYDTICIEDLNVKGLMRNHHIAKHIADASWWTFLNMLTYKSEWNDKKVVKIDRFYPSSQTCSICGYLNKDTKKLSVREWECPSCHAHHDRDVNAAINILRVGLKQYTSAGTADYTGGEEVRAVLSESHSSVKPEAHKHFACGQSTTTK

SEQ ID NO: 10969 - protein, 479 aa, unknown
  TnpB Polypeptide
MPGEGIYPVETKNRRTNVVRLLPNGAQDRKLRRLADTTARLYNELNYERRQQFFSGEGVDLKGTWDKYYEKYKGILGSANAQAVMQKNNEDWNSFFSLLNMKREGKLPPRMRRVSPPGYWKDRETGKRKLIIVIRQDRYEVDEQRRVIILKDFNMEIKFVGGLRWYGKQGRLEIIYDETKDAWYAHIPVDVGVVETKTGKKTKHIVRGERRVIQFESPKGNKVASIDLGINNLASVVVDDGTWILYKGVRAKEDYFYFMKRIAEIQSLRDTLRGKLLDDAIDELNHEMRRLYGKLMRRLLHLYRNFAKHLIEKLHELGVSTIYLGYPFNIAQDKGNKFTVNMWSYRKLMEVIELKAQEYGIKVFEVVEYNTSKYCAYHGVEIKRYPRGVVSCPKGHKLHSDLNGALNIMKRATGRIPLVIKKPLSFIVEHNQVAPTKGGGNPQDPRTSHPLGREGVISGVLNLTATGEDMHCLRSIRSL

SEQ ID NO: 10970 - protein, 533 aa, unknown
  TnpB Polypeptide
MDITRLKYDELYDFAVLIRNHKNTVSQYVNENIFYYLECNKFQFLNEMIAKFKGVISSSFYDRLYTDVFTCYQNKFKALQRKLQFEAVEFNGFEFYKRDSKYHKRGELKGVIIKKKQTPLSNCLTYLARYGDEGIIDYIKGNLDKCDAKKREFYNNILRCCEKFGFDRLYALALSKRKRILKCYSEFPIEFKSLSFGGRSRKKNIVSFNKRFGSKINSFISLSGFRRKSFDIPVKYHKGYHGNMKDYRKANPNYDYIITFDEKKHQVKINLCKDGERYIPEPHGKTVGIDVNCKNNLFSLSNKTVYDYDRKLVNDFCNLSLDIDKLKSKNKDYTIGKRKQRKLDVMNVKMIKSEQQLIATMCKILQSQGVGHVVMEDLDNGFGKCYVKDHNNEDINYNRTVGFLGLSSLKQEVEHIARKYYIAVSTVHPSYTSKMCPNCGCIDDKNRPNQETFKCVECGHENNADLNAAINIKNRVLVTVLREKLLKQLDNGAFEPRKLKRDEVKDALLSFRRSLPKVGGECIEGGLTTFDYI

SEQ ID NO: 10971 - protein, 415 aa, Bacillus sp.
MAKVKGTTSKKRREEFAHLRHLLSLWTCSCFVSPAGNVSTETIKQYVEQQKKGVKLVSQTITVKIKLLPTKEQASILNVMSKEYIAVVNSLISEMVTEKKSTRKTTKDVPGNLPSTVKNQAIKDAKSVFSTKIKKSKYTIVPVLQKPVCVWNNQNYSFDSTHIHLPLMINGKVKKVPIRALLTDKHNRNLDLLTHKLGTLRITKKSNKWIAQISVTIQTHENTGTKIMGVDLGLKVPAVVVTDDGKTRFFGNGRQNKYVKRAFKSKRRKLGKLKKLNAIVHLDDKEQRYMKDQDHKVSRAIVNFARDHHISVIRLEQLANIRQTARTSRKNEKNLHSWSFYRLSQFIEYKAKLMGIKVEYVNPAYTSQTCPKCSEKNKTSGRKYKCKCGFETHRDRVGAMNIRYAPVVGGNSQSA

SEQ ID NO: 10972 - protein, 437 aa, Halorientalis sp.
MLEVHRTHRATICNHSQVAESLDHHGWAASKLWNVANYYSREQWEETGEIPDHEVLKDELKTHPKYKGLHSQSSQRVLEELAEAFNSWYSSDDNRDNPPGYRKRNYYDAEGRRVHEEHPRSTVTWKQNGIRHDTKHNRVRLSKGKLHKDYPRQRDCILIEYETRPDVTVETLQQVRAVYDDTKERWELHLVCKDEIETPTTPGDETAGIDLGISNFATVAYSTEDANLYPGNRLKQDGYYFPKEIAKCNDSSGERATRLHHKWSERRTHFFHSLAKHIVHRCVEKGVGRITVGDLEGVREDEDGDSKNWGRHGNLDLHGWAFDRFTDILAYKAKVRGIEVVEVDEQDTSKTCCVCGREDEKQRVERGLYVCESCDAAFNADVNGAENIRLDINESNSESPASLDGDRSTGWLAQPAVYLYDLSWGFQPQREVVDCKP

SEQ ID NO: 10973 - protein, 382 aa, unknown
  TnpB Polypeptide
MIKSFKIRLYPIQDQEQLMWKHIGCCRFIWNYMLALQQQHYENGEKHLSAFDMINQLKPLKNDGEHGWLYDVSNTSLKVICQDLDKAYKEFFRKTRGFPKFKSRKRSKPSFPVVCGCKTYFADDQFVQITKLGRVRYRTDFEFAYGRNVLNFLNPRISNKNGKWFLTFGLECENQASELTNEPLGIDLGVKDLAIAAFNGQHMVFHNINKSKRMRDLTKKERHLQRSISRKYEASRKRTGRYEKTKNIMREEAALSRIRARKANIRHNYIHQITHTLVSLLPARVVMEDLNVQGMMKNRHLSKAIQEQNFYEFMRQMEYKCAWRGIPFGKVPRFYPSSKTCSACGCIKKDLRLSERIFVCPECGCTIDRDYNAALNLSRYEI

SEQ ID NO: 10974 - protein, 368 aa, Competibacteraceae sp.
MKLVANLKLQPTPQQAESLKQTLERCNAACNWISAQAWGKETFRQFDLHKLLYPQVRQHFDLAAQMAVRCIAKVADAYKLDKETQRTFRPLGAQPYDDRIFRFVSNDQISIWTLNGRDKINFVCGEHQRQLLKHRKGEVDLMFVRGHWYIAAVCDFDDPDLLTPDGVVGVDLGIVNIATDSTGEQFSGKGVEEKREWYVKRRAILQKKGTKAAKRRLKKMSGRQRRFQKWVNHNVSCRIVSKAERSQCAISIEDLKHIRARAKANKEQRKRLHNWGFAELRGFIEYKARKAGVPVFVIDPRNTSRQCSVCGHIAKKNRPSQSVFRCTACGHEANADCNAALVIGSRATVTMPLFAHQCVPGAVESPVL

SEQ ID NO: 10975 - protein, 373 aa, unknown
  TnpB Polypeptide
MALVNKAYRYRFYPTDAQKKQLDRSFGCARFVYNYFLKLRTDSYYEKQERINYYKTGKLLTQLKKDNDYCWLQEVSSVGLQNTLRDLDKAFSNFFAGRAKYPAFKKRTANQSICYTKSAFSLKNEVLTIAKNKTPLNIRWSRQFNEVPSSITVSKDCAERYFVSFRVKEQVYSLPQINKSIGIDVGIKDICVTSDSFRSGAPKYSRKYEGKLSEAQRTLSRKKNGSKNREKARRKVAKIHAKIADSRNDFNNKLSTKLIRENQSISIENLNIKGMLKSRPVAKSISDSSWGSLFRKLKYKAEWYGRSIIVIDRWFPSSKRCHKCGYINNSLKLRDRSWKCPSCKEVLDRDINAAKNILTIGRKLEPLVSLLDK

SEQ ID NO: 10976 - protein, 348 aa, Aliterella sp.
MWGKHLNCAKLQNHIAGIRKRNPFWQLVGSQAVQDICQRIDKAYQMFFKHHKKGVRPPGFKKVKKYKSFTLKQAGYTFLGGNRIKIANKVYQFWKSREIEGTVKTLTIKRTPLGELFMVVVTGARFERESFAGGASPANVSPQIQSTNGKIAGFDFGLKTFLTCSEGFNIEAPLFLKQSLTAIKKASRQHSKKLKGSTNREQARKNLVRKYEDVSNRRNDWFWKLAHDLTNKFDVLCFETLNLKGMHRLWGRKVSDLAFGEFLQILEWVSKKKGKQVVYIDRWYPSSKTCSRCGHILESLDLSIRRWRCPSCQSENDRDENASINIKMVGASTIRLGDVRQALPAIAV

SEQ ID NO: 10977 - protein, 518 aa, Nitriliruptoraceae sp.
VERVGHDRTDGQAAERGQVTRAVEVTLDPSQSQERWLRSYVGSMRVAYNWALEQVRDNLEIRADERARGVAEGELTPALAWSRESLTARWRQVRDEVHPWHRDVSIHAFRTGLDNAALALKNFSESSSGKRRGQKVGFPRFKNRHSRQAVTFVELADGVDHRHWIRPDSRTHVRLMLPRRASDSTWWRRHTRPKSQQATGRDRRSEVAWLHTHQPDTVREVWGLCDTGRAKVQALTIKFEGGRWKAVFRLRLLDGTTRLRNPGEPVKHHGGPVGVDLGLKHLATLDRPIPGLTDEHGHVPNPRVLERQLARLRRLDRAIARCEKESNNRAKLIRRRARLHGKITATRKLYLHELSRRLAGGFDVICIEDLNVAGMARRKGLRNGRLVAEASMGELVRQLAYKTSDRGGMLATVGRYYPSSQTCSGCGARTKLALWQRVYDCDHCGLTLDRDVNAARSIRAEGTRLLREHQDVASIRGETINGVPRPGETEPAQHHRAGGHGSSEAATDPATPALAGVA

SEQ ID NO: 10978 - protein, 405 aa, Acetobacter sp.
MKIQRAHVVRLYPDLAQEDFLCQIGGATRFLWNLALEQRQTWGQRHGLNRFSQSKELTQLRSDVDWLKACPSQVLQQVLNDLEKAFRNFFSRRAGFPKFRKKSRGASFRFPDGKSALYERLTGKGGHLKLPKIGWVRFRGWREIPGQIRNVTVRCDAGQWFAAIQYEHDVPEPARKTLPAVGIDRGVAATIAVSGQGRVKGPDAYRKAMKRLARMQHIVARRKKGSQNRRKAVLRVARLHRKVRRIRADFLHKVSHWLAKNHGTLVFEDLKIRNMVRSASGTVAEPGRNVRQKAGLNRSILDQGWGLLRLFSGYKTAACGGQCLDVPAPNTSRECRMCGHISAENRASQARFSCVRCGHAENADDNASVVIVKRAVDNGLLPVEAMRQHAREAGISVGSLLASCQ

SEQ ID NO: 10979 - protein, 214 aa, Burkholderia sp.
MILVYRYRVKSLNGLLNKQSRVVNYVWNFCNDTQKHALKWNKKWPTGFDLNVLTTGSSKELGIHSGTVNATCEQYAKSRSQRRRPYLRYRGRKSLGWVPLKGRDLKREGDAFRFAGNTFRVFNSRPLPEGKIKDGTNFAQDARGNWFLNIVIEMPDVQARPIRSGVGIDLGLKDFATLSTGEKLPNDQFVVRIERQHDAAERYRGTANKRVGLQ

SEQ ID NO: 10980 - protein, 352 aa, Paenibacillus sp.
MVQTITMSIRIYPEYINLLEQQSEEYVKTVNSIVDHAIEVGAFPTWTTKNVKANLPSAVCNQAIRDAKSVFSKFKKQKIRSVLKKPVYYVNNQNYKIGDESLSFPVMKEGKSKRIICKAFISSRDQSLLQDVKMGMMRIIQKSNKWFAQISITKITPTNHGEKIIGIDLGLKVPAVAVTDDNKTRFFGNGRENKYMKRKFRSKRKELGKKKKLNAIRNLNHKEQRWMKDKDHKVSRQIINFAVKNEVSTIRLEKLTNIRNSTRTSRKNEKNLHTWSFYRLAQCIEYKANLTGIKVEYVNPKYTSQTCPVCKKLNKAKDRLYACICGFHSHRDRVGAINIIHAPVVDGKSLSA

SEQ ID NO: 10981 - protein, 261 aa, Shigella sp.
VKRLQAFKFQLRPGGQQEREMRRFAGACRFVFNRALALQNENHEAGNKYIPYGKMASWLVEWKNATETQWLKDSPSQPLQQSLKDLERAYKNFFQKRAAFPRFKKRGQNAAFRYPQDVKLDQENSRIFLPKLGWMRYRNSRQVTGVVKNVTVSQSCGTWYISIQTESEVSTPVHPSASMIGLDAGVAKLATLSDGTVFEPVNSFQKNQKTLARLQRQLSRKVKFSNNWPLPPSQFQRCTCDFFCIRRLDYVELKSGKFTRG

SEQ ID NO: 10982 - protein, 354 aa, unknown
  TnpB Polypeptide
MILTYKLKHNRDFSRELSLAKKVADYAIANRPISSKDVKHIGLKSMIANQILRKYSRSKTVKEAKSVNLGIPSQGVRVVGKEIQIPCLRLKLPILSSQKFEKINQIEIGKEYAFVSVSIKEPEKYHPTSVIGVDRNTNKHVLVASNIDTGKVLKLGKECQHVHLKYKHLRKELQAKGKFSLLKKIKHRESNIIKNINHQISKRLVEEAKDNNAIIVLEELKDIRKTTKCRRKQRYSLNSWSFCQLGDMIEYKSKKYGVPIAYIAPQYTSQRCSRCGHIEANNRKIKQFHCVKCGVVENADANAGFNIASLYQSGISRSGRLPPASLAGECQFTPREFASFACEIFAIKRKLIFE

SEQ ID NO: 10983 - protein, 405 aa, unknown
  TnpB Polypeptide
MKFCVKYRLKPTEEQAESLGLLGFYATKLYNTDNWIRREQWTQTGKIPNWYTQKKLLKSNHWYQLLPSQTAQAVIKNLQDNYKSWFKLRKTDPVAKPPGFRRRDRLSPLTFYQQFALVGDQLALVMSKKFRAETGVDKLVFNLDLWRKVEGTSKMCNVIYDGGWMAHVVYEVPEPPQTSDKNVLAIDLGIINLAATVDLNGRSKLYSGRQALSVQHYFNKEIARVQSLTARQHNKKGSHAVSRMHKKKRRQVNLILHSVSKALVEDAKRNRVGTIVVGDLKNIRKDNGKGKNWGRNNQKLHAWGFRKLLTQIRYKATLSGIRVVEVSERNTSRRCSVCGVVRKANRRHRGLYVCSKCGAVLNADVNAAVNMLRTYLHQAKAQGSIGCVAQPLIWRYAVNQEAHTL

SEQ ID NO: 10984 - protein, 537 aa, unknown
  TnpB Polypeptide
MSTKSFIISLPIITGDQDRRRLRKSFSFGCNLQNAVMGGGWDRVLKMRATAEWQTARAMPKSSERTKAFRDLRVRFRLNEYDFHADVAKHRKASGRGHLLGINECQKLASRAWISVERHLYNGGSPRFISSRRGLHSIEGKTNRTGIIWKADQQCVTVCKHVYRVRVDKRDDWLTRALQDPTDPTKPRKVKYCRIVREMRKGKERFLLQLVAEGTSPLKHAYAGKDLRMAIDPGLGSLTYATEDGTIAKVQIAPSADTDHRAVRKLQRAMERSRQATNPDNYETVEVVRHGKKHKSLKVKSGRLQWRFSKRYESLRAELAEIFRLSAATRKREHGEVCNWLLGHAGHIIVEDNSYKAFQRGRFGKTIGRHAPAALYAQLTNKAESAGLLVEVVSPKKLKPTQHNLLTGQFVKHELWERRVRLGNDDDDRWIDRDAAACLNLLYADLEKQTYAPERIREAVLAGVTAWLDAGVVVIQAREGITEREFGRFRRRGIPSLTVQGLRQQGFRGRSDSKSGTTPRRKASTVSKPSHFSGEVV

SEQ ID NO: 10985 - protein, 464 aa, unknown
  TnpB Polypeptide
LFDEDSPYIEWRVLENVVEQLNTFYDQHGCFPGMYTELIGTPEPNGTLLYAPDTGDYHIHDLTIEDGGVMVVLNAPNSLSPDSYHDWTDHEIRFPTHSRFVEMVETGDVKAPTLHASEHGYTLGVPVDVPEQDAETVADRMLAVDLGVKKQATAVVLDAGENGHHKQVAPPEFIDHPAKDKLFRVKANAERINDRLAAFRRQAKAHTERFAHLLGEYRQTRRKERRLREQIQHDVANQLVWLALEYGCDTIVFESLGQIDSSDASGAVAWSISSWARGDLLDVVAYKAELVGIDFETVNPWGTSRYCPRCGEKGRTVKAPDDHTEQRHGGHFHCPECGYECDRDVVGAVNVGRKHLDGSKMEEANPAAYTEAGNHASFPSPRGARSAGVQSATDEQDEASGRQTQLSQYRVPSLTVKRSGTDTGGLHQNYGSNTGLRRPSGSVTMHVLASATGSTRILPNTTEN

SEQ ID NO: 10986 - protein, 442 aa, unknown
  TnpB Polypeptide
MFGGDCQMGSYEAVKVRLDPTPKQERLMASHAGAARFAYNAGLAHVKEALDNGEPPEWSHYDLRRWWNANKDELAVNRDTGVVWWSQNSKEAYSMALRELSRGLSNWSRSRKGQHKGKRVGFPKFKSKNTTMRFAYSTAFTAPTASDPYGLKLPCIGRVHCMENVYRRVAGAHVIRVSVSRRAGRWYASLTVEREPRPSSTPRGGAVGVDLGVKRLATLSDGTVIPNPRALNTGLRALRKAQQALSRKVKGSARREKAKKHVARLHARVADVRADAMNKATTIIAQSYNAVCIEDLNVAGMVKNHRLARSLSDASLGEFRRQLEYKTARNGVELRVVDRWYPSSKTCSNCGVVKVKLSLSERVFDCDACGLSIDRDLNAAINVKVAGSAPETLNARGGDVRRADKTLSGSAVPVEARTKRARKSAVRLGAGLGNEAMQPSAN

SEQ ID NO: 10987 - protein, 552 aa, Lachnospiraceae sp.
MIINHTKNKKYAALCQYFQANTADSKRMYNTANFYIRNTMTGLKKSPEKRTHSEIEVLHYVFTSIQQHNDTKIKELKALKLRNVGGLHCERIMRDVLFKKLIPYPTKEKWFLSYETLDTIFKLTENPVYRRMNSHVNQNAIRKVIAAWTGYFKSLKQYDKTPSAFTGKPHIPGYKKEAAYTAWFSNQVAKFKEEGGKYYISFVNMKEKLCIGNTAIYEGLKYMKTEIKPIYGQYRILITFDDKIKEIEAPEHPSRILGLDPGVGNFLGVANNFGGVPFVIRGGALKSENRYFNKKRAKLMSKLTKGSDSQHSAKYSRQLNAISRRRESFLKDYFYKCAWYVCRYALSAGVEVIVMGHNKGQKQEISLNSVNNQNFVSIPYYKFIQVLKCVAAKCGIAVVIREESYTSQANLLDMDSIPTYKEGQNIEYTFSGKRVHRGLYQSATGILMNADINGAGNIIRKEYPDAFQNIKDFSYLHATTLSIGYKDLYRNAKSVSARPKKYKYHKSGKYTVIRNSARSAVRSEYRKLWGTCGLVCLQNKDEQNKTENNKAA

SEQ ID NO: 10988 - protein, 415 aa, Streptomyces sp.
MQLRYNYRVYPNPAQRAALAKAFGCARVVFNDGLRVRQEAHAAGLPYVKDGELQKQVVTVAKRTDERAWLGEVSSVVLVQSLRDLHTAYRNFFSSLTGKRRGPKVAAPRFKSKKDRRQSIRLTANGFSFRGNGRLYVAKVGELRVRWSRPLPAPPTSVTITSDAAECYWASFVVEVAPEVLPEAGADTGIDLGLRHFAVLSDGSKIDIPRFFRRAEKKLKRMRKSLDRKVQGSRNRAKARKRIARQHARVANQRRDWHHKLSTRIIRENQAVYVETLPVGGMGRTWLAKSVYDAGWAAFVGMLEYKAAKHGRTFVKVDRAFPSSQLCSVCGHRDGPKPLDVREWTCGRCGSVHDRDHNAGKNVLFEGRRIVAAGQAETRNALPSAGKTRAKAVAQRVEAGSRREGLATRTGVLVP

SEQ ID NO: 10989 - protein, 439 aa, Streptomyces sp.
VIRTYKFLMRPTTGQQVALGEMLRDHCSLYNGALQERRDAWRHVSKTSVTYETQSAQLKEIRAFDPERQGRWSFPSQQATLRRLDKAFAAFFRRIRSGDVPGYPRFRGMNRFATVVFPKDGDGCRWDSTPHDSVTRVRFQGIGHIKVNRHRLVVGKVKTVSVKREGRRWYVVLTAERTAPDPLPATGSVTGIDLGIANFLADSNGRFVPNPRHGRKAAAKLEAAQQALAQCKRGSNRRKEVAAKIGDLHRKVRRQRLDHAHKTALDLVREHDLIAHEDPKIRKMSRAPAPTPDPERPDAFLPNGATAKAGLNKSIADAGWGVFLTILHAKAESAGREVIAVDPRNTSRTCPECGHVSAENRPTQERFHCTACGHSAHADTVGALNVLRAGLARREASPAQREAPAPTPGRSHTGKSSSCGRAPRPGRHRPAPAGRPAGR

SEQ ID NO: 10990 - protein, 269 aa, Streptomyces sp.
MCGVVTGAGQVDGVKIAVRVKSVPDAVRAPVIGVTLRTAGEPANRVSQVAFERGVPREYELRKAPLNENPSGFIGVDLGIVNIATTSTGYRAAGRGLNRHRKRQLELRRKLQAKGTKSAKRLLKRRSRREQRHAANVNHIIAKQIVTTAERTGRGIALEDLTGIRDRVRLRRDQRAPPHSWGFHQLGRFIAHKALRTGVPLVYVDPAYTSQTCSEGGHLDRKNRVDQATFACRACGFLADADDNASHDIDRKGEAVWTAGRESRVPATP

SEQ ID NO: 10991 - protein, 296 aa, Streptomyces sp.
VHWFDTVDFPKDGDGCRWDSTPHDPVTRVRFQGVGHVKVHQHRPVVGKVKTVSVKREGRKWYVVLTAEQDRPEPPPATGSVVGIDLGIANFLADSDGGFVPNPRHGRRAAARLEAAQRALSRFPRTRRDKRTKNHRRAVQKVADLHRKVRRQRLDHAHKTALDLVREHDFIAHEDLNVRNMLKPSAPKPDPEQPGSFLPNGAAAKAGLNRSINDAGWGVFLTILHAKAESAGREVIAVGPRNTSRTCPECGHAARENRPTQEKFRCVSCGHTAHADTVGAVNVLRAGLVRREAHLA

SEQ ID NO: 10992 - protein, 443 aa, unknown
  TnpB Polypeptide
MPELPSTYIRSTSHSLKFANAGKRYAVVDFLTEYRKAVDVYVEVLWNCPREWTPGKILDVEHDYLDVPSMIGTTDIPIDTKLSGRALKCAATQACGMVKAALRRRKLDLEIRQKCIDDGKAIPKRVAYRLDHKPSMPKTANANAEINSICCSVQDGEHTTFSIWVELKSMFSCDEYARGYSIQIPLKRTKMDDKWRTGEHEVLPSILLSDDAIHIRYRRPVPECEGEKVTGLDQGVRRMLTASDGTVIPDEDHGYKHVLQKIARKKRGSKAYKRALKERENYVFHSIKQVDWSVYKLINLERHFDIKRGKRTSRMLTAFSNPQIRDALYMRTTEEMGVPLQEVDNVCNSLRCPMDGWVHVKNRPKKGVVFRCCKCGYVDDADEVGAINANLHAQGLPDCSHALVFTWKLHKKSGFFWTKEGFFDEKGNPISVAGSSQSPAGQK

SEQ ID NO: 10993 - protein, 397 aa, Selenomonas sp.
MLRAVKIRLLPTKEQEILFWKSAGTARWAYNYFLEANKAIYKAWIENGKVGKRSASEGEVRKYINNVLKKTTHTWLKEVGSNVMKQGVKDANLALQRYFKGISGKPKFKSRHRSKISFYVNYESLVRRSNGFHGEKIGFVKTATPLPKIPKGKKYARPHISFDGRYWYISVGYEVQQEEAELTGESLGIDLGIKSLAIVSNKSATEIHFYKNINKSVEVRRLEKKLKREQRKASRKLEANIKSYDKKRRPRWIRPLRECKNLKKQNKKIQLIYKRLTNIRNNHLHQTTSEIVKTKPSQIVMEDLNVRGMMKNKHLSEAIAKQKFYEFKRQIQYKAEMYGIKIIEADRFYASSKTCSCCGHIKKDLSLSDRTYICPVCGAKLDRDLNAAINLANYKTA

SEQ ID NO: 10994 - protein, 393 aa, Bacillus sp.
MIRAKRVYFQTSKTNLQRLFDCNRESAKVWNDCLRHAKAYHLQHNGKWINKSALQVLTKGSYHLHSQSIQAVFEKYLFARDATRAALLKGIKTAKYPYKQKKHYNTKWKKDGFSVKENGTIHLSMGIHNGKREQPIVVSVNPATLPEGKLKEIELAWDNGLYLAISYEDGEIPMRHTYTHSAGVDMGEIHSIAAFCETGEALIVTGRKIRSIHQLRNKKLGELQRLMSKCNKYSRQWKKYNRAKQFILSKSSKQLQDALHKTTKNFVDWCLENEVKQVFVGNPEGVQRRKQKKRTKHVNQKLSNWSFGTLRAYLEYKLHAKGILLFLVDEAYTSQTCPCCQRRKKVRTRNYVCACGYEEHRDIHGARNILAKELYGKMCHIPEETKRKYLRIA

SEQ ID NO: 10995 - protein, 581 aa, unknown
  TnpB Polypeptide
LKQEPKRNLATYMTLLNTNDGHSCVLNEIMQEWLNYQTNRFAYLKKDNKLGSYNKKDCDIYRDLQTFDSDINGIFKGKKTTKFDARYSRAIDINIQARCSSLLELKKIEIEDKEIKVETINKKINKVQTKIDNVKKNPWFKVKNQYDRISLNTLKNKLVILNNKIESLKLDIKEKRFNGIVFGGNNLWKEQRKKHIDIKYWKEKWKNRGDEFECGGSKSEEYGNKKFHLSLSQYSKENPSKRAKFDLKIMLPYLVQEEFGKSMTIHDIYFENGEKLILDNVKNHEQYKNDLSNYNKEKKKIENIENEELSLKLLSELGEKPSNSHLKSFYYLIKRKGKKYYCHVTIEKDTIKNVTSDKNGVIGIDINYDNIAFANINRSGKLIYSKVLKFNFGHKNSSSHREQMINQSIKELVQYAKRKKKDVIIEKLDFSFKKSQSMKGNESDVDYNRMIHRLAYAKIKERIRIQCLENGVKLIPINPAYTSMLGRTLYTKPHGISVHEAASYVISRRHFNLKEEYKERKISFLYKDRACEIEIPERIFKEQEKLTSFKFWAKLYAWMKKEFKAPSRFYKKVIKSEALSC

SEQ ID NO: 10996 - protein, 364 aa, unknown
  TnpB Polypeptide
MPSYLRRAAIRHALGSVSSYKTRMDLWTKSGEKTGMPKLVYENHAMPVFYRGVMYREGAEGKEEAYLKLYDGHDWKWFCVRLNHTDMEYLRKNWSGKKASAPTLEKRHHKYFLRFSYTEEVTLTKTPVKEQIICSVDLGINTDAVCTIMRADGTVLGRKFINHPSEKDRMYRTLGRIRRFQREHGSAQTQGRWAYTKRLNTELGKKIAGAIVRYAEENHADVIVFEYLEMQGKISGKKKQKLHLWRKRDIQKCCEHQAHRKGMRVSRICAWNTSRLAYDGSGAVTRDWENHSLCTFQTGKRYNCDLSASYNIGARYFIRELLKPLPATERSLLEAKVPPVKRRTSCVYADLRKLYSEMERLKAA

SEQ ID NO: 10997 - protein, 423 aa, unknown
  TnpB Polypeptide
MYSIPVSDPRVSELITWYLETLQKAINIIWESIEWKYRFPRVEEKKGKLRVRVPDKLKVPELPKSKSFKKKLRDDLLRECPYAKHWVDAVIRTAYSIMKTWRKRYLKGRARKVKPRAKKRFARCKITLMKVNYEEKKIRITVKPGEYIEVSWSSRWFTRRVEGWRVGEVVLKDDRVLIPFKSTRIMEVRNVVAWDSNELSLDGFSPRTGFIMVDLKPLQSMKITYERKKRIAQSKGLKSIYEKYVTREHNREKDFMNKLAKGLTKLLPNTIHVFEDLGKEDLVSRRKTPKDRRKRNARTPWKLIQKKLSEKAITVKVSPKNTSRTCPRCGCVVKTRVGRLFKCPRCGFELDRQKLASINIYLKHSKMRGFPHSDEPEKTMKEELWVGVTPSGRSPMIWIPMKRGPESDEAKGRELGIKQYQAL

SEQ ID NO: 10998 - protein, 399 aa, unknown
  TnpB Polypeptide
VKLAFKYKVNPTQKQQTELQRHFKIHAKIYNKSLDTLDNSQEWIPKYKMYNKLTTWKQNHEEFTTVHSKAAQQTIGRIYRAIQGLSKQKQKGRKVGKLRHRNKLSSIEYNQSGFTINENTIQLSKIGDIPITKHRPVTGEIKGVTIKQSKTGEWFVSVITEVETPSEIPIKDIESENVVGIDVNVSNLFADTEGKKLESLYKFLKPELERVKKEHQNLSRKEYKSNNWKKQKQKLSKAYTDLVNKRDDILHKLSNWYVTEYDLIALEDIDSKELSEKSNGLGKYIREQAWNRFAEFVSYKASQAGNHVLQVDPSYTSQDCSNPDCDNREKKSLSQREHDCSECGLELDRDVNAAWNVLFKGLDKLGLGWSELTPAETETTNDTRYVSLRTVVETGSPDP

SEQ ID NO: 10999 - protein, 393 aa, unknown
  TnpB Polypeptide
MKAIRTKEVNENVKAANSCLRKAKRQAKELAVFTGEVVRLIDKEGHSLQGFFNRVEFVLVDGTIKFRVVINPILECENCIMASCHEDYLYEVQVLDPNIKRLKSIIRSLKFRRNRNEFKLKRKMPSVCFGGKKNLKNCDLETYRFKRARRMLIPGRRQGKYSNNLFKLNVDNDMLTYRSTQKDIVFKVQFHKYKNELYARVNEKHNSPDKAVAYELMDYGEYFIVKAIFEKHMNLPKTNTLYGAIGIDINVDHIALCETNKDGNIVLIKKYPIHKENTKNKRNEELYQLAIEIMGYCKSKKKSLVVEDLNFKQLKTRMLYRPKKQNKTLSSFAYKKILEKVERKCLMNEVDVIKVDPKNTSKIGKEKYTKIKGLSVHYCAAYVINRRGMGFVD

SEQ ID NO: 11000 - protein, 294 aa, Acinetobacter sp.
MKTLKLRIKDKHCKVLDQLASEVNFVWNYVNDLCFKHLQRKQQFFAAYDIAKYTKGASKECNLHSQTIQAVTEELVTRRKQFKKSKLTWRVSNKKSARRSLGWIPFKKVAIKYADGYVQYGKHQFKLWDSYGLSKYSIKTGSFVEDSRGRWYVCLVVDSPKQDKPTATKAVGIDLGLKDIATCSDGTIISNPKFYHQYEQKLGIAQRARNKKRVRALHAKIANCRKDYLHKASTQLVKDNALIVVGDLRANKLVKTKMAKSVLDTGFSALKTMLKYKCENAGVMFEEVNERFTT

SEQ ID NO: 11001 - protein, 460 aa, Acinetobacter sp.
LKLTRIHHCKNLNVQKYKQLEKQAVLLGRVRSEVWAKYGAVAGLNISDRAIRDAWMKESRDFGVSANAWKETLRDCVGDIKAYREASKDKVKQAIRKRTSCNNEQKRLYTLLKKDEWMTDNFLHRQMRNHFKHGVNHTHNQIIVRADMCKTFELNGQCWLKVPSLVPRQTIKIPLNTTVDFAPQGTLRIILKNGNIEVHSTYDAVETQDCGQETVGVDKGYSEAFVDSDGDVYGSGLGKLISSESDYLNQKYKHRNKLRAIAKAKPHKKQKIELNNLGRKKLDKRQDTQKAKLKTLIFTATHKLVDKAKVIVAEDLTSPIQSKRNYGKNTNRRLNTWAKGLLANALTSISHRRGSTVHLVNSAYTSQSDSFLHGLLIGTRKGDRFHRFNGEVVQADWNAARNVLARLNDNEISRYTPYKTVKRILQERTDRYKSELTDSGSSYTLGNKTLTECELVLEYV

SEQ ID NO: 11002 - protein, 450 aa, Frankia sp.
VIVQLRYGFRLYPSAGQRVALARAFGCARAVYNDALRARETARAAGLPFPTSGDLSKLLITEAKKTPERAWLADVSAVVLQQSLRDLDAAYRNFFDGLKGKRPRMGAPRYRSKRDTRQSVRFTANARWSLTSGGKLRLPKIGDVGVRWSRNLPCVPSSVTVIRDSAGRYFASFVVETDSEALPPVQPEIGVDLGLTHFAVLSDGTKIDSPRFLRRAEKRLTKTQRDLSRKKKGSANRAKARVKVARAHVRVADARREFHHQLSIRLIRENQAVAVEDLAVKGLARTRLAKSVHDTGWSRFVAMLEYKAARYGRTFVRIGRFEPTSQVCSACGVKDGPKPLAVREWTCPACGAGHDRDVNAAVNVALAAGLAVSARGAQVRPAYVPAPRGETGTHPKLTPTAAAQQAGISAPQLQGGEEVKRAVPPGGRRGGAAVRAGAATHAGPTVPRWP

SEQ ID NO: 11003 - protein, 262 aa, Blautia sp.
MEEYGSGLNYNLLWSSIYYSTTYLPVTKDGYVIKSGSVSMKADRFYVSVLVEISDNKISSHYSEGIGIDLGLKEFAIVSNGKRYKNINKTARLKKLEKQLIREQRGLSCKYENLKKGESTQKSNIQKQKLKVQKLHHRIDNIRTDYINKTIAEIVKAKPSYITIEDLNVKGMMKNRHLSKAVASQKFYEFRVKLQAKCKENGIEFRVADRWYPSSKTCHCCGAVRKDLKLSDRIFRCGCGYIEDRDFNAARNLRDAVTYKIA

SEQ ID NO: 11004 - protein, 404 aa, unknown
  TnpB Polypeptide
MTETSKLLKKGFKFPIYPTAEQQELINQTFGCCRYVWNKVLEAAVHEYKQYLEMSKDTRQSVLIKPDVSGYGFCERLPAMRRDPKTPWLSGVSSAALQQTMLHLGGAFTRFFKEKRGYPKFKKKHGKQSFSLTKTAFTLNQSGFFIAKCKTPIKVVFSRQLPSEPSSLTISRTATGKYYVSFICEYQPVKTSGQGRIGIDLGIKDFATLSTGQKFTNPKYYLKAQRRLKRAQQTLSRKQKGSSNRHKARISVAKIHERVANTRMDFQHKLSRQLVNDNQVIAIEKLMVVNMVKNRKLAKHISDAGWSSFTNMLNYKAVESQQTTIFYVSTWFPSSHFCSVTRERLNRKLSLSERAWDCPYCGQRHDRDINAAINILQEAELNLVVKFKDLSEVAGRVVLANTVH

SEQ ID NO: 11005 - protein, 384 aa, unknown
  TnpB Polypeptide
MKRTYQFRVYPTTQQIATLTQWLATCRMLYNNSLAERKDAWQTHQHSVSYYEQATKLKAAKQTNLCLKAVHSQVLQDALRRLDKTFANFFRRIKKGEKAGYPRFKGKYRYDSFTYPQSGFTIDYQKKKLHLSKIGSIAIKLHRPIPAAGVIKTCTITRDVDHWYACFAVVLPDPASGTRQRGITKAIGVDVGLTSLLTLHTGDTIDNPRWLRTSEKQLAKEQRRQARKVKGSHNRHKQNTKMARVHRKIRNQRKDFHHKLSRKLVDSYDLIAFEKLRITNMVKNPHVAKSISDAGWGQLMCFSEYKAEEAGTLVEYVSAYNTTQLCSRCGKLVPKTLATRIHSCPYCELDVARDHNSAITILHRSTHFIDSRSSSGQGLPVEPV

SEQ ID NO: 11006 - protein, 305 aa, unknown
  TnpB Polypeptide
MFVSLQFKLELKREDREKLIKLMRKQSSAIRVAYNMLRKLEKEKTKNPFPYTVELKLRDGEVYGNVSFELPTPEVRYTKEKGVIAIDTNASPIHLAMAEVSKTGELLSYQTISLHHLIGLSQNSKDHQEWILAHQIVDLAIQKGKAIAIENLKKLKKGMRGDEKAELRKRLHQWNAKKFLQKLKRVATLKGVEVVEVNPAYTSVIGMLKYAPQLSVDKDVAGAYVIGRRALGFKEDMPENYEKLLKDKAYLEFALKRYEEREKKLRELLEKEGNEYKRNTLKSELRSVENARKLLANLIQSLQSE

SEQ ID NO: 11007 - protein, 518 aa, unknown
  TnpB Polypeptide
MFVSLQFKLELRKEDREKLIKLMRKQSSAIRVAYNMLKELEEEKAKNPLTQIYQRLRQLFPDLPTIYIASAIYKAKQYPTDKPVVFGSKRLFEKLCKNHLTGKVRERLKKQWRELRQGTLISIGSKSDKGNRLIRFENINGQLCLRITTGNREFIYAKVLREPSNSKDKWLTFMSMLLESWQTKNYFAYTVELKLREGEIYGSVSFKLPTPEVKYTKENGVIAIDTNASPIHLAIAEVSKTGELLSYQTISLHHLLGLSQNSKDHQEWILAHQIVDLAIQKGKAIAIENLKKLKRGMRGDGKAELRKRLHQWNVKKFLQKLKRVAMLKGVEVIEVHPAYTSVIGMLKYAPQLSIDKDTAGAYVIGRRALGFKEDMPENYEKLLKDKTYLEFVLKKYEEREKELRELIEKESNEYKRNALKSELRSVEDAKKLLTNFIQSLQSEPSSCEGAYGRNPEQGRGNKASSSAWQVLKVALLFPILGKVLPRDLSPLKPVLVEGAWDRVRSRLAPLEVGGASWS

SEQ ID NO: 11008 - protein, 447 aa, unknown
  TnpB Polypeptide
MVQLSKLTQTLSFGLDIDTGSGDDLQTGCLEARRIRNETNRLDGQGWEWDDIKSTVVTNADHVNNTTQLIVDKALGELETYLDNKDDGWGRPYPYIDGLYPMVMNHGEGYRLFLEDDTTVRFRITATRGTHVKGELRGSPDHFDRLRTAFNDEEWRVGTAEVVHKHDEWRLHVTITHETHRVASKHDADTIVGVDVNEDCLALAAMNRDGDVKDSVVFEYPSVKEQRHEFFTKRKRMQKAGQTGFESVVQTEERDYVHDALHKVSRQVVEWVSQFLDPVIVFEDLKDMRDSIDYGTRMNRRLHSLPFAALQDMVSYKAAWSGIPTDKADPEYTSQRCPRTECQHTERANRQKKRFKCLECGFQDHADRKAAVCVVQEWFDEQYGNVPPLDTLPQVKKVRRAASGPGGGADSHGPTPGSGVDRHGPSARDSQSQAREEFKSVASAVPE

SEQ ID NO: 11009 - protein, 218 aa, unknown
  TnpB Polypeptide
MLKDLKIEGKELVYSKALQMVNNQLWYNINSLHELKKKGKKVGKLRYKEILKIVNYNQSGFKIDGDKLILSKIGEIKVLFHRPLEGEVKGVIIKRGATGWYAIFQVEVEKKPLEKTGKVVGIDLGVEKLVTTSDGVVIENPKVFDKVERKTKFLQKLLSRKKKGSRNYEKVREKLAKIHEHVENLMSDYIHKVTSWLVEQYDEIYVEDLDVKEMVEDR

SEQ ID NO: 11010 - protein, 420 aa, Selenomonas sp.
MKMKRSFRVMLCPNKKQETRLFQYAGTCRFIYNWALAKEMEAFQKGKKRIGGFDLRKELTQMKKVPEYAWLNTVSNNVAKQAVKDLEAAYDRFFRIQRETNVKYTKKKLAHLARIGKKPTVYDMNGHPKFKKKGKTQPAFFQDGVKLQATETHVKLEGLAGSKKKNRQVLNWIRLAETGRIPSSKTYGNPRITYDGEHWWISVTVDVPDKEKKGIYGDGIGIDLGIKKLAVMSDGKELQSINKTKKIKKLEKVRRRLQRQVSRKYQMNKKGERYEKTCNLIKSEKRILRIDHKLSAIRRNYVQQATTKLVERKPSFICMEDLNVQGMMRNKHLAKAVQDQGFYEFRRETEYKAEALGIPVIIADRYYPSSKTCARCGHVKKDLKLSERTFHCPSCGQTIDRDFQAALNLKHYAEKELGIA

SEQ ID NO: 11011 - protein, 413 aa, unknown
  TnpB Polypeptide
MKKVKQEADIILSERHIISSSHPYFSECDHLTFLGKNLYNATLFYQRASFFKKDFQNYYAVNRVFTHENQMDYRALPAKVSKQVQMLVDKSFKSYFALVKKKIKGEYDSPVRIPRYLHKTKGRCTLPYPKDALSLKEEGMVKFSKTGIKIKTKVEKERIQGARIVPKGNHFVIEILYKKPKKQLVSDTIQKVAFIDPGLNNLMTVTSNAFSPLLYSGKELKSMNQLANKKLAQVKSVLSERGLYSSPLLVSIYNKRDRRIKDCLHKLSTHLVNQFVSHKIDTVIFGHNVGQKQDIKLGSVTNQNFVHIPFYQLISLLQYKCELQGIRFITTEESYTSKCSFLDLEEVTKQKEYLGKRVKRGLFQTKEGVRINADVNGSLNIGRKYLTKLGLYTEPLHKELVLHMANPKRICLA

SEQ ID NO: 11012 - protein, 346 aa, Sulfobacillus sp.
MLFAKKMRINVCERDAETLEFMQAKCRALYNWHLSQVKAGAQWSLYDAKRTLQQSRKTDPELNAVYGKLLQAVFFRLDEAMRGFFRRVKAGEMPGFPRYHARQKFFTLKYPGVYLRVEGNVLILPAGGRGAQKRFPDIRAHLTETPPMPFREVAITKDAEGRCYATFLLDVSESPKPADDGSAIAYDLGIKTLATGDSTTERFLHIGSFTTYRWYNKQLDDIRSLRSRCRKGSRRYRDLTQVYHRVSEKKRREQRDALHKASAFLTRPAENAIVIGDLSLQQMVQTLRKTQRTKGLNRSVQNEWGLFQFVSMLEYKARRNGKEFHTISERYTSQDCSRGGSRHAGS

SEQ ID NO: 11013 - protein, 423 aa, Calothrix sp.
MLVLEYKVKAKKHQYDAINEAIRTTQFIRNKAIRYWMDAPFGFNSLHPTETDRTATVSPREAKVNKIALNNYSTALRKEFKFVEELNSMACQSATERAWLAIDRFYQNCKKKVTGKKGYPKFQKDNRSVEYKTTGWSLNQAKRRITFTDKKGIGEVKLLGKWDIQTYPVKQIKRVRLLKKADGYYCQFCIDTDVKSESRIADGEIGLDVGLEYFYSDSNGNHEENPRFLRKAEKAIKHSQRQIYKKEKGKNQRRKARQRYARKHLKVSRQRKEHALVLARNVCKLNSLVAYEDLNVKGMVKNHALAKSINDVSWSLFRRWLEYFAAKFNSQVAAVNPRMTSQKCSDCGTIVKKSLSTRTHKCSCGCELQRDVNAAKNILNLAKARVGHTRSNASGLVTSTLIGVSLLEQVTRVKEESPAFTTK

SEQ ID NO: 11014 - protein, 358 aa, Calothrix sp.
MLLSIKTKLKLSKTQEIIMSKHAGIARFTYNWGLATWNNLFKDGLKPNKYILKKFFNNHVKPEFEWIKEKGICQKITQYAFDNLGDAFARFFSGKGGYPNFKKKGHHDSFTIDASGKPIPVGGKSIKLPAIGWVRTYEGLPYTTCKSITISRIADSWFIAFAYEQEHKPGTKQYDVVGVDLGIKELATLSTGVVFPNPKHYKTNLEQLRRLSRNFVRKNKGSNNRHKAKIRLAKHHARVVNLRKNTLHQITTFLCKNHAKIVVEDLNVSGMLSNHKLAQAIADCGFHEFKRQLEYKAKKFGCEIIFADRWFPSSKTCSHCGHIQDMPLKKRTYICGICHHLMDRDLNAAINLSRLAKA

SEQ ID NO: 11015 - protein, 399 aa, Calothrix sp.
MYAINRELKLNKKERSLMRGMAGFRRFVYNYALDLIMASWDFDDIKVGDSKRLDAIKKVFTQVTMNKPEYTWTKKYPSTVYQSAFQDLKNAFSRWRKGSGEFPVKKSKKKGDSFTIYKTSGIYPEKGKPAIPFTNRVVINRGKNIALPGIKASTPLGLRLKEGVNFICSSQTFTVSRTADRWFVSFVLDAEKVPPIIHPIEKIGVYLGVKTLATCSDGTTYAMPITTKIAKTKLQLLQWRNRNKVMGNKKLKIRASNNAQKFYTKVAKKHAHIASIRQDTAQKMTTDLSRKAYVIRIEDLNVQGMIANHKLADAVSNHCFYAIRRQLTYKQSFYGTKVELVDRCYPSSRQCCKCHHLQPMSLSDRIFNCQNCGHIQCRDENASINLENAPSNKVRLAQP

SEQ ID NO: 11016 - protein, 390 aa, unknown
  TnpB Polypeptide
MPTYTLELKLHTKRESDLRYLENYFREVARLSNTVRRFAIRQLELLSRDPAYKTLLAEYRQLEKGKGKTEVSHQLSVMVSSYGLTKYGLQKSALELRRHFTYVHADVYQKVCDSVWKGIEKVLYQDGKQIHFKRWEDFLSFEGKKNSTGIIYQDGKVYINCTPKHPKGGITLSMILPKDQGSDHWKYETTCLCDPTKYCRIVRKKFPTGWRYYVQLVQEGIPPQKHPRGIGKIGVDIGTSTAATVSDTACHLEVLGGNIATKEKEIRRIQRKLDRSKRATNPQNYKPDGTIKKGKKRWTYSRRYQKLRDQLKALRRKRAAALRQWQEQFANTLLEEGDTVYVEKMNFKGLQKRAKKTEKRHSQRCAVSLIYSIFCAQIMEISEPLLLFSG

SEQ ID NO: 11017 - protein, 340 aa, unknown
  TnpB Polypeptide
MKSITITAKVKLYPTSEQMMILNKTLSVIRDVLNFVSAFVFGREGIRYLELDHALYYPVRQQFGLRSQMTQSVFKTVLAKYKSMKSNGHPFSKVSFRNFEYDLVWNRDYSISGQSVSLNTLSGRLHIPFELKGMEHWFSAGGRFGTAKLICKNRKYYLHIPVTLEAENRNILNHIVGIDLGVNHLAVSFDDEGNTRFFSGRTVTEHVRLKSRYVMVSWAFCQFREMLEYKAALSQSEVLATDPKYTSQSCPVCGNTTKANHNRRKHEICRVYVYTRPIEADRLKLQKEEVESVMWIDYDECLSRIENHTLKNCLNVKELQMVKTGGQKVEGNSVDICRLT

SEQ ID NO: 11018 - protein, 484 aa, Lentzea sp.
VGSGSGDRRPPRRARQSWRKVPSGRRTRSPWPPVEALAFRPGTNPDSARSVPAQPGRSKHAVGRHAGRRRGRRGAPGRLWFVRTAYRCRAYPTLEQAAVVNRTFGCVRLVWNKTLAERNCRYRAEGVRTSYRETDAALTEWKRTEEFAFLSEVSCVPLQQTLRHQHTAFGNFFAGRARAPRFKSRTGRQSAHYTRSAFRMREGVLTLAKTSTPLRFVWSFGDVDLAALDPTMVVVSREPDGRWYVTFAVDTEPPAPAESAGHAIGVDLGLTDLLVTSDGERIANPRHLVRKARNLARYQRRMARCQRGSGNRRKAKAKVARAHRKVRNARQDFLHRTTTALVRSADVIAIEDLNVKGMVRNRHLARAISDAGWGELRRQLEYKCDRAGRTLVVIDRWFPSSKTCSACGHVLAELALSARHWTCPGCRTRHDRDLNAAKNILAAGRAVAGSTVSGDACGADVRRQGPSLPRSAVKQETRAARHSA

SEQ ID NO: 11019 - protein, 287 aa, unknown
  TnpB Polypeptide
MMIRKGYKFRLNTSPTDEALLRPFAGCNRFLWNKALALQKERLANKQGCLSYNKLAKILPAWKREHSFLADAPSQALQQTLMSLAKALSEAFDKKNPKQFLVFKRKFKSRESFRYPQGFEISNNRVFLPKIGWVGFRKSRHIKGKPKNVTVFKEIDHWYISIQTEIKVDVLVHPSTKAVGIDVGVKKLIALSDGTHIPPVNSFQSAQAKLARLQRRLAKKVKFSSNWVKLNKKIQKLHWHIANIRRDYLHKSSCALSKNHAIVCMEDLSVSNMTKSAKVLLRIPDVM

SEQ ID NO: 11020 - protein, 287 aa, unknown; identical to SEQ ID NO: 11019
  TnpB Polypeptide

SEQ ID NO: 11021 - protein, 168 aa, Fusobacterium sp.
VLNVGGASKEEEMKIIKKAYKFRIYPTLEQIIFFSKNFGCVRKIYNLMLDDRKKDYEEYKSTGVKTKYPTPAKYKEEYPYLKEVDSLALANAQLNLEKAFKNFLKNKDFGFPKYKCKSNPVQSYTTNNQNTIYIKDSYIKLPKLKSLVKIKLHRKIEGIIKSVTISKN

SEQ ID NO: 11022 - protein, 437 aa, Halomonas sp.
MIDYKLPHTEFAMKVLKAYRFKLKPTPEAEALLYRMARCGRLAYNKSLEIMLDIVRKELAFEGDRKSLYKALNDLAPKERIALAKRLPSAAGLNKQLTQWKKAPELIFLKEAYTDNLQQRQRDLRDKAIKDWCSGKRGFPVFRTKRIAHHSTMRFVNFPKYCALDQRRIKLPNKLGWVRMYQSRVIDGEPRNATVSLDACGNWHVAIMCAVDVKPTRVPDQGAVGVDMGIAKNMTLSDGTTFSGVRSFAASKDQLAASQRKLKHKERGSANWKKQKRKIARIHQRIADIRRDYQHKATTTICNNHAMVAVEDLRVANMSKSARGTVTQPGRNVRQKSGLNRSILDQGWYEIRRQLAYKMAWTGGLFVAVPPHHTSQTCPACFYKSADNRKTQASFLCTHCGYAENADVVGAINVLHRGLDLLEASNQSDLIRAGRRP

SEQ ID NO: 11023 - protein, 376 aa, unknown
  TnpB Polypeptide
VSLVQVKVRHAVKYRMYPSETQARLIDRTIGCARFIYNQMLETRIAIYKSTGETCNPTPAQYKDEFPFLREVDSLALCGAQMHLSAAYRNFFRDPGRVGFPKFKTKHRSRQTYTTYNVNNNIDLDEGGRHLKLPKVGSVRVRQYKNIPSGWKLKNVTVEHCKSGEYTATILFEYETQAPEPVTPVSFVGLDYSSRELYVSSDGEHANYPRFYRQMEPRLAREQRKLSRMTRGSRNWSKQKRRIAKLHAKVRNRRVDFLHKTANRLADQYDCVGVEDLDMRALSQTLRLGKSTLDNGYGLFRSMLANKLERQGKQLIVVDKWFPSSQMCSNCGHREGATKDLSVRNWSCPVCGVWHDRDLNAATNIMREAQRLSREQ

SEQ ID NO: 11024 - protein, 421 aa, Halovenus sp.
MHYAYRLRLKPTDQQREVLDYHRDTCRQLYNHALREFNKIPESAGTLNQRVRQVRDQLTNLKNWWDELNDLYATVTQATVMRIEDSIKALSELKKKGYNVGSLNWKAPREFRSFTYVQSGFKFDKKNGQTVLSLSKLADIPIECHRDIPDDETVKEVTLKKEPTGEWYTSLAVDDKEEPEKPSIEAIDADDMVGIDVGILKYVHDTDGTAVGSLDLSDERDRLERAQRNLSRKEHRSNNWEKQRQTVAECHQKIKRKRRDFLHKLSAYYAREYDLVAVEDLNVKGMLESPRNSLNTASAAWNTFTELLEYKCEREGTHFVPVDPKDTTKDCASCGVKTDKPLWIREHSCPACGFQADRDENAAWNVLSRGLSELGVGYSEGTPVETALPVGTTVVPAKRVLEAGSPCLKERAATPRVSRQG

SEQ ID NO: 11025 - protein, 403 aa, Oscillatoriales sp.
VFNLTYEFKLKPTAAQVTIFEDWLEQCRHVYNYALAERKDWFKSRSCQISVCSLRSEYIIPIETKRPTYASQCKSLTVARQNIPALKSVQVHVLQQTLKRLEQAFVSMWEQNHGFPRFKKAGTMRSFVFPQLNTQVVKAGMVNLPKIGWVKFRQSRDIPSDAAVKQARIVKRSSGWFVMLTLQWNVNVPDIMPHGEGIGIDVGILNFAAVSDGKLIPNLRPFKKLERKLKLLQKKVNRKVKGSSSRKKVQAKVSQLHEQIANSRKNYHWLVAHELCNRAGMIFVEDLNLKGLARGILGKHCLDAGWGQFFQILEQCCHKRGVFFLKVDSKKTSQICPNCLTETGKKELSERVHLCHHCGYTTDRDVAAAQVVLIRGLAAVGHTVKMLSEGKAVALPMKLESPP

SEQ ID NO: 11026 - protein, 314 aa, unknown
  TnpB Polypeptide
MLRAYKYRIYPTNEQKALFAKTFGCCRFVYNWALNLKITAYKERKETLGNVYLTNLMKSELKAEHDWLKEVNSQSLQSALRNLDTAYANFFRNTKAVGFPKFKSRKSGQSFLCPQHCSIDFAKGTITIPKAKDIPAVLHRKFKGTVKTVTVSMTPSGRYFASVLVDTVIQEQKTSEPVHDTAIGIDLGIKLLAVCSDGRTFDNPKNLQRSLEHLALLQKRMSRKRKGSANRNKARIRVARLQEHIANCRRDNLHKIAHALTHDSQVRTICMEDLNVKGMQRNYHLAQAVGDASFGTFLTMLEYKCRWYGGTSSR

SEQ ID NO: 11027 - protein, 220 aa, unknown
  TnpB Polypeptide
VDLGIKTLATFSDGTTEPNPRHLRSCLKKLKQLQRAVSRKPKGSHNRRKAAQRLGRLHRRIANRRANTLHQLTSRLAKTKAVVVIEDLNVAGMLRNHHLAQAIGDVGFYEFRRQLSYKAAWYGCRVLVASRWEPSSKICSGCGWVDEDLTLANRMFRCQNPACGLMLDRDLNAARNLATLAGSLSERQNACGEESAGLSLVAQVKLSPVKQEPDAFDASA

SEQ ID NO: 11028 - protein, 268 aa, Archaeoglobales sp.
MMPKAKTLRLWLTPSLSYRIKGNYVEVLGGYRLRILGWDRRYDQYPSGEARLVYKDGKFFLMIFKRVPRPSKHAQKGVLAVDVNEKEIVFGNSVVRERRKTAVDRALRYKRLAEKLQEKYSSDKYNAWLRRRSILKRVRHFHRKARNIIEDWAKKVSLEIAELAKRHQYAVAREDLTGLIERLRELPRDHKVALLILSYRELAFWIDWQCEKLGVPVIPVEPEYTSSICPNCSSRLMENGYRQLKCPGCGLEEDRDRIAVLNIEKRAL

SEQ ID NO: 11029 - protein, 249 aa, Marinitoga sp.
MNNIKYGYIFVPKFKEGIKVRIHRTLPDTFKIKNVTFEKTTTNKYYASIVMEVPDVQITNTSNYILGIDLGVKDTITLSNGEKYSMPNLKKYEKRLKRLYRQLSKKQKGSKNREKSRIKLAKYIEKINNIKKDWIHKITHKIVSENQVGKIVVENLNIKGMLKNKKLSKYIHWQSWNKFITILEYKAKRQEIELIKTDRFYASSQICHICGHKNEKVKNLNIRKWVCPKCGTENDRDINAAINLANYAF

SEQ ID NO: 11030 - protein, 337 aa, Vulcanisaeta sp.
LSGEAELAPALMIKRRLNKWYAVFIFELKPREEEPRSIVAFDINENTVAVGKIDLTSTVGMVTNWNRQYLTPQLYMIRTDFGRLARRYERIRSAIIERLKPGFALPSGNYVNVTNTREFRKQVRKLQERVRKVGRVRHVTNELTKTPSIIITEDLGDNPQEEMIEDVGKDELRHRIKQTPFKKLEEAVGDKALERGSKLFHVSSYRNSRVCPIHFARLERTDDWHTLQCPLGHYVDRDYASVLNMAWKTTPESWTKGVWWNMKQEMNWRKHEGKTNPIIPYEIVILLQFTMKRIKASEQSPAMPARGKPMNPAREPMKVAARKPPTPFQGREEVRHI

SEQ ID NO: 11031 - protein, 286 aa, unknown
  TnpB Polypeptide
MKILTSYSVRIQGYGSVLDDTVAVYRKAVDFFIAVIMANWALFDGLGQKDAQRECEKLCVSTATRPTVPHDFSVDFYKFPSYLRRAAINAAFGAVSSYKTRLAQWETNPQGKEPGLPKAGRIFPAFYKAQQFVWHGRYCIRLKVFIRNTWDWIDVGLRKTDVDYISLYCATRKELCPIVTKRGRVWSLDFAYEEKVDLNETDIEDQVIVAVDLGINNAATAVVMRSDGTVLERRFLRLPKEKDSLERALGRIGNAQRHGAKRMPRLWGRAKGINDDIARKNCGLHS

SEQ ID NO: 11032 - protein, 336 aa, Natronomonas sp.
MGNQKSEISDDGFELKNTSGRHATLVLSKIGDLKIRYHRELPADADIKEVTIKEETTGEWFVSFGLETDEADLPEKPDVDSLDASNSVGIDLGILNYIHTSDGIAVDWLELEDEYERLQREQRKLSRKEEGSNNYEKQRRAVAKVKRHIRRKVLDYQHKITTWLVTEYDAVFVEDLNVTGMLQGDGNARNKQDAAWRQFITLLEYKADMYGCHVVQVEAAGTTKECARCGVETAKPIWVREHSCPSCGFETDRDANAAMNVLQRGFAELGLGWPESTPVETVTATDADDFREVSASHVVETGSPICSRARSARSHGQRDRRSRTTLRKRTASAVSE

SEQ ID NO: 11033 - protein, 376 aa, Tepidiphilus sp.
MKLTLQTQLLPTSEQAALLEATMRAFNEAANWLAGEAFARKTANKILLQKLCYAELRERFGLSAQMAVRCIAQVCEAYKRDKSKRPQFRPLAAVPYDQRLMSFKGIDRVSLLTLSGRILVPMVMGKYQQERFTAAKGQCDLVLRKDGKWFLLVTVDLPDGTKPPTTDFIGVDLGVANIATDSDGQRYSGNAVEAVRIRQHALRRSLQKAAAGKKRRGLRPKNIRRKLKRLSGKERRFRANENHRIAKSLVAKAKGTGRGIALEDLKGIRARTRFRKAQRARMGGWAFRQLRTFIEYKARLHGVDVVLVSPAYTSQTCAACGHAAKANRPSQAEFRCVVCGHTDHADVNAARNIRSIARAAVNRPKVSEQHQDLLFA

SEQ ID NO: 11034 - protein, 386 aa, unknown
  TnpB Polypeptide
MYKTYKFRVYPNDEQKILINKTFGSARYTYNYYLDKMINNGYVKPYANIQDYVDNLKYEATFLQEIDSIVIRQSLFNLDNAYQKMFNKQGGYPKFKSKYEKNSYNTVAVYSKCKDKEYCNIELNLQTRQIKLPKIKWVDIRGYRNTFSINGRIKNATISKEPNGKYYVSVLYEILDIDIIIRPRTIVGIDIGIKKLLTLSDGTTIDNNKCIEKYQKRIKRKQRELSRKVKGSNNYYKCKKELTILYSKLANSRKYYVHKITKNITDEYDIIACEKLKTKEMIIKGKENKLSTKINDATFSEIIRQLSYKVKFKGKNFYQINTYYPSSQICSRCDNQDKKYKNLNEREYKCIECGQVLDRDFNASINIMFEGLKLYMENYEKNYAII

SEQ ID NO: 11035 - protein, 447 aa, unknown
  TnpB Polypeptide
MSVQLVGSPRVLSDDVRTAKNEKIASAFKATKERRKRQTPRVVDLKIVTNKLSATQLEALERLFVEAKWVYNDVIGSGDVFKYQAPKKTVAVHAPEGVEQREFKVLGSQMKQSIVAGACSSVKTLASLKKKGKRVGKLKFKSKYTSINLKQAGTTYKIRGSKARVQNIPGWVRVRGVAQLEGTELANAKLVRRPDGFHLFVTTYRFTDEIPSQIKYEGVVGVDFGVKTSFTLSTGEKFDIAVGETERLKRLQRKLARQQKGSNNYKKTQDKISREYRHITNRRDDVANKLSHEILGYEQVFMQDESITGWKSKRGFVRGGRKIQRSVLGRVKTCLSASPRVTVLGKHVATTATCICGVKTKHTPDKRVFVCASCGYSEDRDVHAAKNMVRLSGVDNLELSTDRTELTPVELMTSACDVVGRELGSVSPHAQVRLDVEAGSHSPLGEG

SEQ ID NO: 11036 - protein, 401 aa, unknown
  TnpB Polypeptide
MPNKKVKRAFKFRFYPTPMQEEELLRTWGCVRLVYNKALDMRHTAWFKSHERVNYSHTSAALTQWKKQDELSFLKEVSSVPLQQCLRHLQSAFTNFFEKRARYPKFKSRKKSRLGLTYSSVGFRFKGDGLYIARLKEPLNVVWSRDFDRDSVSTVTITKDKAERWFVSCLGEVSVEKRCITGNTVGLDMGVKDTLVLSTGQKLSPRDDRDMKKKLAKVDKYQRRLSKKKIGSNNFAKAKTKLSKAHVQVVDARKDWIHKTTTQLVKEFDVVCIEDLNARGMTRSARGKGRKAKAGLNRRVLEQSFAEIRRCLEYKSRDCGGEVVAIDRFFPSSKTCSSCGYINKSLTLNQRLWTCPRCQEHLDRDINAAKNIHAAGLAVLACGDGVRPAKKPMALQVGSRQ

SEQ ID NO: 11037 - protein, 564 aa, unknown
  TnpB Polypeptide
MTIKTKKRKRETKTGLVKKKRKINDNSIQENKITERNRWCSSVKYISPFMTSVSFEQMNTLRRKNKSYDSYLKRTTKNSWFSVIQTKFNGKNTYLDDFLQDHFIKKEKIEDDKLKSKYEKIEKKDKKPKKKTNLKGKSNRTKKTDKKIDRKQLIENKRKQIEAREKQSAGQSRKIRLYPNKDQRKTLADYSGTSRWTYNQCVRYWYECDKDKNLYEKLDHLDSNTLRTKFKNKNSTYLQKYDWVFKVPACVRDESILQFIVSKNQAQNKYEKMKEENTGNVKFPQFEFKSKKNKLQESFYVPHREYYQNQFKWMRQIKTKEKFTLKHDTRVIREPTGKYFILLPEPLKQEIVAPLSDNQRVKVASIDPGVRTFATIFDNSGNAFEYGKGDIGRIFRIVYYMDKLQSKMQMKKRNGSYYHNSKHRYNMKKALTKMRQTIKNMVKDFHHKVSKHMCLNYDLILLPEFNTSQMTLKRNRRIGRKTTRQMLTWSHYKFKQILLHKAKRYNKVVQIVREDYTSKCCSQCGNINYKLGGQKKYKCRQCGFHGDRDINASKNILMKYIIEN

SEQ ID NO: 11038 - protein, 476 aa, unknown
  TnpB Polypeptide
MNQENNKEIVKKNKIEEWKKLKDEQFKLQITTYKDTIVLPELNDINNKKTAEKFDIIDIIKTTPETKIINTELNIIFDKLYKDNTDLNDKLKKTLIYYIYPTEEQKKILLYWFDLYIYMYNKVLEKVKQIRKEENKKQNKMVKINELNLDLNLTKLKKEFSDLKKELSNKINPITKEKSKINKHILDYAIKDAISSINSIMTNLKNNHVKNTRLRYLKTTKNTKIIKIEKNICQLNSFCSSVLGKKINIKPDIKFNDITEVAILQYNKKKDTFRFLVKEKVEMKNENKINRKIIAIDPGFRTLITGISNEHIIEIGINPLKKIKPKIIKLEKIKNKKIKNKKRQLMKYEDKITNFIKDMHNKIVKKLTSDYDDILIGNMSTKSIVENEETRKEIKKEANYLKIYQLKERLKNKCIKENKRYKSINEYNTSKCCSNCGNKKINLGSNKTYECVECNKIYDRDINASKNILLKGMINK

SEQ ID NO: 11039 - protein, 486 aa, Oscillatoria sp.
MTSITYCKALPTPIDELNAIGKTQLEMFFSAYTPIFHKAVCETVNLMMSGEEFNKSDWNTHLQKTYGISKRHANGVISKAKGAVDSAKECRISHIKTLEGQAKSCEKWLKKAEKKLKNGRKFYAKKNWQNSKTGCVFPLSSSLKYRQTNWQNLRFQIHKKKRKLTRYRQILSVLKSIPVRVHVPNNQAFIVGSQDESYGNQVCQWDGDNLRFRVPACLESKFGKYVEAKIGDFPRNINRLPATGAKTWHFYHKDDKWCVAVSFTPSEVKQVSRSVDYGCIGIDINPGSIGWAYIDTEGNLKSHGKIPFQSGLPNGKQQAIIVKVCLELAALATKYQCPIVGEELDFSTKKEQLRERGKKYARMLSGWAYSEFFKLLNSIISNRGIELITVNPAYSSIIGLVKYLRMYGLASDEAAATVIARRGMRLSEKIPGSLTAFVEVNSRKHVWSLWNQLNKKIKLSGVLTNRHSYYAISNWDFLVNLDIEEA

SEQ ID NO: 11040 - protein, 251 aa, Microcoleaceae sp.
MKRLELVNSFATNRFARLMDGGAKSWLDLSKYCAIWASEFDFANKLGAMARQASAERAWASISRFYDNVKKGIKGKKVGFPKFQKDCRSVEYKTNSWKLSEDRKSITFTDKCGIGRLKLKGTRDLNFYQPDQIKRVRLVKRADGYYVQFCISVDRLETAPMTGKTIGLDVGLKEFYTDSNGETAPNPRFLRRGETRLKRAGRLVSRKVKGGSNRRKARVILGKRHLKISRQRKDHAIKLARCVITSNDVVV

SEQ ID NO: 11041 - protein, 423 aa, Lactobacillus sp.
MHKTMAQLPYHYGVKVRIFPSTEQKRLIKRNSDASRFIYNEMNGLKRELFMLRQVKIPIMLVKQRIQTLEQRLKNPATGISNIHGWLNDPDLDSLMKANAIKNYRYAWKLFRQVHRSGTPVFHKRRSEQKYQTSCQYDSKLPVKNMLNGSVRLLDRKHIRLPKLGMLRFKGMPAKLFVCRENIRIGTTTISMDATGRYYVSMQLASEQPFVTVTNSKESNPVGIDLNTDNFLTDSNGNVVANPRYYRSIQSKLARAQRKLSRRALRAKKEQRPLRDSKNYQKQRAVVAAIHRKVANRRNNFLHLVSTILIKNHDLVVAEELQSKNMLRNHALAMSIADVGWRTLLRMLSYKAALYDRKFITINPRNTTQTCHDCGFVMGTDNTEKLTLSDRKWTCPQCGTQHIRDWNAANNILDKGLEKLATK

SEQ ID NO: 11042 - protein, 372 aa, unknown
  TnpB Polypeptide
MQVTRHCAVTYRIYPDKAQAGLIDRTIGCARLVYNLMLETRIDTYNRTGKSCNPTPAQYKDEYPFLREVDSLALCNAQLNVAKAYNNFFRDPKHVGFPKYKAKHRSAWRYTTNNNNRNIRLIEGGRYLKLPKVGVMRARQHKTIPDDWKLKSATVEHLKSGGYTATILFEYETQAPEPVRPVHIVGLDYASHGLYVSSDGEQADYPRFYRQMEPRLMREQRRLSHMVKGSGNWVKQKRRIVKLAAKVRNQRADFLHKTANRLAARYDCVGVEDLDMKDMSQSLALGKSTMDNGYGMFRTMLAYKLERQGKQLVTVDRFYPSSQLCSDCGYRNKDTKNLYIREWTCPDCGVWHDRDVNAATNIMHETRRLVQE

SEQ ID NO: 11043 - protein, 418 aa, unknown
  TnpB Polypeptide
MRRKKKDTENTIPTITRAHKIRIYPNKHNQEVFQRYYDYQRSIWNRAIDERNTQYKIYKEMKATGLYTQKELNKNYFPNTNNLRKMEKFDWEANFYCLVREIQFDNLCQAWNNYFNPNMPNHKKPKYKKKKDVENHKKLSLRKIRTKGKWLLLPNSRYSKPEYRFTKIKMAEELRFNGRITDDFTVSVENNKWYVTITIETPFEEKVALTKQSTGIDVNVGSIDYLKKDGQNKEYDKFYLLSKSLLRQYDKIKYYSRLIVKKRNKNPYYKYSKSYKEAITKLNSAYTKAYNIQEANLNNIVKYFFNNYNRIVIEDLDVNSMKMNKRLCKSLHRNAFGRFKQKMINKSKEYNVEFILADKYFPSTQTCSECGHVKTGDEKLFLWGDKYGNDHNTYVCYDCGTIQDRTENAILNLNHYGK

SEQ ID NO: 11044 - protein, 370 aa, unknown
  TnpB Polypeptide
LIKQKTYKFRLHPNLEQRIFFEKTFGCSRFIWNQMLADRIAHYENTGTSLNNTPAQYKKEFPWLKEVDSLALANVQLNLNAAYKSFFQSGFGFPKFKTKKTVQSYKTNNKKGVETIALLDGKVKLPKVGWVKLKLHRQVKGVIKSATISKTATGKYFISILCEEEVSPLPNTDSNLGIDLGLKNFAILSTGEKIENPRFLTSLSKKLAKEQRILSRRGLLAKEKGVKLSESSNYQKQKLKVARLHEKIANQRKDFLQKLSTNLIKNHDVICIEDLASRNLMKSHHLARAIGDASWSEFVRQLHYKADWYGKKIVTISRWFPSSQLCSHCGESSGKKALSIREWTCENCGTHHDRDINASLNILKEGLSLA

SEQ ID NO: 11045 - protein, 211 aa, unknown
  TnpB Polypeptide
MEETYQIHENFLYLENKIFRGMDQIKQLRIYPPEKGSCKIIVVYEVPDQEELPQNGHELSIDLGLHNLMTCYDSGNGKTFILGRKYLALERYFHKEIARVQAQWYGQQSGKGVKHPVTSKHIRKLYKRKQDSVTDYLHKITRYLAEYCREQGITCVVAGDIRNIRREKDLGHRTNQKFHSLPYNRIYIMLEYKLKRYGIRFINSLQIKSQG

SEQ ID NO: 11046 - protein, 343 aa, unknown
  TnpB Polypeptide
VRTGGIQRRAARPAGSLRRRAAVPHRRGVVGPADRGQGQPGPGLAGRGVRSGAPAGPGGPERRVPELLGLPGRPAEGAEGRAPRFRSRKDRRQAVRFTANARFSVTPGGKLRLPKIGDVPVRWSRDFPSAPSSVTVIKDAAGRYFASFVVQTVPDTLSATEPVIGIDLGLTHFAVLSDGRKIASPQFLRRAEKKLRRAQQALSRKEKGSRNRDKARIKVARAHAQVADARREFHHQLSTTLIRDNQAVAVEDLAVRGLARTRMAKSVHDAGWSAFVAMLEYKARLYGREFHRIGRFIPTSQTCSACARAPSLRCHRPSRRAKLTAGDRWPSFSARTNRGCQFL

SEQ ID NO: 11047 - protein, 443 aa, unknown
  TnpB Polypeptide
LERQQNPKKLIFGSRTLFEHLKKKHLTGVKREKIRQKWEEKRHGILYAIGQKASKGNLNIRLVNLKSQWHLRINLGNGEYVWAKVVRSAKRKTDQWVGFISDLDQAEKTGEWFPYTVRLKLRNGKIYAQFSREENLPEVTITKDNGVIGIDINAYPFHLALVHTAKDGNLEKYERISLDKLLEGSSEKREYSSWQTSHQIVEIAKRERKAIVVENLEKLPKGKRGDGLPKLRQKLQKWVYKALLQKIEIVAKRNGIQVIKVNPAYTSIIGKLKYAPLHNIDKDTAGAYVIARRGLGFKERLPKNYKELLKDPEFLSYTIAKIENKITKLKQEIREEKNEYKRNRFKSVIWKTRKELDLLLIHFRGSGESESAAQQAVNRELKPMRGRVQSLQKSWQVLSVAFAFSCLESLRDFSPLKRVLISRDWVGVANKASPSLLGQGTTI

SEQ ID NO: 11048 - protein, 405 aa, unknown
  TnpB Polypeptide
MQRKPTLKAFKYRIYPTDAQVLFFAKTFGCCRFVWNKMLEEKLEAYKKKERIPRIIPAKYKEEFPFLKEVDGLALCNVQLQVEKAFRDHFRNRKQFKLPKFKKKKDKQSYTTNNTHDSIRVDFERGLLYLPKLREGVKVELHRRFDGKIKSVTVSRTNDGKYYASILVETEDPKNKVVEPKSKACGIDLGLEHFAIVTNDFGNYKVEHPKYLRRGEERLKRLQKSFSKKQKGSKNSEKARLRLARQHAYISNARNDFLHKLSKAIIDENQVVVVEDINVKGLLKTRLAKSVSDSGWSKFVTYLKYKAEWYGRTFIQVDRFFPSSKVCHRCGHKKEDLALNDRTWCCPGCGENHDRDVNASINLYLVGLGRPEVTPVEQALVDDRSPNGLPKKPSCDETGSSTTKG

SEQ ID NO: 11049 - protein, 305 aa, Cyanobacteria sp.
LKFEGRARFPRFKSKHGKQSLQYPQSVKLSDHSLYFPKIGWVSAKIHRTFEGKLKTVTVSKNKRGHYYASLLFDDGKPEPQISTQGKAVGIDLGIKEFAITSDGSKFSNPKHLPKHESNLKRKQKKLSRKKKGSTRRQKARQKLARAYEKVSNARQDFHHQLSRKLVNENQVIIAENLNVKAMLRNHKLAKSIADCGWGTFLNFVSYKAKEDGKTFLEIDRFFPSSKTCNHCLNVVDSLPLDVRNWTCQSCQTQHDRDINASINIRDEGLRVLASGTEATASGGNVRPARGRKSSVLANAVETGS

SEQ ID NO: 11050 - protein, 221 aa, Natrinema sp.
MGMAEEVAKTLEATLAPPTQGKGVRLRRLLSTYREALHDAFDSGADTMNGVSDVVTPFDLPYQAKAALCSYVPKLRKTYNARELDDEHPIRLTNQAAKFDRDESRHHEICWNVPLPGYGTNFWIPLRINPEQEPLWHDLLSEDAKAGQIRLQQNRSSWVLHVTVTYSVEEPETDGDETYIGFDIGESALITGCASSATRRRNRCSKVAVKRDTSARRCSRR

SEQ ID NO: 11051 - protein, 366 aa, Ruminococcus sp.
MKANKSYKFRLYPNMEQQILFAKTFGCARFVYNKMLGDKIEYYQSTGKMLHNTPAPLKEEFPWLREVDSLALANAQLQLQTAYNNFFRNTSIGFPKYRSKKSGRKSYTTNNQKGTVRIEAGKLRLPKVGFVQIKQHRQIPEGNTIKSVTISQEPSGKYYASILTEYETEEQIVMLDAEKSIGLDYSSPHFYVSSDGEIADMPSFYRGAEIKLAREQRKLSKMTKGGSNWKKQKIIVARAHEKVRLKRKDWQHKKSAELAEQYDYICVEDINLKGIAQGLNLGKATNDNGFGQFLEFLSYKMAERGKKLITIDKWFPSSKTCHSCGFVNEELTLAIREWTCPCCGEYHDRDINAAKNIRKQGLSIIA

SEQ ID NO: 11052 - protein, 371 aa, unknown
  TnpB Polypeptide
MAASVRKTYKYRLSPTPDQEQALDMVLWRCRTLYNTALEERKTAWERRHVSISYYQQKAELPDLKVACPEFAEVYSQVLQDVILRVERAYQRFFQRAQDGKKAGAPRYQGRGRYHSFTYPHYGNGVTLDGGLLSLSKIGRLRMRLHRPLEGTPKTVTISREADGWYACISCEGVPIQPLPLTGQETGIDVGLKVFLVTAQGLVVENPRHFRTSERRLKRADKAVARCQKGSHGRRKALARRAKVSQNVKHQRRDFHHKTALMLVRQYDVIYLEELQIANMVRNHHLAKSISDAGWGQFRSILASKAAYAGKRVEAIPPAYTSQDCSGCGERAPKSLSVRTHVCPSCGLVIDRDENAAMNILRAGQARQALT

SEQ ID NO: 11053 - protein, 466 aa, Paraburkholderia sp.
MSTLTRILHAAPSSLPALRAISKVMAFVRADLWRRYGALGTIGKNAATIRKEVTAGGWYASLAVDGTIRAETTKDVVNDILTYKAAACAKVRQAIAKRTSDEAERKRLFTLLRRDQWLDDPYLHRMMRKYFRHGVSHCDNQFIVRSDKHESRVSNGRLVVTIRIASQYGTPIVLTTSSNGKNVDLTGCNLRVILKGDSVEIHYATGKPEGRPCGTAEIGVDKGYTEAFTDSNGEHHGEKFGAVLTAYSDQVSTTGKARNQLHALEKAHREAGRTAKAERIKRNNLGRVKLKARRDRAQKRLRTIAYQAAHTIVDKAAVVGSEELTSPIRRKVQWRNYNRRMSAWAKGVLAQALEEVCTQRGATHVVVNAAYTSQMDSFTGLLEGKRVGDKFHRINGDVLQADTNAARNVKARIRDQEITRFMPHVAVKQILLARSSGATERQSASVGRKASQSPRQRSADKSTAQL

SEQ ID NO: 11054 - protein, 384 aa, Clostridiales sp.
MLIPNNKQKTKLFQYANTARFAYNWALGREKENYENGGKFISDRELRKEFTQLKKTDEYSWLNNISNNVTKQAIKDACNAYKRFFKGYSRFPKFKSRKFSTPSFYQDDVKIKFTNTHVKIEGFALSRKKNKQKLNWIRLAEHNRIPIDCKYTNPRIKHDRLNWYLTIGVECKDSIASPLNEGIGIDLGIKDFAICSDRSVYKNVNKTQKVKKLEKQKRRLQRSVSRSYEKNKKGVSYCKTNNVIKKEKLLLKLNHRLTNIRHGYLHQITSEIVKREPSFIVLEDLNVKGMMKNKHLSKAIQQQGFYEFRRQLEYKSAWNNICVIIADRLFPSSKLCSCCGNIKKDLKLSDRIYKCKCGNVIDRDYQAALNLKRYGDNVVKQSVM

SEQ ID NO: 11055 - protein, 481 aa, Nonomuraea sp.
MRNATFSSSRHTNSYQGDGKGAVMQVVQAYRFALDPTPAQASALATHCGAARVAFNWGLAVVKANLGQRAAERSYGIPEEWLTPPSPWSMYALRKAWNQVKDSVAPWWRECSKEAFACGLERLAAALKNWSDSTKGKRKGRRMGFPSFRSKRRSAPSVRFTTGAIRLHGRTHVVLPRLGRIKTHESTRKLARHIEAGTATIASATVRKEAGRWFVSFSVRLRRPERTPARPDAVVGVDLGIATLAVFSDDRPPIANPHHLAGAAKRLRRLSRTVSRRIGPDRRSGRRPSRRWLRANAARNRAHHRVAALRRDAIHRLTTDLARTYGTIVVEDLHVAAMVKNRRLARAISDAGFGEIRRQLGYKTVWNGGRLVVADRWFPSSKMCSACGVARAKLPLSARTFRCEACGLTLDRDRNAALNLASLVQHVAGSGSETQNGRGADRETPPGGAGGREASIPRRATGQDGDLHPAMGESLRIAEIQ

SEQ ID NO: 11056 - protein, 318 aa, Thermococcus sp.
LARKNAESWRSFFRLNKKKKTGELPEWFRPRPPGFVREENGRKLFVIPLRNDQYRIGGNVIELRRLGKFGKLKIQFKGRIHLTGKQGRLEITYDPVKRKWYAHLSLTVGEKLEGGEWVSVPRTPKGSLFAGIDLGVNNLMAVYVENGESFLVNGRPLKSIDFYWREKIANYQSKLNKSGAKMSRKLKRMHERAKLQAKHYINTAVRQTVRRLYELGVSKIVVGYPKGIARNSDKGKKQNFLLSHVWRFNYVIKRLTEVAEEFGIFVEVVGEAFTSQLCPLCGQRHPNGRIFRGLFKCHGEGVVMNADLLVPSTFWRRR

SEQ ID NO: 11057 - protein, 408 aa, Thermococcus sp.
MTHDWNVEELLTAYRRILQRAIDEIWENTTWKEKKVKHRYSIGNGKYKYYETTRLIPYFPKSSEFKRELRNKLLKNWPFAKHYVDSAIKTAYSILESWRQNYLKGRRKRRKPVVKRKFVRVKTTLMKVEGSKIRITVKPREEYLELDYSGEWFYERIAGWKVGELIIRERDVYLTFSKELEFNGRIKLGIDSNLMSFDVYHPEKGWIKVDLSELHRIAETYDGIIDKLKSIQRKAPKRIGMLLRKYYARRRNRIEDFLNKLAVQLSREFPDTVFVFEDLNKFKMLENGSRKFNRKLSHSTWGKIVRKLSYRVPIEFVNPAGTSSTCPVCGSRLESRNGLVECFNCRFKADRQFLGAFNVFVRGVGVALSGGEARDLLSNEPGGELRLMSPKSVVRVDLNGRTFIHVPP

SEQ ID NO: 11058 - protein, 331 aa, Okeania sp.
IYMKSIRTKLKLNNKQKTLLAQHAGYSRWCYNWGLSLWKAAYRDGYKPNTRKLREVFTNHTKPLYPWMKNLSSRVYQYAFIHLGEAFKRFFKGLGKYPKFKKKGRSDSFTIDNCGKPIELNGWSHKLPFIGIVKTYEPIEARTKKSRLAGDWYLSCSYEFHPTTIPQKTDVIGVDLGVKTLATLSDGKVVTSVRAYRQFEAKLSREQYLNRHKEVGSANWKKAQQKIARLHRKVANIRKDALHKLTTYLAKNHGRVSIEDLNVSGMLRNRKLAKSIADQGFYEFRRQLEYKCKWYGSKLVVVDRFFPSSKTCSNCGHVQDMALHLRTYDCP

SEQ ID NO: 11059 - protein, 455 aa, Desulfobacterium sp.
MLMGIKLQAHPTKDQKIILSQWMGNARFIWNAKCQDNKYLTNFARKYLPVNTYAPIDQKYSLYKDKELSPWLFNCPSQILRNSAANWYDTYQHFLKGLCGKPRIKNKRDGGSIHLTKELFRFEKCEDGVTRLFIGSKRNNIGYLSIKTHRKFKEPKSIYIKKQNGRYAVSLVFNDGIDESGLNDQKEALKILSQCSQEDLERMTIGIDRGVVRPVQAGKECFDFTPEQKRKKKGKEKYLKRLNRQLSKQKKGSRRRNRTKNKIARAHEKIANIRKDFCHQTSRKLIDKPAIKVYVFEDLRTKNMTKSAKGTIENPGKSVNAKAGLNKAILDKGWHMIEAFTKYKAYRAGKVTFKIPAAYTSQECAACDHIHSDNRRSQELFLCLNCGNTDNADNNAQKVIKKRAIKLILDSGTELSKRGVLLGIGCGAKGKTHKPKGICAHGCETSKKKELGRAA

SEQ ID NO: 11060 - protein, 434 aa, unknown
  TnpB Polypeptide
MGFYEAVKVRLDPTPKQERLMVSHAGAARFAYNAVLAHVKEGMDSGEPPQWSHYALLRWWNANKDTLAVNRDTGVVWWNRNSKEAYNMGLYGLARGLSNWVKSRKGQRKGRRVGFPKFKSKNTTMRFAYSTGFTAPKFSDPYGLKLPRIGRVHCTENVYKRVDGARVIRISVSRRAGRWYASLTVEREPTVKPAPKGGAVGVDLGVKHLATLSDGTVIPNPRALGTRLKALRKAQKSLSRKVMGSVRREKARARVARLHARVADVRADAINKATTMIASNYSTVCIEDLNVAGMVKNHHLARSVSDAALGEFRRQLEYKTARTGAVLRVVDRWYRSSKTCSKCGSVKDKLSLSERTYKCDNCGLTMDRDLNAAINICVAGSAPETLNARGEDVRRSDLVSGNADLGEARTKRSPAGGVRLGVGLGNEAIQLSVS

SEQ ID NO: 11061 - protein, 412 aa, unknown
  TnpB Polypeptide
MMRLNLQVKLYPTKQMRTYLDSQCDYRRYCWNKGLEVWNNFYDQRVISLPTELKLKIKESLTDKSIQFTEEEMNLRKEFPSPIERHVRNELVAHKSDWEYENSARVLQLAVKDLSDTWIRFFKKSQDSSGKPKFKSRKESKQCFKTDRARIQNNRLLLDKPRAYNGHWESIRFKGYSIPDGAIKLCAITRVKNQYLATLSIDVETTPLTPTGKVTAVDANVDHFDYTDGVCTLRPTELNRLYGKVKHYQRVLARKRQVNGKRGIHSKSYQKTRTKLQMTYSDIKHIQNDLLHKFTTMLYQNYDTVVIEDLSVKKMQMSKKAKGLHRSLLGRFRLFMEYKAEKFEKELVIADKYYPSTQRCSSCGHIKTGDEKITLAGNQKYGTRHDEYHCYECGYKGNRDYNAVLNLLALIK

SEQ ID NO: 11062 - protein, 235 aa, unknown
  TnpB Polypeptide
MNPRLTYNGLNWYLSIAVEIKNEIKPILTNESIGIDVGVKDLAILSNGIVYKNINKSKKVKKLEKKLKRLQRKSSKKYEKNKQGNKIIKTNNIKKLEVKIRKIHKMFTNIRTDYIQKTTTEIVRTKPSQIVMETLNIKGMMKNKHLAKYMQKQKLFEFKTLIKYKSNKYGINFIEVDRWYPSSKTCSECGYVKSKLSLKEREFICEDCGIVIDRDLNAAINLSRYSDNTVSYTEF

SEQ ID NO: 11063 - protein, 440 aa, Streptomyces sp.
VTTERAQGEWQFGHRARLALSPAQARLIDDQAHAARTMWNCLHAWWTMLPRERRSLAAADAVIRQARKEIDFLAVLPAQAAQAVLKTYLQAWKNCWEGRTGEPNFKARLRSVMSVDIPQGRDLQITRVHRRWGMVNVPKVGRVRFRWTRDLPVGRHASAGSRITGARLVKDALGWHIAFRVTTLEPRPEPHRGPEVGIDAGVNIPLALSDGNHQDHGRPARLSDKTSDRDKWLNPEEKAKLLRLERQAACLKQHRKPKQRSSNRLRAVYDQIGKLRAKAKRRATDWQHQTTTYLARTYSVLVVEDLDIANMTKSARGTIEEPGKNVKQKAGLNRSISQEAWGRTVTMLTYKTARHGGTLHKVPAPGTSRRCSACGLTTPGSRESQAVFVCKNPDCGWSGNADHNAARNVLHLYRTGHALVPTAGRAVVRRARRVKPATAR

SEQ ID NO: 11064 - protein, 527 aa, unknown
  TnpB Polypeptide
MSTQVFVLELPIKDSDDVVRFLNRKFDFALSLYNATLHTALGRLERMRNSREWREAILLPKGKERSRKLAEIRFSFGLTEFSLGKVTNDHRNGAKRFVRKTDPGAKRLKNECILGVEVAETIGSRVWRSVERYLFGKGGRPRFKSRRRGLHSLENKSNHANIIWHPKEKAFAWNRRRIPVEISSSDYIREALSDPLDPSKPRKFKYCRVCRRRIRGRRRYFLQLILEGHPPVRYIPGPKEKWVGIDPGPAKIACVAEDGVFLIPSSPASLNDHSNEKRRLAQLMHRSLKATNPDSFDASGAIKKGATWNCSNRFKKLVNQRNEIFRIETAARKTDHRRIANIIIQMGGTIKCEKNSYQSFQENFGKSVRKHGTGDLIQCLRRKAESADNADFIELNAYRCRLSQFNHVDGSYIKKTLKQRWARIGNTVVQRDAYSAFLAMCVIENRHDPRLLREKWPSVETLLRRAGLARDYNPAKDFDLSRSAIEPVFAAAFRQSGMHARIICAFGDSRSESVLGHPRRTNRKQIK

SEQ ID NO: 11065 - protein, 578 aa, Calothrix sp.
MAKSLLSELTHRSYSKTKNSDGTRTPQLRIGVEAKLPLHSFLSDWGDKYQSIMRTALNALQNGQSEDDIEKTFQSKFDIDWAWADSVASDASGTFDQLTTARDLRIKGLNDDLTAGWKSVASTIESMEQQLANPTRKNMKGFAKRLMGLESKISRLERKQAEKQELELAKRLHICFGSSKLFNAQYHLEENGYSSHAQWRVDWEKKRGGNFYSVGKGSVSGNNPVAKIFYINNDIFNVVFTVPRFLRGKYGDTVTLEFEVSAARKHNLLYALESGKPVTVQCFRREHKNDQWYIHLTTYVQDVPTISSISNGCIGIDLNAETIDVIYIKRDGNPFICRNPISFPIPTGTTGQKEAKLRDIVCEIVKLAEIYQCPIACENLDFSTKKNQLRHSGNQEYNRMLSSFIYDKFRSYLVVRAEKYGIAILFKSPFMTSVIGMIKYMAKYGLNSASSAAMVIARRAMGFKEYIPLSWLKTLSSFFKPEDSKDGGFGGGWRRISAWLKKFCIRRPRLFQLDTVLRFLLDSLVNESQKKTQTRRKPGGSNQSGGRRKGRGKPTEGQVPLEREEAVVTLNGAFTVAP

SEQ ID NO: 11066 - protein, 318 aa, Vulcanisaeta sp.
VARNIYDSALAIVKSARSNGSNKPRVRKFTARLDNYDAKVELDKGVVKVILRDKWYVLRLKHRREYIERFIGLRWKEVHVKYEGKRLFVSIVFEVRYEPYAPKGFMAVDVNLRMITTFNGTEVRRFRTRLIDALSKRARVEELQKKYPKRWRFNERILNRIKALHRRARNIVIDSSWKLAREIVTRAYKHGHAIILENLEHLRDSINEKNNDIRWKLTLFAYRKLQHAIIAKAIEHNVPVIIVDPRNTSTTCPRCGSRLTYIHRLAFCRNCGFIGDRDVVGAMNIWLRAVQACAGLPGSTQSASPMNNETRQSRGTKK

SEQ ID NO: 11067 - protein, 295 aa, Vulcanisaeta sp.
VELNKGIVRIILRDRWYVLRLRHRREYIERFLGLRWKEVHVKYENKRLFVSIIFETRYQPYIPRGFTAIDINLRTVTTYNGTEIRRYRTRLIDALSKRARAEELQRRYPKRWRYNERILSRIKALHRRTRNIINDSSWKLAKEIVTKAYKHKHAIILEDLEHLRDSINGKDDGIRWKLTLFAYRRLRHAVIAKAIEHNVPVIIVDPRNTSTTCPRCGSRLTYIHRLAFCRNCGFIGDRDVVGAMNIWLRAVQACAGLPGSTQSASPMNNETRERGGKQNEEMKKTNRPKPSPCSS

SEQ ID NO: 11068 - protein, 422 aa, Acetitomaculum sp.
MKGNSYMYLTVKQQVKHLSKENYRSIKELCHAAKNLANEAIYNVRQYYFTEGKFLKYEKNYVLLKNSPNYKALNSNMAQQILKEVDGSFKSFFGLIKLAKQGKYAFKDCKLPHYLPKDGYTTLVIGFVRLNGNKLILPFSNSFKKTHKPVTFTIPPILLDKKVKEIRIIPKAHARFFEIQYTYEAECVQRNLNKNNALALDLGINNLVTAVSSNGRSFIIDGRKLKSINQWFNKENARLQSIKDKQHFVKKTTNRQKAIARDRNNKVNDYMNKAARKIIDYCVSNNIGTLVVGYNETFQRNADMGKRNNQNFVNIPYGQLRSKLEYLCELNGIVFVKQEESYTSKSSFWDRDDLPIYNNDNPKTYTFSGNRIHRGMYQCKNSKCLNADVNGALNILRKSNVVSLERLYTRGEVDTPVRIRIA

SEQ ID NO: 11069 - protein, 446 aa, unknown
  TnpB Polypeptide
MMRQLGSVTPEIVINRWDLSTMDSDREPPSTDDRSSEFDMVLSYRYRLEPSKAQHVALAEILEFQRLLYNADLKHRRKSYQVTEERGLQPERISFPSRCKELTTLRRDVPEWFGAIPANLARWTLKRADLAYQAFFRRCQSKAGKAGFPRFRSSHRWRSFGFHEFSGIRFDAEAKRLRFQGLPGALRVSLHRPIPDSVRFLSCAFTREGRRWFVSFQLSIPTVAMHISSETVGIDLRIQHLAALSTGEEIVNPKILERKHIELRRRQRALARCQRGSKRRLKVCKRLARVHQSIVNARTTYAHQVTVSLTQRFGIIAVEDLRLRNLTASAKGTAEAPGTTVRHKAGLNRALLDVAPGRFVELLAYKAERAGGQVVKVNPRGTSIQCSSCGTDVPKELRVRTHACFACGLTLDRDHNAARNILSRALDALGRGVVAPGLAKPLATAA

SEQ ID NO: 11070 - protein, 410 aa, unknown
  TnpB Polypeptide
VKRIERIRLYPTKRQEQALHFMLDVTRHLYNAALQERKDAYRMRGVSVSAKQQNAELTALRSATGRLDSRVAAVYRECEDAVLRRLDLAMQAFFRRCKRGETPGFPRFKPTARWKQLMFPHGDRALRFVAGKVAVPGLGPVKMRKGREVPEERGRAWIVEKNGRWYTCFECERAAQPLPATDKVLGVDRGVHVLAATSEGELIRNGRMANKHRRVVTGHARALDKETVKDSKGRPTNWQDPKRIAAVRRLARAKEREANARLDALHKASRRIVDSADAIGLEDLNLRGMTRSAKGTAEKPGKNVAAKSGLNRSMLDASFGRLATLICEKAESAVREVVSVDPRYSSQTCGRCLHVAAKSRLRRRFVCVACGFTLHADVNAALEIRRRAKLSLTSEVTPAEDAGRGARCAA

SEQ ID NO: 11071 - protein, 410 aa, unknown; identical to SEQ ID NO: 11070
  TnpB Polypeptide

SEQ ID NO: 11072 - protein, 377 aa, Clostridium sp.
MMIKAIKIRLFPSKGQEILMFKSCGVMRFAYNWGRARWEELYKQSLEPSKAKIKKEFNNTIKNQENYKWLKEVSGQITAQAFEDLNNAYKNFFKGLAKYPRFKTKRKSRKSFYVRYDRLYFKEDIVYIEKIGKVKCKTNYDIPILPNYNNPRCHFDGKYWYLTLGFEHNENQVELNKDLSIGIDLGVSNLAVVNCIDKPIKNINKCTKVRKLKKRLKRLQKQVSRKYEANRQDSKYNKTNNIIKLEKVIKLVYRKLNNIRANHIHQTTNMIIKLRPYRVVMEDLNISGMLKNKHLSKAIQEQGFFEFIRQMQYKCKFNGVEFVQVDKFYPSSKTCSCCGNVKKDLKLKDRMYVCDICGLEMDRDKNASINLGNYKIV

SEQ ID NO: 11073 - protein, 258 aa, Thermococcus sp.
  misc_feature (202)..(235): Xaa can be any naturally occurring amino acid
MPSETIKLTAKFKLKTEPEGLEDLFSLYQEIVNFLITYAFENNITSFYRLKKETYKSLREQYPELPSHYIYTACQMATSIYKSYRKRKRRGKANGKPIFKKQVIMLDDHLFKLNLEGGFIKLSTPSGRLELEFYPAKYHEKFREWKIGQAWLVKNPKGVFLHVVFSKEVEVREPKVIVGVDLNENNVTLSLPNGEFVQIITXXXXXXXXXXXXXXXXXXXXXXXXXXXXXXXXXXSVLIFLINVGLLMPRSCAAFPVL

SEQ ID NO: 11074 - protein, 242 aa, Thermococcus sp.
LGDLSAGIDLGINNLMAVYVENGGSFLVNGMPLKSIAFYWRKRIADYQSKINKSGSKKSRKLSKLHLKAKLQMKHCINTMVRRTIEKLYSLGVSKIYVGYPKGISRNSNRGRKQNFLLSQVWHFNYLIKRLKEVSGEYGIEVVLVDEAFTSQSCPLCGHRHKNGRIFRGLFKCHREGVVMNSDLVGAFNILKRVVGSITPSLSALAGGRGNWGMTTPEGFEEPNVSWVLVKTPQTFPSLARG

SEQ ID NO: 11075 - protein, 436 aa, Thermococcus sp.
MKRTVTLKLQPSKEQEKTLLELAQATAVIWNKINYERLKQFKEFGKIDFGTTEKEAYYTFKGWVGGSTVQQLARKNAEAWRSFFSLLKKKKSGELPEWFKPRSPKFVKEGNERKLFIIPLRNDQYKIENNTIELRRLGKFGRLKIQFKGRIHLKGKQGRLEIIYDAVKRKWYAHVSYTVEEKLTNGEWVKVPREPQSNLTAGIDLGVNNLIAIYIENGEAFLVNGRPLKSIAFYWQKRIAEYQSKLNKSGYKASRKLKRMHQKTKLQARHYINTAVRQTVERLYEIGVSKIVIGYPKDIARNSDKGKKQNFILSHVWRFNTVIQRLKEVAEEYSIEVLLVDEAFTSKLCPLCGQRHSNGRIFRGLFKCRREGVVMNADLVGAFNILRKAVRTITPSLSALAGGRGNGGKTLPEGSKTRFNLGLNETPQTSPPLVRG

SEQ ID NO: 11076 - protein, 480 aa, Thermococcus sp.
  misc_feature (97)..(130): Xaa can be any naturally occurring amino acid
MPSETIKLTAKFKLKTEPEGLEDLFTLYSDIVNFLLDYAFENNITSFYRLKKETYKGLRREYPDLPSHYIHTACQMATSIYKSYRKRKDEEKLMESXXXXXXXXXXXXXXXXXXXXXXXXXXXXXXXXXXITSFYRLKKETYKGLRREYPDLPSHYIHTACQMATSIYKSYRKRKRRGKANGKPVFKKKVIMLDDHLFKLDLEGGFIKLSTPSGRLKLEFYPAKYHEKFREWKIGQAWLVKNQMGIFLHVVFSKEVEVREPKVIVGVDLNENNVTLSLPDGEFIQIITHEREIRTGYFVKRRKIQRKLRAGKKREELLEKYGRRERNRLNDLYHKLANKIVELAEKYGGITLEDLTEIRNTIRYSAEMNGRLHRWSFRKLQSIIEYKAKLKGVSVVFVDPAYSSSLCPICGGKLSPNGHRVLKCSNCGFEADRDVVGSWNIRLKALKMWGVSVPPESPPMKTGGGKPTRYEINALHALYW

SEQ ID NO: 11077 - protein, 493 aa, Thermococcus sp.
  misc_feature (220)..(253): Xaa can be any naturally occurring amino acid
MPSETIKLTAKFKLKTEPEGLEDLFSLYSDIVNLLLDYVFENNITSFYRLKKEAYKSLREQYPELPSHYIYTACQMATSIYKSYRKRKRKGKANGKPTFKKKVIMLDDHLFKLDIEEGIIKLSTPSGRLELEFYPAKHHEKFREWKIGQAWLVKNQMGIFLHVVFSKEVEVRESKAVVGVDLNENNVTLSLPDGEFIQIITHEREIRTGYFVKRRKIQRXXXXXXXXXXXXXXXXXXXXXXXXXXXXXXXXXXVKNPKGVFLHVVFSKEVEVRESKAVVGVDLNENNVTLSLPDGNFIQIITHEREIRTGYFLKRRRIQKKLKTGKKRKELLEKYGERERNRLNDLYHKLATKIVELAENYGCIALEDLTNIRDSVRYSAELNGRLHRWSFRKLQSIIEYKAKLKGVSVVFVNPARTSSLCPICGGKLSPNGYRVLKCECGFEADRDVVGSWNIRLKALKMWGVSVPPESQPMKTGGWKPTRYEINTLHTLYG

SEQ ID NO: 11078 - protein, 320 aa, Thermococcus sp.
  misc_feature (232)..(265): Xaa can be any naturally occurring amino acid
MKRTVTLKLQPSKEQEKTLLELAQATAVIWNKINYERLKQFKEFGKIDFGTTEKEAYYTFKGWVGGSTVQQLARKNAEAWRSFFSLLKKKKSGELPEWFKPRSPKFVKEGNERKLFIIPLRNDQYKIENNTIELRRLGKFGRLKIQFKGRIHLKGKQGRLEIIYDAVKRKWYAHVSYTVEEKLTNGEWVKVPREPQSNLTAGIDLGVNNLIAIYIENGEAFLVNGRPLKSIXXXXXXXXXXXXXXXXXXXXXXXXXXXXXXXXXXKSLRSKLFSYFLSPLKVCISHSNELGFSFLCQLGVNPRMVEAHVPNANDSNSEHF

SEQ ID NO: 11079 - protein, 549 aa, Thermococcus sp.
  misc_feature (325)..(358): Xaa can be any naturally occurring amino acid
MKRTVTLKLQPSKEQEKSLFELANTGAKVWNEVNFLRRQLFFDHQPVDFNKTEKEVYEKYKKEIGSATVQQICRKNAEAWRSFFSLARKKKDRELPKWMRPKPPSYLKDDGKRKPLIVLRNDQYKIEGNKLILKGLGKFKRLEVQFKGRIHVKGKQGRLEIIYDESRRKWYAHVSYTVEKRLTGNEWVEVPRRPKGDLSAGIDLGVNNLMAVYVETGESFLVNGRPLKSIAFYWQKRIAEYQSKLNKSGYKTSRKLKRMYQKAKLQARHYINTAVRQIVEGLYEMGVSTIVVGYPKGIARNSEWGEKQNFILSHVWRFNTVIQRXXXXXXXXXXXXXXXXXXXXXXXXXXXXXXXXXXLNKSGYKTSRKLKRMYQKAKLQARHYINTAVRQIVEGLYEMGVSTIVVGYPKGIARNSEWGEKQNFILSHVWRFNTVIQRLKEVAEEYGIEVELVDEAFTSKTCPVCGKPHKGARFVRGLYKCPAEGLVFNADLVGAFNILKKVVKTITPSLSALAGGRGNGGKTLPEGSKTRFNLGLNETPQTFPPLARG

SEQ ID NO: 11080 - protein, 422 aa, Thermococcus sp.
MKRAVTLKLQPSKEQEKILFELAQATAIIWNKLNYERLKQFKEFGKIDFGTTEKEAYYTFKDWVGGSTVQQLSRKNAEAWRSFFSLLKKKKRGELSEWFKPQPPKFVKEENGRKLFIIPLRNDQYKIEGNMIELRRLGKFKTLKIQFKGRIHLKGKQGRLEIIYDEARRKWYAHVSYTVEERLTNGDWVKVPREPRGNLSAGIDLGVNNLMAVYVENGEAFLVNGRPLKSIDFYWQKRIADYQSKLNKSGYKTSRKLKRMHEKAKLQARHYINTAVKQMVERLYHLGVSKIVVGYPEGISRNSDRGKKQNFILSHVWRFNTVIQRLKEVAEEYSIEVLLVDEAFTSQTCPLCGQRHSDGRIFRGLFKCRREGVVMNADLVGAFNILRKAVEKITPSLPALAGVGVTGGRPSPRGRRPALTWV

SEQ ID NO: 11081 - protein, 427 aa, Thermococcus sp.
MQNSSSKNETIVRAYSIPLRANDVILNFIEEYHNMAKTTLQEILNAKKFTKVERKQLRDKLLENWSYAAHYVDSAINQMLGLVKSYKRKLKKGKKVQKPRLKKKLVYVKSTLFRLKGTRLKITIVPREYYLEIDLAKYHYLHPLLEEIKEGKVKLGGLFLFPEKLILNFVKSVEYFEPKDWMSIDINLTNITALAGLTVYHFDTRGLYHTHRVYEVKRQKIQRISAWNRRLSGELLEKYSGRERNRMRDFLHKLANKIVEIAYRKRMGIILEDLRGIKEKVLNGSKDFNRKISKWNARELQRLIEYKAKWFGVPVVYVNPRNSSRTCPACGGQLIPQEGRLMKCSNCGLVEDRDFIAVLNLRMWGSGVTPKGLEVSRAGKPNEGPMKTNPYGIIVIEKQRIGIKFHKITLTSPQGKPQNPFKVESIK

SEQ ID NO: 11082 - protein, 437 aa, Prevotella sp.
MITLAHRIQLMPNNKQRTCFRKAIGCCRFAYNWGLAEWQRRYKTGERGLTGRKLRNSFNAIRGEEFPWTYEVTKYATAHAFDDLQRAFDNFFAHRAKYPTMHKRRDGIGSFYIGAGQEIKLSDTHKGLRHLRNTAHNTNGKHQYLNIPNLGYVKMAERLRFIGKILGVKISQDGDKFFASIQVQITEEEYHRTHVAASDENKRRAVGIDFGLDEAMTLSDGIAIHNPRTIFKHHRKITRLSRQLSKRHHAKTKQERLQGVKRSSNYRKLSRNLRREQRHIAAIRRDFTQKLTTILVTHYRAICIEDLNVKGMQRGKLARSVSDMAFGELRRQIEYKAAMSGTTITLADRFYPSSKTCSHCGAKKDDLTLRDRIFVCPKCGHTINRDFNAALNLLSLIPNVGTDYPELTPADLTALQSSFVTNRIATSKVETGRQRKL

SEQ ID NO: 11083 - protein, 384 aa, Streptomyces sp.
VQLRYRFRLYPTAGQQQALARAFGCARVVFNDGLRARQEAHAAGLPYIKDTDLQKQVVTAAKRTEERAWLGEVSSVVLVQALADLHTGYRNFFASVTGKRKGPKVAPPRFQSRKDNRQAIRLTRNGFTLRPNGRLYVAKVGEIPVRWSRSLPSDPSSVTVVKDAAGRYFASFVVQTDPSEVLPEVTPEVGIDLGLTHFAVLSDGRKVSSPKFLRRAERKLRMAQQDLSRKAKGSSNRKKAVARVARLHARVADARRDHHHKLSTAIIRDNQAVYVEDLAVKGLARTRLAKSVHDSGWAQFTAMLEYKAARYGRVFGKVDRWLPSSQTCHVCMVVDGPKPLNVRTWTCGACRTTHDRDVNAARIVLAAGRAERQNACGGTVSPSA

SEQ ID NO: 11084 - protein, 292 aa, Streptomyces sp.
VQQQALKDFAKAKNARFASGFGEPTWRKKFVHEGFRVIGTDCVPEFEADGSPTLNAKTGKQVMGRSVVVRKLNGRWAQVKVPGCGWVRFRLSRPEPPKAKTFRVTLRNGQWHVAFAVIPAPVEAPGTGEVIGIDRGVKITAALSDGRRLNCPQLTVRERAQVRKHQRRAARAPKGSERKAAEYAKAARLKAREADRRKDWCEKTSTMLARTYSLVRFEKLNIKNMTRSARGTNGQPGKQVRQKAGLNRVILAQGWGLLRQRTEHKAPGRVEDVPAPYTSLLCSACWGHLPRP

SEQ ID NO: 11085 - protein, 658 aa, Streptomyces sp.
VSRKLPIAEGETSRTACARTLVRTGVDEKTGERLSPSVLTERAGWCADLVSGMAAALLADHWNTGDVDVLAAGEDAGGRKLPSNVWMALRRLGWAVTAPDGVKVNDRIVRMAQEQAGRALRSAKWRAELTAGVLAAWPVDPGKRTPSEWDAVREAVPGGEYLPSSIIKARTRQAATHLKANSRLPVDVFELEGHPKAARMLLLAACDGQQATIERSETDPTRVLLRLQLPTRPDPRAYRDWTWVACPITLPPTVPANAVLHLPTLRLAGDTVRADVAYTHAVPKAQRAGHTVALGVDWGLSTLLSAGAVQLNGDGRITALGHGAQFQAAGVLAKQHRLRRLSERLHAKADQHMRLIGHSEHHALAPKLDVLQDEIRNVSNRRSNLNDALAWAAARWAVDQAIAAGATVIYLEDLRSMEAKGMGRTVNTRLSQQVRGQIADRIRHLAAEIGIAVVTVPARNTSKLCPHCLTPLRHRKAPDRPTIAGWKWAICPNQSCGWQGDRDHGAWRRIAARGLAHQAKTVIDRTSGLMVIRSVVDKLDSKAVVTTTAKTSRQDRSKTGPTRPRSTRPAPRRRRAPSPAARPCGPAGQRPEGHAPTGRTRLPRAAHRHQDVNTISTPTTGHRPRGAALGAGFHLHAHASPPRWETIPETQSDSGSHS

SEQ ID NO: 11086 - protein, 538 aa, unknown
  TnpB Polypeptide
MFISLQFKLELKKEDKEKLIQLMRKQSSAIRVAYNMLRELEKEKAKNPHAQIYHRLRQLFPDLPTKYIDSAIYKAKQYPTDKPVVFGGKRLFEKLCKNHLTGKAREKLKKQWRELRQGTLIAIGSKHKTAQGNLLLRFMELDGKLHLRITTGNREFIYAKVLREPSNSKDKWITFMIMLLESWQIQSYFPYTVELKLKDGEVYGSVSFELPTPEVRYTKENGVIAIDTNASPIHLAIAEVSKTGELLSYQTISLHHFLGLSKNSKDHQEWILAHQIVDLAIQKGKAIAVENLKKLKKGVRGDGKAELRKRLHHWNAKKFLQKLKRVAMLKGVEVIEVNPAYTSVIGMLKYAPQLSIDKDVAGAYVIGRRALGFKEDTPENYEKLLKDEEYLEFALKRYEEKEKELRELLEEETNQYKRNALESELKVVENSKKLLTNLIQSLQSEPNSCEGANGRNPEQGRGHFASSVVWQVLKVALLFPILGRVLPRDLSPLKPVLVEGVWDRVRSRLVPLEAGGTVPNRGFLEQPHSSQLCNGSGG

SEQ ID NO: 11087 - protein, 428 aa, Nocardia sp.
VSHKQGYRVELAPDAEQVVVMGRHCGLSRVVENFCLEVVQKRWAQRKAEESYGISGDELTEVPWTAPALEKLWRATHQQRYPWFNENKMSSRVPKEACRMRAAGFANYLKSKKGQRKGARVGFPGWRKRKHGSRFRYDGDRAGPVDARTVRLPGVGRVATREDMIWLTARLACGAARILGATIREQGGRWWIAIQLEVDRDEINTRRRVPERAPKCGIDLGLSTFAVIANDDGTSEEIHAPKPLKAAQRGLARANRKLARCAPDSMNRGKARARVARLHLRVVHRRRDFLHKTTTRLARTKSAIAVETLNVKGMIRNRRLACAVSDAGFSEFVRQLGYKADWYGAGLWKADRWFPSSKTCGACDRINHGLVLADRTWFCPGCDVVHDRDCNAAGNLLNAMLADLGSSGDRLPLAGKFPGEKKRLAETT

SEQ ID NO: 11088 - protein, 430 aa, Nocardia sp.
MSRHTAFRYCLDPTVEQQTVLARHAGAARFAYNQCLALVKTALTQRRTDPDHPVPWTRFDLINAFNTWKKSAAAGRIFTVDPSGVTTVEVTGLAWRNEVCQQVFEEAATDCGRGLTGWSDSRSGKRRGRRVGFPRFKKKTSSTVSFRLRNKHAKTGRPTIRIGEGDIPRSVTLPGLGQLRVREDTRRLRRMLTTGRAKILSATVSQRAGRWWISVSIEAADLHPGHHHPARVPDDGGGCVGIDRGLSAFLVAATSDGREVARVDDPPKPLARGLARQRRLTKVLSRKEKGSRNRREAAARLARHHHRVANVRRHFLHQVTNELVKTHDRLVVEDLHVAGMLRNRRDLRAGGRVTNARRREGADRHPMECRCNRPGRRGNQGSYPGRGMSLGRPRRAVSDNHRVIRHAVRNGRPGGSGSPLTRRFPSARAL

SEQ ID NO: 11089 - protein, 507 aa, unknown
  TnpB Polypeptide
LDLNGEVLDSTPVLTQLTSEIQGISGYSTFVARNDMKLGSDLERVTATTPAEAGRRAGVTMPWFFVEDEDGKPIAGKSGRSRKEALIQHRVVTSYRSWRERVKAANGESDKYVSRGWKRTVRASPPSYGEDFINLGAVNKQYAAIENDPFATGEIVLKMVIQGMRYRLIFKFDNTRFREGKVTLPLIKIQGNQPVFIFTVVTDNPVVQFSGDYVVGVDVGVRNYATVVVRNSKTEKIVYQTTLSQRVHSLWNSVRASERQVKQLRKKADKLLYDRQAKMSALDEACFHREAASRKKRELAILAAQEIAYLSHFWGNAVVAVEDLSWVANTMRNGRWNRGELINWLLHYVSQNGSWVVAVNSANTSQQCHKCGSKVSHPAHEVSFCPKCGAMDRDVNAASNIAARAVLKVEKARKTRAKNRKLQPQAPLKTPVARASLKYPGRDRTKRAATPKRKKRVMMEVNLPPRPTRVNMATVLADCGTHGATETRKAALKQGNVAYKRRLYSLN

SEQ ID NO: 11090 - protein, 533 aa, unknown
  TnpB Polypeptide
MLDTLPVIHDTGWEGVLAKNRTYKAFIARPSRVLDLNGEVLDSTPVLAQLASEVQGISGYATFVVRNDMKLGDELSQVTVTQPTMAGRRAGVTMPDFLIAGRSGRSRKEFLVQHNVVAAYRSWSERVKAVNGTSSKYVSQGWKRTVDTSPPSYGEDYVNLGAVDKHYAVIENNPFTDGEIVLKMVICGKWYRLIFNFDNSRFCEGKVTLPLVKIENSAPVFIFTVVTDNPVAQFSGDYTIGVDVGINNYATVVVRNSKTGEKVQESTLSQRVHSLWNSIRASGRQVKQLRKKAKSLLYDRQARMSALDEAQLHREAASRKKRELAILAAQEIAYLSYFYGNAVVAVEDLGWVSNTMQNGRWNRGELMQWLTHYAAQNGGWVMSVNSANTSKVCHLCGSKVTHPVHETSRCPEHGVMDRDVNAAANIAARAVPKVEKARKTRAKNRKLQKKQAPLKTPPARGSLRYPGRDRTKNYPTPKRKKRVVREGTPPSRPARVNMATVLADRGAHGILGTRMAALKQGYITCRRSLYSPN

SEQ ID NO: 11091 - protein, 534 aa, unknown
  TnpB Polypeptide
LVTNNISQDTPSTVEGTRRRDAGERRMIYTAKFRIYLNPTQERKLNGIFTIYNRVKRIGYNLLFYGEEYIAEHFGEGQIIQQCLMSVCHNNPYVNTILIDNKAMLEVQKTWLEKRRKRMTHQTKVITEKINKIKDKNKHDRRLKGLYARRSSILAKLNNLALKPVVFGGKKLFRDRIRGKISKEEFRLRRDSSFSCVGKKQKGLKNLNIKILSDKTVKIHTFSKQKERTWLIIPMSVNHVQEKWFQQILNADKYTVTVKRKFFKGEVRYFVHVSYEIPEPTPCYGYEHGAIGLDFNCNFAALTNVDMNGKLLSYRTISFGNLHSYRKDKSNDYISYKMDKIVNYCINKRKGIVVEDLQFDQKFSYNKKRNRKLGNLKTTALQLLERKCKKRGVSFRKVFPGYTSLIGKYKYSRLHNLTVHHLASYVIARRGLGFKEAFPPIYDWVLSQVGEFIEPRLKQGSPYRKWSMIHDLFQHSGTTSFKTAEILRKTVLMKYVLYSVTSAQPDNLKVGLSTNGKIDDYHKTWDYINDFTVL

SEQ ID NO: 11092 - protein, 430 aa, Streptomyces sp.
MKSAEADFRRQGEKSCRPADLNLTNRPTSLLSMPMTHVKRAFKYRFYPTDAQAAELSRTFGCVRKVYNLALAARTEAWARQERVNYNQTSAMLTVWKKTEELAFLSKVSSVPLQQCLRHLQLAFTNFFGRRAKYPRFKSKKKSRKSAEYTTSGFRWRDGTLTLAKMSEPLDIVWSRPLPEGAKPSTVTVSLDAAGRWFVSLLVEDPTVKPLPVANTAVGIDVGLNHLLTLSSGEKIANPRHERKNRARLALAQRRLAKKAKGSNNRNKARRKVTKIHARITDRRRDHLHKLTTRLVRENQTLVIEDLTVRNMVKNRSLARAISDAAWSEFRSMLEYKAQWYGREVVAVDRFFPSSKLCSTCGSLQQKMPLHVRTWTCDACGVTHDRDVNAAKNLLAVGLTVAACGAGVRPQRSTPGGQSATKQETLWREP

SEQ ID NO: 11093 - protein, 303 aa, unknown
  TnpB Polypeptide
LSVRCNHERLGLPTKQDGAYLRLQTHIADGWDATSVLMTWRYRFLVLLKKTPPTPQITENVVGVDQNSNGIGVTVMNKRTGRILKQLYLGRTISLRQIRYENRRAKLQEYRDKDGHRGKAGLKLKRLSGRQRSYVRTNTWLLAKQLTDLARAHNASIAIERLYKLRRRRGQMSRKSRRKTNRIPYGFFRHALTHKSTQLGIPVMQVPAKYTSQTCPRCGHVSRQNRKNWRYFRCVRCRFEANADRVASVNICQKAIQATYPVTKDQFLPTGASVSRLDMQDEEASWQHPTPQSCKPTISIVGS

SEQ ID NO: 11094 - protein, 426 aa, Cyanobacteria sp.
MILNYRYRIYPDLQQIQLLNEWLETLRLSYNYALRELKDWIASRKCPIDRCSLESEYIMAADYPFPSYHQQQNNLPKAKKKFPRLKAVPSQVLQTNIRRLHDSWDSFRARGYGFPRFKKFGQMKSMLFPQFKTNPLTGWQIQLPKLGKVQINLHRPIPKGFMIKQVRVVKKAIGWFAVVAIESDFELSNPVPHGHAIGVDVGLLSYIATSDGYTEKRPKFFKTAYSRLKVLQKRLSRKMKRGKNYEKARIKVAKQHNHIAFKRTDYQFKLAHKLCDMADTIYIEDCDFRIMAKGMLGKHTVDAAFGKQRDILEYVAKRRDVFVGRVDHRGTSQVCPNCRAEVRKDLSVRLSECHECGYVVDRDIASGQEICNRGEETYRGTREKQEIGSQVVLSGNFVVDKWRNLSSGRVGEQDSIGDSGSPLSIR

SEQ ID NO: 11095 - protein, 393 aa, Moorea sp.
MSSVADSTVSGSTKLLSKKIRVYPGTELKVKWRTWINAARWCYNKAVAILKTTKIGKYDLRKKVMLDVPEWVNQTPYNPRQLAVFQAFEAYKAAIKSGGHTKFRRYCDPVQSIRFQKSNFSKGVFYPRQTKGLTFTSSEPLPEKMTHEPILSIDRGRWFISFAVESDQDNFPIPQKAIALDPGVRSFLTGFDGQRFIDLGTGDIGRVYRLCSHLDRLICQAALAKGRPNKRKRFKLRKAAQRIRGKIRNLIDEAHKKISCYLTSEYQVIYLPKFETSQMVGKAKRKIRSKTVRAMMNWAHYRFNMTLKHQATKRGCFVVDVSEEYTSKTCTRCGHVHRKLGGSKKFLCPECGHTLDRDHNGAFGIFLKALRDTSSSITDVLYTDSGEAHELPG

SEQ ID NO: 11096 - protein, 442 aa, Helicobacter sp.
MKVNKGFKFRLYPTKEQQDKLQHSFFVYNQAYNIGLNLQQEQYEKNKNLPPKERKYKKSSELDNAIKQCLRARDLPFSAVIAQQSRMNVERAFKDALKIKDRGFPKFKNSKFAKQSFSWSNQGFSIKESDDERFKVFTLMKMPLMMRMHRDFPPNAKIKQITISCRHRKYFVSFSVEYKQDITAIKNPKDCVGLDLNVLDIACSCGVNNPEKLTDFKRYIQDMKELLGLEIDEKTDPKRLIPTCSKLYSLKKYSEKFKRLQRKQSRRVLKSKQNKTKLGGNFYKTQKKLNQAFERSSHQKTDRYHKITSELSKQFEWIAVEDLQVKNMIKRAKLKNAKQKSGLNKSILNASFYQIIFFLDYKQQHNGKLLVKVPPQYTSKTCCNCGSINPKLKLNHRQYWCSDCGYKEHRDINAANNILSKGLSLFGVGNIHADFKEQSLSC

SEQ ID NO: 11097 - protein, 441 aa, unknown
  TnpB Polypeptide
MGMTEEQRLAKNASIKEAMKATHEKRKSQVCRVYMLKVKKNKLSARQKEDFKMLFVEAKWLYNDILNYGSVKGQSIFDYELGNVVEVKLPDGSFDGRNLDHIGSQMKQSVYTDMKSSIKALSKLKKKGIKVGRLKFKSEIRSVSLKQYGTTYKFHNDHRVKIQNIHGLVRVNGLDQIKDNVEFANAKLLNRADGYYLAVTTYTERKSYSNRPSADVGIDMGCHTSFTLSTGEEIDVKVKEPEHLKHQQRKLARQKKGSNSRRRTIHKIQKKHQRLVNRKNDKANKIVADLNKRFGLIYIQDENIKGWHKGGHGKAVQHSCLGRVKAKLKSQDNVYVVNRWEPTTQECINCGKKHTMPQNERTFKCDCGICIPRDIHSANRMVQEGRKLVPPEQREFMSSDWQTSILSYLGQGKSAGLTLEAHRLHAVGSSLQCGIGPRMEI

SEQ ID NO: 11098 - protein, 379 aa, Brevibacillus sp.
MKGNLSKSEVTLLVLHHKAFRFRIFPTLEQAVLIQKMLGCSRFVFNHFLAKWQETYEETEKGLSYNTCATQLPALKQTFGWLKEVDSIALQSSVRHVADAFDRFFRKLNNLPRFKSRKNPVQSYTTKYTNGNIAIDGNQLKLPKLGWIRFAKSRDIEGRILSATVRRNGTGKFFVSILCEVDIQSLPQINNAIGIDLGIKSFAVCSNGEVIANPKPLRKYEKQLARWQRILSRRKPGGSNWHRAKQKVAKIHEKIANCIEDFLHQTTTKWIRENQTICLEDLQVENLLKNHKLAKSISEVSWAKCRTFLEYKAKWNGRTISVVSKNYPSSQLCSACGHRNPDVKNLSLREWSCPVCGLHHDRDHNASINIKHEGLRLVG

SEQ ID NO: 11099 - protein, 376 aa, Domibacillus sp.
LEVTAMLLNHKYEIFPTKEQKDMLDRWLHYCRQLYNSALLDKQRKYKQKKENYDMYDMRKQLKMDQETYPFLKGVPSQSVQDVFLRLKKAFDNFFRKDTKYPKMKKSKEYKSITFPQFGLNSKGYRFAMSFSGTGQLYNTKLGEIDILLHRPLEGKIKQLIVKRQGHRWYAIFCVERQALPSSIDTDNAVGIDVGINKYAVLSNGTAYENPRFLRKKEKQLKKAQRALSKKKKGSANYIKQVQPVRQLHGKVANQRRDFLHKLSYNLSKDYSVIAVENLNIRNMVKNKKLSKSISDAGWGMFRNMLAYKCENQGGVLVKVEPKYTSQDCSSCGERVKKSLSVRTHICTSCGTVLDRDHNASLNILKKGVEQLSVAK

SEQ ID NO: 11100 - protein, 490 aa, Tolypothrix sp.
MQVSYQYKLRPNQSQSKVMDSWLDMQRSLFNWFLADRIDGYYQTLIMGEYCDIRTKTERCPLTCSLSKNSNLHNPWKNPDKNGVVKKRSASLMQDAYLAEIKQARPWYKAIHSNVLQMLLKRLDAAMEGFFKHGRGFPSFKNRSKFRSFQYKPGDVKIDGNKIYLPSIGWMRFYNSRPIPQGFQIRTVTMRKKADGWYTSILIRDDSVPNFPTPKEVHTVVGLDMGLTKLVHCSDGSDFANPRPSTSKKGRRTLKIRQRRLSRKKKSSNNRKKEAQKVARLHKKQSDKRSAYQWFVASKIVRKADAISVEDLNIKGMKAKCKPKPDDVKQGRFLKNGQSAKRGLNRSISDASWGTLIEKIQYTAAKSGKSFFKVDPRNTSRTCSKCGVVDALSRFGEKFTCVACGYETHADKQASVNIKNRTIQQNGLTIKKPRKVRRDSTKPKQLILFETPTVESTTSKRRQHRASNGKRDVPGNLPTQLSLWDIGDLA

SEQ ID NO: 11101 - protein, 497 aa, unknown
  TnpB Polypeptide
VKTVQFRLFPSKVQEKGLNEICTIFNKVRRIGYKLLFNNADNIQQKLMALCNNNSYVNTILHQNETRLEQQETWLKKRRSYLASKIEVIRDKIDEVKAKDEKDRRLQGLYSRLSSIMNRLANLKLEPVVFGCKQMFRKRLLKKISRAEFRIKRDASFSCIGKAQYGQKNPNLKILPNLHIKIRTFKNERGKKWLTVPFSVNERQSQWLQEIQNIDKYTAAVKRKLLKDEVYYYLFISYEISEPETKFNFENGCIGGDANFNFASLADVDRNGHLLSYQKISYRNLHTFRKNKRNDYASYKADKILNVCLNKRKPIVIEDLAFEQSFSYNKTLNRKLSNFKKSMIDLLERKCIKKGIPILKVPPYYTSIIGQLKYTRSHNLSVHYLASYVIARRGLGFKEDIPTDYKWLLSQVGDLIKPRLKKSSTYYNWARIHDFFKHSGITSFRPSEIVEKVLSVKNGLNSVTNAQPDNLRAGLSRKGKIENYHKFWYYMNNTGIL

SEQ ID NO: 11102 - protein, 261 aa, Halorubrum sp.
LAYVSDEDFEFRMAHLQYRDGEWYLHASMRKVEVDEESSGSESKHRTVLGVDLGVNNLAVASTGGFWSADEFNHWRREYEKRRASLQQCGSRHAHENIESVGQKEYGRFEIYLHTVANELIEEAIENDCSHIVFEDLTHIRENIPEATWQHIWAFRRLYEYVEYKANEHGVDVVQVDPRNTSKRCSTCGFTHPDNRSGETFRCQQCGYENHADYNAAKNIGLQYLRHRQNADDGGAPVDVRLNRGTLNVSGEYIPPASAEA

SEQ ID NO: 11103 - protein, 420 aa, Halorubrum sp.
MKRTNTFVVRPRSEQDRELLHELLDASASLWNELTYERRQQYFDGDSIWDTDDYRKQYVGILGSATAQQLIRKNKSAWKSFFSLKEKGEQCSPPGYWGNEDDGRTLRTYVRNDQYTLETGDRSRLEIPVGTELKEKYGLGHTERLRLEVAGVPKWDGKQGRLELYYDDTSNQFRAFQPVTVDNSQLDSPLADETAALDIGANNIVACTTTTAKQYLYEGRDLFERFRETTREIARLQSELHEDRYSSNQIRRLYRRRTRRRDHAMDALARDLIERLYDEGVSTVYVGDLTDVLETHWSVRANEKTHNFWAFRAFIERLTYTAEEYGIAVEVRPEAWTSQTCPNCGSTEDTTRHQDTLTCLCGFEGHADLTASETFLRRQTEVPRPMARPVRFEWDDHDWSGKPHPHDSPKELRTNRSIHG

SEQ ID NO: 11104 - protein, 384 aa, unknown
  TnpB Polypeptide
MFALKRELKLNNKEASCLAGCAGYSRFVYNYGLSIIQDSWAFDDVQASDAKRLGAIKKVFTNVTKKRPEFAWCNEYPSRIYQNAFRDLSAAFSRWRNPKLSAAMPQFKRKRHECSFTVDSSSGSVLVAVGKSIKVPTLGTFRLKEAIPYNCISQTFTIAREAGKWYISFMVKACPLPAMKHTGQATGIDLGVKTFATLANGESIDSPASLKKAKTKLRRTQWKHRNKIQGNRKLKQQASQNALKYYQRLRKQHKHIANIREDFLQKVTTELGKTWQRIAIEDLNLSGMIANHKLAEAISTLGFYRFRELLTYKQAYHGFELTIVDRWFPSSKTCSNCGHKQPMPLKERIYSCGSCGHSIDRDHNAAINILNWPNTPTLPMAIGI

SEQ ID NO: 11105 - protein, 390 aa, unknown
  TnpB Polypeptide
MEKAYSYRFYPTPEQESLLRRTLGCVRWVYNKALHERTQAWYERTERVGYSQTSSMLTAWKKEEELDFLNEVSCVPLQQGLRHLQTAFSNFWAGRTKYPNFKKKHQGGSAEFSKSAFKYRNGQIYLAKCKEPLDIRWSRLIPEGCEPSTVTVRLHPSRRWHISIRFDDPTIKPLPVTDKAIGIDLGINSLVATSDGDKVSNPKHLKKHYRKLRRAHKNLSRKEKGSKNREKARRKVARIHAQITDTRKDHLHKLTTQLVRENQTIVVEDLAVKNMVKNRKLAQVIADASWGEITRQLAYKCRWYGRTYIEIDRWFPSSKRCSNCGHIVSKMPLNVREWECPECGTRHDRDVNASKNILAAGLAVSVCGASVRPEQSKSVKATAMKQKPKS

SEQ ID NO: 11106 - protein, 407 aa, unknown
  TnpB Polypeptide
MFVLEYKVNPKPHQIEAIEEAIRTTQFVRNKTLRFWMDNRGVGKTELFRYNTQLRSEFEFVQDLNSHACQTAVERTLRAITRFYDNCKKQVKGSKGYPRFKKNTRSVEYKTSGWKLDLQTKKHITFTDKKGIGRLKLVGSRDIQYYQPEQIKRVRIVRKADGYYVQFAIKLDPRDTVKPLTPTQQAVGIDVGLKYFLADSQGNIEPIPQFYRKTEKQLNRLNRQKSKKFRKGKPQSNNYRKARVRYARKHLRVSRQREEFVKRVALRLIQSNDLVAYEDLNVKGMVRNRCLAKSISDAGWSLFRQWLEYFGDKYGKVTIAVPPHNTSQNCSNCGEKVQKSLSTRTHVCPHCGFVADRDVNAALNILQLGLSRVGRTQTHASGEISSYPVGEILLSNEASMNEESPTL

SEQ ID NO: 11107 - protein, 325 aa, unknown
  TnpB Polypeptide
MFTSLKIRLYPNQKQRIQLSKELGCARFVFNRFLDEWNKAYETTGKGLSYTKCANQLPTLKQELPWLTEVASQVLQQSLKNLDTAFKNFFRGTGRHPRFKSKHRKQSATYPQGFKINERSIKLPKLGEVRAKVHREIKGKVKSVTVSMTPSGQYFASLRIELPGELPEQSIQGKVIGIDLGLDALIVTSDGEKIKPPKFYRKYEKKLAKHQKRLSRKAKGSANRYKARLKVAKIHNKIANCRLDSHHKLSRQLVDENQVIVFENLNIKGMTRNHCLAKSINDAAWGMLQTLTEYKAREQGKVVEYLTTPRRKRSRILVSFRLPLN

SEQ ID NO: 11108 - protein, 431 aa, unknown
  TnpB Polypeptide
  misc_feature (188)..(221): Xaa can be any naturally occurring amino acid
MLNLSYQYKLKLTANQAAVIDEWLSVCRSVYNYALRERKDWVNSRKCSIDRCSIHSEYIIAADAKRPTYASQCKSLTAAKRTNPSLKLPQSQVLQQTLKQLEAAFVNMWDRGFGFPRFKKHKRSFVFPQVKPDAVNGDTIDLPKIGKVEFHNSRDIPDGFFVKQIRVIKKASGYYVSVSIQCDVDVPXXXXXXXXXXXXXXXXXXXXXXXXXXXXXXXXXXSENQFVKGHKFFKESEGQLKSLQRRLKNKTKGSRRWLRVKRQIGLLHEKIHNCRKDFFFKLAHQLCDEVGMIFAEDLNLKALGRSALRKACLDAAWGSFLDILRHVCWKRGVYFAKVDANGTSQICPHCGTNCGKKSLSQRVHSCSNCGYTTDRDVAAAQVVKERGLSAVGQVVLTLVEGKDKGLCPPPAGGLYTPRIGAGVYTPARVSL

SEQ ID NO: 11109 - protein, 228 aa, unknown
  TnpB Polypeptide
  misc_feature (195)..(228): Xaa can be any naturally occurring amino acid
MIAISYHSIVKARYRYRIYPNQYQQIRLAKLFGCCRVVWNDALALCRQSEKLPKNGDLQKVCITQAKLTEERQWLSEVSNIPLQQAIRDLGVAFNNFFKSLKGERQGQSVSRPKFKKKHNRQTARFRQGGFSIKRNKVYLAKIGNLKVKWSRPLPPNPTSVTVIKDCAGRYFLSFVVEVEPEVKPPKNPAIGIDXXXXXXXXXXXXXXXXXXXXXXXXXXXXXXXXXX

SEQ ID NO: 11110 - protein, 419 aa, unknown
  TnpB Polypeptide
MMRVAQKIRIYPNPEQQQQLAKAMGCCRFWWNYALNICNQTYKETGKGISRSGLNALLPELKKEHEWLKTDVYSQSLQQTTLNLSRAFINFFEKRARYPKFKSKHGKQSVAFPQHTSIQGDDLKLPKIGLVKAVFDCRYAGKIKTITISKNSTGRYFASIIYEVEACFRSGNGDKILGIDLGVKDFAIVHDGTKTSKYANPKHLKKYARNLARKQKKLSRKQPGSNSRQKAQKIVAKVHARISNSRQDFLHKLSRKLVNESQVIVVENLLARSLAPYGGAGSLVNVRGLVLNHKLAKAISDCGWGTFVNFLSYKLDREGKKLIEIDRFFPSSHICPECLTQQPKMDLSVREWICLNSACNTRHDRDEAASKNIRAEGIRMLKADGSAVSVSGGSVRQDRGRKTKVMQHPVKLETTTSSR

SEQ ID NO: 11111 - protein, 422 aa, unknown
  TnpB Polypeptide
MILNYRYRIYPDVQQIELLNEWLETCRVSYNYALRELKDWIASRKCPIDRCSLESEYIMAADYPFPSYHQQQNNLPKAKKQFPRLKSVPSQVLQTNIRRLHDSWDFFRARGYGFPRFKKYGQMKSLLFPQFKTNPLSGWQIQLPKLGKVPINLHRPIPEGFVIKQIRVVKKAVGWFAVVAIESDIVIPSPVPHGHAIGVDVGLLSYVATSDGYTESRPKFFQTAYRRLKVLQKRLSRKRKRGKNYEKARIKVAKQHNHIAFKRTDYQFKLAHKLCDMADTIFVEDCDFRIMAKGMLGKHTIDASFGQFRTILEYVGRKRDVFVGRVDHRGTSQTCPNCRTEVRKDLSVRLHKCNECGYVVDRDIASGQEICNRGQETYPGTLEKQEIASQVVLSGNFVLDKWRRGGMPSSDIGKPTLYCDSN

SEQ ID NO: 11112 - protein, 424 aa, unknown
  TnpB Polypeptide
  misc_feature (48)..(81): Xaa can be any naturally occurring amino acid
MLNLSYQYKLKLMPLQAAAIDEWLSVCRSVYNYALRERKDWVNSRKCXXXXXXXXXXXXXXXXXXXXXXXXXXXXXXXXXXLTAAKRTYPNLKLPQSQVLQQTLKQLEAAFVNMWDRGFGFPRFKKQMRSFVFPQVKPDAVKGNTIDLPKIGKVEFHNSRNIPDGFFVKQIRVIKKASGYYVSVSIQCDVDVPDVIPHGYAIGVDLGLNSFIATSENQFVKGHKFFKESEGQLRLLQRRLKNKTKGSRRWLRVKRQIGLLHEKIHNCRKDFFFKLAHQLCDGVGMIFAEDLNLKALGRSALRKACLDAAWGSFLDILRHVCWKRGVYFAKVDANGTSQICPHCGTNCGKKSLSQRVHSCSNCGYTTDRDVAAAQVVKERGLSAVGQVVPTLVEGKDKGLCPPPAGGLYMPRIGAGVYTPARVSL

SEQ ID NO: 11113 - protein, 403 aa, unknown
  TnpB Polypeptide
MLNLSYQYKLKCAPDQAAAIDEWLGICRSVYNYALRERKDWVNSRKCLIDRCSIRAEYIISPETKRPTYSSQCKSLTAAKRTNPNLKIPQSQVLQQTLKQLEAAFVNMWERGFGFPRFKKQMGSFVFPQVKPDAVNGNTIDLPKIGKVEFHNSRDIPEGFVCKQIRVIKKASGYYVSVSIGCDVDVPDIMPHGYAIGVDLGLNSFIATSENQFVKGHKFFKESEGQLRLLQRRLKNKIKGSRRWLRVKRQIGLLHEKIHNCRKDFFFKLAHQLCDGVGMIFAEDLNLKALGRSALRKACLDAAWGSFLNILSHVCWKRGVYFAQVNANGTSQICPNCGTNCGKKKLSERVHHCQNCGYTTDRDVAAAQVVKERGLNAVGQTVSTLVEGKDFGAGVYTPARVSL

SEQ ID NO: 11114 - protein, 293 aa, unknown
  TnpB Polypeptide
MPTTDYTEFLHNVKQEYITNSYELDGIFIFDIELPATSHICPKCGETTKHIKDYRIRTVKFGKVQRGPLIGKYRQRRYICPHCGHSFAESNPFVRKHMQLSVTNIRMLFDKLTESVTYTAIANECDTSITTVLRYCSMITIPKPKTLPTVIGIDEFKGNAEGYQYQVNLTNPDTHEILDILPKRDTQALIHYFASFKHKDRLQVKFIVMDMSIQFKRIMEALFPHAHIICDRYHVCRLVDWAVERVRKREQHKLAAYSRMLKQNRRVLMKHPDHLTEAEHIKLCEILRISDDL

SEQ ID NO: 11115 - protein, 503 aa, unknown
  TnpB Polypeptide
LGITISYRYSLCRDDGLRPSSRPIPEMTLLTISLLLSPVWLLVCMAVATANADLSGCSSASNSASKPPKKAKKPKRTTQIDGGTLVRGYKTELRLHNRQRTHCLQHAGAARFAYNWGLRRKKEAYQTGQKIPSAIALHKELNALKKPQFPWMYQVSKCAPQEALRDLDNAFAHFFRKCKLKKQGQHRGKCGYPRFKSRKRGIGSFRLTGSIKVTDKHIKLPHLGWLRLKEDAYLPTDAHILAATVSEKAGRWFVSIQVEEPYTAHPAPQGAPIGVDLGIKALATVSDGRIIANPKALRTALNKVRRAQRRLSRRHKGSKNREKAQRQLATAHYRVANIRRDALHKATATLVQTKAKSAQQVPSVVVIEDLHVAGMVKNHRLAQAISDAGFGEFRRQLTYKAAQRGIALVVADRFYPSSKRCHECRQHNPNLTLNQREWVCPGCGCVLDRDLNAARNLAALAPTNVPQVLRERNACGDDVRPGTTRQSSPKQELNAECGVSTIG

SEQ ID NO: 11116 - protein, 420 aa, unknown
  TnpB Polypeptide
LENDVIFSHKITLDVTHRQREYFSRAAGCDRFCWNLCLAEWNRRHESGEKRSGAAIKKDFNTFKYEAFPWMDGLHRDAHADAFERVGDAWSRYFKALKIGNKTTGRPKFHKKGRRESFYVSNDRLNFSKDGFRVKLPVIGEVGMRERLRYQGKIIGATVLRIADRWFINIRVDVVKVRKKDEWVDIEKRRTGNGIIGVDVGLQTAAVVSGGTEFQAPKPLKKALKKLRRLQRKASRQIKGGKNQKKTYRRVANVHARCENVRKDHWDKITTKLCSENQAVGIETLNVKGMLKNRKLARALSDAAFGEFARQMAYKAIIFDVKLVKADRWYPSSKTCSKCGHVKETLSLAERVFHCDHCGLEIDRDLNAAINLMKLAMAEVEKSKLPTACGEVKPAKEERLVKALGAAGTKPIAHSCALTN

SEQ ID NO: 11117 - protein, 291 aa, Megasphaera sp.
LFSRPQADLVRNRDYSFVDDGQTLSINTLGKRTKCTFESEHFSEYLDGSWNLGTAKLVELKGLWYLHIPITKSVEDFQKENVRHVVGIDRGLRFLTVSYDEQGKTEFISGRKVATKRHKFQEVRRQLQSKGTKSAKRRLKAISGRENRWMSDINHQISKTLVQKYGKDTLFVLEDLTGVSFEESNISRTVKQKYDLRSWSFYQLEQFLTYKAHENRSEVLKVSATYTSQRCPKCGTIHKENRDHHRHLYRCQCGYSSNDDRIGAMNIQLLGTMWISGDNNPRYERITTASE

SEQ ID NO: 11118 - protein, 433 aa, unknown
  TnpB Polypeptide
MEYLKMEEYPYHFGMKTRIYPSSQQKAIIHYNSECNRFMYNKFVALNQEYYYWKKALDTIPEDLQDESNIEHLAKLKELSKSVKKIKDEYHIFNAKRVSKCKGWYDALNGAYTKKSYQLAWKNYRDGNQRNVPKFHKRTAHPYEDKYRTYINPRVQTIFINATHVKIPKLGTIRCDEIRKLLQEKDDWAPGTMTVYKDATNKYWLSLQLGSKTPFVEEKSKTKKEIGMDLNVENFGMLSNGEVIENPHFYTSQQKRLARLQLILARKYQQAKKQKRNLNQASNYQKMRLKVAKLSRKVYNRREVFLQELSTDLVEKYDVIALEELRSSNMMKNHNISKAIQDVGWRKFITMVQYKCDLYNKQLITVDPKMTTQTCSACGYRLQKENADGVNERLTLRDRKWECPSCHIKHIRDVNAAKNILQKGLKTLVAERV

SEQ ID NO: 11119 - protein, 313 aa, Bacillus sp.
  misc_feature (163)..(194): Xaa can be any naturally occurring amino acid
  misc_feature (280)..(307): Xaa can be any naturally occurring amino acid
MEVNEMMINKAYKFRIYPNQAQAILINKTIGCSRFVFNHFLSLWDYTYKETGKGLTYGTCSAKLPAMKKEFVWLKEVDSIAIQSSVRNLADAYTRFFKKQNSAPRFKSKKNNVQSYTTKQTNENIAVVGNKIKLPKLGLVRFAKSREVEGRIVNATLRRNPSXXXXXXXXXXXXXXXXXXXXXXXXXXXXXXXXKTHSYIGIDVGLKDFAIFSDGTLYKNPKFFQSLEDKLAKAQRVLSRRMKGSSRWNKQRVKVARIHEYISNARKDYLDKISTEIIKXXXXXXXXXXXXXXXXXXXXXXXXXXXXLLWISK

SEQ ID NO: 11120 - protein, 445 aa, Ligilactobacillus sp.
MAQKTKKNKLLRYQRIRQKQTEQQYEYLTERHVVRPSHPKYSVLDRFSHLANNVYNQGLYRARQALFKGSWLSYNKLDASLKQSNRQKDSMIYSSMNSVHLVQQQLKLVARNMNSWNKARKAYAKNPGKFTGRPKLPKYHTKGGLTTILVDNQTAKLRPNGYVEIPCMDKFKVKLAHPETTAIQEVRIVPQNRRFIVEIVYKTNQTIQYKPDNGRYLGIDPGVNNAFTLATNVSGITPVIVNGKPIKAINQLYNKQRAQLTRIHDLLGQNRSSHRLASLDFYRNQKMNSFAHEASKRIVDFALSHGLNTIIIGKNKGQKQRSRMNKQNNQNFIGIPHQIMINLIKYKANLAGIVVIQHSEAYTSQTSFLDKEEPIRENGDKARKRKGISPAKRRLKRGLYKADTSQLINADVNGALQIIKKVVPNAFADGIEGIRLCPVKWSLRF

SEQ ID NO: 11121 - protein, 367 aa, unknown
  TnpB Polypeptide
MKTFKYRLRPSKSQRTKLIRTLELCRWVYNETLATRKNAWEQGKKFLSLYDTYKLLPMWKQEHPELKDVYAQILQSVQDRVDLGFKAFFRRVKAGEKPGYPRFRGYDRYDSFTFKQSGFKIFQSRLVLSKIGSIKIILHRPIQGRIKTLTIRRDAVGHWYACFACEVEAEPLAFNQQAIGIDMGLESFATLSNGAKVENPRFFRRDEKELTKAQRKLSKAAKGTRERMKRRRTVQHINQRIANRRRDLAHKLSHDLVESYGMLAFEKLNSKNMLQNHCLAKSISDAAWNQLIRYTTYKAENAGRVVVFVNPRNTSQKCSRCGTLVEKSLAVRIHACSVCGLIMDRDENAANNILRLGLESIDNVLEP

SEQ ID NO: 11122 - protein, 379 aa, Streptosporangium sp.
MCAMAQSVKRAFKYRFYPTPEQAEQLARTFGCARLVYNKALEERSRAYTMEGRRVSYGESSAMLTAWKRTEELGFLGEVSSVPLQQVLRHLQAAFTNFFAKRAKYPAFKSRKRSRASAEYTRSAFTWRDGHLTLAKMGAPLDIAWSRPLPEGVEPSTVTVSKDAAGRWFVSILCADTIRPLDPTAAMVGIDAGISSLLTLSRPIPGLTDAAGKVANPRHERADRARLARAQRALARKDKGSSNRAKAKVRVARVHARIGDRRRDHLHKLTTSIVRENQVIAIEGLAVRNLVKNHRLARAVSDASWRQVRTMLEYKAAWYGRELVVVDRWFPSSKLCSACGALQPSLPLNVREWVCACGATHDRDVNAARNILAAGLAER

SEQ ID NO: 11123 - protein, 407 aa, unknown
  TnpB Polypeptide
MRRSYKYRLFLTDKQAGMAQTQVNIAREVYNACLEERRACYRVTGQSLTYYDQANQLKEIRRVCPDVATANYSMLQATCRRAQRAYDTFYRRVKAGMTGGLPRFKSCHHFDSITFPSYGDGCKLTGTRLKLQGIGSVKVKLHRPVEGTIKTVTLKREADKEPLKINFPFWSPRSSVRGSTAAGSYFLTSPKWYVVFSCAVEATPVPATGQAVGIDVGLTHFLTTDTGATVENPRPFKRAQRRLRVAQRALARCKRGSVRRGKARRRVAALHQKVAHTRKDFQHKTARVLVDAYDTIYHEDLAVANMVKNHKLAKAITDAAWSQFIVVLTSKAEGAGRHMIAVNPCGTSQTCVCGAPVPKTLRDRWHACPACGLSLPRDQVSAMLIKANRPGHDHQAPTHAASSHVSA

SEQ ID NO: 11124 - protein, 400 aa, unknown
  TnpB Polypeptide
MLIAHKITLDPNNVQVTYFARTCGVARFAYNWALAEWQRQYEAHKADASLPKPSQMALRRQLNRIKGEQFPWMLDVTKNAPQMAIIQLGAAFKNFFAGRAKYPKFRKKGLHDRFSLTNDQFSVDASRIRIPNLGWVRMRESLRFTGKIMSATVSRVADRWFVSITVDTPNDLPLPNAENQGAVGVDLGVSALATLSTGEVVAGPKAHKALLSRMQRLSRGLSRKVKGSENRKKAKAKLARLHARISNIRKDALHQLTTDLTRRFHTIGIEDLNVRGMVKNRHLSRAVSDMGFFEFRRQLEYKAAQRGGMIVVADRWYPSSKTCSGCDHKLGVLPLSARGWTCPACGFVHDRDVNAAINLRNLAVSSTVSACGEEGSGLGRKPKAKPASVKQESSSKATCG

SEQ ID NO: 11125 - protein, 402 aa, unknown
  TnpB Polypeptide
MAKTRNYKFRLYPNSEQEYRLQNNLAVCRWVYNKFVEQAQKSFITRNDMNYVLTELKQSESWLYNYHSKMLQMVSTKLEGSEKALIELNKKGYKTGTIKFARYNEFRTFTYNQSGYNLETHSDKTLLHLSKIGYVEIRKHREIPDNTNIKQVIVTKSKSGKWHACLTCDMVEPLFNIPKISFTKAVGIDVGIKSFVYDSQGHATPNPLNLKKMLKPLARIQRKISRRKKGSNNRLKAIRHLQRIHERIANRRKDFQHKLSTIYAKNNDIVFVEKLEKLNMVKNHKLARSIMDSSWGTFLQKLEYKCKLLIEVPARNTTIDCSRCGNKVPKSLAIRIHRCAKCNLVLDRDYNASINILKKGLKIFNLSAKDYYRRLPQELREVTPVEIMRFVKQEETTQLVGW

SEQ ID NO: 11126 - protein, 380 aa, unknown
  TnpB Polypeptide
MPLFPNFSEEKYMEKIKTYKFRLYPTKKQEEILNHHLWLSKELWNFLLQKEKEHYNETGKFIEKTELQKLTKNSCLFSQTAQAVCHRLHNAIMKMIRERKQGKNTGFPRFKNFFRVKSLYYPQAGFKLEEKLEVSPFGEIKIKKHREINGTIKTLTLKRSPSGKWFAMFVVYVQRKIPKQNNGPKTGLDFGLMNFATLSNGFTIPNPKPLIKHEQKLIFFQRRLSKKQKKSRNRNKARIKLANLHEKIKNMRLDFLHKTSNSLLSNFSFLQNCYSAPETNSKCSIAKNASLVSPSVDCIFSLTKLNAVWLLQLISLTFAPPSSRIFTAFSIPFIAASIRAVFPSSSFASLNAPLFKSSLTTQLFPFFAANINADLPLWSR

SEQ ID NO: 11127 - protein, 285 aa, unknown
  TnpB Polypeptide
VSLTTVEGRERFELAIGRYQREQLAGSNPKSATLVKRRDGSYYIQICVEKKPPKQQDTDKMIGVDLGRTDIAHTSEENNWNGQQLNRVRDHYSRLRAVLQRKASKGTRSSRRRCRELLQRLSGKERRFQAWVNHRISKAIVSRAKVTNSAIALEDLTGIRERINQQPRSKAERRRANSWAFYQLRQFLEYKALRAGVTLILVPPAYTSQTCHRCLHIHPDPAQSYRSGKSFKCGHCGWEGDADLNGANVIALLGAAVNQPRGSWLACQLQGYRKPALYCEAVRVG

SEQ ID NO: 11128 - protein, 412 aa, Candidate division WPS-2 bacterium
VASRFDGQLRWLHKVRLYPTCAQERALVTMLRVTRELYNGLLQQRRDAWTTRRVSLPSREQYAQLTELREAEPRFAAVYRECQDAVLHRLDLAFAAFFRRVKHGETPGFPRFKPAARWNQLEFPHGDRALKFDTVQRRVRAPGVGSIRLRKGRVVPEFGRAFLVTKNGRWYAVFEGHRLTSPLPATGCRVGIDRGIRVLAALSDGTTIENLRPGSRRRAVVERHQRALDAVTVKDAIGRPLNAKDPARIAAVRRLARAKEREANARRDWLHKVSREIVRRFDRIALEALRLRSMTRSAKGTSEVPGVGVRAKAGLNRALLDAGFGILATLIREKAEYAARTVIEVDARYSSQTCAACGCVCKESREGPCFTCVRCGHAADADVNAAQIILLRAESPPKSAPGTARGRQHDAA

SEQ ID NO: 11129 - protein, 191 aa, Okeania sp.
VLSVKCSLKPKILYLTLFGNCYKPLQQSLKDLDQAYKNFFNSCTGKRKGIKVKSPLFKRRKSRQTARFVGANYKVGQDKIYLPKVGKIRIVWSIPLTSKPSSVTIIRDSAGRYFASFVVVTFREMSLHCAQHLPKSENSIGIDLGISTFATFSNGTKVESPKPLKQNLKKLGKFQRKFAKTQPGSKPIRKT

SEQ ID NO: 11130 - protein, 327 aa, Clostridium sp.
MKKLKRAYKVEINPTDEQKSKIHQTIGVSRFIYNFYIARNKEIYEREGKFVSGMDFSKWLNNEYIPNNQDKKWIKEVSSKATKQAIMNGDKAFRNFFKKSKGFPKFKKKKNQDVKAYFPKNNKTDWTLERHRVKIPTLGWIKFKEFGYIPANSVVKSGTVSQKSNRYYVSILVDEDDIQVSNPINEGIGIDVGIKDFAICSDGVKFKNINKTSTVKKVEKKLKREQRKLSRKYESLKEGRATRQNIQKQVIKVQKLHQRLTNIRTDYINKTISLIIKQKPSYITIEDLNVKGMMKNKHLSKAIASQKFFEFKTKLMSKCKENNIGLE

SEQ ID NO: 11131 - protein, 509 aa, unknown
  TnpB Polypeptide
VGALSKKSGEFAQKLADLRANGKAAEANLLVLLRELRETSGPHLQARHWKLALEETSKMAMTHWKSVIAEAKKELADTLKRFHDQDRHYAYWLLCGINRQFFELLDGKVPLPNPDESFDRNYCLSYDRPLSSKTLRSIAGIVRRTVNRIRRESVCYPRTKTFHNRIDFDSSCYTVRSTEEAQFLELMSLEPGKRICLRLKGKSKIRGTLQLIRDTAGTYSLRVYVPQQCEEKRKTGTVIGIDLGYTEMMATSEQELLGTDLGKYFSAIADKRGKNSEGRNRMHSLFRHLLKKSGKDNLAKAERIRKHNLGRKKQRARYIRDIGVIKTIVNRELNLLFTRKTNPIKTIVVEDLSARMKVHLGKKWNRRLSGWMRGYLQERIRYKAKKHGIEVSEVNPAHSSRECPRCHCTDKKNRQGDVFKCSHCGYHGHADLVAALNILGRLGDKEIRKGMSPSRVKAVLDGRYVGWKSLNHTVTDRTSGEERVVDESPRSASSKSELRSNVQVCIASR

SEQ ID NO: 11132 - protein, 365 aa, unknown
  TnpB Polypeptide
MLKAYKYRIYPTKEQEIYFAKTFGCVRFIYNKMLADRKQSYEQNKDSGEKTKYPTPAQYKTEFPWLKEVDSLALANAQLNLDKAYKNFFREIKKGNKEQGLPQFKSRKSNYHSYTTNNQKGSVAIEGNKLKLPKIGLVKIKLHRTFVGIIKSTTISKTPSGKYYASILVDVENKQLAKTDVKIGVDVGLKEFAITSNGDKYENPKWLRKSEKRLAKLQKSLSRKKLGSNNRKKARLQVAKLHERIANQRNDFLHKLSTKLLHENQVVVIEDLKVKNMQQNHKLAKAISEVSWAEFRRMLEYKAQWYGREIIIAPSNYASSQLCSNCGYKNTDVKDLKIREWKCPSCGSVHDRDINASKNLLKLAM

SEQ ID NO: 11133 - protein, 348 aa, Escherichia sp.
MASWLVEWKNATETQWLKDSPSQPLQQSLKDLERAYKNFFQNRAAFPRFKKRGQNDAFRYPQGVKLDQENSRIFLPKLGWMRYRNSRQVTGVVKNVTVSQSCGKWYISIQTESEVSTPVHPSASMVGLDAGVAKLATLSDGTVFEPVNSFQKNQKTLARLQRQLSRKVKFSNNWQKQKRKIQRLHSCIANIRRDYLHKVTTTVSKNHAMIVIEDLKVSNMSKSAAGTVSQPGRNVRAKSGLNRSILDQGWYEMRRQLAYKQLWRGGQVLAVPPAYTSQRCACCGHTAKENRLSQSKFRCQVCGYTANADVNGARNILAAGHAVLACGGMVQSGRPLKQEPTEMIQATA

SEQ ID NO: 11134 - protein, 337 aa, unknown
  TnpB Polypeptide
MPCFYRNNTFLDSEEANIVSLKLYNGKDWIWETFVIRDCDFMYAYSHMKEWKASAPVLVKRNHRYELRISYEMANSKFPKFKKDKEVETVIGVDLGINTDAVCSVVHKDGTVTGQRFINHPVEKDRMHGLLNTIKKAQQNGNHKTPRLWRLANNYNEAIAVKTAVEIVSFALESKADVIVFEHLGMKKKKKGNKQKLSLWRKRDIQHRVEALAARNGIRVSYICAVNTSRLAFDGSGKVIRGKDAGFGTYELCKFTTGKVYNCDLSASKNIGARFFIRVLLKSLSAKEELLVLAKVPELNRRTSCCLATLINAYAVLCASKAKPEASAEGNAARQSH

SEQ ID NO: 11135 - protein, 384 aa, unknown
  TnpB Polypeptide
MPTQILKAYKVRLYPNEDQQVFFAKSFGCSRFIWNKMLADKIDHYKATKTTLNNTPAQYKKEFEWLKEVDSLALANVQQNLRAAYSKFFKQGSGFPKFKKKGIKDSYTTNNQKGTVAITDSTVKLPKIGHINAKFPDKINGLIKSATISRTPSGKYFVSLLVETVVNELPKTQSNIGIDLGLTDFIVLSDGSKVANPKFLAKLQDKLAQEQKVLAKRRAIAKADQRKLSESRNYQKQKLKVAKVYEKITNTRKDFLHKLSFNLIKNHDVIAIEDLNVKGMVKNRKLAKAISDSSWSSFTTMLAYKSEWYGKTLVKIDRWYPSSKTCSNCGHLLTKAELPLSVRTWDCPSCLQRNDRDLNASINILNQGLLLAKQSKTVGATGLA

SEQ ID NO: 11136 - protein, 373 aa, unknown
  TnpB Polypeptide
MRTVIKTYKFKLYKNKKNKYLNDGIDIAASIWNYCIAMHRHYYKAFGKHLSANRLMKHITKVKKTLHPEWKALGSQAVQDVVQRVDRSYKAFFDHVKQKRHGRKSPPSFKKRSRYSSFTLKQAGYAFYNNSNRVTIMGREYKYCKSRPMEGTIKTLTVKHNALGEIYLIVVTKQEYNDILPRAGKAVGMDFGLKHFLNLDDGTVIDSPQWYKTALRELRAAHRAVSRCQKGSNNRRRAIRHLERVYQCISNRRRDWFFKLANQLVGEYAIICIEDLNLDGMKRLWGRKVSDLAFAEFVAILEWVASNAGTTVVKIDRWAPSSKACHVCGTVNPRLTLKQRRLECDCCHTVLDRDTNAAINIKRLGLAQLGYTA

SEQ ID NO: 11137 - protein, 406 aa, Halorubrum sp.
MLLVELRRTAVVKLDVDDDAHQLLQETIDRFKQAAQMVVNDGWNGTEDGYIVTSKTELHDRTYDTVREATNELNADLVCAARNRAANALDSCAEKRKDGKNPSKPQFTSDSIVYNLNAITYYDEYATLATVNGRIEAEYVLPDEDVPPTIYLSDDWKKREATLQHRDGDYYLHIAVVKETDDEPEDAENGTVLGVDLNVDGHLVVTSTGAFLGNADYLNHKRREYEKRRGQMQQTGTRSAHLTIKSLGGRFANWSEDYLHRISKALVQEALAHECTHIAFENLEHIRERISNASKFQQWIFRCIQEYTEYKAAEYGIAVEKIAPQYTSQRCSHVDCSFTHKENRDGDEFSCLECGREYHADYNAAKNIARKLLQHWHKSGAGGASSHLALKSGSLNVNGVYTPTTT

SEQ ID NO: 11138 - protein, 461 aa, Pleurocapsa sp.
VIYNYQYRLNPTTEQKLVLNDWLRICQYWYNRQLGERFDWWEQNRSYTDRCLLVCHLPELKDKPEFYGQKKQLPVIKQDLVSVSWSGELLDFNLVPSQTLQEVCKRVKLAFDRFIAGDKNGKRSGKPRFKNTARFRSMVFEGAKFHSCSVGGKWLYVSLPKIGVLNVRHHRPIPDGAVLKQTQIVKKADGWYINLRLQDDSVPDFQFDIIPSWNNSLGMDAVLHEDDYLATSEGFKLPSLKSFRSAQGKLACFSKRKSAKKKGSKSRRKLAKSEAKLHQQIARARKDHSYNTAHVLLKTGKKVFFHEKLNLTGLSRRNKAKQDDEGKYLPNGQSAKSGLNKSWADAAFGIFFNILKFKAEKAGALVIPVNPQYTSQLLPYKDEFVFTDCGIREYWDEEYQLLIDRDISAGLNVKRVGLDLFPTIIRRKGNPVVVASATNSTLKEVLSTLRGLEKPALYSKS

SEQ ID NO: 11139 - protein, 552 aa, Streptomyces sp.
VGVLREVAASFVVPGPAGVAVRDRLRVSEADAAVLSEVGVFLGSLAAGDLAERCGQGLAHDAASWAVRKRSLTGRSSARWAGSITKATHDQWALARRGQAAHLAWLRGQIASIEARLARPLGAKADRRQGLVRGYASPGEWHAKSRRLQMLKDRLTVVEADRAAGRVRVVRGGKRLARTRHHLQAAGLDEQTWRERWRAERMFLAADGETGKRFGNETIRVTGTGQISIKLPAPLTHLANAPHGRYLLDATVAFRHRGQEWLDRITANRAVAYRIHHDPVRGRWYVTASWQRAATPVLPLQAALARGVVGVDMNDDHLAAWHLDVHGNPVGEPRRFFYDLAGSAQHRDAQIRHALTRLLHYARRCGASAIAIEDLDFTDGTSREKHGRNKRFHRLISRFPTARLRARLISMAAEQGIAIVAVDPAYTSRWGAQHWQQPLTTPRRKMSRHDAAGIAIGRRALGYPVRRRSAPPPHHQSDGAGHRTAQARPDTRRREETRPHIPGPRTGCAPPGRGAKAGDQGAQHRSEHPAEHRSWQQDSLPAQSLGTVREDR

SEQ ID NO: 11140 - protein, 407 aa, unknown
  TnpB Polypeptide
MQRLQAYKYELKPNGEQQRNMRRFAGSCRFVFNKALAMQKALHEQGEKKLGYAGLCKALTDWRNADDTVWLADAPVHPLQQTLKDLERSYTNFFAKRADFPRFKKKGQGDSFRYPDPKQFKIDAANSRVLLPKLGWIRYRNSRDIQGMAKNITVSRCGEKWYVSIQTEREEVEPVHPSASIVGVDVGITRFATLSDGTIFEPINSFKKQQARLARYQRAMSRKVKFSNNWQKAKAKVTRLHQKISHIRRDYLHKTTTTISKNHAMVCIEDLQVRNMSRSAAGTTEKPGRNVKAKSGLNKSILDQGWFEFRRQLEYKQAWRGGQVVAVNPRNTSRTCPACGHVSAENRQTQARFACVECGFEENADLVGAINILAAGHAAMACGGKVLSDLPAKQEPAEATTQGFTLV

SEQ ID NO: 11141 - protein, 365 aa, unknown
  TnpB Polypeptide
MQRVISLTLPKYRELTETIINYNQIANFHIKKALEFQTISKRKLHNICYSEIRSNYPEFPSALIQCARDNAVEMLKGNKSNHYTTKRSTSSIRFDLRTFKMFFALGELKITTIKGRKKYKIKIPEYFYKYQDWFIKGCTLGIDKKNLRLKIIVEGIKFTHNVTSTLGIDLGLKNIAVLSNGIHIKSNEIKRIKRKYAYLRKKLQSKGTRSAKRKLKSLSGRERRFVKDCNHSLSKIIANFCYGITAMEDLKNIRKGKKGKIFNRLRSNWSYHQLREFIKYKVEELGNRLVLVNPKYTSQKCYKCGYIDKKNRNKGQFKCLSCNYSCSADLNASRNISHEAQLFCEQVDVNQPNIAVVAPIDVILN

SEQ ID NO: 11142 - protein, 495 aa, Moorea sp.
MMTTSSNMSKGKKKSGTVKKLSTQVVPVIGMSMVVEAELVAMMQRLGIVRSESYNKLGSVSHWGLDWRKAYPEVRSLRTPESLGLPSKLMEWTVNDVAKSISAQQAACIEALGKILHKRFPGKENKKRRNQCYKQLSSPSFIDDPFLHRIVRKQFQRGHSRIKNQIVYQQNGYSCQRISRHTYQLELAGLRRGKRNRILVRSNRKITGQIRLIYNLQLQRFEIHFLVDHGTINNPTECRFVGVDKGYTEVFYDSDGRAHGLGLGKLATNKSDRIVKKNRNRGQLWALHRKLEKIDPAKSARILENNLSRKTENRRLRKDQAVILAVIGAASKSLFRGESLKVFAEDLTQPIKGFRQSKAMSRRLNTWMKGAIRDSLQKWANWTGSVVSEIQPSYTSQIDSVTGTLLGVRKGDSFTRFNGVVLQADYNAAKNILARGTDQEISRFMTRVEVQAVLLRRTARFLKGMDLSLIDAVELGWLDSKHSKTQAFKELLTGM

SEQ ID NO: 11143 - protein, 339 aa, Acidilobales sp.
LIRTAYSIINSWRKRYLKGKARKTMPRIRRRFARCKITLMRIDYERRIIRVTLKPGEYLEISWANRWFINRVRDWNVGEIIIKDNRILIPFKKNEVEIIEDLVAWDSNELSLDGYSPSRGFIKVDLRYLQSIKIVYEGKKAKAQSLGKRELFEKYSRRERNKEKDFINKLAKQITILLPKAIHILEDLEKEDMVRKGEVEKTRRKRNSRTPWKQIHRKLSEKAFIAKISPKNTSRTCPQCGYIVKTQVGRIFKCKKCGFELDRQKLASLNIYLKYTRMWGFPHSYEPEISYEGELWVGVTLNGWRPRIRAPMIEALRPMKPREERLISLDINRYETRTP

SEQ ID NO: 11144 - protein, 468 aa, Thermofilum sp.
LSGEGKGGKNGEKRVDAFRVWEVKASREVRLRLRSLYFSVASAVERAGEELERRHGEAFTQEPEKFREELIDEASRLAELPKGLLHYGIEWYKMLTEARRKSKRRSRFTPPPMLLSVKIIEGSRRLHGNTAAVAVLNTFRGELRIPSANIAVRLKPSLIRAVLEDVGRFPDLKLTLQLTARGRLRLAAHREIKPAWWNGNDRLAVIAVDVNSSHGLYLMAFAFDSEARLLTQRVFKPPNTTLLRLLAALMRSYSEVKSWSETVERFRERRYAEKLRRAGKGYTVEEALRLAERLRAKINTTPERAERIARQASRKVKKVNNDWVRGVLREVRSLVRKLRDQGYLIVIVADVPQAESLKGSGLQRTLLRVAERVKNLALYEGARWFQPENNVSGKRCPLCGAWGVELGKRYYRCPKCGLVYGRDWAACANAAKLFLKACDAEKHLGALDKWLSQHPRALVHGAPRSIAR

SEQ ID NO: 11145 - protein, 367 aa, Thermofilum sp.
VLKFEAELPEELKDFIERVYQPRASMRYWQRLLGLGDAKLEVAWKEVPWAYRVTFDDMVVPSATPKRKSYLRFPLLSWTLKHHGADLRGKELIIRLYRRVYSIPLPERGVEWLQRQEEACRESGGRLTRYVAVKSDGQVSVVLHCSHSLGVEELLESLDAIAVVDVNSSHGFYFLAYDLRNGGFTVRRFKVPEVNWRRIKLLQRAAAESRSPGAWATARCALRKAYRRRRAALLKAVAEVAKELKGRRALVFVDVPFDESLRNSSLQRTLRSFTGRLENSLGFHGIPVIGRTLPSKRCPLCGAKLEKAERRGETRVMKCTGCGRAFERDSVPVLHALKLFIEESEVEELAEKLARHYRLSSQKKQSN

SEQ ID NO: 11146 - protein, 572 aa, unknown
  TnpB Polypeptide
MSAWDKDNTIGQRCILELALKYTKAQHDLLDKTFRVANDMKNCLIGWYSRQLMEMTRTRLWREVQHGLAELYKAYGPDLAKLEKLEKAIKSEEEHCKKFGTPFVLSGKKAKQRAALKERVKEYKTRERPFITSRNEMLKAYKFSKNDFEKRMMIYRSSYDSLIGSATAQRIADTVWAMFEAYLFKNGRKVIFSRFSGFLAIEGKSNKANIIFNREKMTLTFGKGSNKATVKVKRSKKDPYGYEAEALSRRVCYCRIVRKAYSNGWRYFVQLVLDGPPPVKADPKTGDVLHSLGKGRVGLDIGPQTLAYSAERTVGLVELAEGVQNMQDEIRCLKRAMNRSRKMSNPGMFYPDGQVIPKNRLSSELLDRRGQRKWVKTKHYRQMEVQLRALYRRQAALRKHLHHRLANKMLPLGDKFFVEDMRWKALAKRAKKTRQNRKGKFLSKKRYGKSIANKAPGSFLSILEEKAIRFGGTFQRIVTWEAKASQFDHQTGKYNPKKLSQRWHILSDGTKIQRDLYSAFLIQHTSTNLKSFDQSCCSKDFPAFIAMHDRAISRLKACSTHLPSSMGIKKPA

SEQ ID NO: 11147 - protein, 424 aa, Bacillus sp.
VSHVIRASYFIFKPNNEVDRILIQLGYAARKLWNVANYEKMNWNKESNAPFPDWYDQKKRLKKHFWYKNLPSQSAQEVLKVLQEAWVSFFELKKSGGIESPKPPRFKQKNVNVKFLNNGFCLDGKNLRLSIPAQQKAYLKEKYNIKKKFIYIPVPTHIKLGVIKTVEVKLISDGEYKIILAQEYPNCSVYEKSDKCMAIDIGVANALTCYDYRGHSHIISGRQWLSVERYFHKKIAHYQAISDAQQSVKGIEYPKKSKRVLQLYKKKRAQTFHILHCMTKRVVDIAVQQGVETIVIGDISGIREKANLGKKNNQKFHALPFLKMVQMITYKAEEKGIAVQIIKEDYTSQVCSICKPIPSKEHAKKGNRRHRGLYVCEECKTVINADVNGAINICKRYLKELNVQSVVVLDTPNVYTFNGQQFVA

SEQ ID NO: 11148 - protein, 211 aa, unknown
  TnpB Polypeptide
LLKTFDKKITKRMANLQKRNIKPRSDNKYRKLVDDLREFLKNEINRLINIIIKIYKPKRIVIEKLDFRSPELSKRMNRMIQNFGKRYIKEKLERLQQLYGIEIIEINPAYTSQECNSCGYVDKNNRKDTQEFECKICGNKTNAQINGAKNILKRSSLGNLTKKQVLKILIERYLERLKGCKSAPLDVIKGNPYFKDYLDSILNPCQSLTSS

SEQ ID NO: 11149 - protein, 452 aa, Micromonospora sp.
VQLRYNVRVYPTPGQQIELARAFGCARVVFNDGLRLRQQAREAGEKYISDGELSRRLITEAKLTPERAWLGEVSAVVLQQALADLNTAYRNFFNSLSGKRKGRTVAPPRFRFRKDNRQAIRFTKNSRFKVLDNGRLRLPKIGDLAVRWSRTLPSDPSSVAIIRDAAGRYFASFVVQVADEALPPVESEIGIDLGLTHFAVMSDGTKVAAPKFLRRTARKLKRLQQDLSRKQRGSQNRSKAVVKVARAHARVADTRRDWQHKLSTQIIRENQAVYVENLCVVGLGRTRLAKSVHDAGWASFTAMLEYKAARYGRIFGRVNRFFPSTRMCSDCGRINEKTALNVRTWDCPCGSHHDRDVNAAINVLAAGQAESRNDRGAQIRPGLVPAPRNEAVTHPDAACSTRSVEGISVLQGGEDVNSATSRTTTTRPPGPRSTGWSGGPRCALPATCSTWR

SEQ ID NO: 11150 - protein, 410 aa, Anoxybacillus sp.
VESFLLCRNRKPTHRNANTTVYPKSESEVKAMFVHKAYKFRIYPTREQEILIAKTFGCARFVFNHFLAEWERAYRTTGKGLTYKLCSSQLTSLKKQLVWLKEVDSIALQTSLKHLSDAYTRFFQKQNNKPRFKSKKNKVQSYTTKYTNGNIAVVGNRIKLPKLGLVRFAKSREVEGRILSATIRRNASGKYFVSILVETEVQPLPKTNRAVGIDLGIKDFAILSDGTTYANPKYLRKLEEKLAKAQRILSRRQIGSSNWHKQRIKVARLHEKMTNSRNDYLHKLSTEIVKNHDIIGIEDLQVSNMMKNHNLAKAIADVSWSTFTDMLMYKATWYGKQVVVVAKNFPSSQLCSHCGYKNKDVKHLHLREWECPSCGTHHDRDVNASINLKNEAIRLLTAGTAGLACSFSLR

SEQ ID NO: 11151 - protein, 402 aa, Escherichia sp.
VKRLQAFKFQLRPGGQQEREMRRFAGACRFVFNRALARQNENHEVGNKYIPYGKMAFWLVEWKNATETQWLKDAPSQPLQQSLKDLERAYKNFFQNRAAFPRFKKRGQNDVFRYPQGVKLDQENSRIFLPKLGWMRYRNSRQVTGVVKNVTVSQSCGKWYISIQTESEVSTPVHPSASMVGLDAGVAKLATLSDGTVFEPVNSFQKNQKTLARLQRQLSRKVKFSNNGQKQKRKIQRLHSCIANIRRDYLHKVTTAVSKNHAMIVIEDLKVSNMSKSAAGTVSQPGRNVRAKSGLNRSILDQGWYEMRRQLEYKQLWRGGQVLAVPPAYTSQRCAYCGHTAKENRLSQSKFRCQVCGYTANADVNGARNILAAGHAVLACGEMVQSGRPLKQEPTEMIQATA

SEQ ID NO: 11152 - protein, 159 aa, unknown
  TnpB Polypeptide
MKKGWRGSNESCQDAYEEVIITNCRKKKVARCHEKIRNQRRDYLHKLSRKIVDSYDAVAVEDIDMKAMGQCLHFGKSVQDNGYGLFREMLDYKLAWQGKKMVKVDRFFPSSKKCCKCGRIKKELKLSERVYRCACGNEMDRDRNAAINIREEARRMLTA

SEQ ID NO: 11153 - protein, 426 aa, Dolichospermum sp.
  misc_feature (358)..(419): Xaa can be any naturally occurring amino acid
MKLKVKNQLTVTRIAILGTKKLNAWKSNELDLIALRLGQLRSDLWNEFGSLKAWGISKFEIDKQLRTSKDKYQLPAKLWDSTLYDVIDNIHLAQAACIEKVMKSLGQSFQSFQSKKGVLQLTLESREWLKHPKLCTLVRKFWYRGHTKVCNQIIVKAFDTKLDNKGVVWLRFGGLTKGKTLKLPTTLPTEVKCQLRLIKRNSRWEIHYTTDIQKAEKKTEGKIIGCDRGYTEVYATSSNDGARFLGNNFGKIQTEETDYRTAKQVKRNKIKSVFDKSIAKGNSAKADRIKRNNLGKIKWNNRETSFKGRIQAIVFTATYHLMTDAIKVAFEDLTEAIKSKKPLRKRMKRNVSSWCKGXXXXXXXXXXXXXXXXXXXXXXXXXXXXXXXXXXXXXXXXXXXXXXXXXXXXXXXXXXXXXXLMLLTIF

SEQ ID NO: 11154 - protein, 403 aa, Oscillatoriales sp.
MYQAYKFRIYPTTEQQTYFAGAFGCCRWFWNYSLNLCQQTYKDTGKGLSRSVIQGLLPNLKKEYPWLTNAYSQSLQVVALNLSNAYKNFFDKRGGFPRFKSKHGRQSISYPQNVKVGTSSIKLPIIGEVHCIIHRTLDGTVKTVTISQNTDGKYYASILVEDGLKTPESDTNGKAIGLDVGLIDFVVTSDGSKYANPKHLKKHSRNLKRKQQKLSRKQKGSKTRYKAKRLLARVHSKIQRVRVDFLHKLSRKIVDENQVIAVENLNVKGMVRNPCLAKAISDAGWGMFGTMLKYKAEKLGKIYIEIDRFFPSSKTCNNCLYKVSEMPLNLRHWDCPECHSRNDRDINAARNIRDEALRILALGTSAAANGRNVSQPGKTSVLLDAIPVEVGSPRHSVLARAGG

SEQ ID NO: 11155 - protein, 381 aa, unknown
  TnpB Polypeptide
VRQSFQFKLFGCKRLKHLHRTIDASAEIWNHAVALHRRYYRLFKKTLPKAKLQRHLAKLRNGRMSHWEAVGSQSVQAITDRLYLGWEAFFKGDIKRPPTFRKRRKYRSFTLKQAGYKVLGQGRMKILGRNYRFNQSRPIEGTIKTVTVHRDALADIYITFSCEGVQQPLEAPKTGLSAGADFGLKNFLTLSTGERIAAPQPLKVRLRRLRKAGAALSRKQRGSKSRSRARLDVARVHRKVANVRNDWQWKQARMLLLTFDMLVFETLNLRAMQQLWGRKVGDLGFADFLSKAGWMATKLGRDLVKIDQWTPTTKRCSCCWRIQDVPLNARVFVCERCGHTEDRDVNAAKSILEEGRLLRSGAARKTSQEASGVNTAESHGL

SEQ ID NO: 11156 - protein, 363 aa, Lachnospiraceae sp.
MNKGVKFRIYPNKQQQNLMNQTFGCCRLIYNKGLAMRNAAFEKGQKIGYTQTSAMLTALKKQDDFAFLKDVDSIALQQSLRDLDRAFVNMFQKRAKHPQFKNKHNYHQSYRTINQGDNIRIVGKYIKLPKLGYVKVRQSMEIGHINNVTVEKTPSGKLFVVLNVDFEPEFHPNNGNTIGIDVGIKEFYTDSNGTTVSNPKYLEKTAKKLVREQRRLSRKQTGSKNRNKQRVRVAEVHEKVTNQRNDFLQKTSTMLVRENQTICIEDLNVKGMIRNHKLARSIASVSWSKFFEMLQYKATWYGNEVIKVPTMYPSSQTCSACGYQNPMVKNLSVRNWVCPVCHTRHDRDYNASINILRKGLQSA

SEQ ID NO: 11157 - protein, 481 aa, unknown
  TnpB Polypeptide
MLLTYQFELRVNETMSIILGHLSYAAGKLFNVGNYERKEYKSLGFTSIPDWYDQKKRLKDNIWYKSLPAQTSQDVLARLSEAWKSYFALKSRYEYRKEKGHLKEYEGEPQSPYYKKDGSHTSFKYLQNSIKVIDSQIRFSIPKRLKEHLKEKYNINKNFFYIPLKRTFSIIKQVEFVYIDKNRYKVYIIYEEEVKSLKEDNKHYISIDIGTKNLLTVYDNNGSSFIVSGASLQNTSYYFSKRIAYYQSQYDKCYPKHKKGVSTKGIKHLYELKNKRINLILHRASRYIVDYCNNHDISKVIIGDVSGILHQKKEFNSPKDKHRYNQNMRAICFARIYEYLSYKLKHVGIELIIIDEAYSSGCSPKSLSVSKDYYDKSKRKHRGLFIEGNDIYNADAVGAYNIMRLYRQNFSLYFDTPIKGLSNPRREYIPVTDQFLNEDYINWNGKAGNVGISGRNYPDGYILEDIINQYVTQMLGYSIAE

SEQ ID NO: 11158 - protein, 411 aa, unknown
  TnpB Polypeptide
MSRYRLYPTPTQEDVLLGHCAHARYVWNLAVEQRSCRQPGRPAPGFAEQCRQLSEARAAYPWLAAGSVVVQQQALRDFHAAYASWFASLRQWRRRYATTPPDQRPAAPSPPSWRKRDVNEGFRIVAVGPGDVRQLNRRWGQVTVPKLGRVCFRLSRPVPEARSYRVTRDRAGRWHVAFAMVPPTIPAPGNGEVVGVDRGVTVSAALSTGQLLKTPGLRATEQRRLWLLERRLAGAKPGSNRRRRVRLAVARLKARQADRRRDWTEKVSTDLARRFDMICVEDLDVRAMTRSAKGNLQRPGRGVRQKAGLNRGILAGGWGRLVDRLEEKASGRVYKLPSAHTSQRCSTCGHVAAESRQSQTAYRCVACAWTGNADYNAARNIAAAGQVVAARGGQGSPGPVNREPPTFGAVA

SEQ ID NO: 11159 - protein, 441 aa, unknown
  TnpB Polypeptide
VLKTLKRTVRVESDFLNEWKYRVLREVEEYQKKIVNEMIGAILSEGLPTTRKKLHERFYSDYKEKYPFLPSRVIEGAYIVAGRIVKSFRERKKEGLTRKDKPEYKRVVITIPNTINWRFNRISVSILTHKGWIDIPLKFTKQFTRYLYEGWRVSQELKLRLVGRKILVWLTFETEVEVESKEGNYISIDVNENNVTLAVFEGFRLRELRRYETGLGRIVMNYSLRREEITMGHSTKDELVKKKLRKLRERERKIDVLRKTVKRITELARSLSAKVVVGKFSSRSKEKMEGNKTSKLRHRIHQWSVVKFVDMLKTQPIEVEEVSESYTSSTNPFNGEKLKKRKQVVEKVVKVFNPYLVTGTAHEGGGIRVFKVNARYLESGEVLLERDSIAPLNIARKVDGRVLVFPSTSPKDLRVTVYDPLRGVPVAELEVIKSKDKLRHG

SEQ ID NO: 11160 - protein, 522 aa, Christensenella sp.
MVVRTLVLKLHKPSATKKELIDLAISRYNRALSYLFEHTKENVEPIMREMQEGGAYRTRRITALLQKEMMERLNEFGVQPFKDALKLDYAMAMVAWLSLRKTQKRARYPQILVEEGFDQHFFSLLELFDQGEISREELRLQFDRMYNGLGIKKPLFFGRYAKNRDYCLLYDEIHGRFYAKLYLLGVKDEKRRGGIRRGTARLRYVLEGGEPLEEDNKRERYIVVPLSFGKTQEAVLRKGLENPHIFKTARLLRKNGEYYLSVNVTCEYAQEEKSETYMGITRSLKDAVRYTVTDLRGKVIAEGGIPFGGYLHEKNGMHAAANKLVEIAGRHKSSIITYRMGNIGDKLTYDGETAKLTAGEFNRLIAMTAYKAEMKGLKKPVFVSARGIFTTCPRCGANTQKNRFPGGRLMCIKCGFAGELEKTGPLNAARRLLKYNGTAFLFFARQSGGKLLIYNDILGISYLAQPTQEGIRDFFCYIEKAVKEMKRKGNIQNGMSAREISYRKRFMNLRNVREEITVVDES

SEQ ID NO: 11161 - protein, 176 aa, Cyanothece sp.
MRDAINKAARFVINYCLKHQIGNIVFGWNDRQKESINIGKTNNQNFVQIPTARLKNRIQQLAESVGIIFTEIDEAYSSKASFLDDDLVPNYGEKPKGYKFSGKRFKRGLYKTAKGWLVNADIQAAANLLKKVATQLGINLARVVKECLTVPKRYELDGLSRSYRKQAEMWLQPIEA

SEQ ID NO: 11162 - protein, 397 aa, unknown
  TnpB Polypeptide
MTIYRAYRTELQPNNHQRTDLMRHVGTARFVYNWGLAQKQQAYKSGQKTPSAFDLSRILNSIKANEFPWMYEVSKCAAQESLKNLDRAYQNFFRNCRTQKKQKGFPQFKSKAVGLGSCRLTGAIHVSPTHIQLPRLGLIRLRQHGYLPTADVKILSATVSERAGRWFVSLQVQRDIPDPFPKPESIVGVDLGIKTLAVCSDGTEYANPKALRSHLKRLKHYQRLMSHKQNKSRNRQKAKQKVARLHLHISNIRKDCLHKLTTRLTKTNSTVVIEDLHVAGMLRNHRLAQAISDVGFGEFRRQLTYKGLWYGCEIVVAPRFYPSSKLCSDCGLINEDLTLKERVWTCECGAVHDRDRNAAINLKSLAGRSPERLNARRETRPLVESSDPSKSVSMTQE

SEQ ID NO: 11163 - protein, 375 aa, Bacillus sp.
MLLSQKYEIFPMKEQKETLGRWLQYCRQTYNSALLDKQRKYKENKQLYTRFDMQKQQTMDKKMYPFLKEVPSQPLQEVFLRLEKAYDGFFRGDANYPKLKKYKDYNSLTFTQFGFKPNGKYRLVMSFAENGKLYNKRLGEIDIFLHRPIEGTIKQLIIKRQSKRWYAIFSVERQVVPSSVVIENAIGIDVGLQKYAVLSNETVFENPRFLLQKEKQRRKAQRNLSKKKKGSANYKKQVERIRNLHEKVANQRKDFLHKLSYHLTQVYSVICIENLDIRKMVRNRKVSKSISDAGWGAFRKMLLYKCEKFGGLLVKVDPAYTSQDCSSCGNRVKKSLSIRTHICTKCGMVLDRDHNASLNILRKGLEQLLVRTTED

SEQ ID NO: 11164 - protein, 441 aa, unknown
  TnpB Polypeptide
MRITSSYGVEIKKQNIPIRHTLRIYRSAVSYLIQVYAESWEGLSQIDNAKKRFNAAEHLVHETKKNHARYDFDLHFPKMPSYLRRAAIQHALGSVASYETRLDLWENGLLTGKPKLVSENHAMPVFYRDVMYREAEPQEDATYLKLYDGHDWKWFRVSLSHTDMEYLRKNWAGKKAAAPVLEKRHRKYFLRFSYTEEVPLTKTPAKERIICSVDLGLNTDAVCTIMRADGTVLGRKFIDFPSEKDRMYSVLGRISRFQREHGSAQVKSRWAYAKRLNTELGRKIAGAVTGYAEENHADVIVFEYLEMKGKISGKKRQKLHLWKKREIQTMCEHKAHRYGIRVSRVCAWNTSRLAYDGSGPVSRDPKNHSLCVFQSGKQYNCDLSASYNIGARYWIREIIKTLPETERSSLEAKVPAVKRRTSCVYADLRKLYVEVNNLKAA

SEQ ID NO: 11165 - protein, 406 aa, Oblitimonas sp.
MRRLQAYKYELRPDGQQERQMRRFAGSCRFVFNKALALQKERYEQGEKKLGYAGLCKLLTEWRNSSETAWLADAPVHPLQQTLKDLERAYSNFFAKRADFPRFKKKGQSDSFRYPDPKQVKLDQANSRVFLPKLGWLRYRNSREVLGAVKNITVSQSCGKWFVSIQTEREVEQPLPQGGAVGIDMGITRFATLSDGTCYVPLNSFKRHETALRRAQQSMSRKTKFSNNWKKAKARVQRIHSRIGNARRDYLHNATTTISQNHAMVCIEDLQVRNMSKSAAGTIEKPGKRVRAKSGLNKSILDQGWFEFRRQLDYKLAWSGGYLIVVPPQNTSRTCPACGHVSAENRTSQAKFACVECGFEENADLVGAINILRAGHARFACEVSDAVRSPAAGTHRSDSEAAQCRP

SEQ ID NO: 11166 - protein, 504 aa, Nostoc sp.
VAKSKTPSFVTTIPLLVDSKQESELLARFQASRQLYNACLNEAITRMKLVKQSDIYQTAKKLPREQKKQRSNMFSEARKLYRYSDYELQAYATLVSNKSKWIADKIDSNTQQTIATRAFRASEKVLFGLAKKVRFKTPNRFKSIEGKTNKQGLRWKDNLLVWGKLKLNPIINESNPVIEHGLSSPVKYVRLLWKEINSKRRWFIQLINEGLPYQKPQNYISEGIVGLDLNISNIAFVGDNHSGLLPFADKVPDFQKEITRLQRKMQRSQRANNSENYEADFLAKKGRKTVVKQGKVKKSSRKWNKSKYYKKNAQKKRELERRKTSYAKSQNRKVVNEILRHGNIIKTEKVSVKGWQKRYGKAISAKSPGFVQSELKRKAENAGGQFITFSTSYTALSQTHLDGSRIKKSLSQRVHRDVTGIVMHRDIFSAFLSRYVNEDQLSLQDAQCEYPRLEQTLWLAWQQYQTNCEQVGESERRLTHSSSEQFNHEGKSVNQIAVKSEKLA

SEQ ID NO: 11167 - protein, 536 aa, unknown
  TnpB Polypeptide
LVDISYVSTIACYIRSVENKGREKVQVRWNFKLLPNQTQEATLEDWLVTLRKHRNYALRERTIGFETNNKDSDSAIIYAYGSYCDLDSRIEFGSGCPLTCPVLKHGVIPQDLELATKETKVKDKDTKKVVETVVKWDSASGIQMKVTTQLRSSILHFSIINSAVLQTNIARLDTAFSNFYKRRIGYPNFIRRLDSFEYKPGHVQLRHIRKNYATAYLPGIGDVKFLRSRDLTLIQDLRTCTITRKGGNWYISMLVNIADVLPAIKSLEECKSVVGIDVGINKLIALSDGSFQENKRISTNKRTARRMAMRQRAISRKLKGSKNKIKAVKKLAKQQHKLAQRRDGYDWQMAKVVVDTADVVARENLNIPNMVKRAKPSHDGKGGYKRNNAAQKTGLNKVILDASWGDIFDKIAWLALKAGKPVVEVPAKYTSQECPKCGHIDKKNRKGEKFLCVVCHHVDHADTKASRLIGRKVGLVFLKNKLTLPADCGKVTPSSYQSIVVETGNHAFGNHRHVRETPTVGYLGDTAEPLKESRRL

SEQ ID NO: 11168 - protein, 292 aa, unknown
  TnpB Polypeptide
MCYNCFELLKKREFCFTEQIINIDRMENAVALFGSFDGNIKLIEKEFNVRVTCRDSELKVEGDAENTSKACKVIESLLQFINRGEALSEQNIRYCISLVNEGSEDKIEQLAGDCICITSKGKKYENPKTIRKYEKKLAKLQRQLAQKKKRSQNYNKIKKKIALCHEKITNSRKDYLHKISHEIISENQVIVSENLQIKNMVKNHHLAKSISDVSWYELTRQLEYKAKWNGRKYIKINTFYASSQLCSACGYQNTETKNLSVREWICPVCGTNHDRDINAAKNILEEGLREIA

SEQ ID NO: 11169 - protein, 410 aa, unknown
  TnpB Polypeptide
MSLPVRATVTARVEAVTPKGDEGLLVEFLRTYRDSVQLVIDEIWGLSEIPSWTELHSMFYSRLVKYGFRAHHVSEIYKRAREVVESTKKNNGSKPTLKKLTARIHTLDYKIDLDKKTLRVAVLHGKWIELELKWYSYLDKYLDGSWKPGEILLSYRYGRFYVYITFHKDIVPREPEAIMGVDLNFNNITYTIINLNSELVSMGVIPFKGLKKALHYRKLAENLQRRHPRNWRFLKWARRIRARWLNKARNILVDTAHRVSKKLVEIAREYNAVIVFEDLEKIKENSNGGEKLSWEKPLWCYRRIQEYTEYKALLDGIETIYVNPARTFRKPPNGRKLRFINYRFLELGESITTRDVVASWNLALRGLKQMRGFWVKWSPDSPRSEAMKPRAKRGNPEAKKHTQLIIAIHK

SEQ ID NO: 11170 - protein, 382 aa, Methanobrevibacter sp.
MKTVVKSFKIRIYPNKTIQNSLHENFGYNRFVFNQLLGNNKLIFDVVVNNPRINPHNHRPSINRSATNNWLNYFKKTYSFLRDGESTSLQSTCDIYNDSFKRFFNKQNDYPCFKSKKNPVQSIRLKNNNNSIRFENNKLKLPKCGFVKYKDNRIIKGDILSATVKFENGRWFAVLNCKNVIVEPLPKTNLSVGIDIGLTDLVTFSNGEKRKPITRLAKIESQIAKHNKNLSRKIKGSKNWKKNVAKLHKLYNKVFNIRNDEYQKLSTEIVQFFDLIGLEKLQPKNMIRNRRLSHSISQIAWTRLVDMIKYKSEWYDKIFIQVDRFFPSSKLCSCCGWKYEDLTLAIRKWTCSECGTQHDRDINASINILNEAIRINKECTIG

SEQ ID NO: 11171 - protein, 401 aa, Limnoraphis sp.
MMGNCQVRFLGGRDAATYALLPDNKVLRYWMDNRGVGKKEMYQYNTQLRAEYTFVAELNSHACQASVENVERAINRFFDNCKKKKPGKKGYPRFKKNTRSVEYKVSGWKLHSSKRRINFTDKKGIGSLKLLGKWDIHTFPLDLIKRVRIVRKADGYYVQFCVKADNQQDAPNTNTEVGIDVGLEYFYSDSSGNHEENPRFLRKAEKNILRSQRQIYKKKKGSSGRKKARGVYGRKHLRVTRQREEHAKRLARNLCLANAKVVLEDLNVSGLVKNHKLAKSINDVSWYQFRLWLEYFGQKFGREVIAVPPHFTSQECSKCGTKVQKTLSTRTHSCPTCGHVEHRDVNAAKVILSRAKARQCVAGVPPVVAPAATGGQPGSNASGVVASTPVGRKTCKSKQRR

SEQ ID NO: 11172 - protein, 390 aa, unknown
  TnpB Polypeptide
LFQKWYNEIRKERREMANKAIKYRVYPTTEQSIMFAKTFGCCRKVYNLMLSDKIAYYKATGKSIQTTPAQYKDKYPYLREVDSLALANVQLNLQAAYNNFFDKKRKARSGFPKFKSRKARNSYTTNNQKGTVAIIDDKYIKIPKIGKVKAVIHRKANTDWKLKSATISKERDGSYYISMLYEFERVVTKVSKSKNAIGLDYKSNGLYMDSNGNVGANHKFYREAQKKLAKEQRRLSRMKGSKKNEPKSNNYIKQLHKVNKIHRHIANQRTDNLHKLSTEIANQYDVVCVESLNMRSIANRGFGNGKATYDNGYGMFLNMLEYKLSDRGKYFVKVDKFYPSSQLCSCCGNKKKLTLADRIYKCDCGLTLNRDLNAAINILNEGLRLLNEVA

SEQ ID NO: 11173 - protein, 378 aa, unknown
  TnpB Polypeptide
MFNKLMKKNKAIKYRIYPSKEQQGLILKTFDCSRFVYNYMLEESIKAHENGESFCTRNSFNYLLTSLKREFLWLKEVDSRALLSANNNLAAAFSNFFKKNANFPKFHKKKFSGSYTTMCVNENVALLDKGIKLPKLGKVKASLHRMPKKDWKLKSATVSQSSDGKFYASVLFEYESDINYQVDLNNAIGLDYASNGLFVDSDGRRGTNHKFYREAQKKLAKEQRKLSRMKGSKKNEPKSNNYIKQLRKTNKIHRHIANQRMDNLHKISTEIANQCDVVCVESLNMRSISNKGFKNGKATMDNGYSMFLDMLEYKLSDRGKILVKVDKFYPSSQLCSCCGNKKKLELSERKYICTCGLEIDRDLNAAINIKKEGLRLLA

SEQ ID NO: 11174 - protein, 422 aa, Bacillus sp.
MASSKEKTPSFIATIRLKTNAKEEKLLLMLSDCGRQLYNACLGESVKRIKVIQNTELYKETVRLSKTSETDIEKRRANFKHLNATFSFTDYSIQSFGTKTKNASKFIAEHLGTHICQKLSTRAFKAVQKFAFKKAKKVKFKRKGEFVSLEGKNNKTFLTYSNGYVFIGKTLSLKCLIDPKDQWMQYALKQRIKYCRLIKEEVKGKNRFYVQLILEGHSHRKYELGKEEFGLDIGPSTLAMVGESKAELREFCEEVVLLDKEKRRINRKMDRQRRANNPNHYQSNGVMKKGKKKWVNSKGYINTRSEHRELERKIKEVRKQLHGRDTNQILQQASSIQTEKLSYKGFQKMFGKSIGRKAPSMFLKMLKRKVESQGGRFREFPTYSTKLSQTCHCGAIKKKDSRTAGIVVIAGSGHNVIYTVHF

SEQ ID NO: 11175 - protein, 389 aa, unknown
  TnpB Polypeptide
MAKRKKKDAACELVAYRFYGVPSEQDAVQEDKTFGCCRYLWNRMLGDRNTLYAEIGHVPNNTPADYKDLDECLFLNAVDSLALANTALNLDAAFERFFKKTGGYPRFKAKKRAKRSYTTNTVYGSYKGRPRCNIHLNTSNGLLKLPKHRDPVRLKLHRPIKPGGKLKSVTITQEPDGKRYYSILMEYPKPQAAAQPVIQNGIGLDYSMPNLYVDSNGASPVFPKPYRTMEPKLARAQKKLSRKKPGSKRYEKQRMKVAKLYAKSKHQRKDVLHKLSCTLTDTYDLIAIEDLDMSAMKQALRFGKAVSDNGWGMFVSMLTYKAEQKGKLLVKVDRWFPSSKTCIACGHIHKELKLSDRTYLCPVCGHAMDRDKQAARNILNEAKRMTGAA

SEQ ID NO: 11176 - protein, 390 aa, unknown
  TnpB Polypeptide
MRAIKSVQQHYTPSPEILRMLDEFRQMMNTCTQVGLAENVTSLKALSLKAYKQLAGYDAMSYYKLCAISSATGILRNCRRTARDGEKPTTPYVRRLRLTTCYGFKIKDGCLQLPYHPREAIRIPLTPHVQATIRKHTVRSITLTKDKLSLTYTKQVAEIKPDGFIGIDRNLNNVTLAAADGTIVKHDLSDATRVKATYRQVRSRMRRNDVRIRREITSKYGWKQQEKVKQILHHASKLIVQQAKRQQFGIVMEQLTGIRRMYRRGNGQGLRYRGRMNSWSYAELQRQIEYKAAWEGLPLLYVHPRETSAKCSMCGSRMARIPEENRLLHCPSCRVSVDRDVNAARNILARGVRFAPVALPVEAMVQEPSAGDPESRWKRVNELKPHDPTS

SEQ ID NO: 11177 - protein, 404 aa, Blautia sp.
MKTGYCIKTMKYKLRCPHPEWLERTEEHYRKVLIFYYHLLLDHEELWEQNLLQIQGNLEHLTIAGRDGRQPEHPIPFDKVPVYFRRSAINKASGNLKSLLTKYKNAGKTPDFTIPESINASVTYFKGMYKNMQEDRIDLKVWDGEKWHWMDSRLKGQAVPEGSLLLSPSVVFKNKEYWLHVPVKLQTSDARNAKERMRDKENICSVQFTNTYIFAMCCILDADGRQKAVYSCRGGDAYSAECKAIKEKIAKSRIYTDNDDTPQPNQRYYMHLKNLYEHYAHQVSREVVDHCIQEQAKVIVLPTYDEAFTKMVRYRSGIYSPLQLEGRIRKFLKYKAWCEGIVVLELSAEGTSSRCFNCGGKVKKKGKMFICENGHQGSRFLNSARNLGLKCLQDFADKRKTDKA

SEQ ID NO: 11178 - protein, 400 aa, Oscillochloris sp.
MPRTIQTTYRYRLTPTVAQANLLNQFAGARRWVWNWALDRKMAHYRQTGETLGFAALSEELTCLKQQPQTSWLREMDSQSLQQALRDLDSAYQQFFRRVRRGEKRKGFPRFKSRKTDTPRFRIPQRVVLHAEAVSVPKIGLIRAVVHRPLSGVTKGATFKREPDGHWYVCFVSEQQVASRTERPVQTHVGVDVGLKSLAVCSTGETTPNPRWYRTQTRKLRRAQQALSRKLRGSRNRGKARVVVARLHQKIRNQRNDFLHKLSTDLVRHYDLVSIEDLSIRGLAKTKLAKSVLDAGWGMFRAMLEYKADRNDSHVVAVGRFFASSKMCSACGLVNADLALSDRVWTCPCGVQHGRDLNAARNIDHEGMRLFELRVAAGDAETQNACGDPVCPTVVVGTGR

SEQ ID NO: 11179 - protein, 354 aa, Curvibacter sp.
MLLVYRYRVKSLNGLLNKQARAVNFVFNYCNDRQKDALRFDRKWLSGFDLNKLTTGSSKELGIHSGTINAVCEQYAKSRSQKKRPYLRYRGKRHLGWVPLKGRDLRETPAGFHFNGREFKVFKSRTLPAGATIKDGTNFSQDSRGNWFLNVCVDVPAAPARPIQSGIGIDLGLKDFATLSNGERIAAPGLYRGAEDALALAQRANKKRRVKAIQSQTANRRSDFLHKLSTRIVREFDLIAVGDVSAAGLARTNMAKSVLDAGWSCFRSQLAYKAVKHGAWFEEVNESFTTQTCSDCGAQPDSRPRGFAGLGIRRWVCSECGSLHDRDVNAAKNILSKLVSGSGHRTPAEGIPVL

SEQ ID NO: 11180 - protein, 395 aa, unknown
  TnpB Polypeptide
MANYTVRKLKLEYSEQLSELAHAAGELYSQTLVSFWRTVRKKNVWLSGYTMEKWLMSDKLHAHSSDAVTQSFFASLKSWRSRRKTDPSSKPPRRRRWYYKLIWKSSAIKIKDGKLRLSNGKSNQPLIVDWHWDKPKQIELGWNKASKCYELRACYSESKVELVENGGVSGCDLGEIHPMVFSNGINTDIFNGRLLRSKRQYQNKLKAKLSNLIDTKKRGSKRRKRLIKSKQKQLAKLKNQIKDIEHKLTSKAVSMLQEKNIQTLVIGDVRDIRKNIKYGKKVNQKLHQWNFGSIRSKLEYKCAKVGINTELISEAYTSQECLSCRKRNKPKNREYKCSCGFRWHRDGVGCSNIRAKYLGEIPVVGLMASPSGVRFEPHLQCNPKRSRLENPLVLS

SEQ ID NO: 11181 - protein, 271 aa, Escherichia sp.
MIKQQAFKFALKLNEQQKANMLLFAGACRFVYNKGLALLKESYESGQKHMHYNQLAPLLVEWKSDPALSWLKQAPSQSLQQSLRDLDKAFSNFFYGNAEHPRFKKKGQHDAFRFPSQRVKVDQEKQLVLLPKLGWVKYRKSRDITGDIKNVSISGKLGKWYISFNTQTDIEEPVHPAISKIGVYVDAKKNITLSDGTQYIPPQSLITLPKQIQRLTNCLRKKNRYSNNWLKSKHRINRLSSRLNQVKVDYLHKASTAISKNHAGDAANLLI

SEQ ID NO: 11182 - protein, 470 aa, Scytonema sp.
MSKRKKKNQGKRKKSLSEIIRTDVWDFATKPEEKQQLIMTIEEYRRFLKPLVLIINARWIELADLSTKERVASVEKIIHKTTDNPEPKHSYYQKVVYKYPSFRKFPSYFRRAAIADALGIVSSFQTRYREWQSGIRSRRDAKPPRLTAMCNSYPCLYQGQQVRYGLNYSSVDIKVWNGKDWVWINKIPVKGHGNNRHLIVGNEMQSPTLVVNKKTCQLSMPVKILQVNKEESERVCSVDLGINNSAVCSIVDIKGTVKARLLINPARDIDQRNQRRMMIAHKSKQTQARVGKDKKLPKGFCKGLYRKSSNINLEIARKVSKRIIEFANLHKVKVIVIENLEGWKAKAGRKKSLTKQKFHLWCHRKIVETLTQRWSELGGIVQAVNPKYTSAYAYDGSGKVKRNKNNYSIAKFPSGKFYNADLSASYNIAARYWYCVLIGDSTFSRVFVDRNSTNKSRTPITLGTLWSLSS

SEQ ID NO: 11183 - protein, 353 aa, unknown
  TnpB Polypeptide
MKYLLRGYNLKIYPTEQQKCTFQKYFNGVNFVYNWGLEQRIKHYQETQKTLSLYETQKLLTLLKKEKGTAWLNEVNAQSLTFALQRVDNGFRNFFRRVKKGDKELGFPKFKSSKITEQSFYSQQGNSLNLNQKNKIIVYRHKKGGKHLNFLNIMNVKNIAVCISSVKYKEELEKGIVKGVTITRQKDGKFFASLCVNIPCAALPRIDKAKKSSIKIDLNTCNPYVAFSKNLGLPINHWDFLNVDLQKIKRLDRKLPRQKQGSVRREETRKKLARLHCKIANRRKSFLNNISKKIVENYKKIVINDMYIAGSLLPKQRKKTRDFNRTLLDKGMGEFKRQLVYKAAWYKRKIILV

SEQ ID NO: 11184 - protein, 490 aa, Moorea sp.
MARKRINKKSEYVVTRTGYCVGGQIERARNMAIRTRRLRSDIWNQYGSLKCWGIKAQKIRNEFKTSNPPEMYGLDSKQWQMTFERVIDDIHACQEAAKSVIIRKIYSHFKPQKDVNGKTDEKTSFRKELCLSLNSFQWMKYPLLHRWMRSAYHRGHSWVDNQICVGIGNGATISRVSRNVVKVTINGNKISARRYEKLDLYFKVGRCTPTGSFRIIFNDNLGTVELHYPKVVKRQETKGIGKCGLDKGYTEALTGSDGQVYGDGIGKVMQSTVTKRHSRGKGRNKLYQVAKKTGNNRIFVANLGKKKWLSRENKKKATLNSLIRHGVNQFFDKYEQAIVEDLSFVVKGKKQAKKLNRNLSEWCKGIIQKALEEISYRRQSSVVVVNAAYTSQVDSRYGVLLGTRVRDQFFTFDGVVLQADCNAGCNIEHRFDDPDISRFMKSKDVRKVLIERTASFLLERGFTLNDAVDHGWFDIRHLKGKRSKKATGLQ

SEQ ID NO: 11185 - protein, 380 aa, unknown
  TnpB Polypeptide
VRVFKSVWQRYAPTPEIAWLLEQFRQMLNDCIRIGLAENVTSLKSLSLKAYRQLSGYDVASYYKLCAISAATGILRNYRKAKRKNPHVREPYARRQRLTTCYGFKVRDGELSLPIHAREHTRIPLNQHIQATINGFAVRSVTLTEDRLSLAYASEVQQVQPRGFIGIDRNLDNVTVAATDGTVQQHDLSEATRVKALYLGVRTHFKRNDVRIRREISGKYGQKQREKVQQVLHHASKSVVEEAKAKQYGVTMEKLTGIRRLYRRGNWQGRWYRGRMNSWSYAELQRQIEYKARWEGLPVIYVHPHGTSSRCSICGQKMKPEENRTLRCPSCGYVVDRDVNAARNILAAGTLRFGVVGLTSEAMVAEPASVRQSAKSMRGS

SEQ ID NO: 11186 - protein, 402 aa, unknown
  TnpB Polypeptide
MYLVEQHIISVNDKRYKDLDRICFLSKNLYNAALYTIKQEFLCTGKWIRAGELNKKMVAENNIDYRAMSGSSSQQVLMALDKNLKSYFSAIKSWKRDNKKFTGCPKFPRYKHKTKGRNVFSYSYAQFKHKGNFIFFPKKEGLPPLKTNCKEGSVKQVRFIPKADCYSIEVVYESSVKEQLPDNNRIMSIDLGVNNLASIVTNTNNKPVLIDGRKLKSINQYYNKKRSKIQQQLKKVNGKENSRRLMSLTRKRNNKVKDYLHKASKEIINTCLEDNITTLIVGHNDGWKQESNLGKRNNQNFVSIPFDMFISMLRYKSERQGLRFVEVNESHTSKCSSFDLESVEQQVCCFMRSVSAKDHQTVKLQLIVILLHCFYLVQSVLIRFAHQLERSTAAAKDRSALC

SEQ ID NO: 11187 - protein, 421 aa, Acidimicrobiaceae sp.
MTIIRHPSLRRVTGLSYFVNVITGPVKRCRTYRYRLHPTTRQIQALSRQLDYQRELFNAALEERIGAWKWERRSVTLFDQHKTLTGLKEVRPEVVSGGITLCRGTLTRLDRAFASFYRRVRSNETPGFPRFRSAASWDSMQWEDRSGWKLTEGHRLRLMGIGEIKLNYHQPHSGTPKAITVKREGRKWWLSVRCVDVPAQPLPSTGREVGIDMGVVNVVATSDGKLLIGEHFGSKAKVKLAEAQRRLATKQRGSNRRHRQAEAVARLHRKVRNKRSSAAHQLSRRLVNDFDFIALEDLAIAKMTASPKPKPDPENPGNFLPNGRSRKAGLNRSIHDAGWGNLVLMISYKAESAGRMVVRVNPHHTSQRCAQCGHIERSNRVSQAAFSCQSCGHEDHADVNAARNILWAGRAQRVHARAGSH

SEQ ID NO: 11188 - protein, 408 aa, unknown
  TnpB Polypeptide
MDCKTFDVKIQENSLNNKQKEALERIFLEQKWYKNYIINWSNQSDQNKLSKFDTKLTSITKKDKDMNDVDVKIQYLSAQSRQCLLSRMLANAKSIKTLSNKGFQKGGHLKFSKEETIIDLKQYGTSHKIVSNKKVKVAGIKKALVVNGLKQFTSIQGIEYANARLLKRASGYYIQFVCYVPKETKQYINQTIGVDFGCETTFTLSNGEKVQASVQESDRLKRLQRKLNKKIKGSKNWCKCKSQLNKEHEKLTNKKNDLTNKVVYKLTEYETVVIQDEQIARWHKSGHGKKVQHSILGRVKSKLKSKPNVVVLDKYVPTTKVCTKCGCCHDELKVYDRTFKCDCGVEMDRDVHAAQNMVWFYKNNVGTLCHNVGVGRTESKRVEMREKILDAIRHSKQSASLNHEADTL

SEQ ID NO: 11189 - protein, 423 aa, unknown
  TnpB Polypeptide
MTNMTLVAETKLYLKDNLSLYNYFDDYSKLFNFLVRRALHHLRHKLNGEPESKYRTRLMLEFGITNRMAKAIVKTAKDQLVLLKGLARYRYSNLYKRRRSLQKKIEKLKLSLNSNRLKRRKLAKVRLFWTQMKLNKVNQLISSGVKINLTFGTKHLLKTNKQKFLAKRDNQVSYIGDKNETCGNQQFQIKFDSKHNHFNYKLRLDNKWISGSNKYIFGSFVLKNKEAKANILQTLSTKLSNPLTYRILKRDDTLYLQILYRRETPNITQNANGVLGIDFNKGFISVSEINQNGKLQSLTRYNYLHKGKATKTKTSMLELASKLVAQAVNVGKDIVIEDLISLDSNKKQEKTISKAYNRMINSLKFGLFKRCLLSKAAKEGVSVHTVNPYNTSQIAKENYTNKMKLNVHDAASYVIARRFYQYD

SEQ ID NO: 11190 - protein, 426 aa, Gloeocapsa sp.
MMTRRVTFRLYPSKAQMAKLFEARRLHAYLFNACVEHRKTSYQKFGKSINYLTQQAALVPFKDCWNEYKALNHGSLQATVKRVDFAFVRFFKGLGGYPRFQSIRRYSGWTYPDARQGFKVHSTGVNGYLELKDLGCQIQMRGKARQWGTPSTCTIVYRNSKWYASITVNCEVFRETGAGAVGLDFGCLTAVATSDGTMVENPRFLASMKTRISKASRIKRRKIKPDFKKKIKASKRWKKANKKVSNLQRKVASQRQDWVHKVAAEIVSSNSLVATEKLNIKGMTRKPKKGSKRKRQKTGRNRSMLDVGMGALRLAIEYKLAEAGGIFMEVPTQKVKPSQTCPNCGHQEKKTLDQRTHQCKECGYTDDRDVAAAKVMLSWALGTNVLNRGEESSTSSPTVRKDCGGMKQLASLKRQKLQVQPPGDLE

SEQ ID NO: 11191 - protein, 445 aa, Gloeocapsa sp.
MTQKTSYKKIIRTDKWKLSPTREQKELMLLTVKEYRRLCRFLVTVVSTHWVELGGLKSDQVVPAVEKLVHATSKNTKPKYPQFNKSFHKFPSYLRRAAIMFAVGQVSSYMTRYYEWQSGIRKRRDAKPPVLNPDTGCYPSLYKGQCYKLHEFKIVEIKVFTGSDWIWISVPIISLRERHQVETNQIKSPSLIVSSKQGHLSVPFECNPEKITKSGVVLAVDLGINTTATVSVVSQEGTVIYREFIHPGRDIDRRDKRLKSISMKAKKTKKLSCGFCKHTYRKCRNINQQIGHIVSKRIVNIAKSFKTEAIVFENLKNWKPKGGKKRSNLKQRFHGWLKSLIFTLTQNKWIELGGKIISVIAAYTSKLAFDGSGFLKRDSKNYTLATFNTGKHYNCDLNGSYNIAARGWQKLTERKYREERGSKSSTRSPRSWACLCDLWFSTQIA

SEQ ID NO: 11192 - protein, 368 aa, Gloeocapsa sp.
MLLGFKTCLILNNKQRTLVAKHAGTARDAYNWANGLVKEILDHNKANPTNKIKFPSAIELHKWLVAIRKKDKPWYYEVSKCAPQYALRQLREAWDRCFKKISGVPQFKKKGKHDSFTLDGSIKILSSNKIKIPIIGVVKTYERLPQLDLVKNVTITRQADKWFISFKIEAEELTTTSSDIVGVDLGIKALAVLSTGKVIDGAKSYRKAEKKLGKLQREVSRKVKGSNNRAKAVTKLAKAHARIANIRKDTLHKLTTYLSKNHAVVGIEDLNVSGMLANYKLAKAIADMGFYEFRRQLDYKCKLYGSKLIVIDRWFGSSKTCSNCGCVKESLSLAERTYYCGECNFSIDRDLNAAINIERYAASSVVSV

SEQ ID NO: 11193 - protein, 396 aa, Gloeocapsa sp.
MEKAFRYRFYPTPAQENLLRRTVGCVRLVYNKALAYRTESFYNGERIGYNQTSAALTQWKKQEDLSFLNEVSSVPLQQCLRHLQSAYTNFFEKRASYPQFKKKRNGGSATFTRAAFSWKDGKLYLAKCSEPLAVRWSRQLPRNADPSSVTVRLTPDGKWFVSILCDIKILPLPRSTQEIGLDMGVSTLVTGSDGTKVANPNSLRKALKKLKQLQKSLSRKEKGSNNRRKARLKLAKHHAHIANIRKDHLHKTTTQLIRENQTIVVESLNVKGMMQNHKLTQAISDASWGELVRQLEYKAQWYGRNLIQVDQWFPSSKRCSNCGYISPKMPLNVREWDCPKCNTHHDRDINAAVNLLAVGQTVTACGATVRPKSSKDIGGCNEAGTVKPKSSQRKRT

SEQ ID NO: 11194 - protein, 710 aa, unknown
  TnpB Polypeptide
VAGDSGFLPNAAADAASAYTTSTAAGLSRSISSSSRWNGSGWSGRDGTMTRTRSLPAARSALVPERTPPSMYRRPPMVTGGQTPGTAQLAATASTRATPESLVKTTVSPVSASTAGTSTARSGQVGTGSRAATAASRGSSATVLVRSASAPMARSASSRLVTPAVAAVNRANSSSMSSSTSISADASSSCRSYRSASGVPLVICAATADPADVPTIRSAAITRSARSGSASCRPRSTPSSHAMPATPPPARTRARFTKQPGGCPGLQAGEESGVPCSRAESSSGGYGVAPAFFRSRVRYCKGETAYRCRAYPDQAQQQVLNRTFGCVRVVWNRTLATRQARWHQAGKITSYAESDRALTAMKKDPDLAFLNEVSSVPLQQALRHQHQAFTAFFARRTRYPRFRSRRSRQSAHYTRSAFTIRGGELRLAKTSAPLRYVWSWPDVDVTSLDPAMVIISREPDGRWYVTFTADAAAPEPLEQTGHATGIDLGVTDFAVTSDGDKIANPRHLERKARNLARYQRRLARCQNGSANRRKAAAKVARAHRKVRNAQSNFLHRASTRLVRGHDLIVIEDLAVANMVRNRHLARAISDCGWGEFRRQLEYKCQRYGRELVVIDRWNPSSKTCSECGHLLAELSLSIRVWRCPSCGTRHDRDINAAKNILAAGRAVARGSPGDACGAEVRHSGSSRVHSAVNQEPRPARAGIPVLQGGE

SEQ ID NO: 11195 - protein, 286 aa, Thaumarchaeota sp.
MEQNTRVKDRMIHLPTFGWVKLKERGYLPAGSHVLCATVSKRAGRWFVSIGVRKKRVRGPENDVEGPVAGVDWGIIHLATVSDGTTLERSPRLERLKWQARHAQKALARKAKGGRNRLKALLRHQKIWYRITSIRVDRLHKFTTTLARTKSVVVVEDLAASNMASNHSLAGAIYGGAPYEMRRQLEYKTKWHGTRLIVAPRNYPSTKMCSGCGIKNGVSLGERTYHCAGCGLVIDRDLNAAINLANYYHCYGTASSAGRACQMQEVTSPQGLVPAGEAGRVSGAVR

SEQ ID NO: 11196 - protein, 420 aa, Lactobacillus sp.
MSQTMAQLPYHYGVKVRVFPSNQQKQLIKRNSDASRFIYNEMNGMNRELYQLKQVKIPIGIVQQRIQTLEQRLKRPATGISNIHGWLNNNDLDSLMKANAIQNYRSAWKMFHKVHQSGTPIFHRKRTEQKYQTSCLYPGKVKSPSVTNGSVRLLDYQHIQIPKLGRLRFRGIPAKILAKKNEIRIGTVTISMDATGRYYVSLQLASKQPFVVQTVRKTQMTIGIDLNTDNFLTDSNGNVIANPHYYRTVKGKLAKAQRKLSRRALRAKKEHRQLRDAKNYQKQRMIVADIQHKVANRRNNFLHLISTTLIKNHDLVVAEELRSKNLLRNHALAMSISDVGWRTFLGMLTYKADLYGKNFITVNPRNTTQTCHNCGFIMGSHDTHKLTLADREWTCPACHQSHIRDHNAAQNILARGIISR

SEQ ID NO: 11197 - protein, 473 aa, unknown
  TnpB Polypeptide
MALTRNIKKELTFTRNYKLKLTKNQELLCLSILTGMSNLYNLALDELKAEIELNGKLPKPGVFQKNYAKHRNADPLLQLCTSQASQAVYQKLISSVKNVLEKNRGKIAGQFYKDNIPNDLSDKEKENLKKQLNVNLNKHILLETLKIFKRKDANNLYSTFVFFEGQYDCFYDDSQFAGFIPSHGKIKFKNVPENRMGLLRTFKEGREFRFVTGRIEVVKKVDGFYASVSCQANREDLPSRTKPYVGSSVGIDFGNKKVMTLSDGKFKEKFSPKVNKRLKTLWARKEALQKCLSEKEDTYRKMNKLSDGVPSSNNYTKLLQKLRNTELDIQRIREFCGHALTNDILDNYETVYVEDIKTAEIMEKDSAISKKAQKSMKRNISHNSWGTLKDQLVYKGDWRGNKVTLVPAKNSTQTCSDCGNILEGDKKIGLKVRKYVCSVCGMEKDRDLNAAINIHNRGNKISAEAYIKVTEEI

SEQ ID NO: 11198 - protein, 441 aa, Clostridiaceae sp.
MKVISSYGVEIKKQNIPIRHTLHIYRQAVRYLIHVYEECWEELFQIANLQKRFNAAEHLVHSTKKNRARYDFDQRFPKMPSYLRRSAIQHALGSVSSYETRLELWKQKKLDGKPKLVYENHAMPVFYRDVMYKEAEDQADIAFLKLYDGRDWKWFPVNLLHTDMEYLRKNWAGVKSSAPTLEKRHHRYFLRFSYTEEVPLSKKEINEQIICSVDLGINTDAVCTIMRADGTVLGRKFINFPSEKDQMYRVLGRISRFQREHGSGQVQSRWNYAKRLNMELSRKVASAITTYAQNSHADVIVFEYLEMKWKVTGKKRQKLHLWRKRDIQKLCEHQAHRIGVRVSRVCAWNTSRLAYDGTGEVVRDSENYSLCTFTTGKRYHCDLSAAYNIGSRYFIRELLKPLSATVRSSLEAKVPSVKRRTSCVYADLLLLSEELSRIQIA

SEQ ID NO: 11199 - protein, 383 aa, Enterococcus sp.
VNFVERLKAYKFRIYPTEEQEIFFAKTFGCVRKVYNLMLNDRKKAYEEVKNAPSKKMIFPTPAKYKEEFPFLKEVDSLALANAQLHLDKAYKNFFRDKSVGFPRFKSKKNPVQSYTTNNQNGTVALIDSKFIKVPKLKSLVRIKLHRQPKGMIKSATISRHASGKYYISLLCKEEINELPKTNSAIGIDLGITDFAILSDGQKIDNNRFTSKMEKKLKREQRKLSKRALLAKNKGIPLSEAKNYQKQKRKVARLHEKVMNQRTDFLNKLSTEIIKNHDIICIEDLNVKGMLRNHKLARSISDVSWSSFVAKLQYKADWYGREIVKVDTWFPSSQICSECGHKDGKKSLDIREWTCPICHTHHDRDINASINILTEGLRIQTLA

SEQ ID NO: 11200 - protein, 393 aa, Kribbella sp.
MFPTPAQHGAMLEQCRHARFVWNLALEQWSMWTSDKGPTPNFGGQCRQLTAARAAFDWLRAGSQTVQQQALRDFDQALKNFHARTHRRPTWRKSGRHEGFRIVGSQASRIVKLNRKWAQVLVPKVGWVRVRLSRAIPPAGSYRITRDRTDRWHIAFAAIPPPILAPGTGEVVGVDRGITISAALSNGELLVCPGLSETEQVRLKHLQRRLARGRRGSNRRRRVRAAIAKLHGRAADRGKDWVEKTSTDLARRYDVIRVEDLRVARMTRRPKPRHDAARPDQYRPNGRRAKAKLNRGILANGWANLVTRLEQKSPGRVEKVNPAYTSQTCSVCGHCAPENRKNQAVFRCLACGHEANADVNAAVNIAAGWAVSARRETPLRASPKREPQPATSA

SEQ ID NO: 11201 - protein, 175 aa, Firmicutes sp.
VNKAYKFRIYPTEKQIELIEKTFGCTRFIYNYFLDQRIEVYKSEGKGIGYTKQQNQLPKLKKELSWLKEVDSTSLQMAIRYLDRAFKNFFRDKNIGFPKFKSKKDSKNTYTINYVNNNVQVKSNKIKLPKLKWVKSKVHRYVEGKFKCYYFQITYKQILCFYSYRIRHRVYGKIG

SEQ ID NO: 11202 - protein, 159 aa, Firmicutes sp.
MEKSDDEIGIDLGIKDFAILSNGEKIKNHKYLNKSLKKLAREQKKLSKKQKFSNNWCKQKQKVAKLHEKIKNQRQDFLHKLSKRIINENQVIILEDLAVKNMMKNKKLAKNIADVSWHKFYSYLEYKSKWYKRTIYKIDRWFQVAKPALFVGILWRLCL

SEQ ID NO: 11203 - protein, 387 aa, unknown
  TnpB Polypeptide
MTQNKGYKYRIYPNKSQIAILSQFFGCCRFVYNHFLAVRRDSWSADKVTTTYTQTSAMLTALKRDPDHLWLNACDSMALQESLRNLDRAFQNFFSKHSGYPKFHKKSSVQSYRTRNQNGGIRIEGNRIVLPKLGPVKAKISRLPAGRILNATVSRTTTGKYFVSLCCEEELVPKPNAGGKLGIDLGIKDLYVDSNDCHKPNPKYLAKYEKQLRREQRSLSRMLEANIAGYTKNRKPIWKRPLSECSNIQKQKRKVALIHEKIYNCRTDTLHKASIRLVNENQVIALETLNVKGMVRNHHLAKAISDASWSRFTTMLEYKAFEHGCTVLRVPTFYPSSQTCSSCGYKNPKVKDLKVRRWVCPECGAVHDRDENAAKNILAKALAMQAT

SEQ ID NO: 11204 - protein, 420 aa, unknown
  TnpB Polypeptide
MFILRKNEKYIKLFINTCMRQLKYSYRIYPNKEQEAKLNQFCGAQRFIWNHFLCLEMEQYKLDGTFRFSHKNITSLPKMKNMENLLWLKDIPSTSLQQTLLYLDKALKHSFRKTSSKKGFPKFKKKKYYQGSFSLAMVNDKMIIGSHIKLPKIGKVKIKLHRKLPSDFKSCQVKQKANKWFIVFTVKVNKHKTVNKIQKVIGLDFNSKDIVVNSNDCSTTNPKFFVKSKQRIKKLNRQLSKKQKGSNNYKKQSLKLAQNHVHVANQRKDFLDKLSYDIVSNNDLICLEDLNIKPMQSFNGRMVQDAGWSMLRSMIEYKADLYGKHVSVINQYFPSTKLCSACGTIVNKSLRQRQHNCNCGLCISRDLNAAINIKNEGIKVFINNKVGTTLIYACGDTKGDDKTPSPVSMNQEAHVALANG

SEQ ID NO: 11205 - protein, 377 aa, unknown
  TnpB Polypeptide
VVKNKILKSYKYRLYPNKTQIELINKTIGCCRFVFNYYLGERIKVYKSEQKSLNYNSNANDLKNLKKEYEWLKEVDSISLQQTLKDLDRAYKNFFRRVKQGGDKAGFPKFKSKKNNKQSYRSQCVNNNIAIKDGKIKCPKLGLIKFKNSKTFTGKIKSVTISKTPTCKYFVSILVDTEINQLPKCNNTIGIDLGLKDFAITSDGVVYNNPKFLRSLEYKLKFQQRTLSRMKLDSSKWRKQKIKIARIHEKITNSRKDYLHKISTKLINENQVICLEDLQVKNMLKNHNLAKAISEVSWSEFRMMLEYKAKWYDRTVSIIDKFYPSSQLCSNCGYRNKEVKNLGLREWICPECGERHDRDINAAINILNEGLRLLDIN

SEQ ID NO: 11206 - protein, 145 aa, Bacillus sp.
LAIAENWNKQRIRVAKLQEKVANQRRNFLHHQSKELATNYDAVIIEDLNMKGMAQALKFAKSVADNGWGMFSSFLKYKLNEQGKRLIKIDKWFPSTKTCSSCGSVREITLSERTYRCTCGLTLDRDYNSALNIKKEGIHLLATAS

SEQ ID NO: 11207 - protein, 569 aa, unknown
  TnpB Polypeptide
MAKSKKKDKNKVVKAKFFYSISLNKNKYDSLVAYAELAKDVRNFASEYIYNNNDLKIGILLNTYTDIDLKKELNNYRKQFKGILGTDEQIDISSTTFQNCCKEVHIRYQVYLQNELTKKLENYNSIRKYISFLIKYYKGDLNELTNLISQEKIKTSLNKKTNKKDFTEKALFYQDLEKFLFNKTRYSVDKILKMVENLRQRLIKNITLINFKSLTFQDLNVSSINHEKGRTGNIIDILEENSNKAIIKINLAGYKQIIIPTKFNKKYHGNLDCYNGVLYKMNSYGTMGKRVTYTIKFLKDRKVKIILFQETEKQNYAYDDNRNNILGVDVNTSSNLFSLSNGVQIPYDEKIINQAAKLNKTISHKQTNKSVSEKNVDEVNKVYSKKIRRRIDKMVRRAEYYQNYKSHELIEYMKNNNFNYLVMEDLDIKSKKTKAKKNANNVKINYNDVAQILRINNLKNVLERLCKKENFNFAKVNPAYTSQTCSVCGNIDKKNRNHRMFLCINCHHSDDADINAAKNIKNRITNPMLKLNLIRFDNENQIHIGSKHKNKSFYEEVYKNMNTTKPFKI

SEQ ID NO: 11208 - protein, 396 aa, unknown
  TnpB Polypeptide
MIKRKAFCFRIKTTPQIEQEFAKFAGCSRFVWNRALALQKERLGAKEKMLRYTEIAGMLPAWKHELPWLLEAPSQSLQQTLKFLDRAFKDAFDKLNPKRFPTFKKKGKCTDSFRIPQGFKVDGDRIFLPKTGWVRFFKSRDIEGAVKNITVSRRGKHWYASLQTELEIPEPRHASASEIGIDLGVRAFAALSDGTLVAPLNSFRAMEKKLAKAQRSLARKVKFSANWRKQKARIAALHERIANARGDFLHKLSTDVCKNHALIAIEDLRVSNMSRSAKGTVEAPGRNVKAKAGLNKSILDQGWGEFRRQLEYKALWAGGVLVPVPPQYTSQSCPECGLVDAGNRHRAEFRCLGCGHTADADVNAAINILAAGHAVMACGAVRAHATAAKQEPLHAA

SEQ ID NO: 11209 - protein, 418 aa, Haloferax sp.
MEVRRTAPVKLVVPDERRDDLHESARQFLHCANRAAEFCWSDDSYTDCVTANTTARDALYDELREETDLTANLVQEAIRRAVQATKGCAERWEQGKRVSQPEFTSWSMLYDKRSATFYRNKVSLSTINGRVECDFELPSDSPTPYEQYVLSDEFEYRASTLQYDKATDEFYFHITTRKDDSEEDSASSEVSEDTGHQTVLGIDLGVNSLAVSSTGRFWQGDDYDHWCREFEKRRGEMQQRGTQAAHKALLRLGKREEAWRKQYIHTIANEIVSEAVEHDCDVIVFEDLSDIREGLPQAKWHHVWAFRRLFEYVSYKAPEQGVSVEQVEPNHTSQRCSRTDCGFTHPNNRQGEHFECQKCGYEVNADYNAAKNIGLRYARKRTHRLRSSPKSENGDAQVDVRINGGTLNGRSHQPIAGD

SEQ ID NO: 11210 - protein, 370 aa, Verrucomicrobium sp.
VLGSKDETAGNQSCQGAVAPDGSLRLRLRLPNGLGGPSKHLVLEGVRFAYGQEAILQALSASRIVTGQTKTEKLVRKREGSAVRYRFIRDRKGWRLFASIEAQPAPLVTRCLAGAVGVDINEDHLAVAETDRFGNLTGIRRIGLNVYGMSEEQAKAIIGDAYKEIARACVDAGKPLVIERLDLRKRRTELEAVDRVRARSLSSFAYAKAIAMLKSASFRAGVEVIEVDPAYTSVIGAVNHARRHGISSHQGAAHAVARRGLGLSERPCVREAVVPTRNGGHITFALPARNRAKHVWSFWAGVQKRLKAAHAAHVRSGGNRKPPAPLPPKARALGATRTLPVKPRHANRRQHCLAGVLDDLPWQWSGCPWF

SEQ ID NO: 11211 - protein, 441 aa, unknown
  TnpB Polypeptide
MAEEKLICYQCNNEIKSKWFSHKLEDGNTYCSDCVSRRVESHQIDKNHWLYEYADELCYKSKNLYNAVQYRIKVKKHKDKEDFKFSGSYLYKRYKELDEAKDLNSNVKIRTLDKLATDWTNFFKALKKNGKNGTEKRKIKEPGFKKSGPKGRCKAEWQVNLNKDSTFSFPSTKGKLRFEPQNKDNVICASFDPLTEDGRYYNLNIIRKVVEPQLQDVDDCSRIVGIDLGIDNLATVVNNFGLRPFAINGKPLKSMNRYFYKKRAKYMQYIGGKGKSNRIYKLTRKRNNKVKTYIHKTSRKITDWCVEHNVDAVVIGKNKQWKNEINIGKVNNQKFVSIPYNMLIDQLKYKLKDEGIKVIITEEANTSEGSFLDRDPLPKYDKDNKPKRSGRRVERGLYEASDGTKINADVNAGYNIIRKVFPKTFNGIEGVPLHPVRINLD

SEQ ID NO: 11212 - protein, 544 aa, unknown
  TnpB Polypeptide
MKKTILTTVAALSMLCTFAQWKPVGDKIKTPWAEKVDPANVLPEYPRPQMVRSQWVNLNGLWDYAIKPVGAMEPKTMDGKILVPFAVESSLSGVQKGLTEKDELWYRRTFSVPAAWKGSNVLLNFGAVDWKADVFVNDILAGSHTGGFTPFSLDITPYLKAKGEQKLVVRVFDGTDKGYQPRGKQVLNPNGIWYTPVSGIWQTVWIEPVAKSHISGIKAIPNLDQKNIAVTVAAENCTTGDLVEVKILDKGKLVASATGLPGSPLRLGIAEPKLWSPDSPFLYDMEVSLRQGGKTVDKVDSYTAMRKIGTKRDKGGILRMTLNDKPLFHFGPLDQGWWPDGLFTAPTDEALLFDILKTKELGYNMIRKHVKVEPARWYYHCDREGILVWQDMPSGDMGNKWEMYTYNGGTDKNRTQESKDNFSKEWKEIMDFCKENHTGILVLPEYNEDFSRISMYRSGNYSPLHLSIRIRNYLKYKAWAEGILVLELRADGTEKQCSICGATGKKQGSVFICQNGHQVNRFLNGARNLGRKCQESFRKNNKPS

SEQ ID NO: 11213 - protein, 374 aa, Peptococcaceae sp.
MQITITAKIQILPDTEQSLQLKATLSAIKKSLNYISDIVFSTKELSQPRLHKVTYDILRHAYGLKSQMAQSVMKTVIAKYKSAKSNNHEFNKVVFKKPEYDLVWNRDYSLVKGLFSVNTLDGRVKVPFRQEGMDQYFDGSWKFGTAKLVFKHDKFFLHIPTTKDVAGSPIQDIKNVIGIDLGINFLATSYNSSNHTEFYRGRHIKHKRAKYSKSRKELQQRQTPSSRRRLRLIGQRENRWMTDVNHQLSKALVESAGKNSLLVLEDLTGIRNATEKVQLKNRYVFVSWGFYQLRQMIEYKAILNHSLTIAVDPKFTSQKCPQCGHTEKANRDKKNHVFTCKNCTYTSNDDRIGAMNLRNIGIEYVHAELVKQVT

SEQ ID NO: 11214 - protein, 401 aa, unknown
  TnpB Polypeptide
MNLAHKIRLYPTPDQELYFRRAAGVARFAYNWGLSRWDVMYQAWRLDNRLPKPSWQQLNKELNFIKYDRFPWMLEVTKCAPQYALENLGSAFNSFFKKKAKYPKFHKKNTHNNFALGNTTVYISNKYIKIPKLGWVRMAEELRFSGRVMSVTISRTADKWFASVNVEPSAEDLAKYRPTKNQGRVGVDLGITTLATLSDGTKFNSPKPIKNSLSKLRRLDKNLSRKKKGSSNRAKAQMKLARLHAKIANIRKDCLHKLTHYLVGNFSIIAIEDLNVSGMMKNHRLARSIYDLGFFEFKRQLQYKSELSDRELVVVDRWFPSSKLCSHCGYKADSLPLSIREWTCTACGSRHDRDLNAAINLSNYGKTAGEAELACGDSSAGRLDFVRSAKLPSVKQEGSSI

SEQ ID NO: 11215 - protein, 408 aa, unknown
  TnpB Polypeptide
MIQYRTYTIRLFPNKEQEQQLQNLPLARNTLYNILIDIEQQTYKTAGKIKTEYDLDKDITALRKQTPLLLCLNSKASQRVAKEIYSSYKSFFNLIKKDNAAKPPQKLQDVNHFHTVVYNQTGWKFINDETLKINGIVVNYKGIPGIDYSKQTIKEVKLKYRNGKYLLDLGIENYVQEKEELTQENKVLAIDLGIKNLCNGVDNLGNVVIIPNKAKKINTYFRKQISKVQSKMDKCAKGSNRHEKLKKVKKKLYKRKDAQIKQTLHIQSKKLVNMNYKTIVVGDLSVKKLMEKGSNKLTKTSRSFSESAIATFMEFLTYKCQNSNTELETINEKWTTQQNCLTGKLFKNKVELSDRVVYLSDSIVIDRDLNAAINILKRYEQNHIALLTVPLDVSNVVNRYNLLTNMCS

SEQ ID NO: 11216 - protein, 252 aa, Staphylococcus sp.
MYDNISIQTIISFIQNEMTKEDAKALKISYSKISKIKKKQAYIWRMNFKDITKINDYRVYKKKQRKNVEYVGIDIGTTHTLTASDIDMKRTLIIENKRIYNATKIYNQNYNNQNATKESIQNTKEMLVRTIESNVDKIINQLLNRYTEPVTFIVGEVYQSVENIRPHYTLYQIFLREMKKRAKHHDINVVSIDESYTSLVCPKCHYKDSKNRTNSNSFKCKQCDFVHDNDDVVASANIVARYISKKRKNEAV

SEQ ID NO: 11217 - protein, 198 aa, unknown
  TnpB Polypeptide
MKTLKLCIKDKHANQLNILAGSVNFVWNYVNELSFKHLQRTGKFFSAYDIATYVKGSGELLNLHSQTLQAITETHAKSRKQFKKTKLRNLGWIPFKKIAIKHLATGQSGKKSLKSTIQLSLAKGKKLTIDVWDSYNLALYSINTCELVQDSRGNWYACITVKDFPTTKCGTGKVGIDLGCKDSAVSSDGDVLTTKLTH

SEQ ID NO: 11218 - protein, 428 aa, Psychrobacter sp.
MKINKAYKFRLEPNTEQTVILNNLVGSARFVWNQMLVISFEMFANNEFINATNLVNKIIDLKSNPDFNFLKASSNAVALQQKVRDLASAWSRFFDPKVHAKLKENKKKLRKPKFFKLADGSEIQLRPLMPRFKHKSDGCDSIRLVQFDKYCRVEDNRVKLPNGIGLVKFRKSQNIIGTIKNVTISKKSGRWYVSFGCERELAENPRHPAISAIGLDMGISKLLTTSNGEYIKPKNSFKANQLKLARLQRQLIKKVKFSENWKKQNRKIQKLHHHIANIRHDYLHKITTSISKNHAMIACEDLKVANMSKSASGSMEKKGYNVKAKSGLNKSILDQGWAMMVNMLEYKQQWQGGLLVKINPRYTSQTCFNCKHVAKENRQTQSKFECVQCGYVANADVNAARNILAAGHAVLSAEGRCGKGSPVETENL

SEQ ID NO: 11219 - protein, 475 aa, Arcobacter sp.
LEKRIHLGYRYKLKISDGQKSFLDHHMFIYNQAYNICLNLWLKENEKNKNLPKELKQYRSATVYDTVVKRALQFRKLTFSTVVTQQARINFLKAVKRAFSKEIVSARLKAIETAQTLKEKVKANQLGMPTFKSSRDTFQSFNWHNQGFQIINDKNPKFKVIKLMKVYFRYRYCREMSSHYKITSITFSKDFTGYYVSYGVELKKQVDLVVSSDTFDITKSIGIDLNAYNIAVSNNVDFIKESNISDVKLGHLIDNGATNRRSLKYKSNVVVLLRKQSRRVLKALEKSKIDKTKLKLGSNHRKTQSKINKLNKKIANQKSDLYHKISTALTNKFDMIVVEDLKTKNMSKSSKGNEIFHGKKVKQKSGLNRTILNASFYQFVSMIQYKTTMLNDKLFVKVDPQYTSQECSSCGNIDKGNRLKQDKFKCTACGFEINPDIQASQTILKRGLESFGLGTSLVDLDKHKAFRSETLVSAS

SEQ ID NO: 11220 - protein, 402 aa, Escherichia sp.
VKRLQAFKFQLRPGGQQECEMRRFAGACRFVFNRALARQNENHEAGNKYIPYGKMASWLVEWKNATETQWLKDSPSQPLQQSLKDLERAYKNFFRKRAAFPRFKKRGQNDAFRYPQGVKLDQENSRIFLPKLGWMRYRNSRQVTGVVKNVTVSQSCGKWYISIQTESEVSTPVHPSASMVGLDAGVAKLATLSDGTVFEPVNSFQKNQKTLARLQRQLSRKVKFSNNWQKQKRKIQRLHSRIANIRRDYLHKVTTTVSKNHAMIVIEDLKVSNMSKSAAGTVSQPGRNVRAKSGLNRSILDQGWYEMRRQLEYKQLWSGGQVLAAPPAYTSQRCACCGHTAKENRLSQSQFRCQVCGYTANADVNGARNILAAGHAVLACGEMVQSGRSLKQEPTEMIQATA

SEQ ID NO: 11221 - protein, 664 aa, unknown
  TnpB Polypeptide
MLIISNIDFMIRKKKKDINILESICNIYKNILEINKKDNESIKNINGIKKELDFCYFIDSKYVYKKSNLEFVNHFIDIDYTYYKFSKDEKKLCDIIHKYSNLDKDLIIFNYNLKKNINKQFNYFIIKYENFTTKFYREIDNYCLYENGILNYDDFFMLIKDSNCIPFWNEQCEKLSKEIFIPIDSNLVISTKPNTFNYDNWFGVEFKKIKNDNLNNKKLEIDNKERKFISQYKNKKTGEIKNIKKSHKIKIYFNPTQKIHIKRLFGIYRYFYNRTINYINNYDKKTNKTFYHIDSKNKKNKITINLDKEKNKFTVITIRKFIKNNYPKWIEEINFPSHLFDMAIKEAVSAYNGCMVKFNKYKIAFDLKLKTKKDKMQTMNLEKTMIHSKTNSLFYNLKNIDTDTDKDKDKDKDKYTFRNLKTSCKINKYLNIRDSSISWNQRTNEYYLNINFDNLEIPNKNILFNKKICAIDPGVKSFLSIYSDDSMNKIGIGIRDKIEKICRDIDIIISKQYRKKKGKYKYTSQKRRSLRKALHKKIKYLDNLKEELHNKSIKYLCDNYGKIIIPPFETQKMVSNIKLDSKTSRNLMCISYYKFLSKLKLRCIEYDMDLVIRPEYYTSKTCTKCGNIKHNLSNDDVYKCKQCGLKIDRDTNGARNILLRNLCN

SEQ ID NO: 11222 - protein, 341 aa, unknown
  TnpB Polypeptide
MKAEKTIKAKILELRKGKEELLRQEYESFQRYMRGEKATPLYSATKQQADRLLKRLKGKVKPNKEYPLILRRDVYRANTKLTPYWLKIPIHGVKGGINVPIKTHEPITDDMVCREAKIIKKDDEWFVYITVEKEVEERNPKSVLAVDIGIRWIATTVSSNDPKPKFYGKELRRVKGHFFYLRRSLALKKAYRAIKRIGDKEGRVVNDILHKISRTVVNQALKNDSAIILGKLKGIRKRNGGRKFNRKLNGFPYYKLTQFIEYKARWLGIRVIRISERNTSRLCHRCGRKGTRVGSFFECPNCGYSCNADYNGAMNILRRGMGYMSMPGAALTQPELGMMKP

SEQ ID NO: 11223 - protein, 390 aa, unknown
  TnpB Polypeptide
MQWTLDRCRELYNAALDERKSVARRIVPIKFCGNIAILEPEKTIVHRQVSKLDQSRQLTEIKHELRPEYNEINDHVLRNVLERVDLAFKAFFRRVKAGEKSGYPRFQSYTRYDSFTYPDLQGWKVIPGEGRHAKLILSKIGTINVKLHRPIQGKIKTATIKREGEHWYVTFACEVESEALPVSYEDVGIDLGITHFAALSNGEMIDNPRHYRRAEKKLKQLQQALARKKRGSHRRKKAAQKVAKAHRKVRNQRKDFHHKESRKLVNKYQVIVFEELQAANLSKRPKPKQDESGKYLPNGAATKSGLNKSIRDAGWNSFTQMVKAKAECAGRTIIFVDPKNTSQICSACGVKGPHKDLEERIHTCTYCGVVLDRDHNAALNILALGHKQIA

SEQ ID NO: 11224 - protein, 424 aa, unknown
  TnpB Polypeptide
VIEMKQTLMLRFKLDASKEQKQYLLETAKAYTGAVNFVLSENLKSKTTNVKKFHHSYYKTIRQRFDLPAQLAINVNRDVASIYKTLWAQFKELKRRKPDSKAAKKFWDKPPKRKALIAKYTYNRTVSFKFENWNEIYVSLSTLHGRLKWIRIHGWNKHYEYLKQGKIGDPILSYDRSSKTFFLLVPVTLEIQKQRPKEIVGVDVGERHILAVASTTGKKYLVDLPEEFKRRKQRYHKLRSELMSKGTRSAKRKLQKLSRREKRFTENVLHIVSKTLVQSHPQARFVLEDLTQIRSNRRAYRGKDKGARRQAERWPFASLQNKIAYKAALYYGVQAVKVDPSYTSQTCPVCGYVSRNNRPNHGEEFVCQNCGYKEHADIVGAINIAIRELSKTQSENLKGLLVSQPNAPQGLSLRRASSPPLEGE

SEQ ID NO: 11225 - protein, 419 aa, Candidate divison MSBL1 archaeon
MKVLRTEKCKIENYSQVVDRIDELSISVCKLWNVARYKCEREWRKTGKIPSESKLKSKLKEHRRYRELHSQTAQNVIEELWNAFKSWFEKRKNDSKARPPGYRRKNGRYPKASVTFKKSAICHDKKNKRLKLSNGRENSSLLVEYKSRPEVDLDRIQVVRLAWNGDRWQIHITHRKEIEPQSPGAQVCAIDLGVNNFATIVYDDGTSELYPENKLKEDEYYFLKKIAKCNKSNSNKARRLHKKRGRRREHFLHALSKEIMGRCEEKKVGRIIVGNLKSIRENETKNNNNYNLKLGQWPYEKFVQLLTYKAEKTGIEVVKMDESHTSQKCPRCGVIDRKNRVERGLYKCSNCGFTIHADVNGALNLLQKVTALSGSNGSVAEPVVNLFAVRSGISPSGCEEGKFHQAEQLQTLNSQPHTP

SEQ ID NO: 11226 - protein, 451 aa, unknown
  TnpB Polypeptide
MKTIRVYQLNQLTPMLFHRLKEAQMEAAQVWNCCMEMHKQARLTHTRWPGRNDLQQATKGHFALHSQSVQMVVHAFLSNIDTTRELRKTHPHMQMKYPWRTKRFYPVHWPAQAVSVEAGRVILPMGRGRPSIVLQLSLPAESGACMLVWNHGFELHVCIEIPRAEQAPGENQAAVDLGEIHLAAVTTNMSAALIVTGRGIRSLKHQRNKQLGQLAKKQSRCKKYSRRWEKLQRAKNKQCRRAERRVRDQRHKATRQVIDFCVQNRVGSLFIGTPHGVRNQGKGRHHNQRMSLWEYGRDIDYLTHKAKQAHIMSFTGSERGTSSRCPVCGHKHKPKGRNWACRACGFAGHRDLVGSVNMHQDAFGTHLKFPRSFTYLRPSSSRVGTPQRCLSESAAQPLLVEQGSSETGHTADGAQKPVCDHGDGSVTLSGRASLRARSVRSALYGQASEEP

SEQ ID NO: 11227 - protein, 400 aa, Luteimicrobium sp.
VTLQGFRVELAPDAAQADRLAQHAGLHRVVFNHCLAHVKAVMGQRAAERTYGIPDDELTPAVGWSAPALEKYWRATHRQTYLWFGDEGLSSRVPKEACRALAAALSNWAKSKAGARKGRRVGFPRFRRRKDGATCRFDAHTAHPATSRLVHVPTIGKVPVREDMGWLTDRIADGRARVLGSRFERRAGRWWVAFQVEVDRTDVNAHHTAPVGGPVVGIDLGITTFATIAADDGTVVEVPNPRHLGHKLRRLRRANKTLARKQRGSKNRAKAVAALAKIHLDVAHARADFLHKLTTSLTRTKSTIVIEDLSVAGMVKNRRLARHIADAGWAELRRQLTYKADWYGSKVVVADRWFPSTRTCTTCAEVNHNLTLADRTWTCPCGTVHDRDRTAAINLLRLAA

SEQ ID NO: 11228 - protein, 488 aa, Luteimicrobium sp.
VSVAADSVRGVSRHTTFQFTADPSAEQARALARHEGAARFAFNQGLRLHLNARDASKGGTDDGAVKIPWTGFDLINAFNAWKKTENAGRRFVVDGSGVAELEVTGLAWRSEVSAQVFEEAVVDLGKALKAWTDFRRGKRTGRQVGHPRFKKKNHERGSFRIRNKTSKTKTGERAMIRLGENGRRSVTLPGIGPVKVHDDTRRLRRMLATGRARILFATVSRRGGRWRISLNVEAAELHPAARHRVREGTDGGGWAGVDRGLHTPVIAALADGTPSVHITEAPKALCTAQPTTRRLQKSVSRKVKGSQSRRAAVRRLARHHERVRARRHHFLHQVSNVLVKTHDRLVLEDLNIAGMLANHHLAAAISDAAWGELARQITYKQAWRGGQVLSADRWFPSSKTCSACGSVTAQLTLADRVFVCDACGLTIDRDLNAAVNLATWGEKNFSQVLDPEARGQVTNAHRPDGSGPRTRAGETSRDDVGTLTATAA

SEQ ID NO: 11229 - protein, 459 aa, unknown
  TnpB Polypeptide
VWIVLIKHWKHRHGKFQEEFDYRWNHNSTGILPYEDIKGVFCKILFVKAYKFRIYPSKQQERQLSHHLWVEKELWNEMLAFTKEFYIDYDKFPTKRTLRSFCKNNGLYSQVGQELAERLNRAIWRMMALKKKGKDCGFPRFKSFDQVKSLSYPQSGFSLGNKLKVTPFGEIHIRQHREIKGTIKTLAIKRAATRKWFACFAVEETLNVKASNGGARIGIDLGLKNLATLSDGSVIENPRLVRKHEEKVASLSRKLSQKKRGSRNRKKAKMLLAIEHEKLKDTRRDFLHRLSRNLVNSYSFIALEDLASQELAEQNYGKQINDAGWGELANMLRYKAESAGCEVVFVNPKDTTKTCCICGNMMDMPLSVREYDCQLCGNSMDRDLNAAYNILKRATGGTPGSNACGDVSRKTSMKQEAPLFFAERKRGPFLPEGKKRTPSGVGSSPICWALLAHAQGNGF

SEQ ID NO: 11230 - protein, 275 aa, Streptomyces sp.
LNSTRRKSSCARCSVTSAGRCGPGVKVAATTSEGTFHDRQCVTPGEVKRLRRLWQQLSRCTRGSNRRKAVLAKINSITGRVRNRRADFCAQTAAELAARNARVVLEDLRTHAMTASAAGTTEQPGRNVRQKSGLNQAILDKGWHMLELALRNAARTTGTRVVLVNPAYTSQTCNDCKHVDPKNRKSQAVFECTACGHQDHADVNAAKNILNAAGHAVSGRGDLAMRRSVKRQPPATRTCMGRSPRTARAAGIPVLQRGEEVNLLAVVSADPHNAC

SEQ ID NO: 11231 - protein, 489 aa, Sutterella sp.
MLTGRKFAARFKNSSAREAYLTWSAGQMFIYNECVLEQRFFDSLSRLIAETERHKQPIRNECRVARPKPDQKYAHFVDKAQRPWLSQVPSAILGIGAFRFCQASKRAATGLAARPKLRAIKDADRHLLLTRAYFTIKPTSRAGWYELRFGSARIPGGTILFRAHREFVVPAMVSVTLTSKALIVSMSYEETEQERFPETEKEILERLRQYSEEELIACGNGIDRGVVRPVQTSNDPEPYAPTKDQLERIRRKERQRKHYQKRMARCEKGSRNRAKMRRKVARTFDYRKNVINDFAHQTSHTLVSDDKVQFFVLEDLRVKNMTKRPEPKYDDNAKALPNGARAKAGLNRAILSSGWGKTEEYLKYKAKKAGKLVMKVEPAYTSQRCPKCGRVERKNRPSQSEFRCVSCGFESANADYVAAGNILMAGVKLIREGRLEPKKVKATLRGKPAKATNVKLGPGWADVMPVEPERCLGKLRCRTRCEAGSPSLK

SEQ ID NO: 11232 - protein, 537 aa, unknown
  TnpB Polypeptide
MKKLNINPIEKEEGKTRRKTPSFVLELPLVVTPRQSKELLSRFESARQLYNATLGEAKRRAMLVKQSKLFQKAMSLPKKHKDRVETFDFARSRYGFNDYSLQKFIGKLRHEMPNKLDSQTTEKLATRAFGAANRMLCGDAKKVRFKGYNQLNSVESKSNSTGIMWRNDHVKWNKLILTSLIKVDDEVIQYGLKCRVKYCRIVRKIYKGKNLFYVQLVLEGKPFIKEKNRLGKGDVCFDVGPSTVGIVAKDDNDNFKARLVQFCSELKNREKEIRNLQQKTDRQRRQNNPKNYLENGQTKRGKKTWKKSKRQIANENKLKEIYRVTAFHRNSLQGKLVNETLRMGNNFKTEKVSRKWLQKLYGKSVGSRAPGKFVSGMKRKAESAGGSFMEFATQSTKLSQTCVCGRQKKKKLSDRIHSCECGVLAQRDLLSAFLGIFVEKAGSKNDKDEDKYILYASQVERLWPSADKLLQAAWMNAVESANGKLLLSSFGKPPACWSQSGSLEEEGRVKFEVQNVVLAHPMGEESLKENEIFPLAL

SEQ ID NO: 11233 - protein, 371 aa, unknown
  TnpB Polypeptide
MLSYLQVEKQRIKMKTSYQYKIKPTKQQAHKIDKTLEMLRYQYNYLLAQRFDWYEQNRCLIDRCPLICHLPELKEQPNYYNQKASLVQLKVDRPWYKEIHSQVLQEVPKKVELAFDRWLSGDVNGKKSGRPRFKSKAQYKTFTYTQFKSHHFVDNKITLSKIGDIKVIVHRPIPDGFDMKTVSVTKKADGYYVTLSLDDKTVPTIKPDFNPDNIVGIDVGLIDFYVASDGLRIATPKHLRKAEGRLKSAQRKVSRRKKGSNRHKKAIEKLGKQHKKVADTRRDFHLKTAKSLLDKYDVVAVEKLNIKGLVKTRLAKSINDAGWGQFITILSNKAANAGLKVIAVNPNGTSQECSNCGHKVKKALSHLRSVS

SEQ ID NO: 11234 - protein, 374 aa, unknown
  TnpB Polypeptide
MLSTLTYAVRVKTTSTQSEILDATCSAYLDCCNMVSKTAWKYRTLSQKTLNQLAYHRLRDEYHVGAQMAQSSIIRVIGNYRTIKETHGTPWATSQPEYHSPGYDLVWNRDYSILKDGRLSVNTLEGRIKFPIDWTHMPEPYRHGKFGTARLLNRNGKWLLLIPSTIELPHPSQPQQVVGVDLGIRFLTTTYDSDGHTDFYNGKEVKNKREHYKRLRTTLQKKETRSARRRLRNIGNRENRWMRDVNHQVSKALVNRQSKPTLFALENLEGIRHATEKVRRQDRYTQVSWAFHQLRQMIEYKALKAGHSTIAVDPHYTSQTCPKCGMIRKANRNKRLHEYQCSNCGYMSNDDRVAAMNIQRLGYQSLVESHSDKL

SEQ ID NO: 11235 - protein, 169 aa, unknown
  TnpB Polypeptide
MFERSFFQVKEIFLWFPLANAPTYAEVTASSWLKLKSDRLHKKISNQRKDFHFKLANKICSEYALICIEDLNIKGMQKRWGRKISDYGFSEFIKILEYKAREIGSIVQKIDRYYPSSQICHVCGTKNPETKNLAVREWICAKCKTSHDRDRNAAINIWKVGASTFFGEI

SEQ ID NO: 11236 - protein, 392 aa, unknown
  TnpB Polypeptide
VTLKKTFRFRMEPDAAQREALARNAGSRRYVWNWALGRKRDYYRKNRIGLRTSILKAELPILKRNPETAWLADADSQSLQEALRDLDRAFKSFFEGRSRFPRFKSRKWDEARFRISQRVAIADGVVSIPKIGSVRIRQSQPVDGETKSATFKQDAAGHWHVTLVTEFTMPDTALPAADPDNVIGIDLGLRDFAVLSDGGRIPGPRFFRKNERKLRRAQRVFSRRKKGSARRLRANRAVSLVHRKTAHQRKDFLHKLTSRLVVKYDGICIEDLSVKGLVRTKLAKSTTDASFGEFRRQLEYKTVWKRRYLAVVDRWYPSSKTCHACGAVNDALTLADRTWTCVCGVCHDRDLNAALNVRSEGLKILTAGHAERITARGPDVRLPQVEAVGVEA

SEQ ID NO: 11237 - protein, 392 aa, unknown; identical to SEQ ID NO: 11236
  TnpB Polypeptide

SEQ ID NO: 11238 - protein, 440 aa, Hydrocoleum sp.
  misc_feature (152)..(152): Xaa can be any naturally occurring amino acid
MFTGGIMQLVERTIIKKNHPNYKPLDALAFLSKNLYNMANYIVRQEFINNGNYLNYNKVQKLLQSGADYQAIPAKVSQQVLILLDKNWQSFFQAIRAYNECPSKFKSRPKLPRYKHKQKGRNILVYTKQAISKPQLVKNQKILLSKSELFFXVYTKQAISKPQLVKNQKILLSKSELFFNSKINYDSLQQVRIIPKLNYYVIEVVYESVEVKLDLSESHVASVDLGVNNLATVTSNKKGFQPLIINGRPVKSINQFYNKKKGKLQSELKKTKSSNRIKRLSTKRNLKIDDYLHKTSRYIINHLIENQIGVLVIGNNPNWKQGINLGQKNNQNFVQIPFFKLIEQLKYKAKLVGIKVIINEESYTSIASFLDWDNLPVYQKGVKYRFSGKRVKRGLYQASNGVKYNADVNGSLNILRKVVPNAFSNGIEGVVVHPVKVTLN

SEQ ID NO: 11239 - protein, 423 aa, unknown
  TnpB Polypeptide
MKINKGIKVRIYPNKQQQELLNKTFGCCRFLHNKMLEERNKVYEELKDDKLQLYAHRYRTEKQYKQEFPFLSEVDSKALQSETRNLLQAFQKFFRGFRNGKKIGHPKFRSKKQKQTYTTYNINNNIRIDQNSKRIKLPKVGWVKYRDDRNIDHPIKHVTVSRTRTNKYFVAIIIEVEIDVEPLTTIPLHKIEAFDMSAPHFLVNETAELTNPRFYRPQERKLKRLHELVSRKQKGSKNREKARLRLAKFYEKIQNQKMDWTHKLTHSLSNHFDAIILEDLNIQGMQQFNSGLSKSVTLDFSWYQFISYLRYKLEWQGKHLVLVDRFFPSSKRCSVCGQINNDLQLSERTWTCQCGATHHRDVNASTNIKEEGLQILHDYGITIINDDHTTVGTTGSHASGDRVRPVLAGSGQGRRNPPAFRQW

SEQ ID NO: 11240 - protein, 288 aa, unknown
  TnpB Polypeptide
LKTNRHGEITLKLNPNRTVDIFIPFTQEIQPQKITSLLFIDTNERSVDFLLVNETSAQVRSLDTSQLSTIHFTYSLKRRNISQKIAQGSKYQPQKRKELLDKYGRRERNKTINEMHAVTNEITRIVETNGALVVLEDLTNIRQSLARQKNLKPRQQKKSKKMRRRLNRWNFRQFQTYLEYKVKATGHPVKYVNPRYTSQNCLQCGKRTKCWGKMFTCKHCGFTMERHILATLNIAEVFLNTQNVARPDPAERHQMTMMARAVRNCKDTIIREASQNDKIMGIYPVLST

SEQ ID NO: 11241 - protein, 423 aa, unknown
  TnpB Polypeptide
MKINQGIKVRIYPNKQQQELLNKTFGCCRFLHNKMLEERRTVYNMLKEDKDQLHSHKYKTEKQYKQEFPFLSEVDSKALQSETRNLFQAFQNFFRGIRKGKKIGHPKFKSKKHKQAYTTYNITNNIRINHEAKRIRLPKVGWVNYRDNRQIIHPIKHVTVSKTRTNKYHVAIIIEVEIDVEPLTSIPPIRIEAFDMSAPHFLVNETTELTNPRFYRAQERKLKRLHKRLSRTQKGSKNREKARLRLAKGYEKIHNQKMDWTHKLTHALSTQFDAIILEDLNIQGMRQFNSRLSKSVTLDFSWYQFISYLRYKLEWQGKHLVLVDRFFPSSKRCSVCGQINNDLQLSEKTWTCPCGATHDRDVNASTNLKEEGLKILQEQGITIISNNGITVGTTGSHASGDRVSPALAGGGQGTRNPPVFRQW

SEQ ID NO: 11242 - protein, 289 aa, Geobacillus sp.
MGGEKMYFCIKQQLNGLTKEEYLTLRELCHIAKNMYNVGLYNVRQYYFEHKEFLNYEKNDHLAKTNENYKLLNSNMAQQILKKVNEAFKSFFGLISLAKQGKYDHKAISIPKYLKKDGFHSLIIGQIRIDGNKFTIPYSRLFKKTHKPITITIPPVLLDKKIKQIEIIPKHHARFFEIQYKYEMPEDQRELNDQKALAIDLGLNNFATCVTSDGRSFIIDGRRLKSINQWFNKENARLQSMKDKQKIKGTTRKQDVNGALNILKKSKAVDLSVLCSSGEVDTPQRIRIA

SEQ ID NO: 11243 - protein, 445 aa, Methylococcaceae sp.
MIVTRTLIADTPSGLLPICKAIGFVRADIWRRFGGVGNFGKNATAIRAAITQSDYYSKLFVDGTIRAESTKDVVNDVLTYKEAAKLKVRRAIAARTTDKDERKRLFTLLKKDEWMSNPFLHRQMRKHFRHGKSGVDNQFIVRSDKHCSEIVDGKLVVVIHIARKFGEDIRLDTRSNGKNVNLTGCNLRVIVKDGFAEIHYATKKKDGRVHGDKIIAVDKGYTEALTDSEGVAHGEKFGKVLTRYSDKTAVTNKQRNKLHALEKKHRLAGRIGKADNIRKNNLGRKKIDARREKAQKQLRTIAYQSAHTVVDKAAVVVSEDLSSPIAKKQPWKTYNRRMGSWAKGVLAESLDEVCTQRKARHVLVNGAYTSQMDSTNGLLEGKRVGDKFYRENGDVLQADHNAALNVLARLNDCEISQFTPYKEVRRILLSRSPAQLSVNRLELGE

SEQ ID NO: 11244 - protein, 527 aa, unknown
  TnpB Polypeptide
VSPQDEAVLWAAGAHLGSLAGRDLAARCAEGRLDAKGRAGSRARRKKALTAESSSRWAGAITRTSEDQVRLAGQNLRAERNTLQARIRTIEARLPVPVGGKADRVRGYATPAERHAKTIRVQALQARLARVDRRLEAGTVSVARGGKALLRKRNNLAAAGLTQDQWRRKWESARLFLTADGEKDKAWGNETIRWNPGEGWLEIKLPVPLTHLANRPHDRYRLSAPVGFSYRGDEVAAQAASGAIRYDISHDPARGRWYIDASWKAAAAPPAPLDRLRQHPVLAVDLNHGHLAAWAVTPDGNPSGPPVTIPIDLAGLPSATRDGRLRAAISSLTRLARQLGCQAVVIEDLDFADAREQGRERAGSRPSRGRPGRGFRRLVSGIPMGKFRDRLAQMTSNAGLAVIVVDPAYTSRWGREHWLAPLQDHSHRVPASGHHAAAVVIGRRALGHRARRKAGVTGGGQRTSRRRATPGAPVARQTTRNGRPRKAQRQPPWWRKTATANRTRLPDQATQDRPGPPTTQDHVLLAQ

SEQ ID NO: 11245 - protein, 333 aa, Streptomyces sp.
  misc_feature (333)..(333): Xaa can be any naturally occurring amino acid
VVLQQSLRDAETAYRNFFASLKGTRKGPRTGAPRFKARKDTRQSIRFTANARWKITDSGRLNLPKIGAVKVKWSRTLPTTPTSVTVVKDSAGRYFASFVIDTDPQADAEQMPATDRTVGIDLGLTHFAVLSDGTKIDSPRFLRRAEKKLKKAQRELSRKQKGSKNREKTRLKVARAHVKITDARHEFHHQLSTKLISENQGIAVEDLSVTGLARTRLANRPRRRLGLIREHAGVQSATVRKDPDQDRPVRADESDLLQPRRQRRAQTPRREGMDLRRMRHRPRPGHQRRNQCQDGRRTGGIGLRSAGKTRTRSGAARRNRKPRIPDRTPCVVX

SEQ ID NO: 11246 - protein, 446 aa, Streptomyces sp.
VCSGGICRSVSGRGRRSINGIAAGRLMEPGRCCCPGSRPPRTLWEGSTVVLQQSLRDAETAYRNFFASLKGTRKGPRTGAPRFKARKDTRQSIRFTANARWKITDSGRLNLPKIGAVKVKWSRTLPTTPTSVTVVKDSAGRYFASFVIDTDPQADAEQMPATDRTVGIDLGLTHFAVLSDGTKIDSPRFLRRAEKKLKKAQRELSRKQKGSKNREKTRLKVARAHVKITDARHEFHHQLSTKLISENQGIAVEDLSVTGLARTRLANRPRRRLGLIREHAGVQSATVRKDPDQDRPVRADESDLLQPRRQRRAQTPRREGMDLRRMRHRPRPGHQRRNQCQDGRRTGGIGLRSAGKTRTRSGAARRNRKPRIPDRTPCVVAAQQRSRRPESSGFSPRCKSKETQHRTGPHVASYLPRGPVQIQITIFPRVRPRSACAWASAIRSRG

SEQ ID NO: 11247 - protein, 386 aa, unknown
  TnpB Polypeptide
MNTSTIRKTFKYRLRPTPAQEVAIDRILMLCRHVYNAAMGERQAAWRMRGVAITYYQQKAELPDIKAAMPEYAEVHSQVLQDVVLRVDRAYQAFFQRIREGKTPGYPRFHGRDRYNSLTYPQFGNGATLDNGCLILSKIGRLAVRWSRPLEGTPKTVTISREADGWYVCFSCADVPTQPLSLTGQETGIDLGLESFATLADGSQIANPRIFRVAEMNLKRAQRRVSRRKKGSKRCRKAIRLLAKAHLKVKRQRADFHHKTALAMVRQYDTVYHEDLQTANMLKNHHLAKSIADAGWSTFLSILSFKAACAGRSVVAVPPAYTSQACSGCGAIVSKGLSVRWHICPQCGTSLHRDQNAALNILRLGQQSGLGQSPQALTQPVGAYVV

SEQ ID NO: 11248 - protein, 425 aa, Halobacteriales sp.
MIDAQALVKTFDFQLDIQSDNESLLRDACLESRSVYNETIRLAKDGVDWDAIPDRVADDANIVKNTTQRVVAKALGAMENYCEYDDFGQPSHTKDGAYPLRANYEEGYNLSLTDDGNVAFRISAKPYKHVKGILEGDDAHLDILKTALTSDEWKIGTAEALFHDENAELHVNITNTEQTIRNKQNSRAVVGVDVNEDNVALTALSEDGVEDTLVIDFPEIKFERHRYFTMRKRVQNAEKDSIHDTLEGREERFIRDRLHKVSRHIVEWSQQFEKPCIVFEDLKEMRDSIDYGTRMNRRLHHLPFRALQYYTSYKAAFEGIPTGWIDPYKTSQRCPLCGHAERANRNKKRFKCRDCEHQDHSDRGASVNIAVKGVKKHQDWNVPALNSLPVVRTVRRQASGAVDAPTVTHPTVRGYQADGRVGVSN

SEQ ID NO: 11249 - protein, 457 aa, unknown
  TnpB Polypeptide
MGIKRIEKNNDKSIDDMVGEGYYHLFLVARKPTPFMGWMNCDSYLYLKNKNNNWIRDMKRSILLQTVATNSKNNHLNEFMNKSIFEYNRLLSEREGCKRFMEFHHKTLSTCKINTSFNVQVRCSLIRDAWKKKTDKVNGLAVKFNIPRNCKTFNTKSNFFVRLGLYPKQRLAVPIKQNRNYKRFQDLISDGWICKTFGLTSDLQIVAYLSKEKEIQQRKNILGIDINAKHFAISVISPEGKVLYQTYFGKHIWIKRKKIMGRRAKLQSLNSIKKLEILKHKERDFVKTNLGQIIREIIKIANRFDADISIERLERFKSKGRKFNRTVMRIPFCQFREILEQRCFDHDIKLNIVDSWHTSKWCSHCGAVGNGHSSNYSLFKCNKCGQVVNSDRKASLAIAVKSLLERNSHIPNPDISIQISKWRGFVNNLIRPNAFGDLCSVNHISSTYGKPTSFSCG

SEQ ID NO: 11250 - protein, 576 aa, Nonomuraea sp.
MSKLTATATCTAHGAIVEQTGEVLPQSLLAQRVAWLAGLAQDRTTDIVAARWSKADLDALWSGVGLDGRALPAKGWMAVRRLGWGVRPAPGVHVCDRVLRCAQEQAARLLRLALHRRAVVAAIVATWPRGPRRRTEAEWAALRAVLPDGVGAAEIRNRTRQIRAYRDAHGGVLPADLTALEGPPGCAAQIVLAAADRQLATLERTGERSARLRVKLPVIACPASGRDWAWHLLPIALPPTVPAEAKLCSPALRVHNGRVRVDLPFQTPIAVAPATGHVIGCGFDWGLNTLLTGTIGRLTAGGRVVTDGRPLSYDASGVSAKLHRLRDQREHLAAKKQHQERLVAGITPADPRVAELAAAYEVIGVEHERVCARIRRLNKALAWSAARWAVDQALAAGATVIYLEDLATLEARGRRGRANARLSGQVRGQVVEAIRHLAAKHAIAVVTVPARGTSRYCPRCGDGTSVLTHCPAPDRLAEKGWAWAWCPDCDLSCDRDWAAAERTVPAPVPGTPGTGQRPAGQAPQTTRPPAGRTGLVRDAQHRTGFHRVAATPVLPLGPYANGPPRPRPPDLPESLR

SEQ ID NO: 11251 - protein, 409 aa, Nonomuraea sp.
MAIRRSATKRHGLPSVVQLRLAPTPAQADALTAAVQVCNEAASFISRLAWEQRTLTVVELHRLAYYPVRVQFAGLGAQAAVRAIARVAGAYANRRATKTRAHVFRPHGAVPHDARLMSWNRDARTVSLWTPTGRVPVPYTGRPEDLKAVDTLPLGEADLIYRRGAWLLQVTVTLPKPEVREPVNGFLGVDQGVANLAVTNDGAVLPGPALPGPIHGNGHVRSLRERRHRQRRRLQKKGTSSARRVLRRLSGREHRMMTDLNHQISKHVVREAERTGRGIALEDLQGIRGRVRAHRFQRRTLHGWAFAQLIEFSRYKAARAGVAFLLVDPAFTSQACPDCGCVSRANRPARGRFLCTGCGLAGHADHIAACNVAVRGVAGWAVVNQPHATGLPSARRDRESKPPASAGGS

SEQ ID NO: 11252 - protein, 364 aa, Nonomuraea sp.
VKRAYKYRFYPTPEQAEELARTFGCVRLVYNKALEERTRAYMTEGRRVSYVESSASLTQWKRSGEYDFLSKVSSVPLQQALRHLQAAFSNFLAKRAKYPTFKSRKKSRASAEYTRSAFRWRDGRLILAKMDTPLNIVWSRPLPDGAQPSTVTVSRDAAGRWFVSLLVEETIRRLDPVAAQVGVDAGLTALVTLSTGKKVTNPRHERRDRRRLAKAQRNLARKAQGSNNRAKARLRVARVYARITDRRRDVLHKLTTRLVRENQTVVIEDLTVRNMVKNGSLARAISDASWRELRSMLEYKTAWYGRELIVIDRWFPSSKLCSACGALHEKMPLGVRAWQCACGAVHDRDVNAANNILAAGLAER

SEQ ID NO: 11253 - protein, 404 aa, Nonomuraea sp.
VDVRRSFKFLLRPTSKQAAALAACLEDHRQLYNGALEHRRTAYRKAGVTVGYGDQSGELKDIRADDPDGQGRWSFSSQQATLRRLDKAFKAFFARVKAGRTPGFPRFKGRGWFDTVEWPKDGDGCRWDSQPEHPTATFVRLQGIGHVRVHQHRPVLGRVKTISIKREGSRWYVVLACDEVPAEPLPPTGAVVGIDMGTTYFLTTSGGEHVANPRFMHAMADELAEAQRHLATFPKRTRQRAKRHRAAVRKVAKLYAKIRRQRLDFHHKTARALIRDHDVIAHERLNTAGMTRTPKPKPDPEVPGAFLPNGAAAKAGLNRSILDAGWVRFLGILANKAESAGRLLVPVDARNTSRTCLACGHVAKENRVTQAKFECVKCGFAANADHVGATNVLNRAGLVLCDVA

SEQ ID NO: 11254 - protein, 339 aa, unknown
  TnpB Polypeptide
MILTFKIKHNRDFSSELGKAKKIAEFVLTHKTRSSKDVKQFGLKSAIANQILRKYGNNDTIKNVNRIKLTVPSQSVNANKEKRTIEIPCLKFSVPYNFRNDYEKINQIELDNEYIYVSINIKEEPQITPETWIGVDRNTTGHIAVVGNPDTGKILKLGKEALHIHTKYKNIRKKMQKQGKYGVVKMIRNRESRIIKNINHNISKAIVETAKENNAGIKLEKLEGIRKNGKHLRNFNYSLHSWSFYQLQTFIEYKAKLCGIPLTYVEPKNTSKDCSRCGNEGIRDSKKFVCQSCRHVDHADANASFNISQRPPIGEGRSQLHIDRDVCKGSTDTPQGATL

SEQ ID NO: 11255 - protein, 231 aa, unknown
  TnpB Polypeptide
MTLFDDGTVSLATVDDCIRCDLALPDDEDGYQHQYLNDEDWKLTESTLSRRDSDYYLHLGFRKPKPEKRVEQQEDDEDRTVLGVDLGIVNIATTSTAYFASGRELRHRHREFERIRGNFQRTGAQSAHRTIQQMSGRESRYFRDVLHRVANDIIEEALAHDCEYIAFKNLKHIRGRAPPVKQFHQWAHRQIVDLVEYKTDAERLRVEFVNPENTSRRCPECGHTNEGNRVR

SEQ ID NO: 11256 - protein, 395 aa, unknown
  TnpB Polypeptide
VTATATKTLEATLAPPTANKERRLQRTVATYRRALLESFESGADTQSAVNDVVTDYNLTSYAKDAIKNYVPQLRRTYNASELDDNHPVRFTNRGWRLDHSEDRTHEFCWRVPQAGRGNAFWIPLRINPTQESLWADLLNGGVSVGEFRLQQHRTNWVLHVTVEYEVAEPDEPDDPTPVGFDIGESKLLTGCACRDETPTRPYIYDGGRARQIRKEMFTTLRRLQERDAEWRVDERFNHYQNALTDIVEKASREAVEYARSFENPVILLEDLSYIREHLDYGKWMNRRLHNWAFARLTGRIEDKARDAGVPVRSVNPAYTSQTCHACGHLGSRSSQAAFRCTNAKCWVTEYQADINAVARRSLAGSEIASRSCDGGQHRWSPQPVGREVRAETAHR

SEQ ID NO: 11257 - protein, 268 aa, Enterococcus sp.
MIIWNNQNFTIGPSGIKMPFVVDGKSKKIEILADIPEYERTLLKKARKIGTLRITRKRAHYVAQIAIELPEKLNTATKIMGVDLGIKVPAVCCTEDNEVKFSGNGRMNKYIRRYHHSRRKELGKAKNINALKKLKDKEQRWMKDQDHKISREIIDFAVNHHIGMIRLEKLANIRKQTRKSRKNNHSLSNWSFYRLASFIEYKANLVGIKVEYVHPAYTSQKCPNCGHRHHAKDRKYDCSECGYIGHRDIVGAKNIIDAPVLDGKSQVA

SEQ ID NO: 11258 - protein, 176 aa, unknown
  TnpB Polypeptide
MYKCIFEINNENLSLTRNTYGTIGVDFNKGFLTISQTNKYGHLVKTDKMTYRFGSGNKTKNDLLLIINKLIKLAINNGKDLVIEDLNFLKTKSKTLKGKSEKGKQYNKMLHSLAYRIFLDRTKQICNRKNVGLIKVNPAWTSWIAKNKFCERMKLNIHTGASFVIARRGMNIKDVV

SEQ ID NO: 11259 - protein, 435 aa, unknown
  TnpB Polypeptide
MKQVITAKLKLHTSPEQFRALRQTQLAYREALNYTSRYAFAHGKMSNQQRLQKETYADVRTQYNLPSQMACNVPRQVGATYKTLWTRVKQNAAQRKAGITKKRYKGLDQAPKYVSPTLTYNFHRDYSFKPEQQVSVLTLEGRVIVSYSGYNKHVTLIEHGAHIGAAKLWYDKPHKQFSLLVSLEVEAADPTPETHKGVVGVDVGQRYLAVTSDTRGKTAFYSGKAARAKADHSARLRKRLQQKGTRSATRRLIAISGRERRFKLQTNHTIAKHIVDTHPSSIIGLEHLTDIRERTKRKRGKKATRKQRRANCHASRWAFAELHSVIAYKATLAGSMTVEVDAHFTSQACPKCGYISQANRPHAGLLFVCQNCHFGLHADLVGARNITMRTLVIRQDWMTTGILSECPDRSDVEAKAARLQKYAELRWSPDPSPLL

SEQ ID NO: 11260 - protein, 425 aa, unknown
  TnpB Polypeptide
MKTDNYTILAAGVGDSVPSATSCSHLIFKAYKFRIYPNAGQRQLLSKHFGCCRFAYNQLLDLHNEIYEISGVSPSLFEMHRLIAEMRKDEDTKWLSEVYGHALQAELRHLDGAFKKFYKALKEGKAKPIIRNGKPTGRRKYEPRFKSKRDENQAVTFPDNVRVIDGKLVLPKFKTPLKMKMHRPLGGKICQAIVSRDCRGKYYVSILCEEECAMLPEAPHKSIGIDLGIKEMAVCSNGEHVANPKFLERGEKHSKYLQRQVSKKKKGSNRRRRARMLLSRHYEKVANRRHDYIHKFTKRIVSENQAICVEDLNVRGMESNHRLAKSIGSVAFGEIVRQLEYKCGWYGRGFVKVGRWYPSSKTCNHCGHINRGLTLKDREWVCANCGREIDRDYNAALNIEAEGTRILSGDGALSDVKQKSGEAAA

SEQ ID NO: 11261 - protein, 412 aa, Chloroflexi sp.
MGKHTTARTYQVKAQLTREGHRRLDAVLRMSARLYNAALQERRDAYRMAGVSISKYDQTKQFTLVRGDDPAWAALDVQVGRSALFRVDRAYQAFFRRIKAGDKPGFPRFRSSRRYRSIELTDAGSRSWLTVNGDRAQIRVKGLPTLRLRPHRPLPAGQPQAVRITRKARGVYVDLVYGHDDPPTSGALPANPIGIDMGVAKRVSLSDGQTVAGVEIDRRRLRRLQRRVSRAKRGSNGRGRKVAALAREWQRVADAERGKAHQLTAALVQQYDFFAVEDLQIPNMTRSAAGTPEEPGQNVAAKSGLNRSILAQSWGRVLSQLEYKAASAGVPLVRVNPAYTSQGCAACGVVDGESRDGQSFRCGHCGYAADADVNAAINILRRGLDAAFGPAGSMPARAAGCQQPRPLGPVRA

SEQ ID NO: 11262 - protein, 220 aa, Okeania sp.
LLHYAVTSKGEFIEVSKFFRSSEHRLSKLQKRLAKKTKHSKSWKILKGKIRSLHQLISRQRLDWQFKLAYHLFSDVSVIFLEDLQIANLVRRCKAKLGNNGQFLPNGQSAKSGLNKSLQDAAFSQFVQILEYVAWKLGKRIIKVDPKGTSQHCWECLNKVSKSLSERWHSCPQCGQELDRDHNSALLIQKIGLLSTQEEDITSVKTAVRASLAEESRALP

SEQ ID NO: 11263 - protein, 409 aa, Okeania sp.
LYALKLQLKLNNKERSILTQCAGYQRFVYNYALNMVNGTSCLTKVNKRGQKVNYSYNERISQGKKVFTNYVKKQPEYAWTNNYSSRIYQSAFKHLSEAFSRFKKGVSKYPRFKSKKDAQSFTVYDGNGKVTINAGKTIKIPTLGIFQLFESIPYTTASQTFTISKTGEKWFVSFGIEAEQLPIHPLLEERPQEVLGIDVGIKQFATVANFNKSEVISLPDSIKIEQLKLAKFQWRNRNKQLGSKGKPPSKNAIKYYKKLTKYHARIANMRRDFLEKTTYYLASKYKHIALENLNVLGMMQNGKLAYSVARQGFYEFRQRLTTKILASGGSVVLADQWFPSSKTCHNCGHIYKELTLSDRIYNCPHCATTIDRDLNAAIVLSQYGEVNQKTRVGCTRIYACELEGADSLD

SEQ ID NO: 11264 - protein, 513 aa, Rhodococcus sp.
VTLTAPLADPDAPVAAPTPDPALEQAAHPRPTVSRAFVYVLDPTPEQASVMRSHCGAQRFAYNWALSQVKANLDQRTAERSYEIPDAELTPPVSWSAYGLRKHWNTVKNDVAVNTDTGQVWWPENSKEAYSSGIANCAAALSNWSDARSGKRKGALGFPRFKGKRALLSCRFTTGSFGLVTDGGNRRHIQLPRIGVVRSAESTRKLARKIAAGTARIRSATLSYRRGRWQVSFSVETTLPARALPPTDTDSAVAGGRGVGRSVTGIDVGVKHLAVLSTGETIENPKHARKHAKTLQRLGRRASRQVGPDRTGQQPSRRWLRTQEQIRAVRTRIADSRRDHLHKLTTRLVQDFHTVVVEDLNIAGMTRSGGAYKRGLNRALHDAGLAEIRRQLTYKTEWTGTRLHVADRWYPSSKTCSNCQVVKAKLPLKVRVFTCDACGFRADRDHNAALNLAALAAVGEGGASSASCGRDVKEARQKPTIRPAARWADGIAAGTPPSGERDQGNLDTRAECP

SEQ ID NO: 11265 - protein, 384 aa, Campylobacter sp.
LKINKLANALNKNKNGKTMLLTYKYKLYKSKKTKHIDELIDIACSIYNHCIALHKRHYKLYHKSLNKVKLQKHLTKLKKLNKYKKWNNLGSQAIQQITERIDNAYKKFFKKQGGLPSFKKRIKYKSFTLKGSVGYKLEDNVISLNGYDYKFSKNQTINDDDKIKTITIKRDNLGSFYICVSLETKDKAHTTTGKSVGIDFGLKTFLTLSDNTSFNSPLIYLKSLKELQSKQRKLSLKKKGSNNRKKAKLELAKFHIKLANQRKDYFFKLSNELAKKYDNIFIEDLNLKAMAKIWGRKINDLAFNEFINILATKTNVIKINKFYPSSKTCSCCGYIKEDLSLKDRIFDCPNCKTKLDRDYNASLNIYRVGASTLRGEFVRPTKVG

SEQ ID NO: 11266 - protein, 369 aa, Tenericutes sp.
MYKSYKFRAYPNDKQKQITNQTFGNTRFVYNYYLSKQQQDNNITIKECISDYNKLKQTYQFLSKENQYLMISTIYKLNNNIKKYKSNGLGYPKYKSKYNKNSYTLKENIIVNLKKQILISPNLGELKIRGYKKLDKINGTLINITISKEKNDKYYISLLYDIPTPKRTIPRVTVGIDLGVRKLLTLSDGTAYDNNKYIDKYEKRIKRKQRELARKEKGSKNYNKCKKELAILYSKLSNARRFYIHKITKNITDEYDIITCEKLKTKEMIIEGKDNKLSSKINDATFSEIIRQLQYKSKYKGKQFYQINTYYPSSQICSRCDNQDRRYKDLTRREYKCTKCNQELDRDLNASINIMFEGLKLYMKNYVRI

SEQ ID NO: 11267 - protein, 366 aa, unknown
  TnpB Polypeptide
MLLGYKFRICPTIEQQTKLDHVMEACRFVYNHALETRLNAYDRYGESLSVHDLPIRLNDLKNKYPWITEIDSYALQASIKKMDVNFEEFRKGNRKLPRFRSRINDNSFKCLIGSFKFDLKNSTLSILEISSIPIVLSRQIPGTILNMTVSRTPTGKYFVAFQVDSNKKIVIPDKVLPETTVGLDVGVKSFVTTSDGEVFEANRKLKDNLKRLRCLQRRASKKVKGSKNQIKANLRVAKLHEKITNQRVSYIQQVTTRLIRDNQTESFVIENLNVAAMLGKREMSQSIADASFAEFFRQMKYKCKLHGKNLIVIDRFEPSSKTCSNCGSINDALTLKDREWTCNACGTKHDRDLNAAKNIKAAGLKK

SEQ ID NO: 11268 - protein, 394 aa, Acidianus sp.
MFKYSFIKISLMARRGKKAIRATVSMKIALSEPLLVLVNNYVKALRFTLFWLKENVPNPNEKRVLPKVHEELYTRLRMEYNLPSKVAEDCYRDALSIYKSWYNNPKKGRFPRVYKPTVWLTPKASYNVDFDKMTIRIASVGELPILGYPRNLKDYLSWRMKESRLVIKGDKAFLKVIFEKPREESVEPKESVAVDINMAEVVVGKDDINYVRIPTRLDEVHHWKSLAENLQKKYPRRWRENKRILHRIHSFHQRARRVMEDFARKVGKWVVEIAEDFGANVIKLENLRNLIKNVNKLPKEFHDKLYLMQYRRLQYWISWQARKHGIIIKFVNPSYSSVSCPKCGKRMEEKGYRWFKCSCGYENDRDVIAIVNLNGRGSLTLSTAPQMRDVRANR

SEQ ID NO: 11269 - protein, 381 aa, Acidianus sp.
MARRVKAIRATVSMKIALSEPLLALVNNYVKAIRFTLFWLKENVPNPNEKGVLSKVHEALYEKLREEYNLPSKVAQDCYREALATYKGWYNNPRRGRFPRVYKPTVWLTPRASYNVDFEAMTVRIASVGELSILGYPRNLRDYLSWRMREARLVIRNDKAFLKVVFEEPRESVEPKESIAVDINMAEIVVGKDDTHYVRIPTRLDEVHHWKSLAENLQRKYPRRWRENKRILYRVRSFHLKARRIAEDFARKVGKWVVEIARMIGVNVIKLESLKNLIKNVDKLPKEFHDKLYLMQYRRLQYWISWQARKHGMIVEFVNPSYSSVSCPKCGQKMKEVSHRWFKCSCGYENDRDVIAIMNLNGRGSLTLSTVPQMRNVRANR

SEQ ID NO: 11270 - protein, 359 aa, Acidianus sp.
VKLRVKVDYKTYQKLKEVEEEYREVLEEAINYGLVNKTTSFTRIKSGVYKTEREKHKNLPSHYIYTACEDASERLDSFEKLKKRGRSYTEKPSVRRVTIHLDDHLWKFNLEKISIAVKRSRVFISPIFPKIFWRYYNTGWRIASEARFRLLKGNVVEFYVIFKRDEPKPYKPKAFIPVDLNENSVSVLINNKPVLLETNTKKITLGYEYRRKLTTTGRSTKDREVRRKLKRLRERDKKVDIRRKLAKLIVKEAFESRSAIILEDLPRRTPELMIKDVKDSQLRLRIYRAAFSSMKNAIIEKAKEFDVPVVLVNPSRTSTVCPIHGTKIVYQPDGGNAQGLVFVRRGKRGGIGTWLRCTT

SEQ ID NO: 11271 - protein, 427 aa, Acidianus sp.
VSKSLRLKSFQPEEEYVYLTYSLKNDKKEESKILLENYRVLLQKALDWLWEKVERKEVKGKKATKIKITLPKKKEVYKVLRDELEKINNLASHYVDKAINDAYSILGSWRRRAEKGQASLRKPTLRKFYVRVKSTLRKVEGEEVRITVRPYEYITFSWSHIWFSRRVKGLELGEPIIKEDKVYLPFRYRLPWFTPLDFLSIDSNLYTLDAYDGEKFVTFTIKESYSLKFGMELKRGRIQSFASKHGRKGKVLLRKYSHRERNRVLDYVHKFVNKLLEMYPLTIFAVEKLNKQSMFQDADDKLSKKVSKTVWRTIHRVLKYKAPLYGSFVKEVNPHLTSKSCPRCGWVSRKVGRTFHCERCGFTLDRQLNASLNIYLKMCGFPHILGIPRLWVGVIPLKGRRGMSRAMPRDPGEAQGLRIGYNFMKIQ

SEQ ID NO: 11272 - protein, 383 aa, Acidianus sp.
MARRGNKAIRATVSMKIALSEPLLVLVNNYVKALRFTLFWLKENVPNPNEDGVISKVHEALYEKLREEYNLPSKVAEDCYRDALSIYKGWYNNPKKGRFPRVYKPTAWLTPKQSYNVDFEAMTVRIASVDELPILGYPRNLKEYMSWRMREARLTVKDGKAFLKVVFEKPREENVELKESIAVDINMAEVVVGKDDTHYVRIPTRLDEVHHWKSLAENLQKKYPRRWRENKRVLHRIYSFHQKARRVMEDFARKVGKWVVEIAEDFGANVIKLESLKNLIKNVDKLPREFRDKLYLMQYRRLQYWISWQARKHGMIVKFVNPSYSSVSCPKCGRKMREVSHRWFRCSCGYENDREVIAIVNLNGRGSLTLSSAPQMRDINPNR

SEQ ID NO: 11273 - protein, 368 aa, Acidianus sp.
MKIALSDSLLVLENNYVKALRFTLFWLKENVPNPEEKGVLSKVHEELYTRLREEYNLPSKVAEDCYRDTLSIYKGWYNNPRRGRFPRVYKPTVWLTPKASYNVDFIAMTVRIASVGELSILGYPRNLKEYENWRMKEARLVIKNDNAFLKVVFEKPSKKVEPKESIAIDINMSEIVVGKDDKNYVRIPTRLEEVHHWKSLAESLQRKYPRRWRENKRILHRIHSFHLKARRIMEDFARKVGKWVVEIAEDFGANVIKLENLRNLIKNVDKLPKEFRDKLYLMQYRRLQYWIGWQARKHGMIIKFVNPSYSSVSCPKCGRKMEEVGYRWFRCSCGYENDRDVIAIVNLNGRGSLTLSTAPQMRDVNPNR

SEQ ID NO: 11274 - protein, 399 aa, Acidianus sp.
MDSHLIFKYFFFKISLMARRGNKAIRATVSMKIALSDSLLVLVNNYVKALRFTIFWLKENVPNPNEKGVLGKIHEELYTRLREEYNLPSKVAEDCYRDALSIYKAWYNNPRRGRFPRVYKPTVWLTPRASYNVSFEAMIVRIASVGDLQILGYPRNLREYMSWKMKEARLVIRNDKAFLKVVFEKPGEESVEPKESIAVDINMSEIVVGKDDEHYVRIPTRLHEVHHWKSLAENLQKKYPRRWRENKRILYRVRSFHLKAKRIMEDFARKVGKWVVEIAGDFGANAIKLESLKNLVKNVDKLPKEFRDKLYLMQYRRIQYWIEWQAKKHGILVQYVNPSYSSVSCPKCGRRMEEKGYRLFKCSCGYENDRDVIAIVNLNGRGSLTLSTAPQMRDARANR

SEQ ID NO: 11275 - protein, 441 aa, Acidianus sp.
VLKTLKRTVRVESDFLNEWKYRVLREVEEYQRKIVNEMIEVILSEALPTTRKKLHERFYNHYKEKYPFLPSRVIEGAYIVAGRIVKSFKERKKEGLTRKDKPEYKKVLITIPNMVNWRFNRVFISVLTHKGWVEVPLKFTKQFIHYLYGGWRVSQELKLRLIGRKVLVWLTFEKEVEVETKDGNYISIDVNENNVTLAVFENFKLKELRRYETGLGRIVVNYSIRREEITKGHSTKDELIRKKLRKLREKERKIDVLRKTVKRITELARSLSAKVVVGKFSSKVKEKMESNKNDKLRHRIHQWSVVKFVDMLKTQPIEVDEVSESYTSSTDPFDGKKLRKRKQIVERVVKVFNPHLMTGPAHEGGGVKVLKMNARYLESGQVLLERDSIAPLNLVRKVDGRVLVFPSTSPKDLRVTVYDPLRGVPVAELEVIKSKEKLRHG

SEQ ID NO: 11276 - protein, 397 aa, Acidianus sp.
MAPLYLNISFSKISLMARRGNKAIRATVSMKIALSDSLLALVNNYVKAIRYTLFWLKENVPNPNEKGVLSKVHEELYTRLKGEYNLPSKVAQDCYRDALSMYKGWYNNPRRGRFPRVYKPTVWLTPKASYNVDFEAMTVRIASVDELPILGYPRNLKEYMSWRMREARLTVKDGKAFLKVVFEKEEENVELKESIAIDINMAEVVVGKDDTHYVRIPTRLDEVHHWKSLAENLQRKYPRRWRENKRVLHRIYSFHQKARRIAEDFARKVGKWIVDVARVMGINVIKLESLKNLIKNVDKLPKEFHDKLYLMQYRRLQYWISWQARKHGIIIEIVNPSYSSVSCPKCGKRMEEKGYRWFKCNCGYENDRDVIAVVNLNGRGSLTLSTAPQMRDVIPNR

SEQ ID NO: 11277 - protein, 398 aa, Acidianus sp.
MDSPLIFKYFFAKISLMARRGNKAIRATVSMKIAVSDSLLALVNNYVKALRFTLFWLKENVKNPEEKGVLSKVHEELYTRLKGEYNLPSKVAEDCYRDALSIYKSWFNNPKKGRFPRVYKPTVWLTPKASYNVDFNKMSVRITSVGELSILGYPRNLREYMSWRMREARLVIKGGKAFLKVVFEKEEENVEPKESVAVDINMAEVVVGKDDEHYVRIPTRLEEVHHWKSLAESLQRKYPRRWKENKKIIHRIHSFHLKARRIAEDFARKVGKWIVEIAEDFGANVIKLESLKNLIKNVDKLPKEFHDKFYLMQYRRLQYWISWQARKHGMVIEFVNPSHSSVSCPKCGKRMEEVGYRWFRCSCGYENDRDVIAITNLNGRGSLTLSTAPQMRDVRANR

SEQ ID NO: 11278 - protein, 397 aa, Acidianus sp.
MDNPLIFKYLFVKISSMARRVKAIRATVSMKIALSDSLLAIVNNYVKALRFTLFWLKENVPNPEEKGVLSKVHEELYTRLREEYNLPSKVAEDCYREALATYKGWYNNPKKGRFPRVYKPTVWLTPKASYNVDFNKMIVRIASVGELPILGYPRNLKDYLSWRMREARLVIKSGKAFLKVVFEKEEENVEPKESVAVDINMAEVVVGKDDKNYVRIPTRLEEVHHWKSLAENLQKKYSRRWKENKRILHRIHSFHLKAKRIAEDFARKVGKWVVEIAEDFGANVIKLENLRNLIKNVNRLPREFRDKLYLMQYRRLQYWIEWQAKKRGMTVEFVNPSYSSVSCPKCGQKMREVSHRWFKCSCGYENNRDVIAIMNLNGRGSLTLSTAPQMRDVNPNR

SEQ ID NO: 11279 - protein, 398 aa, Acidianus sp.
MDSPLIFKYLFAKISLMARRGNKAIRATVSMKIALSEPLLALVNNYVKALRFTLFWLKENVKNPEEKGVLSKVHEELYTRLREEYNLPSKVAQDCYREALATYKGWYNNPRRGRFPRVYKPTVWLTPKASYNVDFEAMTVRIASVGDLQILGYPRNLKEYMSWRMKEARLTVKGDKVFLKVVFEKGEENVEPKESIAVDINMNEVVIGKDDKHYVRIPTRLEEVHHWKSLAENLQKKYPRRWRENKRILYRVRSFHQKAKRIMEDFARKVGKWVVEIAEDFGANVIKLESLKNLIKNVDKLPKEFHDKLYLMQYRRLQYWIEWQAKKRGMTVEFVNPKYSSVSCPKCGQKMKEVSHRWFRCSCGYENDRDVIAVVNLNGRGSLTLSTAPQMRNVRANR

SEQ ID NO: 11280 - protein, 396 aa, unknown
  TnpB Polypeptide
MRLVERHIIKDNRFEDICLKSGLLYNYVLYLVRQGIFNKEYLKEYDLSTKLGRENQFDFRQLPCNVSQQVVGQVFKNINLWIKNKKDFDKNPSKYSNHRSHLPKYKKGKKQNMVVFTKCNCRIKDDGYIHFVKNVIEPIKTNVKKDELKQVRIIPQATCYVVEVIYERKEIDLNLDKDNFLSIDLGLNNLCSCISNVGVKPFIINGRVMKSLNRWYNKKKARLMSYVSDKGTSRRIRRISLYRNCWIDDKMHKISKYIVNFCASNNIGRIIVGLNKEWKKNINIGKRNNQHFVSIPHSKLINKITYKAKLLGIEVVTHEESYTSKIDHLAFEPLKKQDDYLGRRKKRGLFQSSIGKLLNADINGAIGIARKVVGDSCIHTIVDSGFAFNPVRVNIL

SEQ ID NO: 11281 - protein, 392 aa, Cyanobacteria sp.
VLVIEYKAVIKPNQVKAIDEAIRTSQFVRNKVLRYWMDNRGVGKKELYQYNTQLRAEYEFVKDLNSHACQSSVENVERAINRFYDNCKNKKPGKKGYPRFKKNCRTVEYKVSGWKLHSSKRRITFLDRKGIGLVKLLGKWDVHRYPIELIKRVRIVRKADGYYVQFCVKVDARTEPRTGDGEIGLDVGLEYFYSDSNGLHEENPRFLRKAQKAIKQAQRRIYKKEKGKNNRRKARARYAKKHLKVSRQREEHAKMLARNVCKANAFVAYEDLNVQGMVKNRHLALSINDAAWAAFRRWVEYFALKFNTKAVAVAPHYTSQKCSSCGHIVKKGLSTRTHKCPHCGTILQRDVNAAINILSKAKSTEGHSGSNAWGEVSSTSVGRKTCKSKKHQ

SEQ ID NO: 11282 - protein, 243 aa, unknown
  TnpB Polypeptide
MSEVFKYRLYPTKKQIDMLAEQLDGHRYLYNQALAQRKDAYEKTGKEVGIDVGLQSFIATSDGNQIENPRYFRKAERQLAKAQKRLSRRKRGSNRRRKARILVAKKHERIANQRLDFCHKVAHFFVQNYDGFAVAALNIKGMVKNKYLSKSISDASWGIFLNILKGKAESAGRWYKEVSPQGTSQMCSNCGKIVNKSLAVRIHNCPFCGLSLDRDVNAALNILKLARTEPSALATTPVVSPRN

SEQ ID NO: 11283 - protein, 401 aa, unknown
  TnpB Polypeptide
MRRAFKFRAYPTQPQEGRAVRLLADHCDLYNAALTERREAWRMRHVSVSYGTQSAQLKDIRRADPDGQGRHSFTAQQQTLRRLDTVFAAFFDRLRVAEKARERKKPGYPRFKPYQRFSQVLFVAGDGARWQPADSGKWAYATFQAVGTLKVHRHRPVPGTVKTLQLTREHRRWYIIVIVDTELVPLPSAGREVGVDVGVTRFLTTSDGEVIPHPRFLAASAAVIADLQRRKARARPGSGNRKRIRRALAREWRKVRNRRRDFHHKTARALISQCDVIALENLNTAGMTRRPPPRADPGKPGAFLANRARAKAGLNRSILDAGWAQFTSILTGKAEEAGRRVVLVNPAGTSIGCHRCGRRCDRRCQKTVICPVHGAMDADVNGARNIASRAGLGSGQAPTAA

SEQ ID NO: 11284 - protein, 671 aa, unknown
  TnpB Polypeptide
METPKEKPPEFFKSTKTSLKSILKHTEINTTKINDVVIKAHKIVIHALQFLKLYMLHHYETNNNILPDIDKVLILNVMKIVCGEKHTNTGKPPKRETIELKDKLTAFYTEHYKPYTQPEQLDYEYMSNVLSYLCEDIMTMYENNIQLHYVDYVERFVNVVWKKKMLVEKIRKIFPTKKEREARIRHLEKELRQIKNDLLNVDSSVAYTSKPYYHNWIVQQKKNILPVKEKFQKQSIYYDLKCKPMDYFPGMIAMMKQVENDLESISNVFPLRSSIAPGYIRLDTITLVNMLLRKEQGKKSDYSNQGNTKKHEDKIWNFFFRKEKKVFRKTGYSFHHMISTDGVGVSILFLRDDLVGKKLPIAKKGLSRELYIDELNDYSGLQDKKIVGIDPGKEDLIYCVDDASKDANIFRYSQNQRRKETKMKKYNNIILTMKTIKIQGEGTNKSVIEYETELSLYNRKTLQIDKFKTYINEKNRINNLLFGFYTKHLFRKLKFGRHINIKRNEQKMISNFRKMYGTPDEVVICIGDWEQRQKMKYKEPTLGIGMRRLLRKNKYNVYLVDEFRTSCKCSNCDGGVCEKYMVRKNPRPKPKKNKDNPKKERKYDELRLVHGLLRCKSGCGSWNRDRNGSSNIYKIAYQAIHKLERPSYLCREFKSNQAVLPNCYKQNIHKV

SEQ ID NO: 11285 - protein, 562 aa, Mycobacterium sp.
MIAQMRTRAQAARVASATGGVQLPGRPKGDGTPTLSARVELGADFEAHRAVVEAVSVLFTLYGTDPLTGELVEVPSGWVLQAYQYALDPTSAQVAVLESHAGGARFGFNTMLAAVKANLDQRKAERSYGIADDQLTPVVSWSFQQLRNRWNQIKHQIAVRDDGSPWWQDNSKEVYANAVANLAEALSNWDDSRTGERDGPKMGFPRFKRKGRSVKSFTFTTEAMRVEPSRHHVTLPVLGTIHTHESTRKLGRRIESGTARILGATVRFERGRWLVSFTCAVRRQPATVLAGIATADAPVVGIDSGVKDLLVIATPDGIEIARHTAPRELKRALRKLRALQRKAARQIGPWDTRSQRKQDPSRGWQKTQAEIARTHARIANLRTDRIHKLTTSLAKTHQVTGGETLAVKNMMRRPKPKPDPDNRGAFLPNGAAAKTGLNRGLADAGLGEMFRQLDYKTRWYGSHLVKADRWLPSSKMCSGCGVVKTKLHLAERVYHCQHCGLVIDRDRNAAINLTRHALKATAPSTGVVTGGADRKTQPSGTAGGNETGTVSERSAHPKGRAA

SEQ ID NO: 11286 - protein, 409 aa, unknown
  TnpB Polypeptide
MMLNIQIRLYPNKTMKTVLDSLCDYRRYCWNKGLELWNTLYEARLLGLPDELKDKINASLTDKTIQFSEEEQILRAIYPRPSERSVRDKLVAQKADWQFEFSARVLQQTIKDLAVAWNLFFNNPKTAGKPHFKSRKKLKQGFKTDRARIKNCHLLLDKPSAYKGKWVGIRFKGATIPDGKLKLCAVTRTNGKYIATITIDIETVMLPKTGKKTAVDANVDHFDTTMGQTSLKPKSLDQLYIRVRTYQQQLARKRKVNKNYQHSKEYQATRAKLQATYERICNVQNDLLHKFTTDLYRQNDIVVIEDLDVKGMQMKKKAKNLHRSLFGRFRQFMKYKAKKFGKTLIIADRYYPSTQRCSNCGHIKTGEEKVTLSGNQKHGTKHNEYVCYHCGYVDDRDHNAVLNLLALVE

SEQ ID NO: 11287 - protein, 422 aa, unknown
  TnpB Polypeptide
MSEEKNLKIKENGKATREKRSQMDCRVFSVKVQENKLSKAKLEKLYRCFLEAKWLYNAVLSSVEVFPRSGIKTISVKVKDSFEEREIKCLSSQMKQDVVDSVKQNAFNLSKAKKAGLKVGRLQYKHECNEINLKQFGNTYKIKSHNKISVQNIGVLVVNGLEQINLDEVEFANAKLIKKPSGFYIHLTVYMKKQPQPETSKEVLGLDMGIKDQLTFSNGVKVNFYLEESEQLKGLMRKLSRQTKGSNQYKQTLTRIKRIFEHQNNKKNDVANKLNSVLKENYVICFQDELLNSWKRKKSKQKFNFGRQIQHGILGRVKDKLKKNKSNVMLDSSTPTTQTCPECGCLTKHSLDKRKYHCEHCGFENADRDIHSAKNMILLSGYGTYRSLNMDAVSTNKLVSLLANLESVGVVVSTNSMEAHCL

SEQ ID NO: 11288 - protein, 609 aa, unknown
  TnpB Polypeptide
MYSNTFSKSTLIKNLSAVNLLGSLFDLPNFDSCPDDILTDPLLQPLMYLKLPYSGSKEHSILLFLIKCESLSVSEKLKYLTYDSVTHKLSVINTQELIISNPVLSKWWNESTDELSKNTWLPDKSLSFGDNTTHLHECTSTMGTNNWFTMKKSSGDNSTELIVESNKIQKQSYKTTLGTVGDINGVVKIRLYPTQHQKNILQQMFDANRYSYNKIIEVIGDKMFDFSPGVFVNAYKDSYRYVTKKYMTELGVPDRIKNTNSLVLQSAYRDVNKARDSMIAASAAQKAKTGKGFVLDKLKFRTKKHLSSESIEIASSDIKYVKNNLFFYFYPMSFRLKKEAKVKSTKRRTSDQVKIDKQNEINQKHTQIRIRIKTPLPKLISAVRLQMIKPGIFYLCIPVKKSTEPITSHKICSIDPGVRTMLTVFDPEDKQVYMIGNNVDKLITRSKKIDILKSQLRHFKGKRNKRYRLKKEMQFIQRKLKNMTFDMRHKTSKFLAENYKTIIYPIFNIKSMCNKKYRNIGKHTARRMYLWSHFKFRELLKYKSALRGGSVVDCREDYTSKTCSCCGRLNHTLGASKSFTCPFCHYVVDRDVGAARNIFLKNHHLLRLS

SEQ ID NO: 11289 - protein, 647 aa, Streptomyces sp.
MYWLPESMSGAGRLPSKGWMALRRLGWTTPAPASASAEGVGVGGAVVVYVSDRVRRAGEEQAARTLRLALHRRSVVMALLATWPADPSRRTGEEWTALREVLPPGASAAEIRNRTRQIRGWARAHAGRLPAGLCELEEPPTVAAASVLLAAMDRQQTTLQRVDPARARLRVKLPMCAAPVSRRDWAWHVIDLRLPPAVEPDALLHAPALRITPAGRIAVDLPHSRPVATAPATGHTVAVGFDWGVNTLLTGVVGRLTGQGATARVVTDGRPLIFDATAISAKLHRLRGHREHLAAKRDHYRALADSPRAPHSSRTVLLDKAATPQSEHERVCARIRKVNNTLAWSAARWAVDQAAALGASVIYLEDLATLETRGRRRGNARLSGQVRGTLTRAIGHLAAKAHITVVTVPARGTSARCPRCLRTLGHHPAPDRLDERGWKWAHCTSCGLSMDRDHAAARRIVSRGLLAQAHTITDRATGTRTIRTTAEGTVTCVRRPKKTTRRLRRARRTPAPSARPRGPKTTPGKTRPTPARPSPARRPQTTRRMPDVRTVPATTPTGAVQRPAGHDTQTPTPFPGQGPGHGAPASHQPEAPLPAGGRRRSRETCRQRTRAAERTGFHHVHATEVHPLNPRFGPHGTNTRPRRARKT

SEQ ID NO: 11290 - protein, 416 aa, unknown
  TnpB Polypeptide
MVRRQAFKYRIEPTGEQQRKLRQFAGMCRFVFNKALALQQENRVAGGQFIGYVPMAKHLTAWRNGTETPWLKAAPVHPLQHALKDLDRAYQNFFAKRADFPRFKKKCQGDSFRYPDAKQIKLDQIGNRIFLPRLGWLKYRNSRPVLGSVKNVTVSQSAGQWFVAIQTEREVDVPLHASPLAAGIDLGVVRFATLWDGHAETVLDPLNSFKRHQHRLAKAQRQMSRKTKFSSNWKKAKARVQRINRQIANARADYLHKATTAISKSHALVIVEDLQVASMTRSASGTAEQPGSRVRQKAGLNRSILDQGWGEFGRQLNYKTAWEGGWLEAVPPHRTSQECPACGFTHADNRQSQAVFLCLACRHRENADTVAAKNIRERGLKQLEGQDHARIACGVNGAVRPSAAGTHRSDGAAKAA

SEQ ID NO: 11291 - protein, 293 aa, unknown
  TnpB Polypeptide
MLLHQGSGYRVKEGYVEIIGGIRLKIIGWDRRYDGYENGEARLVYRGDKMVLWISKRIPKPQPYQPKDAMAVDINEKKIVYGNQVINEERDTKIDEAHRWKKLAEDLQKKYSSPRYPAWRRRKSILNRIRSYHRKARNVLEDWARKSALEIVRFAKKLGYAVAREDLTGLINSLKKIKSKDHRTKPIIMGYKRLGKWIDWHAKKQGVPLAIVKPNGTSSKCPKCDSKGLKEVDYRRLRCSRCGFEADRDVIGKLNIRKRALKKLKIKVIPGGSLATPTAPQMTDVNPNRWGNQ

SEQ ID NO: 11292 - protein, 382 aa, unknown
  TnpB Polypeptide
MASGDEGLLTLSIGMRVSPEPGAMELLRRYNTALNYAINKILRLNLKKIGEVHNALYRELREWFNLPPRTAIDCYRDALANANAWRNNPRRGRRPRVRKLSMLLHPGQSYWIRDGYVEIIGGIRLKIMGWDRRYDDYKNREARLVYRDGKMILWISKKVPKPEPYQPRDVIAVDINERKIVYGDHVINKERDTEVDRAHRWKKLAEDLQKRYSFTRYPAWRRRRGILNRIRSYHRKARNILEDWARKSALEIVRFAKKLGYAVAREDLTGLINSLRKIKNKDHRTKLIIMGYKRLGKWIDWNAKKQGVPLAIVKPNGTSSRCPKCDSKGLKEVSYRRLRCSRCGFEADRDVVGKLNIRKRALKKLKIKANPGGVLAPRLPPR

SEQ ID NO: 11293 - protein, 327 aa, unknown
  TnpB Polypeptide
MVLRTFPSQASLSILIGGWVYLDLEPSKEFYKLLARGFKPTSHAKIRLDRKNRRVIFHLSLEKEVEIYRPEDIVKPVDVNEDSVATLYEAFAVILGTDLAKTTLGYSYRKKSIQRRNRSGSRETRKTMEKLREGKKKRDYRWKTTNMIVRDALRMRGVIVIEGISGEDIRVMIARYKNKQLRHRIYQSALKGELNSIIDKAREYGVPVLMVDLRNTSKICPIHNALIEYGEDRIGICSKGGERWHREVVALINIYLKALEALYEGIAEKGFGVLSIDGSTIPLGSTVTHETIEIPRSLWGRWKSLDNHRIKNPVDQEAQQSKTKEYQ

SEQ ID NO: 11294 - protein, 216 aa, unknown
  TnpB Polypeptide
LAYKRFFKGQSAFPKFKSKRKSKPSFYMDTDKIQFTDKTVKLEKITLSRKKNKQKLNWIRLAERNRIPIDSKYINPRITFDGINWWISVGIEYADNAETPVNDGVGIDLGIKDLAICSDIDTPYKNINKTQKIRKLKKKKRRLQRKISRKYLINKKGDSYYKTSNIIKAEKKLLKLNHRLTDIRHNYLHQTTTEIINRKPKFIVLEDLNVKGNRRL

SEQ ID NO: 11295 - protein, 126 aa, Okeania sp.
LIRENQTIVVEDLAVKNMVKNHKLARAISDANWGELVRQLDYKADWYGRELIKIDRYFPSTKRCSNCGYIVEKLPLSIREWDCPECGTHHDRDINASINILAAGGAVSVCGATVRPEGSKARLCWC

SEQ ID NO: 11296 - protein, 412 aa, unknown
  TnpB Polypeptide
MKRTNTFIVEDNPILRNLADNCARLWNELNFERKQAYIYYKKFSWYPKHLYKKYAPIIGSATAQQVIRKNNETWRSFLRLKRLEKEGRLPPHIERVSMPRYWKRNGKRELRIIVRNDCYRIDDRYLYLPKGLKLKYKGRLKWYGRQGRLEIIYDEVNEVWRGFMAVRVEKPPKRGGSKPLYIDLGVRCLATIWHEGLKQPIAFRGGELLWDWWYWTKKIAREQSRLAKINKVKTSRRIRKMYRIRKKRFRHAVNAMIKMIVEYTHRSGLSKIEVGNLKGIRNNNHKNSKVNSMIHNFWNFRWIIQKLKEKAEEYGIEVIEVSEYKTSSICPRCDSNKIVRRGRLFKCLNCGLEAHRDAVGVVNMGTLRNGGMPIGVVAHPLLLRWNRCRWEPKRAMNTQRMNTLEARIPLLK

SEQ ID NO: 11297 - protein, 471 aa, unknown
  TnpB Polypeptide
MELIRMVRTIKLSYTTAPQAIEVITQWRKAQSVIIRTAYNRVQEGKKDKEILALLRAMPQGRLDSWLTLSALKRAHALHRANPKRAVIFGGKHNLQLRAQGKLTAAQWKAKRLQPLYFEGHAKSYGEQGGNHRFVLDIEQNKVWFYPKAKVGLPLQIKLGKRSNYRELLEALQFRCTWHRDVPFIVSLTETDICISWDEKVEPLKPKTNAKRVLALDLNPNRIGAAVLERDGKACKPLKWAVYDYPELNRKLGKPSDHPDSVHQRDKRVYELSGMAKEITALAAHFQCRAVITEHLNLETQDHGKGRSFNRTINNQWTRKGFVLPLVRRLEQAGIRHVEVNPAYSSKMGNLLWGWPLLIPDPACAAVELGRRFLQGDPKSSERKNGGNRRKEERQAQASRDAEARAEWKRVWNQLHPQSGDTPRCTLPALRQKFPAACPSPSPFKAPQSLVSRFEPARMAAALRIHMRKNS

SEQ ID NO: 11298 - protein, 251 aa, Richelia sp.
IDDAIRTSQFIQNKCLRRWMDVLGLNKYDLNKYCAVLAAEFPFADELNSMARQSAAELAWTAIARFYDSCKKKVKGKKGFPKFKKNCRSVEYKTSGWALSENRKAITFRDKKGIGTLKLKGTYDLNFYNIKQIKRVRLVRRADGYYAQFAIDVEVKVETQPTLQVVGIDLGLKYFIADSKGNVEPSPQFYRSSEKQLSRANRKKSKKFSPARKKAKIRQSSNYHKARNRYARKHLRVSRQRKEYCKRLAYS

SEQ ID NO: 11299 - protein, 383 aa, unknown
  TnpB Polypeptide
VRTYEYRVFPNKAQQQLLVDCLREARHLYNEMVEITRARHDNAGKPHNRYDLNMAFKGRGGQHVPQTTVQMLADRLDKAWKRYEAKKVLTDRAIAEGKEDKFKPRFKNALHWHSIQLRQFAKGKDAWLEGNRLRVPAKIGKSLKVKMHRPLEGTPKTAHLVLRADGHWYALIVCETIDVPLPVTSEEIGLDVGLKVFLADSDGNTVANPKPYRESEKTLCRKQRTLCCRVKGSRRRRKTAYSIAKTHLKISRQRKDFHHKVSRLYVDKYQAIVSEDLNIQGMVRNHCLAKSISDAGWNSFLNMVAYKAESAGRVFVQVPARFTSQRCFQCGELVPKSLSVRTHVCTHCGYVEDRDVNAAKNILQTYQSTNPARALPSVANVSR

SEQ ID NO: 11300 - protein, 349 aa, Polynucleobacter sp.
MLLVYRYRIKSLNGLLNTQSRAVNLVWNYCNDTQKHALQWRKKWPTGFNLNALTVGSSKELGLHSGTINAICEQYAKSRGQLKRPYLRYRTNKSLGWIPIKGRELKREGNSFRFAGKTFRIFHSRALPDGKIRDGSNFSRDARGNWFLNIVIEISEAPQRKLSNGVGIDLGLKEFAALSTGEVISSQHDYKKLEPSLVIAQRANKKRLVAKIHAKIANRRADELHKISSRITQEFDYIAVGNVKPSGLAKTKMAKSVLDASWSTFRNQLAYKAIKHGAWYEEVNESFTSQICSNCGALPNSRPKGIADLGIRQWVCSECGVSHDRDINAALNILARHGHVSPAVGISLI

SEQ ID NO: 11301 - protein, 413 aa, unknown
  TnpB Polypeptide
LYKTVKVRIYPTPKQSQKLGQAMGCARWWWNHALNLCNETYKETGKGLNQIALNKVLPKLKKSEETAWLVNCYSQVLQSTTLNLTKAFKNFFEGRARLPRFKSKKGRQSIQYPQNVKVLDGIVKLPGDVGEVKAKIHRPIEGKIKTVTVSRTPSGKYFASILSEVEGENPKTAEGSRERQPNGKIYGIDLGVKHFAIVTDGEKVSKYDNPKHLAKHEKNLKRKQKKLARQKDRSNSRYKYRKVVAKVHERVANARQDFLHKLSHKLTSDSQAVVVENLHVKGMVRNHSLAKAISDCGWGTFVNFLAYKLERKGGKLVEIDRWFPSSKLCSNCFYQVDEMPLDVREWTCPHCGTHHDRDGNAATNIRAEGIRMLQTDGTAVSADGGEVRPLLRTQVCLEALPCEVGSSNYTAHG

SEQ ID NO: 11302 - protein, 428 aa, unknown
  TnpB Polypeptide
VLVVEAKLKNGTPAQYSRLDDAMRTAQFVRNKCVKYWLENKGTTRNDLQKLCAVLAKDSTTPWVNKLNSQARQSSAERAWQAISRFYANCRNPSIKKKGFPKFKKHTRSVEYKSTGYKLSDERRQITFIDGFKAGTFDLWCSQKTLVYYSEQQIKRVRVVRRADGYYCQFLIDYEREDLHEFTGNVVGIDLGLKEFYTDSNGNTVENPRYLRKSEKRLKKAQSRLSKRYIKSQKQSNNYHKQRQKVANLHLKVSRQRKDKAIKDALALVQSNDLVVYEALKVSNMVKNHKLAKSISDASWYQFTQWVNYFAKIHKIVCIAVPPHFTTIDCSVCGTKVSKTLSTRTHQCPSCKIVLDRDYNAAINILKKGLSYLRRYLNGTVGHTGTDPNDWGESGLWIFNRDIEDLSGLVEPVISDNDSGRIPRHSNA

SEQ ID NO: 11303 - protein, 408 aa, unknown
  TnpB Polypeptide
LEEKLNSNDNKIYRSVKIRLLPTKEQEILFWKSVGVARWSYNYFLSESYRVYQEWLEDKSKPKHISEMEVRKYINNHLKKTTHTWLKDVGSNVMKQGVKDANIALQNFFKHGKGYPKFKSKKRSKPSFYVNYESLKRTPNGFRGERIGYVKTKESLPMIGKNQKYRRPRISFDGRFWYLSVSFEVKRLDVKLSDTKLGIDLGIKELAVISSQSGTDIKKYHNINKTCEVKRLEKKLKREQRKFSRKILVHKGLCNNKTNHKKELELCKNIQKQKSIIQRLYRRLLNIRTNYLHQTTTEIVKTKPSHIVLEDLNVSGMMKNRHLSKSIMCQKWYEFRRQIEYKAELYGIEVVLADRFYPSSKICSCCGNVKRDLKLSDRVYRCDCCGNVVDRDVNASINLANYNIESVN

SEQ ID NO: 11304 - protein, 277 aa, unknown
  TnpB Polypeptide
MNELRLQKHRTMWTLHVTVEYEIGDTSELPKNPTRVGFDIGESMLVTGCALQHDTPTKPLLINGKEAKRIRKEMYTTLKRLQERDASEWRIEERFSYYQNRLTDIIEKASRESVEYARQFENPVIVMEDLAYIRESLDYGEYMNRRLHSWAFARLQGRIEDKAKDVGIPVRYVHPQYTSKTCHSCKHIGYRPRQAEFKCKNAECHVSTFQADINASANIARRVDPWGESLPVKQVDDDSPQDGSRCDTATTHCEQSEKSSQMTLTTFQESKPTASDD

SEQ ID NO: 11305 - protein, 519 aa, unknown
  TnpB Polypeptide
MKIEEDNVQKKLKNGKQKNEKSGKTNCTLQAPSLPVYDTVKLRIKTERMTARKCDKLRIITTRDTRICNDYLRIIKHNENKVLRNNGTVNKSLLDKLTLTTSKRTNHKLRTTVPHDLKKRYPRCSHDEFIECRDKAIWTYESWKTQQSLTKKELKRPRFKKKTPRIQSINRERFLMIYSPKNTVAKIWLVLRDSLDTKRSGKSNHKKLWLPLALSPYHKQKMKLEKIKTLELVYSPKNQQWWAHFTLQYTVPLYHSTQPPAVLGVDLGIKKTAVAVLLTPSGKVIMDNIKFIVDKERQQQIHKLDYRIKSIQSVLDTRKYNGQPTNQLNVKLYQLRRRLRSVKEQELGYAVNQLVDFILQLKKRYNLFISVGYPGKIQKSHPRGSGNKSLRSSVHKWRFRFFVTKLKQKLALHGFESHRVVVINESWTSKRCSRCDSLNTTRTGQGQFNCHDCSYELDADLNGAKNIGKRLIQYALKPKQGFTKIGDKLSSDYYPITLFKCLAPLGQWLKDSAKNPSTL

SEQ ID NO: 11306 - protein, 397 aa, Coleofasciculus sp.
MRTAYQYKLRPTKQQVIELDRWLAMLCAQYNYLLADRFNWYEQNRSPVNACPLICHLPELRDPPDYYSQKKTLPQLKKTHPWYKEIYSQVLQDVVKRVKVTFDKFLKGDSNGQRSGKPRFKARNRYRTLTYPQMKDGCWQGNLINLPMFGQVKVILHRSIPDGFKIKTASVTKKADGYYLTLSMADKTVPEIKPDFHPDSITGIDVGLKEFLTTADGETIAIPQHYRKAQKRLGVIQKRVARRKKGSKGRLKAIKQLGKQHKQVADKRKDFHFKTANYLLSKYDCVAHENLNVKGLTQTRLAKSVLDAGWSNFLSILTNKAEKAGLLVIPVSAHNTSQDCSNCGEKVPKKLHVRWHDCPHCGCSLDRDHNAAINIKNRAEGHPVLKAQRLLRNSRIG

SEQ ID NO: 11307 - protein, 444 aa, Coleofasciculus sp.
MKAMAKSKKPRGVQQMLLHPDKEAKAVLEYLCEQSGKLYNMGVYFARQTFFKTSKLLTGKFDLIYEQSVGKSKIAQSLPSTPAQQTLLSVAEAFKSYKRLRQAWFKGQLPNKPKPPNYLKGSRLFKVAYPNSGGQKPKLVDGQLQFSLGLTVKRWFGIDSFRLPAPSHLDMAKVKEWTILPKNGVFYLEASYEIPKQETFVGIDDQALAIDLGTADNLAACVDTLGNSFLIDARAMKAFNQYWNKQVSTRKEGKPQGYWDTFLDRVTRKRNHRIRDGINKAARLIINHCLKYGISTIVLGWNEGFKDNANMGRLNNQKFVQIPLGKLKDRLQQLCEVYGIHLEVTEEAYTSKASYLDGDSLPKFGEKPDGWKASGRRVKRGLYRSGNGAIVNADLNGSANILRKVARKLGIDLNRLSRRCLATVARVRLWQLPQPALSAESPCL

SEQ ID NO: 11308 - protein, 314 aa, Coleofasciculus sp.
LPQLKADCLTVSPNPHKRKNGKARRDIAQINLPKIGQVKVIYHRPIPEGFTIKTGLVSHKADGWYVTLLLEDKTIPSLTPPEIQANEENSLGLDVGLEKFWTASDGTVETIQQHYRKSEDKLAKLQNRKDKKPHKSASRRQLAKKISKHHQKLQRKRKQFHYESANQLVSRDEQVFFVEDIKSANLSRKNKPKQDANGKYLPNGQSAKSGLNKSINDASWGQFLSIFIYKAAKAGKLVVKVKPHNTSQVCSCCDLLVQKDLSIRVHECLCGLILDRDWNAAINIKRVGLGIFPTIKRPKRSLLTTTKEAHTIPF

SEQ ID NO: 11309 - protein, 398 aa, Streptomyces sp.
VATAQVKRAFRYRFHPTSEQAAELSRTFGCVRKVYNLALATRTEAWARQERVNYQQTSAMLTAWKKTEELAFLNEVSCVPLQQALRHLQTAFTHFFSKRAQYPRFKSKKKSRRSAEYTASAFRFRDGRLTLAKMTEPLDIVWSRPLPEEAKPSTVTVSQDAAGRWHVSLLCQDSAVQPLPATDTAVGVDVGLDHLLTLSTGEKVANPRHERRDRARLAKAQRSLARKAPGGGTNRRKARQKAAKIYARIADRRRDHLHKLTTRFVRDNQTIVIEDLAVCTMVKNRYLARVISDAAWAEFRRMLEYKAQWYGREVIAVDRFFPSSKRCSACGSVQNTMPLSVRAWTCACGTTHDRDVNAAKNILAVGLTAPVCGAGARPQRSTPGGRSAMKQKPLRREP

SEQ ID NO: 11310 - protein, 409 aa, unknown
  TnpB Polypeptide
MYTKNKDSIKVLKSFKYKIKPNEEQIVLLNKHFGSVRFVFNYYLNERKVEYETNKQTLNYYDNANSLTKLKKVEEFKWLTEISSQSLQYSLKCLEGSYNGFFKGRTGFPKFKSKHDKNSFCVPQYTKVIAGKLIIPKFKDPIKIIQDRKFRGEIRQCTLSKTPTGEFFVSILVEGDHRKFEKTGQIVGIDLGIKDFAITSDGYKYKNNRWTKTYAKKLKEHQQNLSRKVKGSNNYKEQKLKVVRLYKKITNSRVDNLHKISTELVKKYDTIFLEDLNIKGMVKNHKLAKHISDASWGKFVTMLEYKALWNDKEIIKIDRFFPSSKTCNSCGYVNQNLKLDIREWTCPSCKTKLDRDLNASKNILKEGLKNISTGTVDYRCGDEIRPVLTGKIDEASKKKELGLPKLIGL

SEQ ID NO: 11311 - protein, 391 aa, unknown
  TnpB Polypeptide
MPGKLEADQAGSGKAVRFTTIKVRLDPTPEQAELFEKTFGCCRFIWNQMLSDQHRFYAETDAHFIPTPAKYKREAPFLKEVDNQALIQEYNKLSQAFRVFFKNPESFGCPRFKRKKDDSDSFTACNHVFESGPTIYTTRDGIRMTKAGIVRARFHRRPQAWWKLRRVTVEKTRTGKYFCSILYMVEEKRPEPVVPNAETTVGLKCSASHFYVADDGSMADLPGWMRRDQKKLAKAQRRLSRLRPGSRNYQEAIQAFRLLHEHIANQRKDFIHKESRRIANAWDAVCVRADDLTEPVPGVPQSNSKDAGFGMFRTCLRYKLERQGKALIAVDRYVPSTRTCSACGTVRDAVSYKENTWRCPECGAVHNREINAAKNIKAQGLAQYIEASERR

SEQ ID NO: 11312 - protein, 375 aa, Desulfurococcales sp.
MELPKYITLTIDFHVSGDYARNILSTAWLSKLVAHRVLRLIKENEVLADLSEYKFLKILRSKCYDILPNRRYVDGILKLVHSTLKSAKALEVNMKDIGLKQWLLFQSDGERGYARGNMNIRFIGTHRVRVLTLGYDKKTRYIELKVPTPKGWKKLIEVLVNRAFDGQIGYPARVVVKDYGIGKHGLHVHGEVQVMVPYSLYLDVMRRYDKPRGDKIAGVDVNVERLDAVVIDRHGNLLSYGTFWLKNATFMGVRRKRSWSLVGEKIHALLKWLYSQGVSVVGLENPEVIGYLRYYWIRNGERRESRWNWKVSMFRNSIIERITWKAPLYSIKPTYVNPKNTSKEGERIGRRLGLDRHLGSAYIMAKRTLKSLQRP

SEQ ID NO: 11313 - protein, 374 aa, unknown
  TnpB Polypeptide
MFKTLTFLIKIEDSENYLKFMEQCSDVFNDHILWSIENQSYNKNQSHKDLYFTIREKHPELPSGIIQSVRDVAMESMKATKLKRKPTKKKYSAIRYDKRNMTLRGQQLTFSSIGGRIKTTLHVPEYYKDIFEGWDFKNGTICYNSKIKQFYAKLVFKTETPDLIKNNNVIGIDRGIYNIVTLSTGEIINSKEIRKQQRKYLYNRKKLQAKGTPSSKKKLKQLSGKEKRFSKDFNHCISKYVANLDCGTFAIEDLKNIRKQKIHNKKFNKWLSSWSFYQFEQFLSYKAEALGKRIVYIDPRYTSQKCSCCGSIKKENRNKSKFKCIECGYHNHSDINAAFNIRQNYLLSVTVMSSEQAAVNQPNVPVTISEAILV

SEQ ID NO: 11314 - protein, 430 aa, Cenarchaeum sp.
MGHVTRYVYNRAVSEYLFDGEYMERVVVDILQPFKLPNTLDSFTSSTLDDYYQVYDFGPSKRRLKYGMYKQLTKWRAKHTWLRECPVSFGRGAIQDASIACRRVMDDNSNHAPYRRKDGRIILSCANPPVRKDDHTVRIPGYGIVKTAKPINTSLDMRSFKIVDVTKRVDKHTKPSDHMFELHIAVHEPVKPHRNTGVVRGVDVGGKHLAVTVDTNGNVTIHNTRHREILREIDALKSIRDHKVRHGRKWCVLNYQIKQLYRKADGIAVNTINQTVSYIVQGADAIIAEILSIQDMTTHGGNYKRAMNRSMRENRLGEFLRKLAQRCEREGIPLCGVMAKYTSQTCHMCGHVDSESRITRDKFICTNCTRVFHADINAAWNILHRAAGKVVLRRPGHKEGYKPTPAMLRSIQQGRQKRLECAAGAVYFCI

SEQ ID NO: 11315 - protein, 209 aa, Moorea sp.
VKARYQYCFYPTNQQKSNLARLFGCVRIVWNDALAICKQSEKTPKSGELQKLVITQAKKTEERKWLSEVSVVPLQQSVADLGTAYKNFFDSCKGKRKGRKVRPPRFKKRTNKQSARLTRRGFSIQGDGVYLAKIGIVKPIWSRALPSDPSSVTIIKDCANNYFLSFVVDIEPVQVEAKNPSIGIDLGIKTFAVMSDGREVHSPDYSKLD

SEQ ID NO: 11316 - protein, 462 aa, Synechococcus sp.
MLLLATEGQEIDKSTVVTRRQTFRLYPSKAQEKALLYARRLHCYLYNACLHHRKTEYQLHRRTVTYLEQQNSLPEFKKVWVEFAALHSQSLQATVKRVDLAYQRFFQGLSGKPKFKSIRRYSSWTYPAQSGWKVNSTGKHGTVTLTDLGITLKMRGQAKDWGTPTTLTIVYKPSQRRWYASFTVEVEVPEPQLGSQSDLRYESIVAYDLGTETALTLFDGSKFQEMANPRFTQKSEEKLRRLGKLKRRKRAPKKGVKASRRWKTIHKLESRLKAKVARQRRDWQHKVTSEMARRYDVGVTEKLNVKGMTRKGGKRKAGLNKSILSVGLGTLNSMLTYKIEQKGGLVLRLPTQAIKPSQRCPQCGVVHKEWADLSNRYHVCPACGFGIPRDRGTVLVMYNVATNRQPGLGLRPADATGTNLVSLGCFSTTSKTCGSLKQLGQRKRQKSHRHASGETPPAYAVG

SEQ ID NO: 11317 - protein, 370 aa, Paenibacillus sp.
VILAKRVRIKPTLEQERQLWKFTGSARWVYNWTLVRQEENYRNGGKFIRDGDLRKELTKLKQTEKYAWLSEISAQTITQSVKDACDAYKKMFKGQSRKPKFKSRKRSKPAFYSRYDRFKANGKAVYLEKLGWIQTSEPLPQADKYCNPRVTFDGKYWYVSIGIEQESEKVELTGQSIGIDVGIKELAVCSDGTVFKNINKSAAVRKAEKRLRRLQRRVSRKYEMNKEGNRFAKTRNILKIEKSICLLYRRLTNIRTNHIHQATSAIAKTKPRAVVMEDLNVSGMMKNHYLSNAIAGQKLGDFIRLMKYKCEKIGAQFFQADRFFPSSKLCSCCGKIKTDLKLSDRIYECDCGFRIDRDLNAAINLSKLVV

SEQ ID NO: 11318 - protein, 283 aa, unknown
  TnpB Polypeptide
MKTAYKFRIYPTNQQEAELGYALEVCRQLWNDALADRRNAWKDEGISRTYNRQAALLITEKEHGRYPGVYSQVLQDVLRRFSKAFENFFRRVRERARKKGYPRFKRQYKSLTYPQSGFKLEGSRLNLSKISGGIRVFLHRGIEGAIKTCTIKKDGTGAWYVIFVTESEAPSKVKPQTAIGVDLGISHAVVTSEGQCFDYPGYLVQAEKQNRAAQKSLHRKVKGSHNRKKAQHKLSAIGKRVTNLREEFLNQVSRKLVDSADIIVFEDLNISDMLKNHNLAKHI

SEQ ID NO: 11319 - protein, 373 aa, unknown
  TnpB Polypeptide
MKLTVQIQLLPDVEQSRTLRAIVERFNEACNWIAAECFARKEANQFKVRNFAYKEVRERFGLSSQMAQLAIKAVCAAYKRDKCIKPKFRKHAAIAYDQRIMSFKGIDRVSLLTLDGRVLIPIIMGKYQAERFTHAKGQADLVLRHDGKWFLLVTVDVPETAPIPATDFMGVDFGVVNIATAEDNDKFSGEKIDATRRRYGKRRKSLGKAVGAKRRQGTRPKNIRRAMKRTKAKEARFRKYENHCIAKKIVETAKGTDRGIGLENLEGIRDRVSARGGEQCNRLSGWAFFQLRTFVEYKAKLAGVPVVAVDPRNTSRTCPECGHCEKANRKSQSEFECRVCGHRSHADLVGARNVGSRARASVTAPEHAGPVPA

SEQ ID NO: 11320 - protein, 413 aa, Natrinema sp.
MGMAEEVAKTLEATLAPPTQGKGVRLRRLLSTYREALHDAFDSGADTMNGVSDVVTPFDLPYQAKAALCSYVPKLRKTYNARELDDEHPIRLTNQAAKFDRDESRHHVICWNVPLPGYGTNFWIPLRINPEQEPLWHDLLSEDAKAGQIRLQQNRSSWVLHVTVTYSVEEPETDGDETYIGFDIGESALITGCALKCNTPTKPMLESGSQARHLRKEMFTTLKRLQERDAADWRVDERFDHYQNALTDIVEKASRKAVEYAESFDDPVVVMEDLSYIRENLDYGKYMNRRLHAWAFARLQGRIEDKAAEAGIRVEYVNAAYTSQTCHACDRLGRRSQQAEFVCPHDDCHVTEFQADINAAANIAGRVDPWGESVPWEPERDDSPRNGSASDSATVHRETSEKSSQMTLAAYSD

SEQ ID NO: 11321 - protein, 461 aa, Natrinema sp.
MHNRLPELKDEWQELKQVHSKVLQRVVTQLYDNLKSLSEQKKNGYKVGKLRYKGKGWFKTIEYNQSGFQVKETDTRLDLLQLSKIGKIPIRLHREIRGEVKGIIVKKDSAGDWFAIFQTEHDEPNISVTDSDSEKSVVGIDLGITHFAVDSDGNRIEHPKNVEKAEERLQKEQRNLSRKEKGSNNYEKQRKELARVHKRVKNRRTDFLHKLSTAYVNKYDIIAVEDLNVSDMVQGQKNSKNTMDSAWRTFIQMLLYKAESAGTEVILVDPKDTTKECSKCAVKTDKKLWQRKHSCPSCGYETDRDFNAARNILRKGIEESEIVGKGQAEVTPADTGTAADTKNSESFCDVSASTVVETGSPLPPRSIAERWWRVVHSELDPGDAVTDSPPTYLRHYLDADRQEELIEEVLDDYSIPEDLYFDAKKAVFLSKGPSASLETVDRAREEADLEPVSEMLDEGGA

SEQ ID NO: 11322 - protein, 419 aa, Scytonema sp.
MLTLNYRYRIYPNAAQEQILIEWMELCRGAYNYALREIKDWCESRKCLIDRCSLEKEYIFPAELKFPCVVNQLNNLPKAKENFPKLREVPSQVLQQTIKQLHRGWEYFQERGFGFPRFKKYGHLKSLLFPQFKESPVTDVHLKLPKIGIIPINLHRPIPNGFVVKQVRVLRKANQWYASINIQCDVNVPSPMPHGYPIGVDVGLEKFLATSDGVLVKPPKFFKTMQSKLKLLQRRLSRTQKRSKNYEKQRMKVARMHHTIDNSRKDFHFKQAHALCDTGDMVFMEDLDYSKMAKGMLGKHMLDAGFGQFRTIVKYVCWKRGKFFAQVDSRGTSQECPGCGAVAKKDLKTRVHHCFNCGYTTDTDVASGQVIRNRGIASISTPGLGGMETACAADLPGTKISLSRQVAKSRKGKTRKSSE

SEQ ID NO: 11323 - protein, 211 aa, Scytonema sp.
IVKQARIVKKASGYFLMLTLECDVSVAAPPAFGHPIGIDLGLDKFAATSDGALIERPRFLNTLHRKLKLLQRRLRNKNIGSNNRHKLNCKIARLHQRISDTRKDWHFKLAHKLCDGIGMMFVEDIDFRVWAKGMFCKHTLDAGFGQFVSILQWVCWKRGVHFAKVDKDYTSQVCPQCDTHTGRKELKDRVHSCPECGYTTHRDVAAAQVIR

SEQ ID NO: 11324 - protein, 518 aa, Scytonema sp.
VKIDANTKITLGGDIPLLLNYQYRAYPNTNHKQQFSSWLRIGQYWYNKQLGDRFSWYENNRNDINSCPLICSLPELRENPDFYSQKKQLPIIKQDLVTVQHSGELLDFTSVPSQTLQEVSKRVDLAFKRFIGGDSSGKRSGRPRFKNSARYRTLKIEGQAITVERIEKDWLFLSISKLKGWLKVRLHRPLPNGFVLKNMLLTGGMTGKMSQPYNYEYPSAPTNQQTKAGSFSLSQCVTKKSDGWYTTICLEDPNVPVFNPDDVTPTWTNTLGMDAVLHEQDYLATSEGTKVPSLKSFRKSEKRLAEVQRRKETKKKGSKSRRKLAKRQGREHQRIARARKDHAFKTAHALVRTGKKVFVHEDLNLKALSKRNKAKQDEDGKYLPNGQSAKSGLNKSWNDAAFGQFFTILEYIAGKAGARIIAVNPAYTSQFLAYRDEIVFTDCDVHSYWDAEYSLNVDRDINAGINIKRVGLGLFPTLKRRKGNLVVGDSTTNSTLKEVLALLKNAPEAYTLSVLRQV

SEQ ID NO: 11325 - protein, 443 aa, Ruminococcaceae sp.
MILSEEHRIKVRKNKDLGSEIDIYCYLVKNLSNAVNYLIRQCYRIHTKLNAGKVLEEWEQDMLDSVNDGIRRYNCSRPGKKELRYVDAENSFIADAYFLSWYLKGTTEYKAVPYATCSQICIQEKCREWKSFYNSVAEYLKAPGKFLGRPHAPGYLDSKDGRGALVITSQNFHVDEQGNIRMPKFLSGIHICARHGNIRQIRITTCKDVILISLLYEKQEAEKADSDTVMGIDLGVNNLIAAAWNSEMTPVIVNGRPIKSINQYFNKARARLQKEAKTSNKCDITRRIERLTEKRNRKVKDYLHKASRKIVDLAEASGVGVIVIGNNHGWKQNSNMGNKTNQNFVSIPYKMLVDMISYKARLVGIEVRIVSESYTSGTSYLDGEIPDVAYYDRNRRIRRGLFRSNTGICINADVNAAYQIIKLGSIREVRIKEREQITKLKVA

SEQ ID NO: 11326 - protein, 395 aa, unknown
  TnpB Polypeptide
MQKIISINIRTPTIRKQIELNKLQSEHLACCKELFSILQANKGVTQTEFHHLTYKDFRKKYKLSADLLISARTCVWNRRKITNKINSVPIRFNSKLFRIDTNNNFVICLSCLNKSKRVNLSVIQDGAYQRLAKNLINGFTISSILLFKDFRVQVLIKKEFEKPIESKKIIGIDTNGNNIAVSVYNTKKKRFLRHFYFGKKMFIKRKIIERRKSRLQGFADLGSQKAFESLKKLKRYEYNFIRDSCWKLAHKIIDLSKSFGNATIVVEDLKNLRVGRKLGNSKGKRVNKIINKIPYGKLFHFLSCLCEENIITFSKINPYHTSQLCSRCGALNKSGKVYKTYVCKSCGQIIDRDNNASKNICKLFGERSILTNTSQTSLNRVAVNQPLPSNEICAL

SEQ ID NO: 11327 - protein, 387 aa, unknown
  TnpB Polypeptide
MRKLLKSFKTEIHPTEEQKVRIHKTIGTCRFIYNFYLSHNKELYQNGEKFMSSSKFRVWLNHEYLPQHPEYLWIKEAYSKAVTQAVNHGQTAFKKFFDHESAFPKFKKKGRSDVKMYFVKNNPKDCRCERHRVNIPSLGWVRIKEKGYIPTTKEGYTIKSGHVSMKAGRYYVSALIEIPDNKTADLSNEGIGIDLGLKDFAIVSNGKTYKNINKSARLKKLEKRLVREQRCLSRKYENLKKGESTQRANIQKQKLKVQKLHHKIDNIRTDYINKTIAEIVKTKPSYITIEDLNVSGMMKNKHLSRAVASQKFYEFRIKLKAKSRENGIELRVADRWYPSSKICHCCGTIKKDLKLSDRTFRCHCGYVEDRDFNAALNLRGVKTYKIA

SEQ ID NO: 11328 - protein, 173 aa, unknown
  TnpB Polypeptide
MGRYMRIKKIIKKYEKQLVKLQRQLSHKGKRSKNYYKTKKKIALCHEKIRNIRKDYLHKVSHEIISENQVIVSENLQIKNMVKNHHLAKAISDVSWYELTRQLEYKAKWNGRKYIKIDTFYASSQLCSVCGYQNPDTKDLSVRTWICPKCGAEHDRDINAAKNILTEGLRQIA

SEQ ID NO: 11329 - protein, 375 aa, unknown
  TnpB Polypeptide
VRRAFKYRLDPNVNQERELAAMRETHRRLYNACLDERKTAYEAEQRTVKYTEQSAKFTEARKTNPFYANINFSSAQATMRRLDKAYKAFFKRVKGKEGKPGFPRFKARDRFDSVEFPKYGDGVRLNDTKLYVQNVGDVRVHLHRDVEGKIKTVTLKREADKWYVVFSCELPDVPILPTDNPPVGIDVGLESFLTDSYGKKEPNPRYLKDALPELRRKGRGVSRKKLRSKNRRKAVKRLRKIHARVRNLRKEHHHHVALKLVRRFGFIAAESLDILGMIGSGRYTRSISDAGWDGFLLTLRCKAESAGIEYVEVNARGTSQCCSRCGEIVPKTLFDRWHECPHCGLSLHRDENSAKEILRRGLLVRIGPAGGNVGH

SEQ ID NO: 11330 - protein, 387 aa, unknown
  TnpB Polypeptide
MKLTLQTQILPDATDAARLKATVERFNEAADWLAGFAFERRVSNKRVLQKLAYRELRERFDISSQMAVRCIAQVCEAYKRDKSIRPRFRKHAAVPYDKRLMSFKGPDRVSLLTLEGRVLVPVVMGKYQAERFTPAHGQCDLVLREDGRWFLLVTVDLPEGTKTPATDFIGVDLGIINIATDSDGETHSGDDVERTRQHYADQRRGLDRAAGAVRRRGKRPKSIRKARRRAARRESRFRKDRNHVISKQLVAKAKDTGRGIGLEDLKGIRDRTTVRKPQRARHSGWSFFQLRTFVEYKAKLSGVPVVLVDPRDTSRTCPECGHCEGANRKSQSEFECRVCGHRSPADLVGARNIASRARVQVMAPQVAESRPKGRVVRRQVFGQAAPL

SEQ ID NO: 11331 - protein, 410 aa, Nocardiopsis sp.
MTSKSVKRAFRYRFYPTDVQAAELSRTFGCVRLVYNRALAERTAAWNTEQRRLSYTDSSAALTAWKRTEELSFLTEVSCVPLQQTLRHLHTAFRNFFDKRARYPRFKSKKTSRASAEYTASAFRYRDGHLTLAKMAESLNIVWSRPLPEGARPSTVTVSRDAVGRWFVSLLCEDIVEQGPAGHDAVGVDMGLTSLVVLSTGEKVANPRHEQRDRTRLARAQRALSRKRPGSANRDRARRKVARVHARITDRRRDFLHKLSTRLVRENQVVVIEDVTVRNLVKNRRLSRAISDASWRELRTMLEYKCAWYGRDLVVVDRFFPSSKACSTPGCGYLNASLPLRVRTWTCPSCGVVHDRDVNAALNLEAAGLAVVACGAGVRPQRESSRTGRPAVKQEGHGATRDEALASNHR

SEQ ID NO: 11332 - protein, 525 aa, unknown
  TnpB Polypeptide
MELSRTINSDKRYYLDENTIENAASFLQTMRVFNDAKIDLYNALYDQKYLASEPLIDHAYPVFLKEKYKTNDYYNAAVYSAASGSISSQKGLMIVLFNKTIVKLDEYERSVEADIRKLKTRLALVTEARRRKEKKLENIKNLPPERIVFGGKKLYSEKDTVGITKSAEDNKTSQKALKEWKQEFFEKRHQSMALPGRHTSKYGNFLCKYDGKDLSVTCIDGTTTVFHDFKLPRYNEAFQNNFTCKPEDRQSICYNFTVKRDRKNRQYIIVSVTMKLQAYENSYYGNGAISMDINYDHFALAEIDETGKLLDQKMIRFDLVKKSTGQITNILGAAVKEVFNWCAEKDKRLIVEDIDLTIKLASRKYGNRKGNHHMTLFAYQRIASSIENQSLRREIAFCKIDPAYTSQMGKFLFMRRYGMSIHQAAAYTIGLVGMGLYDKLAPDLRMLNLLKTKEGIVPEFSQETYKTIWARITKTFSGIQKHFFYRKIPYEVLEERKRPSLRTLAAEMKVRYMPDAANYKSCESI

SEQ ID NO: 11333 - protein, 411 aa, unknown
  TnpB Polypeptide
MKTIIPGTIHQGNIIVLKQLMRDWSSCIRFAYQRIHREGLTGNAIKVACKPVYMTKLNQRYIADAVMKAQAIKKDHVIFGGRKRWRDMLSGILPKKEWQETRDSELYSRGDRTKKGNPNIRVLNTPEGYKLRVGLPGPREFLMFDLYIPEGRRNNKKDYKELLDLYGDCYDVRIKNRAGKFQVSIGIDIPEVKPIYLCSNGVIGIDTNPNGLAVVEIGKDGNLINHEFLECARLQFAQHDKRKNDIGALALQVVNKAILANKGIVVEDLKFNDGKRGSRKFNRMRHNFIYSQLLLAIERRAIKDGVEIRKINPAFTSIAGILKYQEQYSLNRHTAAAFVIGRRGMGFMERVKVKLELGENKKLNLEGKGFKIALTAKAYAYFRHLYRVVEMKLPAVTPPCLTPGLGNYDTS

SEQ ID NO: 11334 - protein, 402 aa, unknown
  TnpB Polypeptide
MTNNLAHTIRLFPTESQETFFKKACGCARVSYNYGLAEYQKQRKEGGKPNILGIKKQFNKEKKTLYPWMSETNKDANQQPFANLQDAFIRFFKHQNKYPKFKKKGKKDSFYISNDKFDIEGKKFRIPKLGWVKGAEELRFKGKIASATVRRRADYWFVVISVETDKTFTTCENQAVVGVDFGIKTLATLSDGKVREAVKPLRTRLKQLKRLQRWASRKVIGSSNRHEANRKVAKILYEISCLRKDILDKMTTYLCENYQVIVIEDLNVEGMLKNHCLALSLADCGFGEFRRQLEYKSNLHGSTLIKADRFFPSSKMCSGCGHVKNTLSLSEREYVCENCGLVIDRDLNAAINLQNYGLNQLRTACPEVTPVDKKALVYSSAIGINETILGEAGISEHSLVPT

SEQ ID NO: 11335 - protein, 223 aa, unknown
  TnpB Polypeptide
MSALIWAWFMRWLRATVSFSISIRAEAFDKTKPSRKRRRLLEKLQKLHRRVRHIRRDFQMKTAHTLAQEYGCVYVEDLKTRNMTKSAKGTIDNPGKNVKQKSGLNRAILRTGFFGMRQAIEWQQYKAGGYVVAVPAAYTSCECPSCTCTDKRNRPRQAQFRCIGCGYENNADIVGAINVRRKGRTGPSAHDQKRIAREVSAGAVVPFARNSGANSENQPLGVA

SEQ ID NO: 11336 - protein, 375 aa, unknown
  TnpB Polypeptide
MIRKAKSDSLSKKAYKFRIYPSEEQKIFFAKTFGCTRFIYNQMLADKISYYEKTKGMLHNTPAQYKEKYLWLKEVDSLALTNAQKNLETAYDNFFKNTKIGFPKFKAKRKTKKAYTTNNVNNNIKIVNNYLKIPKIKSLIKIKIHRNIPDNYKLKSVTISQSASGKYFASILFEYENQVIEKKSKTFVGLDFSMHELYVDSEGIYANYPKYYRQEQLKLAREQRKFSKMEKGSKNREKQRIKLAIVHEKVANQRKDFLHKLSKKLIEKFDCVCIEDLNMKALSQVLNFGKSVMDNGWGMFVNFLDYKSKEVGKKLVKVGKYFASSQICSNCGYKNKEVKDLSIRQWKCPNCKVVHDRDINAAINIRNEGMRIVLG

SEQ ID NO: 11337 - protein, 372 aa, Kribbella sp.
VWNLATEQWSMRKPGQRGIPGYAEQARQLTAARAAFGWLRAGSQIVQQQALRDFEQARRNYIAGTHGRPTWRRMGQHEGFRVAGPQAQRVERINRKWARVLVPKLGWVRFRVSRSVPAAKSYRITCDRVGRWHIAFAVVPASIPAPGTGKVVGIDRGISVSVALSTGELLHCPGIRDSEHDRLVILQRRLARARRGSKRRQRVKSAIAKMYARSVDRRRDWIEKVSTDIARRFDLIRVENLRIPQMARRPRPIPDPALPGGYLPNRRRNKAALNRAILASGWGLLVRRLEDKAPTRVERVHPAYTSQTCSRCGHRAPENRESQAFRCRCCGHRNHADVNAAINIAAGRAVRARRDRSTRMSVKREPQLTTSV

SEQ ID NO: 11338 - protein, 223 aa, unknown
  TnpB Polypeptide
MFIFDFVAETVLDQIIDWLYGKIVGFLNDFFAMMNNMGVELFDLPWVNAITTFFSWLGWALFVVGLVVGAFECAIEYQADVIVFEYLEMQGKISGKKKQKLHLWRKRDIQKRCEHQAHRKGMRVSRVCAWNTSRLAYDGSGSVSRDPKNHSLCVFQTGKRYNCDLSASYNIGARYFIRELLKPLPVTERSLLEAKVPSVKRRTSCVYADLKELHLQMEILKAA

SEQ ID NO: 11339 - protein, 366 aa, unknown
  TnpB Polypeptide
VSKINVKYRLFPSKAQQRTLNETLAVCRDVYNSLVHERTVFYETQGKSPTLYQQQKAMTAWKPNHAELKTVHSQVLQNVAVRVELAFQSFFRRVKAEKTPGYPRLKGKGQYNSITYPQEGYGVGQSSVTLSKIGQVKAKIHRACPGTIKTCTVRKDGQKWYVCFSCEYEAVPLPPCIESVGIDVGLKSFAALSNGEFIENPRFFRKEETALAKAQRKFDRVKDKHCSKERKRTKKVVRRVHERVRNRRHDFVHQTARRLVNRFGVIAVEKLNVNGMVKNHRLAKSISDASWTQFRNSLTMKAESAGRLVTAIDPRYTSQDCSACGYRAKKKLSERWHHCPMCGLVLDRDTNAAVNINALGQQSIAN

SEQ ID NO: 11340 - protein, 421 aa, Streptomyces sp.
MQLRYNYRAYPDASQSRALAMAFGCARVVWNDCLRDRKEAHAAGLPYVKSAELSRMRITQAKGTEERAWLAEVSAVVLQQSLRDLDAAYKNFFDSLRGTREGRRVGPPRYKSKKDARQSIRLNTNAFSLRSNGTVYVARVGNLKVKWSRPLPAAPTSLTVTKDSSGRYFLSFVVDTQPETLPQTETEAGIDLGLSAFAVLSDGRKIDSPRFLRRAEKKLKRLGRELSRKVKGSKNRAKARIKVARQHARVADRRRDFHHKASTQIIRENQAVYVEDLAVAGLGRTRLAKSVHDAGWSAFVGILEYKAAGHGRTFAKVDRAFPSSQICSVCGYRDGPKPLHIRRWTCGGCGTVHDRDHNAARNVLFEGRRLVAAGRAETQNACGAPVRRAHVPAQRGEAGSRRKGRTTQAGIPGPQAREHVK

SEQ ID NO: 11341 - protein, 406 aa, unknown
  TnpB Polypeptide
MLKAYKYRLKPTKEQRIFFEKSFGCVRFIYNWALAKRIEAYQSEGKRINAVDLCKMLTDLKKAEGMEWLKEVSNQSLQQSIRNLDSAFTRFFREKKGFPKFKSKHKSRAAYKAINSVEVDLDNNRIKLPKIGWVKLSENRKFEGDVRSVTVSKNKTDKYYVSVLVEDGKEIPSKEPITYEGTIGIDVGIKDFAVCSNGDVFQNPKYLEKATDRLNIIQKRFSKSKKGGNRHERLRKQLARQYEKVTNQRTDFLHKVSTKLVRENQAIIIEDLNIDGMMKNHKLARSIGSVGWATFFSMLEYKCEWYGKTLIRIGRFEPSSKMCECGYINRELKLSDRKWTCPKCGTTNDRDLLAARNIKRFGLQAQNLLTQPMAYRGLDGENPTMDDRSTSSLRSSGSMKRQVIQV

SEQ ID NO: 11342 - protein, 251 aa, unknown
  TnpB Polypeptide
LQQVRIISKDKYIVIEVVYKTENIQLLQDNNRYIGIDLGLDNFATITNNCGLIPLVINGKGLKSINQYYNKQMSHYKSIAKKLNKLDYTNRMRRLTFKRNNKVEDYIHKASRFVVDYCRNNEINTIVIGNNKNWKQNSKMSKRVNQNFISIPYYSFIQKVQYKAEEFGIQVIITEESYTSGTSFLDNELPIKENYNKSRRKYRGLFVSNNGTKINADVNGSYQIIKKVFPKAFANGIEGVGLHPFKVNLFL

SEQ ID NO: 11343 - protein, 439 aa, unknown
  TnpB Polypeptide
MVTEYNLTMANRKVTYRMYPNAAQSERLVEMLGLHQRLYNAALGERIRIYRKEGKGPSFSAQCKDLTQWRKTSAGLARMNAQSEQVTLKRLHRTFQHFFRRLKNGEKPGFPRFKSIHRYPGWGYKTHSDGWRLHPGENGAHGKLYLQSVGNLPIRGKARTTGVPVTCEILHKAGQWYASVTLEIEVVQRERGAETGAFDWGLSAFMTIATPENIETVANPRHLRNQLAELKRLGQAVSRKIRMAQQLSGRQRGFPVSANLRKAIQQLARLHAKVARQRKDFLHQTSARLVRQFGAIATESLAVKNMVSGGGSRKKGLNREIHAASPSAFLQMIRTKAEEAGSWYEEAPTRELKPTQRCHTCWQLPDEKKTLSDREHQCPPCGASCGRDENAARVLLRWLEQRLAGESGFCSPQGAGREPSEVWSGGSLAAMKHETHAMP

SEQ ID NO: 11344 - protein, 424 aa, Halobacteriales sp.
MDYVLKYRLFPDSHQREQLDWVRDTVRQLYNHGLHRFNRTPESAGTVKQRVRQIRDEIPALKDWWTDLNNVYSTVLQQAVEQIATNIENLGKLRRAGYNVGSLNWKAPHEYRSFTYRQRGFELDEKSGPTGRGTLTLKKVNGENIDVSIRLHRPIPDETDVKHVTVKKDKTGAWYACLNVERDAPDKPDPREIDTDDTVGIDLGITSFIHDSDGRQISRLDVSAGRDRLEREQRTLSRKDHGSNNWEKQRQTVAELHKRMRNKKLDFKHKVAAFYTRKYDAVFVEDLDVKGLLEGDRNGRHTHEVGWRDFITILKHHGRKRGCHVVEVAPADTTKECNECGVKTNKPLWVREHSCPSCGFEADRDYNAALNVLERGLEKLGVVHSEGTPAETGTAVGTEGSAAVSASAVVETGSPCLKEVTGGD

SEQ ID NO: 11345 - protein, 400 aa, unknown
  TnpB Polypeptide
MTSTTTHRAYKFRFYPTKEQADLFLRTFGCVRFVYNKSLAVSTQRWRTDKKSTSFSEMSGLLTQWKKEPELAFLTKVAAVALQQSQRNLTRAFQNFWKKRAHYPHFKKKGVSRDSFTLVGSAVRYVDGTVHVAKSKEPLNIVWSRRLPKGSVSSATISRNRAGQWFISLLMEETIEHLPLTGKNVGIDLGLDSFSVTSEGVKTKHPRMSKEEKAKRASLARSLSRKKKRSANREKARQKLARFDQKIVDRRRDFLHKLSTKIVRSNNIIVIEDLHVSGMSASGGSRKKGLNRAISEASWSEFRTMLEYKSHWYGRDLRIIDRWFPSSQMCSQCGHIDGRKALSIRQWVCPECGTHHDRDINAAKNILAAGLAVNVCGDGRSLRHSSGDDVALVYEAESSL

SEQ ID NO: 11346 - protein, 479 aa, unknown
  TnpB Polypeptide
MTKNSVRTTVRTRIKTEVLTARKQRKLEQITGRDTRTIHKYLKVIYHNEEQVVSSRSGTKTVSKSKLDHLTLTTSKHTQHSLRTEVRHDLKHQFSRSSHNELQECRDNAVAIYHSQQALTSSPTKSLFQKKIPRTQSANRNRFLLTCSPTNSIARWWVGIRDSLDTVKNNTTRHQKLWLPLACSPYHENKLQQGKVQALEVLYNPKKKEWWVHLILLHVPPLYTSSRPPAVLGIDLGINKRAVSALLTPKGIINRHEIRFWSDKTRKQLLKETERKITKLQKKLASPSLSSGERRTFLHHLKILRKKKRKEHILTDHTYVNSLVRYILSLGKRYDLFVVVGFPVHIRKSHFRGNHRPYTRKHVHQWNYRRVTELLKFKLSLQGWDEHRVLAISESWTSSTCSRCGSYHTLRPTQPSFICNTCGYQLNADLNGAKNIAKRLIKYVLQPNYTTIKDLVTGKFFPLSCFRVFPVLSQWLPTK

SEQ ID NO: 11347 - protein, 364 aa, unknown
  TnpB Polypeptide
LSPICWNGGKHLSARSLHKHAYHQVKGTVSAQMTCTAIRFVAACYSKRKLRKLSDAVTFKKPFAVFLIGKRERDVAIKKDGTISIWTVGGRKRLAFSVLDYFVGYFLNALSFDSLTVKEKNGQLIGYLCVTLPKPAGKGSVLVGADRNETNLLVAVKERGDVFFESGLKLRIWRKKHRKKVARLQKKLAERKAQRKDTRSVRRVLKRLSLCQRNFTKTYCYTVAKRFVVWAGTDAILALGNLKFQQGKKDSKAFNRRLHQFPHSLLLKCIRNKAEMMGIPIFLVNPAYTSQTCSCCGSFGDRQRHRFQCPHCGFTLHADLNAAFNILRRAKTMLSCQPLSWWGSGLKSTSLEAQPLRVWASRRL

SEQ ID NO: 11348 - protein, 267 aa, Klebsiella sp.
VKLDQTNNRISLPKLGWIRYRNSREVIGEVKNVTVIQSCGKWYVSIQTEYEVPEQVHKAASMVGLDAGVTKLATLSDGTVYQPVNSFKASQRKLAMLQRQLSRKVKFSASWQKQKKKIQRLHSHIANIRRDYLHKVTSEISKNHAMIVIEDLKVSNMSKSAKGTAERPGRNIRAKSGLNRSILDQGWYEMRRQLEYKQLWRGGQVLAIPPAYTSQRCACCGHTAKENRQTQSKFVCQVCGYTENADINGARNILAAGHAVLACGGMI

SEQ ID NO: 11349 - protein, 297 aa, unknown
  TnpB Polypeptide
VITLESSQDSHFDYWLKISTLEFRKQLLVPVKLADYHRRALEGKTINSSVQLNKRDGTWWLTLSSEEMVPVQAVPDASVVGIDVGIANFLTTSTGKHYGTFHGKLRERQKRDREKRRRKAKLRKCLEKKGVQKLPSTSSKSGQRLIRHVRQEINRAVNDCFAEHLDTQFAYEHLSVATMKQKARAMNAYMRASNLAHIPKQIAWNAAKRGVSVTRVKSAYSSQECSVCHYADKANRSDQQTFCCVVCSHRTHADMNAATNIERRVGDTELRACKDRKVIKALLISRHQAWKKQNGWP

SEQ ID NO: 11350 - protein, 389 aa, unknown
  TnpB Polypeptide
MWYNVAGMRTYEYRCRPNKKQEAQMMAVLIASRRLYNDALQELVENYKATGKHMNLFEQDKRHGAKEHPDLPAIVVDTTLKRLHRSFANFFRGRKEGKRIGFPRFKSADAWNTIQFRDAANCLDGNYLKTPKISGGKIRVNVHRPLNGTFKFARLVLRPSGWYVQCVTDYDGERLEPNAKAVGLDFGITYLVADSDGGFVRNPKSFRTSAKKLAHAQQKLAKCKKGSRRRRKAKRQVARVQERIADQRKDKLHKVSRSYVNGYGTIAVEDLKPANMVKNHCLALSISDVSWGLLRFYLTYKAESAGREFVAVPPHYTSQKCSRCKELVQKSLSVRTHVCPYCGYVADRDTNAAQNILRIGLDETFAEGARGAGFASESPRPLKQEAPGL

SEQ ID NO: 11351 - protein, 405 aa, Paraburkholderia sp.
MERLQAFKYELMPDGGQQRQMRRFAGACRFVYNKALALQKDNYEAGGKFIGYVPMAKRLTAWRNGSETPWLKDAPTHPLQHALKDLDRAYKNFFAKRAAFPRFKKKGRSDRFRYPDPKQIKLDQTNSRIFLPKLGWLRYRNSRDVLGAVRNATVSLSGGKWFVSIQTAREVDTPIPRATHAVGIDMGIARFATFSDGTHLAPLNSFKTHEARLRHAQRAMSRKIKFSSNWKKAKSRIQRIHARIANARRDYLHKATTTISQNHAMVCIEDLQVRNMSKSAAGNIEQPGNNVRAKSGLNNAILDQGWFEFRRQLDYKLRWTGGYVIAVPPHNTSRTCPCCGHASVENRTTQARFTCVACGYENHADVAGAINVLERGQRLFACGGRVQSGHPAKQEPAEATAQLIA

SEQ ID NO: 11352 - protein, 423 aa, Microcoleus sp.
MQLAERHIIKSTEHRFALIDGLAFESKNLYNAANYVIRQSFVYGWGYINYNEMNRLMKSHQTYKALPAKVSQQILMILDKNWKSFFEAVKAYKVDSSKFTGRPNIPKYKDKVKGRNILVYTIQAISSKQLKKGIIKLSGTEISIKTKVKPERICQVRLVPQCDYYVIEVIYNEPESTISDDKFIASIDLGLNNLVALTSNQQGFTPLLINGRPLKSINQFYNKRKAQLQSQLKGSRKSSPRIQRLTRCRHQKVDNYLHHASRLIVDIFVAQQIGTLVIGKNAQWKSEIDLGKQTNQNFISIPHARLIEILEYKARLVGIKVIVQEESYTSKSNFLNLDPIPVYGHIGADGVVFSGKRIKRGLYKTSVGQLINSDVNGSYNILRKAIPNAFSNGIESCVVQPRRVNPLKVQAKGEGLNASHVMS

SEQ ID NO: 11353 - protein, 235 aa, Geobacillus sp.
LNIRLTYDDKTYQCYVAIANPLGQQEGKHAPRLRFPVSVPEKYEEEIIDLVTGDPVGVNAKGKPLIEYQPYTVEIKRKNGEYYVHLIYEEEVYGRELAYDEPIQAERIAGIDINIDRIAVSIISKQGNFIKSKVFYCHELEYVRANKRNNIVGKTVRDVYDWLLQENVGAVVIENIQLRQRHDTDKRFNRFTHNFKKKKLTDTIIRRGMRLGFRIKKANPAYTSVIGRFKYIIRP

SEQ ID NO: 11354 - protein, 354 aa, Vulcanisaeta sp.
LPRDKCDADYIRRLMALANLAYRGFEVWVPDVPRTIQHQLYGFRDFKDSLVFGTTPKRWFTKTWVPLKTLRIYADGTRRGATDALVILDLRSNVIKLRQVCKSEPKYIVEVPMPGWVVERVREGGDVRYAMIGLRGEEPYLALVAERTIEPYQPSGYRLVVDVNAWKYGIAWGLVKNGKLITWRTEGPGTFLINTLYHQAVDRERKAGKLRRLGYGDTAVVNRVRRQAFTRRSRIYRVTRDKAYFLASKLVRKALKYKASLVIDDVTEESRRELLEEGLPRDVVKLLMSNLKRFVHQLKTLAKWYGVPYEFKRLPSTICPICKHELTQEEGRIMICENCGFKAPRDMVPMYWVI

SEQ ID NO: 11355 - protein, 347 aa, Bacillus sp.
  misc_feature (237)..(238): Xaa can be any naturally occurring amino acid
MTIHNKAYKFRLYPKEQQAHLIRKTFGCVRFVYNKMLTERKEVYEKHRGNKEELKKQKFPTPAKYKTEFEWLKEVDSLALANAQLNLQTAYKNFFSGQNDFPTFKSKKDRKSYTTNMVNGNIMLLNGHIKLPKLKLVKIKQHREIPQDHVIKSCTISMTPTGKYYVSILTEYEKEIVQKEVETVVGLDFAMSELYVSSENEKANYPHFYRQVLERLAKAQRVLSRRTKGSERWNKQXXKELVDNFDVVAIEDLNMKGMSRALNFGKSVADNGWGMFTTFLAYKLQEQGKQLVKIDKWFPSTKTCSSCGNVKDVALSEREYVCDCGTLIDRDYNAAINIKNEAIRLLA

SEQ ID NO: 11356 - protein, 391 aa, unknown
  TnpB Polypeptide
MREFVKLTASFKLDGEIPDIFSLYKQIVNELLDYASFKNISSFKKLKAERYYELREKYPNLPSHYIYTACQMACSIYKSFRKLKRKGKAKGDKPQFKKDVIMLDEKLFSLNLNNLFVSIATPNGRVKLKLIHRKYHERFRDWKVGQAWLIKKDYELFLNVVFSKDIEVEKPIDVIGVDVNENNVTIAKLNGFGKKVTREKVIRTVYFLKRRKIQSKIKVGKTRRKLLVKYSGRERNRILDIYHKAANWIVEEALETGSAITLENLKNIRKKIKYSKKMNGRLHRWSFRKLQLIIEYKAKLNGVPIIYVNARGTSSLCPICGAKLSPNGHRILKCKRCGLIADRDIIGAWNIRLRGLKQIDVASPVPAESLPMKTEGGKETKHHKMSSLLER

SEQ ID NO: 11357 - protein, 381 aa, Moraxella sp.
MKTLKLRIKDKHATQLNRLSSSVNFVWNYVNDLSYKHLQKTGKFFSAYDLNEYTKGSGELLGLHSQTIQAINETHAKSRKQFKKAKLKWRTNNSKSKHKSLGWIPFKQSAIKHIATHQTGKKGLKSTLQLSLAKGQKLIIDLWDSHNLSLYQINTCELVQDSRNRWYACITVKEYPKTQCGTGSVGIDLGLKDSATTSNGDKLQIKQTLKYAKDLAIAQRAKNKQRVKAIHAKIKNTRLDLIHKFTTQLVRDNAIVVVGDVKSNQFNSKKGKLAKSVYDAGWFELKRQLTYKCKHAGCRLEIVNERYTTQICSCCGDMSSSPKGRTDLGIREWACAECGTRHDRDINASKNILAVGLDRLGAGIPTLRAGRKSKATPNLKS

SEQ ID NO: 11358 - protein, 412 aa, unknown
  TnpB Polypeptide
MPAETTATKTLEATLAPPTAHKENRLQRTVATYRRALSESFDSGADTQSAVNDVVTGYTLTSYAKDALKNYVPQLRQTYNASELDDGHPVRFTNRGWRLDHSEDRTHEFCWRVPQAGRGNAFWIPLRINPAQRELWTGLLDGDVTVGEFRLQEHRTNWVLHVTVEYEVAEPDEPDDPTPVGFDIGESKLLAGCACQDGTPTQPMLFDGSRARHLRKEMHTTLKRLQERDADWRIDERFNHYQNALTDIVEKASRQAVEYARQFENPVIVLEDLSYIRESMDYGKWMNRRLHTWAFARLTGRIEDKAVDAGIPVRFVNPAYTSQTCHECGHVGSRSSQAVFRCTNSECWVSEYQTDINAAANIAGRLDPWGESLSLNPTDDDSPRDGSACDSTTGHRTPSPKPGQTTLAAYQS

SEQ ID NO: 11359 - protein, 311 aa, Lachnospiraceae sp.
VLYRGQSYKQDDCRVQIKVFIRHTWDWVTVGMPQRDLWSLIKAAADPSLGKMESPTLVYAFHRYCLYFPFQVKTEKLDELPPDEQITLGVDLGINHGAVCSAVDARGYVHSRAFDPFEKERRAIGCVLTRIRVIQRKSGPQRLSKLYTKLDCLKDNYVRQLARWIVNQAVSAHAYGIVLEHLGRMKGRGRHRDRIHHWCKCRIRDFVKSMALRAHIRVFLINPRNTSALAYDGSGKVTRDMSDFSKCTFQTGKRYDCDLSASYNIAARYFLRTMEKSMSSEAWTRLRAEIPELGKRTERTLSTLWKLAEVS

SEQ ID NO: 11360 - protein, 418 aa, Anabaena sp.
VIHKAVQVRIYPSKEQETQLAQSFGCARWWWNYALNKSVETYKETGKGLSRAALNAFLPALKKSDDTIWLADCYSQILQATTLNLTTAYKNFFDKRAGFPKFKSKHGKQSIQYPQNVKIVDGHVKLPGNIGIVKAKIHRPIEGKIKTVTISKTPSGKYLASILTEVEGVSTPLNTSENTTISEGKIYGIDLGLKHFAVVTDGENVSKYENPKHLAKHEKNLKRKQKKLARKQKGSKSRNRYRKVVAKVYERVSNSRQDFLHKLSYKLVSDSQAVIVENLNVKGMVRNHNLAKSISDAGWGTFTNFLAYKLERKGGKLVEIDRWFPSSRLCSHCFYQVSDMPLSVREWTCPHCGTHHDRDGNAAINIRAEGIRIIKAEGSAVSAVGGEIKPKLGRKSKLRHSPVSTEADTVLGTPSQCG

SEQ ID NO: 11361 - protein, 227 aa, Anabaena sp.
MRTSYQYRLKPTREQTEKIDKTLDMLRHQYNYQLAQRFHWYEQNRSPIDRCSIFVCHLPELKDKPNYYSQKASLTQLKKDRPWWYTSIHSQVLQEVPKKVEIAFDRWLKGDVNGKKSGRPRFKGAGQYKTFTFPQFKRHHFTNNKITLSKIGDIKVIVHRQIPDGFDIKTVSVTKKADGYYVTLSLDDKTVPTIKPDFNANNIVGIDVGLIDFIVTSDAGLAHLKPY

SEQ ID NO: 11362 - protein, 182 aa, unknown
  TnpB Polypeptide
MQRKNLAREQRKLSRCEKGSRNYQKQKKKVALYHEKIKNQRKDFQHKLSHSLAEDYDAVCVEDLNLKGIAGGLHFGKGIQDNGYGQFLSMLGYKLEERGKYLIKVDRYFASSKICSVCGHKKKELALSERTYLCECGNQMDRDVNAAVNILEEGKRIYKKMCIIAQKRSVTGSKKEPRDTRG

SEQ ID NO: 11363 - protein, 326 aa, Oxynema sp.
LYKGQCYKLQGYDRSSIKVFNGTDWVWTTVQITGLRERHTVDSNKLLSPSLIFNEEKNACHLSVPFECHPPQREQDGTVVSVDLGINTTATVAVVNFDGTVIHREFIHPGRDIDEVAAAAGTCVLRNGDRRDQRLKSVSKRASKTMGKGGSLQKGFCSNTYRKCRNINRQIGQIVSKRIVQIARQFKADAIVFENLKGWKAKGGQKRSNLRQRFHGWLKGMIRDFTEMKWQEMGGKVVDVVAAYTSKLAYDGSGVVRRDSKNYALAKFFSGKRYNTDLNGALNIAARGILQLTCRKDSEERSSQKSGRSPRSWACLCDLWTSTVPG

SEQ ID NO: 11364 - protein, 257 aa, Oxynema sp.
MRHFRPTTVSRTTCPKQRSNSRIWVRYILRCCRPRFADCTIPGRHFCNGDMGFHVSKSSVSSNPLCFPNSSTIPSMASQSSCQKLGKYPSTCIVPSPPFQRGVGGIQVRVLSRVRGTQWYVVVTIESDISVPDAPVRGRAIGIDLGLERFLTASDRSFQERPKFFKSMQRKLKLLQRRAARKQKGSQNWEKAQIEVTKMHHRIANRRKDFHLKTAHQLCDRAQTIFAEDLNVTGLTRGMLRTDCVDAAFGQFLSLTE

SEQ ID NO: 11365 - protein, 171 aa, Oxynema sp.
LKGGRRGDRERIGVDVGIKTLATLSDGKIYPNPKAYRQAQKKLAQLQKELSRRQKGGKNREKTKLKLAKTHRRIADIRADHLHKLTTYLAKNHGEVKIEDLNVSGMLKNHKLAGAIADGGFDEFRRQLEYKCEWYGSKLTLIDPWYPSSQICSNCGHRRTPTKNAPGQKTV

SEQ ID NO: 11366 - protein, 290 aa, Oxynema sp.
MHVLEFKIRGKPWQCQAIDEAIRTTQFVRNKCLRYWMDNKGVNKYKLNKHCRVFAQEYPFAQKLNSQDRQSAAERAWAAIARFSENCKKGIPGKKFCIDIEVKLNSQRTGKAIGLDRTLKELYTDSNGHSKPNARFCREREQRLNLNQRRVSREQKGCSNRNKAINCLGRTHFKISSQRQEHAKRLARCVIQSNDLVAYENLKVKSLVRNYCLAKSINDAPWDRSRKGLEYFGQKLGKVTIAVDPALTSQQCSSCATKVQKPLSTRTHVCSCGCEMDRGWNAAINILKEP

SEQ ID NO: 11367 - protein, 408 aa, Oxynema sp.
MFKAYKYRIYPTHKQQATLAKSFGCCRWYWNYALNLCQETYQSTGKGLSRGYLQGLLPALKKEYPWLKEDVYSQCLQVVALNLSTAYRNFFEKRAKLPRFKSKQGRQSISYPQNVKFEGNYIKLPKVGLVRCRQHRSFEGKIKTVTLSKNPDGKYYASVLVEGKKEPPLLSTEGKAIGIDLGLTDFAMTSEGSKYNNPKHFDKHARNLKRKQQKHARKRKGSNNRNKSRVKVAKIHTKISRCREDFLHKLSRKIVNENQVIVVESPLTPLNKGGTKGGIGMVRHHQLAKAISDVGWGMFCTMLKYKAESEGKVDLEVDRLFPSSKTCHVCLNQVKTLPLDVRSWTCEHCQTHHDRDINAAINLKNEGLRILELGTRSTALGGDLRRGGRTSVLSSAVPSEEGSRYCNL

SEQ ID NO: 11368 - protein, 374 aa, Oxynema sp.
MLKAIKVRIYPTDEQSVTLAKHFGCTRWLWNHCLYVMTETYKTTGKGISALTMKKQIPTLKAEYEWLKECYSQCLQQSVLNLSQGFQNFFEGRAKYPNFKSKHRRQSVQFPQNVKVISESAIKFPGLLGTVAAKIHGPIEGQLKTVTVSKMPDGKYFASLLIEDGTEKPDPSSDGKAIGIDLGLTNFAITSDGSKFVNPRHLKKHERNLKRKQRKLSRKKKGSQNRNKARIKVAKVHAKIANTRADFLHKLSRKIVNENQVIVVESPLTPLNKGGTKGGINMVKNHNLAKAISDVGWGQFCTLLKYKAEFEGKVYLEVGRFFPSSHLCSNTLLPLEKMDLSIRSFVCPYCSERHDRDINAAINIRNNKITFAVA

SEQ ID NO: 11369 - protein, 412 aa, Oxynema sp.
MLVLTYSYRIYPDLEQELQMLNWLETCRQVYNYAVGERKDWIGSRKCSVNACTLQKEYIIPANAPYPDYYHQKKALTEAKKTNPELKAVHSQVLQDVMGRVDAAFVAFHQKRTGFPRFKKFGRMRSFLFPQMKGEAIDGNSIKLPKIGQVPINLHRPIPEGFDLKAVRVVRKHSGWYVMLILKADVDVPDIPPEGHALGLDVGLEYFLSTSDGEQVSRPRFFNKLHRKLKSLQRRLKGKQKGSKNWLKLIERIGRVHENIANYRLDWQFKLAHHLCDRAGIIFVEDLDFRTLAKGFLGKHMVDAGLGQFVNIVLPWVCWKRGVYYGQVNPRGTSQECPECGAQVRKELKDRIHHCGECGSIKPRDVASAQVIRNRGLSVVGLTADEIACGRVRSEALPRQDRTKQVVAGAIR

SEQ ID NO: 11370 - protein, 428 aa, Oxynema sp.
MKTLETENRKNYGRIKGTLVKLVERHIIKKGHRFWDEIDELSWHSKNLYNAANYLIRQNFIYGHGYLNYNRMDKLMQKTEQYRALPAKVSQQVLRGLDKNWQSFFAANQAYKVNKEKFLVNPKIPKYKNSQKGRQLLVYVKQALSKVALKKGKIKCSKTQIELETSVAEKVVEVRIVPRCDCYIIEVIYEEVEPTLKSNEWVASVDLGVDVLMAVTSNQPDFVPLLINGRPLKSLNQFYNKRKAFLQSQLKGNRPTSKRIQRLTRCRNQKVENYLHRASRYLVNLLVNRNITTLVIGKNEGWKQNAKMGKVNNQNFVGIPFNRLIEMLTHKCQLVGIKVVLTEESYTSQSNFFNLDPLPVYGETVEIPKFTGKRIKRGLYRTDTGFLCQADILGSYNILRKAFPNAFMGYGIERCVVHPRRINLSKPK

SEQ ID NO: 11371 - protein, 372 aa, Oxynema sp.
MLTMNYTYRIYPDALQQTELLSWLETCRGVYNYALRELKDWIASRKCSVDRCSLEKEYIIPADELFPSYHRQQNNLPKAKKQFPHLGKVHSQVLQTTIRRLHDTWEVFQKRGYGFPRFKKFGQFKSFVFPQFKNNPINGFTIKLPKIGEVPINLHPPFAPLSKGGWGDTGKGPVHGRAIGINLGLERFLTASDRSFQERPQFFKSMQRKLKLLQRRAARKQKGSQNYRRKDFHLKTAHQLCDRAQTIFAEDLNVTGLTRGMLRTDCVDAAFGQFLSLTEWVCWKRGVYFGKVNPNGTSQTCPNCLATVSKGLEVREHHCPECGYRTHRDTPSASLRERAAAEMVLDRGLENVGASGTLGNGNRLSSRSVGGL

SEQ ID NO: 11372 - protein, 277 aa, Oxynema sp.
MDSLVSKSSVSSNPLCFPNSRTIPSMASQSNCQRSGKYPSTCIPPSPPFQRGVGGIQVRVLSRVRGTQWYVVVTIESDISVPDVPVHGRAIGIDLGLERFLTASDRSFQERPKFFKSMQRKLKLLQRRAARKQKGSQNWEKAQIQVARMHHRIANRRKDFHLKTAHQLCDRAQTIFVEDLNVKGLTRGMLRKDCVDAAFGQFLSLTEWVCWKRGVYFAKVNPNGTSQVCPSCFATVSKGLEVREHHCPECGYRTHRDHAAAEMVLRRGLEQVSSQGL

SEQ ID NO: 11373 - protein, 421 aa, Oxynema sp.
MLTMNYTYRIDPNVVQQTELLEWMETCRGVYNYALRELKDWIASRKCQVDRCSLEKEYIIPADEPFPSYHRQQNNLPKAKKQFPHLGKVHSQVLQTTIRRLHDTWEAFKKRGHGFPRFKKFGQFKSFVFPQFKHNPINGFTIKLPKIGEVPINLHRPIPNGFKVKQVRVLSRVRGTQWYVVVTLESDISVPDVPVHGRAIGIDLGLERFLTASDRSFQERPKFFKSMQRKLKLLQRRAARKQKGSQNWEKAQIEVARMHHRIANRRKDFHLKTAHQLCDRAQTIFAEDLNVKGLTRGMLRTDCVDAAFGQFLSLTEWVCWKRGVYFAKVNPNGTSQTCPSCLATVSKGLEVREHHCPECGYRTHRDHAAAEMVLHRGQENVVSQGLWGTETACQVGLSGVYDLDKWRGAGIPNREAGKPVL

SEQ ID NO: 11374 - protein, 293 aa, Oxynema sp.
  misc_feature (293)..(293): Xaa can be any naturally occurring amino acid
EWQSGIRRHRQAKPPVLNANTECYPVLYKGQCYKLQGYDRSSIKVFNGTDWVWTTVQITGLRERHTVDSNKLLSPSLIFNEEKNACHLSVPFECHPPQREQDGTVVSVDLGINTTATVAVVNFDGTVIHREFIHPGRDIDEVAAAAGTCVLRNGDRRDQRLKSVSKRASKTMGKGGSLQKGFCSNTYRKCRNINRQIGQIVSKRIVQIARQFKADAIVFENLKGWKAKGGQKRSNLRQRFHGWLKGMIRDFTEMKWQEMGGKVVDVVAAYTSKLAYDGSGVVRRDSKNYALAX

SEQ ID NO: 11375 - protein, 383 aa, Oxynema sp.
MLNLTYNYRIYPGLDQKAQMLDWLEQCRRVYNYALAERKDWIGSRKCPVNACSIKQEYIISADAPYPDYYKQQNALTEAKKAIPELKAVHSQVLQDALKRLDKSFKFVQERGFGFPRFKQFGQYRSFVFPQFKSNPINGFEIELPKIGAMPINLHRPIPEGFALKRVRVVFKPSGWYAQLILQADLSVPEIMPHGEPIGIDLGLEKFLAGSTGELVERPRFFVDWQSKLRWLQRKLRNKKKGSANYRKIQAKIRQLHEHIYSVRREFHFLTAHQLCDHAGMIFAEDLNLKMTSRGILAKHCLDAAWGSFLEILRWVGWKRGVYFAKVDPNGTSQTCPQCGAHTGKKELGERVHYCDECGYTTDRDVAAAQVVMQRGLVLAADG

SEQ ID NO: 11376 - protein, 357 aa, Oxynema sp.
MTWRKWLAASRYCYNAGMARLRDTYFEGLKLPSAYNLRQVVMSKIPEWVNSTPFNLRGAAVLDAHAAFKNTPKEHKLSPKFRSCRQPVSSFKLQSQNWRGGTTYPTHKTESGIKLKELKVNASEEIPEAIPSDFNVILDRGRWFITYTVEEEGLTNPHQQAIALDPGVRAFLTGFDGNKVIALGNGSISRIVKLCKRLDRIQSETAKAKGRDNKRKRFKLRKLARQLRIKIRNLVDECHKKTAAFLTSNYSQVIIPDFKSSFMVYRAKRKINHKTARSLLTWAHYRFKQRLVHQAVKRGCQVIEVTEEYTSKTCSKCGQIHNRLGGSKKFICPNCSHRIDRDANGSINVFLKTISGN

SEQ ID NO: 11377 - protein, 450 aa, Oxynema sp.
MLKYFIMSKAIVRTDKWGLQPSPEVRLHLAATVDEYRAYCKALSYVVMGHWPELVAAKSFCAAVEKLIHRTRKNPDPKYLYFGKRFYKFPSYLRRAAIKFVEGQVSSYLTRYREWQSGVRKRRDAKPPAFNVDAECYPALYKGQLVKFDVHLMVAWIKVWNGSDWVWAEVPIASKRHRHLIGSIKSPYLVVSQKRCHLAVPFGIVPPKWETDVVCAVDVGINTLATASIVCPDGTVLARKFIHPASDIDRRDKQTNIIRQKARKTKTLHRGFAKTPYRKAKGINANIARQVSRQIVNFALEHGASTIVFEDLKGWRPKGGKKRSNLKQRFHGWLHRRLVLLTQEKFQEVGGKTEYVYARGTSSWAFDGSGKVRRSKTQYELATFANGKRYNADLGASYNIAARYLAYKLKLTRRKDGQVAKGKSSCATPRMPVTLSLLWDWEAAYEREAS

SEQ ID NO: 11378 - protein, 358 aa, Oxynema sp.
MLTMNYTYRIDPDATQQVELLEWMEACRGVYNYALRELKDWMASRQCPADRCSLEKEYIISANEPFPSSPRQQNNLPKAEKQFPHLGKVHSQVLQTTIRRLHDTWEAFQKRGHEFPRFKKFGQFKSFVFDPGLEQFLTASDGSFEESPQCFKSMQSKLKLLQRRAARKRKGSKNWEKAQLAVARAYHWIANRRQDFHLKRAHKLCDRAQTFFAEDLNTKGSTRGMLGKDGVDAAFGQCLSLAEWACWKGGIYFAKVDPNSPSQTCPNYFAVVSKGLEVREHHCPECGYRTDRDPPPASLRERAVAEMVLHRGLEQVSSQGLWRNESARQVGLSGVDDLDKWRTAQIPNREIGKPALYL

SEQ ID NO: 11379 - protein, 334 aa, Oxynema sp.
MKATLRQISYNLIIWLYRRWAKLPRFKSKQGRQSISYPQNVKFEGNYIKLPKVGLVRCRQHRSFEGKIKTVTLSKNPDGKYYASVLVEGREEPPFPSTEGKAIGIDLGLTDFAMTSEGSKYNNPKHFDKHAQNLKRKQQKHARKRKGSNNRNKSRVKVAKIHAKISRCREDFLHKLSRKIVNENQVIVVESPLTPLNKGGTKGGIGMVRHHQLAKAISDVGWGMFCTMLKYKAESEGKVYLEVDRFFPSSKTCHVCLNQTKSLSLDARSWTCEHRQTHHDRDINAAINLKNEGLRILELGTRSTALGGDVRRGGRTSVLSSAVPSEEGSRYCNL

SEQ ID NO: 11380 - protein, 179 aa, unknown
  TnpB Polypeptide
MTFKNINKTKEVKRLKKVLKRKQRQCSRKYEQNKKGKEYVKTNNIIKLEKEIRLLHRRLTNIRSNHIHQATNKIVKTKPSRVVMETLNIKGMMKNRHLSKAIAEQCLYEFKRQIQYKCKKYGIEFVEADKWFPSSKTCSCCGAIKKDLKLKDRVYQCSCGLKIDRDLNASINLSRYKLA

SEQ ID NO: 11381 - protein, 145 aa, unknown
  TnpB Polypeptide
LVTRLHERIKNRRKDYNHKVSKEIIKNYKEIYITKDNLRGQSKILGKSVQDAGISQLRNFITYKGDNHGRIVKLVNSKNTTKTCGNCGSLTGPSGLNMLNVRNWECSACRAVLDRDTNSANVILSFGLGINLVSRFNSRSGILVL

SEQ ID NO: 11382 - protein, 152 aa, Arthrospira sp.
LGEVSSIPLQQYLRDLEQAYSNFFKSCKGQRKGKKVKPPKFKKRKSKQSARFMDNGFKLYLNSDYIYIAKIGDIKVVWSRELPTKPSSATLIKDSADRYFVSFVVEFNPQPLPENQNSVGIDLGITDFATLSNGEKVKSPKPLKKQLKRLRR

SEQ ID NO: 11383 - protein, 371 aa, unknown
  TnpB Polypeptide
MGMIRRTVHVKHDNGHLLGGLLHYISAASNHASRGYRKGVRGKELYRMTVHHTGVYQSRFADYIIREICGSHRAWRTNKLFDPHARAPRYHNGVAQTDYFKISFDETSELWDGSPAMHVAIYGRGRPGRSWLVFHVPPYVVKRLAEPGVVPKTVRLDRDEIYITYERYVPDREPASWVGIDMNAGNNTYAYPNGMVGIVWNKYGSEYNKAQSKILRVKRRGDARIIAKYTKKAWYTYNNRVGDHMGKEAKACASAGCGVGYEDLNIHRLYTKDGHTAPYVRGRLKTTLNVGRRRRAISNAQEAAGLPHMGINPAGTSAKCLTCGKKLRRSAVQRRNARNMWCQPCHTGARRQRGRQHTLSYNHGACHGMYG

SEQ ID NO: 11384 - protein, 352 aa, unknown
  TnpB Polypeptide
MTIPGRKGIIQGNCVVRYDTDTKVLSYDSMTRIPVKTKNSKTKKESVLRAVTYEIKGVEFPYGQVFVNDAMNNKSRQAVAWRFEDAGSRILVKCMVSVEQELPRKNEYYTDGCVSFDTNVDHLAMTELDKNGNLIHHEVIRFDITGKTNEQRGQILSNSLEQIFKYAKQKCKPVAMENLKDIKNESMYKNEELNRKLSEFAYTKITQLAESKSYKYGIGLYKAVPAFTSQIGKIKYMRHYGISIHVAAAMAIGRRAMGFKERPPKGLRTLIPQGNKNRHHWSQWRFLARHLKKQPAYKFYHMIPYDEFECITDMNQYMKEEFCNYQNRAYFLKRLTDIFNQLARTMPGVTTV

SEQ ID NO: 11385 - protein, 422 aa, Methanosaeta sp.
MPVFIASWRMGRERSFLHAVYESRPAIMPRTYLYNNCTNNIVLKAYRFRLYPTKSQITTMERTLDLCRWTYNQTLSYRKNAWEKEGRSISKYEMHNFLPRWKEEYPELNEVFSQTLQSVQERVDLAFKAFFRRVKAGEKPGYPRFRGRGWYDSFTYPQMGFKINTGKLYLSKIGDIKIKLHRSIEGKIKRLTVRRSATGKWFACFSVETEDAALPPWKDGSVVGIDVGLDSFATLSNGEKIANPRFFREEEHELARVQRRLSRASKGTLERRSALKIVHRVHERIANKRYEFAHQVSHSLVDRFGLIALEDLNIKCMVHNHNLARSISDVAWNMLVTITSYKAASAGSVVVLVDPRNTSKMCSRCGILAEKSISDRVHNCPKCGLSMDRDWNAAINILRLGLQSVGEASRKSSVLLGGEWSP

SEQ ID NO: 11386 - protein, 376 aa, unknown
  TnpB Polypeptide
MERAFKYRFYPTQEQETLLRRTLGCVRLVYNRALAFRTEAWYQKQERVGYGQSSSMLTEWKKEEELSFLNEVSCVPLQQGLRHLQTAFSNFFAGRAKYPNFKKKRNGGSAEFTKSAFKFRDGQVYLAKSTVALPIRWSRQLPQGSEPSTITVKLEPSGRWTVSLLVDDLTIQPLPSIDKAVGLDAGITSLITTSDGEKVANPKHFAKGFKRLRKAQKALSRKQKGSLNREKARRKVAKVHAQIKDARQDFLHKMTTRLVRENQTIVAESLAVKNMVKSRKLAKSISNAGWGEIVRQLAYKSLWYGRTFVQLDRWFPGSKTCSSCGHQVDSLPLNVREWDCPKCSAHHDRDVNAAINHLAEGRSVLACGATVRPDRH

SEQ ID NO: 11387 - protein, 380 aa, Halobacteriales sp.
LRCARDLLDASASLWNEVDYERRQNFFDGDSVWDPADYRKQYVGVLGSAIAQQVIRKNSEAWRSFFAAREDGEDTAPPGYWGDEDDGRELRTYIRNDQYTLETGERSRLEIPVGQDLKEEYGLGYHDRLRLEVAGNPKWKGEQGRLELYYDEVDAAFRAIQPVSVDDSRQDSPLASEEAALDVGANNLVACTTTTGQQYLYEGCDLFARFRETTEEIARLQSKLREGRHSSQRIRRLYRKRTRRRDHAQDALVRELMERLYDEGVATVYVGDLTDVLSAYWSAEVNEKTHQFWAYRSFIDRLATTAEEYDITVEVESEAYTTAECPVCGERDDTDRNGDAFRCSCGYEGHADLDASRTFLERHAGTNLEVGSMARPVCLK

SEQ ID NO: 11388 - protein, 647 aa, unknown
  TnpB Polypeptide
MRHTTFRFALAPTAEQARTLARHGGASRFAFNQSLQLVTEALAAGKVDPSVTVPWSGFDLISAFNRWKTSESAGRVFVVAPDGTATKQVTGLSWRKEVSAQVFEEAAVDLGRGLARYAQRGGRQVGFPKPKRKGRDHDSFRLRNKKDPGGRDGIRVGEDHSRSVRLPKIGTVRVHDDTRRLRRMLRPAKHLDPRTGEAVVGPRARVLYATVTRRVDRWYVCLNLEAADYHRCLRHQQRSQGERRRFVGIDRGLAVFAVVADSNGVEVCRFSAPRPLTRRRGRLRRCSRALSRTQRGSRNRLKAARLLAREHNRIANIRRSFLHEVSSQLAKTHSGLAVEDLPVANLIRNKRLAQAITDAAWAELARQLRYKTAWLGGELVVCDRWFPSTKTCSACGRVAQGMALGTRTFHCGGCGLVRDRDCNAAANLAAWAETATVEAAQVPDRQGGRVTHAVTSSVRVCERLLAGTPARGSAPQPGLGLGSGVVGPRHPRMVLWSLARPRLHVSLPAVVRPRTAPGRQLHPAGHPGRRHGRRPGLRSSHGGSTPRWRCGPPAARIEDTPRPAGPTEDRPGSRRNRDGSWRTQTSGQPPPAARPAGRFCRPESGGPCRSRPGRRCGETPAGPSRGPSPAHRGPPRRWCRSGASGWW

SEQ ID NO: 11389 - protein, 488 aa, unknown
  TnpB Polypeptide
MGTRQRFAIPDGWVARGFRFEVQPTTSEQPGRIAQSFGGRRFAYNWALGLVKANLDARAADPAVPLLAWDFYELRRAWNQAKDQVAPWWRCSSKEAYASGIADLVAALGNWSDARAGRRAGRPVGFPRFKARRRDRGRVRFTTGAMRLEPDRRHLVLPVIGKLRSKENTRRLERLIAKGRARILSMTLAEQGGRLFVSVQAIVAHQPRTPADPAARCGIDLGIGHEWAVIAHGDDQIERVAHPAPGAALQRQGRRAARQLSRRTVDSRAHRHTKAKCAALARRAANLRTNQLHTLTTTLTRRYGTIVVEDLDVQAMGRGMGRRAFRRTVYQAGIGKVRPTLAYKSGQQGGRLVVADRWFGSSKTHHGCGGYLADLRLDQRVWVCPQCGLLVDRNANAALNLRDWTGGPVADRVDDRDVQRGGVAAPAPFVGEPRRAGSRAGVGVRGSTRPSSGGGGRRRQNPTPAPAEERNPEQGYQPTGAHKRALNW

SEQ ID NO: 11390 - protein, 404 aa, unknown
  TnpB Polypeptide
MLVRGVVFYLESDLSSEAKFLLEDFRLAVNNAIRAGLLARVTSRNALVRVAYKDFREQHPRMYAQHLVSAFEVAGGILKNNRKRFRKGITGRIPYVKRLIMKAENQAYKLDRKSGVIDLPIRAGCHIELRLVVSQYHRKYLDDMALTLGSLTVLPDRVIVAFRKDAPKPFVPGSALSLDTNERSLDGLFVEGDVAKAVKAEFPEVAIIQQRHHDRRKRLQKKKAHDRRISRELCRREGTREHRRIDYRLHQVANSVLKFAEERKSAIVLEDLKGMRQKRSKELNRRLSRWPRRRLHQIIEYKAQWRGVPVIKVDPRNSSRTCPICGRIQDSRMGAEFKCECGWHLDRHINASINLLQTAISKGMAGGLRFNPGAFQHDAMMILYEPAMAARSEPNGTSGIVGVT

SEQ ID NO: 11391 - protein, 416 aa, unknown
  TnpB Polypeptide
LTRRILRSVEDAYRRMVEEMVEYAVRHGASQATLHEVFYAEFRREHPWLPTRLIKGAYRDAARRAKSFRAAKKRGKAYTEAPEVRRVALTFSDAQDWRLEGGALKLRIGGRWVELRCSGHKQLHRYLYGGWRLTEELKLKRRGKHWVAYLTFKRNFDVDPDPRNVVAVDINENNVTTAVFVGRVLREVWRLETGLGRMIITYAERKKKITEEHHPSDREVKSKLKKLREKRRKLDVVRKVAKFIERLAEERDAVVVVGRITHRAKEKMEENKDRKLRHRIRQWDVRTLAKLLEEKPIQVIEVAESRTSSHTPSGARISFRPLVIRRAVRGASGRVRPVKILLRVGRAGDEAWERDVLGAINIGLRYLQMGGFVASAPTGAHAARAMLMNPRPGPTPLAEIQLSADTASGGTLWTTW

SEQ ID NO: 11392 - protein, 384 aa, unknown
  TnpB Polypeptide
MFAIKRKLKLNKQQESLMAQLAGFSRLVYNYGLDLFWQTVELELTASDSKRIQAIKKCLTNFTKKRAEFAWMNQMSSRVYQSALQDLQTAFSRWRKGIAKKPVRKTRKNKQSFTVYDSNGVVLVVAGKSIKIPTLGTFRLQEPLSESYISQTFTISREGDGWYVSFAVNAQRIPPIMHEVFQTVGIDLGVKTFATISDETEIEAPQPYKKAKTKLGQFQYHNRNKQRGDRRTGQKASNNAKKYYKKLARFHKQIADKRQDFLNKTTTSICKKYAHIKIEDLNVSGMIANSKLSAAISDLGFYEFRRQLEYKAPMFGSKLDIVDRWYPSSKQCRKCGHKHTGLTLKERVFDCPNCNHIEPRDLNAAINLANAPDDKCSRVGSPRT

SEQ ID NO: 11393 - protein, 396 aa, unknown
  TnpB Polypeptide
MKQISYIYRAYPTKEQINIINYNLGGCRYVHNSLRNVFIKILKNRENLPSKNDISNMVKDLINKHEFLSKCDRTALIITGYNLLRSFKNYATDEEKYNCPKYKHKKLKESYEFINYKGFCQIFQKYMLLSKIGKLRYSKYRQIGTNLNLSAVRITKYSNKIFYVNCIFDYEDYPVIKVLDKTNVIGLDFSLKNFYVDSNGESPEYPFEELNRLQLKIKRINKSLLKMVKGSNNYLRQKEKICLLNLKIDNIRKHYYNVIARNLVNKYDYVAVETLNMKEISKHNNAEGLSLGVSTMNIGYANFLKVLEYKLNNSGKELIKCDRALKSSQMCSLCGYINPIMKDYSIKEFACPKCKLTINRDKNAAINIKIYALKLLGGYKKTWKDIWHFFKKKTNI

SEQ ID NO: 11394 - protein, 274 aa, Prochlorothrix sp.
MKVRYQYRIYPTLQQVKGLNQLFGCCRVVYNDALAIVRSVPQGEKWPSNAELQKLVITQAKKTAEREWLADVSVVPLQQSVQNLGAAFKNFFESRSGKRKGPKVGFPRFKKKLNQQSARFVRTGFSLKGNKLELAKLGRFKVKWSRSLPSEPSSVTIIRNTAGQYHASFVVEIGPINIEPLRPSIGVDLGIKTFAFLSTGDRVESPGYNRLDRKTRRFQRKLARQVKGSKRREKTRLRLAKLKLKRPISEKTFCTRPRPSSSTKIKWWCWRIWR

SEQ ID NO: 11395 - protein, 420 aa, Clostridiales sp.
MVVTKGIELRLYPTKAQKVFFNKCIGSERVAYNAMLNTKMVLYKDYGVKNFSPNWSSLKEFYPWMEEVDSRCLNYAKIEVETAYKNWFRSLKKGGKVGHPKFKKKTHSGTYHSTSMPNTPDRLFRDGKIFIPKAGLVKFVQYKELDLTRINKIRYLTIKRTNTNKYFVSVCCDVELPEYEHTGNCIGLDLGIKDLIVTSDGTKFENKRFLKSCEKRIKNLQRIHSRKKKGSKNREKARLRLATAYEKLGNRRKDYLHKLTTKIVLENDVICIEDLNVCGMVQNHTLAKSIADCSFLMLRSMLAYKCEWYGRKLVVIDRWSPSSKKCSCCGYTMPSMGLAVREWLCPSCHTVHDRDVNAAKNILVEGLKILDIGREPPEYKPVENSTMDDRAETYLKSSGSVKQEAYMQMGKVIPTSLACG

SEQ ID NO: 11396 - protein, 521 aa, Nocardia sp.
MSRHTAFRYCLDPTVEQQTVLARHAGAARFAYNQCLALVKTALTQRRTDPDHPVPWTRFDLINAFNTWKKSAAAGRIFTVDPSGVTTVEVTGLAWRNEVCQQVFEEAATDCGRGLTGWSDSRSGKRRGRRVGFPRFKKKTSSTVSFRLRNKHAKTGRPTIRIGEGDIPRSVTLPGLGQLRVREDTRRLRRMLTTGRAKILSATVSQRAGRWWISVSIEAADLHPGHHHPARVPDDGGGCVGIDRGLSAFLVAATSDGREVARVDDPPKPLARGLARQRRLTKVLSRKEKGSRNRREAAARLARHHHRVANVRRHFLHQVTNELVKTHDRLVVEDLHVAGMLRNRRLARAIADAGWADFGRLLYYKQRWRGGTVVTADRWFPSSKRCSACGTLNPALKLTDRVFGCGCGYRADRDLNAAVNLAAWPRLQQEDPPRSPDLRAGGRVTNARRREGADRHPMECRCNRPGRRGNQGSYPGRGMSLGRPRRAVSDNHRVIRHAVRNGRPGGSGSPLTRRFPSARAL

SEQ ID NO: 11397 - protein, 378 aa, Streptomyces sp.
VHVVRGGKRLARTRHHLAAAQLTEAGWRQRWEAERWFLKADGESGKRFGNETIRVSPDGGVSIKLPVPLAEYANAPHGRYVLAGRAGFAHRGQEWADLVEADRAVAYRIHYDTARGRWYLTASWQIPASRTVPMAAALADGVIGVDMNADHLAAVRLDTHGNPTGRPHRFFYDLSGTAQHRDAQVRHALTRLLHWARTCGVKAIAVEDLDFTAEKTRERHGRKRRFRQLVSGMPTGRLRARLTSMADRTGITVIAVDPAYTSRWGAQHWHKPLSGDTRKTTRHDAAAVAIGRRAQGYPIRRRTTPPPAHRSDAQGHRTVQAGPGALGREGPRPRVPGPRTRCAPPDRGTYAGDQSAQHRSERSAEHGSWQQESLPLSS

SEQ ID NO: 11398 - protein, 536 aa, Clostridium sp.
MSDKEYNKILKQYHKLSDRHILVVETDMPYYDVLKVVVLSDKIRKAGNELVSLMRKNYDQLLRTKRYRKLLYLYGSTKDKDKRKIYSNQLNKMQKAYHVTWEYCRTSMIPIGKKYGIDAVFALTKAEDIWRGIEKCLYGNGNAIHFSKYGELPCIRAKQINRGIPVSVKDDRLQFKLGKTAFRIQVNDRFQQDEVNAVLTYLAEPEVVDNKAVNTFIKDAYCIDTYRPCYATLVPKIIRGKYRVYLHLTIEGKAKPKYDKHDNPRHKYGKGMIGADIGTQTVAYTSDTEVGLKNLSERGNSIQTSERKERLLYRAMDRSRRATNPQNYNEDGTVKRGRKTWKYSNHYKKLKTKHSELCRINTVNRQLAINEDANHLRSLGDVFVTEPKNASKLMRRAKETTKNVKGKFNKKKRFGKSIKNRCPSGFQTTVEKKFKATSGTYIEVPNNYRASQYDHTVDDYIKKKLSDRLYKLQDGTEVQRDWYSSFLLYCYNHKTQDIDKNKCNTEFDNCCKKEKALITWIKTHKIKVLNSGIKIA

SEQ ID NO: 11399 - protein, 442 aa, Mycobacterium sp.
MADIGPGQLHADSTLAGIPTSYAGKFANPDLRRLQGQSLSVAVVTLHAMSRFRLLPTPVQQVALVEHCRHARFVWNLAVEQQQLWQRGRRGPDYHEQSAQLTEIRAEYDWLAAGSQTVQQQALRDFAQAMRNYFAGTHRRPTWRKAGVHEGFRQVDLKPHHVEKLNRRHGRVWVPKIGWIRFRWTRAVPAGVKSYRITQDRAGRWHLAFAHIPDPIPAPGDGSVVGVDRGITVSVALSTGELLHCPALTPGEQTRLRRLQQRLTGAKRGSERRQRTKLAIAKLKARETDRRRDWIEKTTTNLARQFDTIRVEDLDVRAMTRSARGTLAQPGVRVAQKRGLNRAINRQGWGRLVARLDDKAGGRIERVPAAYTSQRCSVCGHVAPENRKSQAVFACVACKAEPCNADVNAARNIAAGRAVPARGDLAIRRSANREPQPSCPAV

SEQ ID NO: 11400 - protein, 352 aa, Alkanindiges sp.
MKTLKLRIKDKHCKVLDQLASDVNFVWNYVNDLCFRHLQRTGKFMSAFDVAKYTAGSSKAGLNLHSQTIQAVTEELITRRKQFKKAKLRWRVSDPKCAKKSLGWIPFKASAIKVEQGQIKYGKQWFGLWDSYGLSRYTVKTGSFVQDARGRWYVCLAVDTVKLEHTTGKTSIGVDLGLKDLAACSDGTVIANPKYYRKYEQHLASAQRAGKKKQVKAIHARIKNSRQDHLHKVSSALVQQHAAIFVGNLSAKKLVKTKMAKSVLDTGFAALKTMLRYKCENAGVWFFEVNESYTTLTCSHCNGDTGPSGLGGLGIREWACMDCGTVQDRDINAATNILRLGRQTLVGGIPVL

SEQ ID NO: 11401 - protein, 337 aa, Actinokineospora sp.
VLVRYRYRIEPSAVQRSMMARTFGCCRVVFNDVLRTREHAYSVGEKVTPAEVQRRVITQARTTEARAWLAEVVSVALVQSVQDAHRAYSNFFASAAGSHKGRVGKPRFKSRKDNRQSFRLTRNGFHIRSDGRLYLAKVGDIRVRWSRGLPSQPSSVTIIREPDGHYYASFVVDVAPIPLPEIAREAGVDLGITRLATVADTEGQRVDVANPKHLARKQRKLARLEREKARRAKYRCESVEVAAEGSRATWQGLSSPTRLSAQTSSSTGPRQPSGLRGGLEHRRTRSQPQVGPGYPRRWMGSVRRADRGEGQALRPDCREGIPMAAQLENVCRLRPCH

SEQ ID NO: 11402 - protein, 120 aa, Actinokineospora sp.
RIHARVANLRMDSIHKLTTTLADGYRTVVVEDLNIVGMLGNRPLASHIADASFGEFRRQLDYKTRWNGGNLVVADRWFPSSQTCSSCGLVKPKLGLAVRTFKCERCGLVADRDHNAAINL

SEQ ID NO: 11403 - protein, 407 aa, Actinokineospora sp.
LSVVVASLIGMSRFRLQPTPTQERVLLEHCGHARFVWNLAVEQHAHWRSGRKAAPGYTEQCRQLTQARTANPWLAAGSVIVQQQALKDFAQAMANFFGRTHRRPTWRRRGRNEGFRIVAAKLSDVRRVSRNVGEVKVPKIGWVRFWWSRAVAAGVKSYRITRDRAGRWHVAFPVVPEPISGPGAGAVVGVDRGVAVSAALSTGELLSVPALRAGEKARLLRLQRKLARAQRGSIRRGKVKTAMARLSARETDRRKDWVEKTSTRLAREFDVIGVEDLKISNMTRSAKGTVEAPGRGVRQKAGLNRGILANGWGLLVTRVEQKAPGRVVKVDPRVTSQRCSASGVVDREARESQAAFRCRSCGFATNADVNAALNIRCAAGHAVAARGGPPLGEPANREPQRDLLLVR

SEQ ID NO: 11404 - protein, 388 aa, unknown
  TnpB Polypeptide
MSFRAIVLSLRPNKHQQKRLEETRLICMWLWNYLRDECIAEFMETNMVMSVIDLNALITPLKRDHPEMWTVHSNALQNVSARVRNSVMGALRRRDEDGAFRFPRSKTPKTFRCFEYTSPKDFTVDGDRISLGKMRDAGGIRFKCSQKIVGDIKRCQIVKRKSHWYAHLIVEVQGEGTEWLENRRTEAGMDLGLKQLATISDGEVYDNIRYDRTASKDIARIHSKLSGLEEGSVEWIKQKCRLDNRFGRIADLRRNYLCHVAKDMAENYRFIAMEDIEIKKLVQKEWQSTRRSQYNASWGILEGCLTRAADRSGTTVVKVDPRGTTQMCSGCGCIVPKTLSERVHRCTHCGLVMDRDLNASLNILAAGRAASALSRELRGSLEDPTPDR

SEQ ID NO: 11405 - protein, 396 aa, Deinococcus sp.
VANTFRGESTTLKAFKYRLSPTKAQIAALDTTLLLCQRLYNGCLEERRGAYRKAGKSVSVYDQMKALPDVKEGVPEYRGVNAQVLQNVVRRVDRAFQDFFSRVKAGKTPGYPRFKPRDRYDSFTYPQPSQNSVSGDGKHVYLPKIGNVRIKLHRPFCGKLKTLAVKREGREWYAVLTCEIPRAEPLPEMGSQVGIDVGTTWFYVTSDGEFCENHRLFQASSKKLRVAQRALARKPNKRSNRRRKAKERVAKLYRKTARQRLQLHHEEAKKLVTAHDLICHEDLNVKGMAQGNLGKQIHDVAWGQFFQILSSKAVEAGRRVIAVDPRHTSQRCRVCGHTERGNRASQANFRCLNCGHAENADVNAAKNVLSMGQAFVAQRTSLEDACHEKPRPFGLG

SEQ ID NO: 11406 - protein, 427 aa, Streptomyces sp.
VHLRYSYRMYPTVGQRQSLARTFGCARVVYNDALTMRKAAWKTDRSRIPTGVLAKSVITDAKKTDARSWLGSVSVDALQSSIRDLDTAYRNFFDSLSGKRAGRPVSLPRFKSRKDSRQSLRFSRNGFRIRGNGKLNLARIGDVRVKWSRALPADPSSVTIVLDPSGRYFASFVVDIEPDHLAELDTEVGIDLGLTTYAVMSDGTVIDNPRFLRKAEKKLKAAQRALSRKANGSRNRAKARRKVARAHARVADTRLDWLHKRTTGLIRENQAIYLEDLNVRGLAGTRLAKSVHDAGWSTFRRLLEEKAARYGRHVGIIGRYAPTSQVCSTCGVQDGPKPLSIRTWTCGACGTSHDRDLNAARNILAAGRADRLNACGGPVGPGVAIPRRARPVETGTHRNAGRTGRKPRVAGAAGIPVLQRGEDVTRR

SEQ ID NO: 11407 - protein, 418 aa, unknown
  TnpB Polypeptide
MDVRRTAVVKLDVSDEQRDALHRTAKQYLYCANRTADYCWSDASYTECKTNKRNVRDALYSGLREETELQAQLVQAAIRRGVEAINGVVERWKKGQRVSQPTFTAETMDYDTRSASFYRNKTSLSTVNGRVECPFVLPTDSPTPYEQYVLSKDYEFRESTLQYDAATDEFYLNISTRRTDSDDSNAEVPADTGHPDQTVLGIDLGVNSLAVASTGTFWQGDEYDHWCREFEKRRGQMQQRGTQAAHNALLRLGKREEAWRKQYIHTVANELVTEAVEHDCDVIVFEDLTDIRERLPQAKWHHVWAFRRLYEYVSYKAPERGVSVEQVEPNHTSTRCSRTDCGFTHDDNRHGEHFCCQKCGYEVNADYNAAKNTGLRYARKRTHRLRSSPTSGSGDAEVDLRITGGTLNGESHQPIAGD

SEQ ID NO: 11408 - protein, 303 aa, Calidithermus sp.
MGGQHGVTYRLDPARNRARIQRLGEFRVLGLHQIPQGAEIASAVLVRRESGFYLQVTGYLPKETLAARQKFPHPVGVDLGVRDKLTLSGGLKVDFEVPETPRLNRLQRRLFRTKPGSKNREHLRHLLRREHGRIANRRRDAQNKVLAFLRRYPAVAFQEDFVKGWSASFGRQVHHSGIGGLKARLRNSLATPLPVERFERTTGECSACGEALEVPLSARVVACPRCGRTEDRDLNAARVILRKGLGLSPNQALGVDRSEVTPMEREAAVRILGSNPWVRVSFLGEVGSPALWCREEITHQIGV

SEQ ID NO: 11409 - protein, 381 aa, Clostridium sp.
MLIPNNKQKSKLFQSAGVARFAYNWVLSREQENYKNGGTFLSDYDLRKEFTKLKSTKGYRWLNDYSNNIAKQAIKDACLAYKRFFKGQSAFPKFKSKRKCKPSFYIDTYKIQFIDKTVKLEKITLSRKKNRQKLNWIRLAERNRIPIDTKYINPRITFDGINWWISIGIECPDSKEIPVNDGIGIDLGIKDLAICSDIAKPYKNINKTQKIRKLKKKKRRLQRQISKKYLINKKGDTYCKTSNIIKAEKKLLKLNHRLTDIRHEYLHQTTTEIINRKPKFIVLEDLNVKGMMKNKHLSKAVVEQCFYEFYRQIEYKSSWNNIKFIIADRFYASSKVCSCCGMIKKDLKLSDRVYKCDNCNTVIDRDKNATINLYNYGKSIA

SEQ ID NO: 11410 - protein, 741 aa, Actinobacteria sp.
LLGQAREEGRVVTAEPAPRLGLARAGDDLAAGRGQTAPCALRERVLVTRQGRGHERHAGRDRVPVRLGLGWHEVEDLPDGLEGAGDVVELAQVLAGVVELDPERELLDHHLGRHPVPVIVTGSVLELGERGPGMIGALVRGVGAVVRHLGVVAGDAGERGADRVEGGEPLDVLVRDLVHARHDSPFERKVSLARVRLHGFERGRPEVVETGVLGSRARISEELLAEQPRTFLGGGVVADSRELEEGGVGQGLGREAPVVRRGRRVVLAHEIAAGCLGLLVTPHSYRLRMRSVHRTARVGLRLTRGQSRRCFGLLRSAGDVWAALVDVNRHRFARRAQPIGTCQAWCREVAGVACGELSVTAIRSVVRRYSAAFLETGRRRRKGERARYPRRKRALFPVRWYQGTFVLEHRRVRLSVAKSAPALWLRLARDIPYPPAQVRSVTLVCEAGRLFPDVTAAVPVADHDLDPARVAGVDVGIIHPFAAASEQEALVVSGRVIRAEERVHLADTKARTRRMATKTPRRGQRGSRRWRKLRAAQRRAETKHRRRVRLAHHQAAKTVVTWAIEHRVGTLAIGDLAGIATDDAGRHQNLRLRQWRRTHLVGALRDKAEAAGVQVVMVDERATSSTCPQCGSRTAKPRGRNFACPSCGHQEHRDVVGARNIAARSGGTTRTPVRVTHRRAGQPPARRDRRRHLWDLRRSSPAPGRSATAGSRSPANPTEAPAPATVHDHPDGHPARITQAA

SEQ ID NO: 11411 - protein, 383 aa, unknown
  TnpB Polypeptide
MLANKFRLYPNKEQTEKLEFALDTCRQAYNMMLGELNEQIVIDKSEIQAMLPDMKICEPRFREVYSKTLQYECYRLFSNLSALRVLKGNHRKVGRLRFKGKGWFKTINYNQSGYSLEDDKLHLSKIGDIKIKVHREVNGNIKQIQIKKEIDRWYAIIITDEKKKITCGNKVIGIDLGINNYLVDSNGNKIENPKILEQNLSKLKHLNKELSRKKKGSSNRRKARIRLEKLHLKIKNQRTDFLHKLTTNLVKSCKIIVMEDLDIKQMSQQKYFNAKNMMDASWSKFAQLLDFKAESAGCQIVRVNPRNTSKTCSQCGHIQDMPLYKRTYKCADCDFVIDRDYNSAINILTKLAGQEMSCVEKSTSVPLEQVGSMKQEALTSTEC

SEQ ID NO: 11412 - protein, 433 aa, Streptomonospora sp.
MHRRIDVPAAAELICANHKTDRRMLVAMRLRYSYRAYSDAGQRRALAQAFGCARVVWNDCLRTRKERHAAGLPYARSAELSRTHITEAKRTPERAWLADVSAVVLQQSLRDLDTAFTNFFDGLKGRRPKSGPPRYKSKKDTRQSIRVNSNAFCLRENGAVYVAKVGDLKVRWSRTLPAAPTSLTVVKDSAGRYFLSFVVETEPEHLPELDTDTGADLGLGHFAVLADGTKVDSPRFLRRAEKKLKRMQKSLSRKAKGSSNRAKARAEVARQYAKVADRRRDWLHKLSTDLIRDNQAIYVEDLAVKGLARTRLAKSVHDAGWSMFVAMLEYKAVKCGRYVGRVGRFEPTSQLCSACGIKDGPKPLSVREWTCRECGAVHDRDVNAARNIRAAGRADRLNASLSAGKTRTKVPAQRVEAGSPRKGQTTQAGIPAL

SEQ ID NO: 11413 - protein, 485 aa, unknown
  TnpB Polypeptide
LQRSNQKVVVEHRDRLTRFGFRTIERFFNGVGCRVEILEELEGKSEHEELVEDILTIIVSFCLGYMEHEVGASRRKAPMQRAHKIRLNPTPQQTEYLRKACGTARFAFNWGLAEWQKQYAAGEKPSAYTLKKQFNAIKREQFPWVLDVSKCAVDTGFRNLDAAFKSFFRRCKNGYTEKGYPNFKSKKRSKLSFRMDGARVSADGHWLKLEKLDEPINMAEMLRFDGEIRSVTISEDAGHWYAAINVEIEPSEHKHPQGSVGIDVGVKTLAVLSDGTRYENQVRLRSRLIKLKRLNRELSRRQEGSGHWNRTKKKLATLHRRIADKRLDYLHKMTTKIARTYQIIGVEDLNVAGMLHNHYLALSISDAGLGEIRRQLRYKTEWYGGTLVEIDRFFPSSRLCPMCGVVKSDLALSDRVFICECGYTCDRDLNAARNIEQEALNMFCRRSGFTETLNGRGQNVRPLGAVLYEASKSAEERQPSKLAVV

SEQ ID NO: 11414 - protein, 219 aa, Dictyobacter sp.
LHSTGANERGRFYHVGGFKGGQWYNRQLDTIRSKRDRCQKKSRRSKHLSKVYKRVSEKKRRKQRDSLHKASHLIAHRLVERTVVVGDLSQRDMVMKKHREKKKRLNRLVFNDWGLYTFMTMLTYKCQLYGKDLQVVDERDTSKMCSGCRHLQAMPLWKRTYRCVECGRVMDRDENSAVNIMTGFLARLGPHTPSSAVYCTRVKTAEKSRRLPVRPKCSN

SEQ ID NO: 11415 - protein, 263 aa, Beggiatoa sp.
MKITRSSKTSLTFLTEKKRQELDAIMDEYARLVNFFIEMFWGNELTKKDLTKDITNLPTSWLSARMRQCTAREALGMVLGAKQSAQELEKEAVKPHHSGKKMILSAQIVAVEKSRNDFDYWLILTSIGNKIKICLPIKSHRHMNFFNDWKRSTTVVIHREYVQFSFEKETGKKLTLGHHIGIDVGINKLLAISTGELYGNEVKTQINRIKGKQQGSKTYKAAKKTLSYYLHKTVKDYFQQHDNLRLVVVEKLKNLKQGKKKTR

SEQ ID NO: 11416 - protein, 577 aa, Brasilonema sp.
VARSASPSFITEIPLVVDSKQETELLSRFQAGRQLYNACLNEAMKRLKLVRNSESYQAAKQIPKTKKKERSDAFKKAREQYRYSEYDLHSFATSTSNDSKWIAQKVDSNTQHKLATRAFKASERVMLGRAKDVRYKVPSRFHSLEGKTNKQGLRWKDNYLVWGNLKLKSIIDPANPVIKHGLESPIKYVRLLWRILNGKRRWYAQLVNEGIPYQKPQNYVSDGLIGLDLNISNIAFVGDKYADLLPFAENVPTFQHKIQALQRKMQRSQRANNPDNFEPNFDARKGRKTVVKKGKVKKGKAQWKKSSNYLKASAKKRELERRKAAYAKTQNRCIVNEILRHGKHIKTENISVKGWQKRYGKAICAKSPGFVQSELKRKAESAGGSFINFSTQKTALSQTHLDGSRIKKSLSQRVHRDVTGIPEHHRDLFSAFLSRFVNQDVLLLQDALKEYPGAESLLLEAWQRSINRKQVSASQSRKSDSPFERFSNKGRTSSQIAITSKKLVSTLPESASMRERGVAQHLLSIIAPTFRLKSISSEPFYLVLHQTLRLHLGGMISNLENLLFMSHRVQLQPRQEI

SEQ ID NO: 11417 - protein, 247 aa, unknown
  TnpB Polypeptide
LKEVDSLALANAQMNLNKAYNNFFRNRKHFGKPHFKSKKTGHGSYSTNNQKGSVRLEGNRVKLPKVGWVKLYLHRPLMESSTIKTVTISRTPSGKFYISILVEYENQILPIIPKKFLGLDFAMHGLYVASDEEDADYPHFLRKAEKRLAKAQRKLSKRRNGSHNRDKQRLRVAKLHEKIANQRRDFLHKKARYLVDHYDAIGIEDISVKAMAKYKKGGKFSFGKSVADNGWNMFTNMLEYVHKHVGI

SEQ ID NO: 11418 - protein, 485 aa, Streptomyces sp.
VKKFKPQPGFVVQAYRFALDPNAAQEQALHSHCGAARAAYNWAVGRVTASWWQRKAEETYGVPEEALTEWRPWSLPALRKAFNEAKTTDPRFSAWWEENSKEAYCTGLANASAAFDNYAKSKNGKQRGKRVGAPRFKSKRKARPACRFTTGTIRIDTDGRHVTLPRLGTLRVHEPTRALLARVQAGTARILSATVRHERGRWFAAFQVEVKRDLVRVARPDVAVGIDLGVKTLAVMADSTGEIREIPNPRHLDSALKQLRRASRTVSRRRGPDRRTGQKPSKRWEKASAARNKVHHRVANLRADALHKLTTSITAEYGTVVVEDLNVAGMLKNRRLARRIADAGFGEIRRQLDYKTRQRHATRIVVADRWYPSSKTCSGCGAVKAKLPLHVRTFECDACGLVIDRDDNSAINLAALAAARTTGTGVAGDQDTAPAASKPRGADQKTRATRTRRTASAGRAGGATLPHQRQTETRDRTQTEALTLW

SEQ ID NO: 11419 - protein, 325 aa, Eubacteriaceae sp.
LFNAALFDIGLLQQSRWLQKKDYEWLKEVDKFALSNAIYNMDSAYQKFFREHAGYPKFKSKHANHKSYTTNYTNGNIVVDFENGKVKLPKIKEVKAKLHRDFRGQIKSATVSQVPSGKYYVSILVETEHKELEHTKDRIGIDLGIKDLCITSNGKKYENPKIIRKYERQLEKLQRRLSHKEKGSKNYYKTKKKIALCHEKIRNTRKDYLHKISHEIISENQVIVSENLQIKNMVKDHHLAKGISDVSWYELTRQLEYKAKWNGREYIKIDTFYASSQLCFVCGYQNPDIKDLSVRTWICPQCGAIHDRDINAAKNILAEGLRQIA

SEQ ID NO: 11420 - protein, 494 aa, unknown
  TnpB Polypeptide
MQVRWNYKLQPNRTQQALMSEWLVTLRKHRNYCLAERQRGFESNNQDSDEPVMYAYAAFCNIETHAEFGAFCPLTCPVVKHGVLSAGLTKISKKQLRWGNVSDVQSKRTTELRAENPYYSRINADVLQGNLAKLDTAYAGFFKHQRGFPAFRKAANFNSFQYKPGVAKLTINRDGRRNKRTGERQPCYSRIYLPGLGTMRFLDSREIPETATIRTITVKREADGWYISVLLNLVEELPALNLDIQSSVGIDVGINKLASLSDGSFLENSRFATNKKTRRQLRIRQRRVNRKVKGSKNRAKAGIQVAKLHKQITDKREGYQWQAASKIVKTADAVVHEALNIKGMKARCKPKRLKGRFMPNGQAAKRGLNRSIADAAWGGLFAKLGWLGQKAGKPVLPENPQYTSQECSACGHCSKENRDGEKFLCENCGHLDHADTQASRTINKRAGFKFVSKDIKNLSADCGKVTLVRDDAARLGKRHQGENWNINQILVNSG

SEQ ID NO: 11421 - protein, 442 aa, unknown
  TnpB Polypeptide
MQTVSSYGVELRKQNIPVRQTLEIYRSVVSYLTEIYEQVWEELAEIPDAKRRFNAAEHLVHTTKKNPARFDFDLRFPKMPSYLRRAAIQHALGSVSSYEIRMELWEKSGEKAGKPRLAYENHAMPVFYRDVMYREEKEGKDEAYLKLYDGHDWKWFCVRLNHTDMEYLRKNWSGKKASAPTLEKRHHKYFLRFSYTEEVTLTKTPVKEQIICSVDLGINTDAVCTIMRADGTVLGRKFINHPSEKDRMYRTLGRIRRFQREHGSAQSRGRWAYTKRLNIELGRKIAGAIVKNAEENHADVIVFEYLEMQGKISGKKKQKLHLWRKRDIQKRCEHQAHRKGMRVSRVCAWNTSRLAYDGSGSVSRDPKNHSLCVFQTGKRYNCDLSASYNIGARYFIRELLKPLPVTERSLLEAKVPSVKRRTSCVYADLKELHLQMEILKAA

SEQ ID NO: 11422 - protein, 546 aa, Mycobacterium sp.
MRTRGRAAKVAAATGGAHLGGTPKPDGTPTLSRYVDIGADFETYRVAVESVSVLFDLFDGDADGYAATGSVGEKLPSGWVVTAAKFEVEWPAEAQRAGLVRSHFGGRRKAFNWGLARVKADLDAKAVDPSHESVGWDLGSLRWAWNRAKDEVAPWWAENSKEAYSSGLADLARALDNWSASKNGTRKGRRVGFPRFTSVRRDAGRVRFSTGTMRVEDDRRTITVPVIGALRSKENTRRVQRHVASGRARILNMTLSQRWGRLFVSIGYALRTPETARTPAQPTVRAGVDLGIRTLATVATIDTVTSTETVVEYENPAPLKASLAARRRAGRDLSRRIPGSRGHRAAKAKLTRLDRRCVHLRREAAHQLSTELARTYGHIVVEDLDVAAMKQGMGRRAFRRAVSDAAMGLIKPRLAYKTSRHGSTLTAADRWFPSSQIHHGCYQPDGTPCRLEGKGRIDKHLVCPITGETVDRDRNAARNLRDWPDDASCGPVGTTAPSVPGPTTTVGTGHGADTGSSGAGGASVRPHPCGAGRGEAKTPTPQGDAA

SEQ ID NO: 11423 - protein, 318 aa, unknown
  TnpB Polypeptide
MLFFEYKAYGKQQQFDAVDEAIRTVQFVRNKCLRLWMDRGGNSQYELNKYCTILAEEYPFANELNSMARQASAERAWSAIARFYMALASSRVTRPTQCLDNCKKQIPGPKAKPPLATWREPPGRLAGYPQFQHDCRSVEYKTSGWKLAKSRKSITFTDKKGIGKLKLKGTRDLHFYQPTQIKRVRLVKRADGYYVQFCVQVDRTEFVEPSGIAIGLDVGLNDFYTDSNGKTVDNPRFLRKGEERLKKAQRLVSKRVKKSSNRRKARLILSKRHLKISRQRKDFAVKLARCDLQVKRPSRLRRLENQKYGEESQSSKVD

SEQ ID NO: 11424 - protein, 398 aa, Nocardiopsis sp.
VTANHVKRAFKYRFYPTDAQAAELSRTFGCVRKVYNLALAARTEAWTRQERVNYNQTSAMLTAWKKTEEFAYLNDVSSVPLQQALRHLQAAFTNFFAKRAEYPRYKSRKKSRKSAEYTTSAFRFRDGRLTLAKMAEPLDIVWSRPLPEGVSPSTVTVSQDAAGRWHVSMLCEDPTVEPLPPADAAVGADVGLDHLLTLSTGEKIANPRHERKDRARLAKAQRVLAKKAKGEGANRRKARRKVAKVYARIADRRRDGLHKLTTRLVRENQTIVIEDLTVRNMVKNRSLARAIGDAAWSEFRSMLEYKAQWYGREVIAVDRFFPSSKLCSVCGALQGRMPLHVRTWTCGCGATHDRDVNAAKNLLAAGRAVSACGAGVRPQRSAPGGRSATKQEVSRREP

SEQ ID NO: 11425 - protein, 228 aa, Escherichia sp.
VKRLQAFKFQLRPGGQQECEMRRFAGACRFVFNRALARQNENHEAGNKYIPYGKMASWLVEWKNATETQWLKDSPSQPLQQSLKDLERAYKNFFRKRAAFPRFKKRGQNDAFRYPQGVKLDQENSRIFLPKLGWMRYRNSRQVTGVVKNVTVSQSCGKWYISIQTESEVSTPVHPSASMIGLDAGVAKLATLSDGTVFGPVNSFQKNQKTLARLQRQLSRKVKFSNNW

SEQ ID NO: 11426 - protein, 396 aa, unknown
  TnpB Polypeptide
MIIKQACKYELRPKAGQERLMRRFAGCCRFVWNKALELEKKAYEENGKRLGYYKLAGMLKEWKKEEETSFLAEAHSQILQQSLIDLNRAYENFFAQRARQPRYKKKGRHDAFRYPQGFKLDEEHSRIWLPKIGWVRYYNSRPVKGTIKQVIVSRCAGKWSVSIQTEREEPIHAHPSKSAIGIDMGVARFATFSDGSFIEPVNSFRKEEKKLAKLQKELARKEKYSRNWYKQIVRVQRHHHKIANIRKDFLHKITTSISKNHAVVVLEDLAVGNMSRSASGTLDAPGKNVSAKSGLNKSILDQGWYEFRRQLAYKMAREGGKLIVVPAQYTSQKCSRCGCVNKDNRKTQAEFKCIACGFECNADHNAALNILAAGQAVTACGEAPCLVEAEPAQGSS

SEQ ID NO: 11427 - protein, 379 aa, unknown
  TnpB Polypeptide
MISYKYNIYHSKKTKYLEKMLRECCFVWNHALALQRRYYKLFGKYISVGKMKKHFAKRIKRNLLHSQTTQEIIERLDESYNRFFKKLAKRPPKFKSPEKFNSFVFRQGGFTLNGNCLTINKGNKRFRFSYSRVYEGNIKQIRIVRETCSRFSLIIVTDHNPINSYRKTHDGASIGLDFGLKTYLTKSDGSKIDSPLFFKQYQNKIRKLNKRLSNAKKGSNNRRRKLFELQQTYRKINDLRSDFQWKLAHQLCKQYDYIFIEDLSIEGMKRLWGKKISDLSHSSFINKLTYVASKYGVTVHKIDKWYPSSKTCECGCINKGLSLHDRTWACPACGAVNDRDILAARNILRKGISELESKSNSNDSNIEVSCVGIQESHSL

SEQ ID NO: 11428 - protein, 388 aa, Methanobacterium sp.
LIRTFKYKVKTDKQTEINANEWLELCRQLYNLALEQKRDYWNCRKQYLRYYQQGPDLVELKKEFIQFKKINAQTLGYVLIKLDQAYNTFFSNLKKKNGRAGLPRFKSKKRYNSFTLDQNGWELKNNILTIFKVGNFKLKLSRPIEGKIKTITVKRTSLGWFTNFHCEIRKTNRVCKNPTKEVGIDLGITKLLYDSDNNFVDNPKYYINSQKQLRRKQRSLTRKIKNSNNYKKQLLIVQKQFEKIKNQRNDFQHKLSTSYVDKYGKIYVEDLNILGMIQNHNLSNHISDSSWGTFINKLFYKVEETGGKLIKVDPRYTSQTCSNCGYIDKNNRLTQSEFKCLICNHTENADYNASKNILRLGQDHITKLSSIEQECYKTSGILEGVNKH

SEQ ID NO: 11429 - protein, 442 aa, Ruminococcus sp.
MQTVSSYGVEVRKQNIPIRQTLGLYRSAVSYLTEIYEQVWEELEEIPDAKRRFNAAEHLVHTTKKNPACFDFDLRFPKMPSYLRRAAVQHALGSVSSYKTRMDLWTKSGEKTGMPKLVYENHAMPVFYRGVMYREGAEGKEEAYLKLYDGHDWKWFCVRLNHTDMEYLRKNWSGKKASAPILEKRHHKYFLRFSYTEEITLTKTPVKEQVICSVDLGINTDAVCTIMRADGTVLGRRFIDHPSEKDRMYRTLGQIRRFQREHGSVQSRGRWAYTKRLNIELGKKIAGAIIRYAEENHADVIVFEYLEMQGKISGEKKQKLHLWRKRDIQKRCEHQAHRKGMRVSRVCAWNTSRLAYDGSGRVSRDPENHSLCIFQTGKRYNCDLSASYNIGARYFIRELLKPLPATERSLLEAKVPSVKRRISCVYADLGELFLEMELLRAA

SEQ ID NO: 11430 - protein, 412 aa, unknown
  TnpB Polypeptide
MTEFSKTMKLHIHPDDDTARLFRELTECYSEACSYISEYVFHHGFILNFMLLQEELYDEIRARFGLKSQMTISSFKTVAARYKTVREQLQRNPFKYQDEDGKWIYISRTLEWLMKPIVFSRPQADLVRGRDYSFVDNGTMISVNTLGKRVRVSFDVPEYFEKYFENGATWSFGTAKLVSLKNEWYLHIPVTKTISDEPDTIKPDHVVGIDRGLRFLVTAYDEKGNVEFVSGQDVMRKRQTFNNVRAELQSKGTKSAKHALKRISGRENRWMSDVNHQISKTLVNRYGSNALFVIEDLTGVSFDEQNLSHHKAKGRNELRSWTFYQLEQFLTYKAVEAGSYVIKVPADYTSQRCPKCGRIHKENRNHDTHEYICDACGYRSNDDRVGAMNLYTLGTLYVSGDSNPRFGPRKIN

SEQ ID NO: 11431 - protein, 406 aa, Thermocatellispora sp.
MARTVKRAFKFRFYPTDAQAALLLRTFGCVRFVYNHALAERVRAYRVEGRPMSYGDMSAALTAWKRTPEMAFLNAVSSVPLQQALRHLHAAFTAFFAGRAGHPVYKSKKRSRASAEYTRSAFRWRDGRLILARMDAPLDIVWSRPLPEGTEPSTVTVSRDRAGRWFVSILVEDRVAELAPNGRAIGIDMGLQSLATLSTGEKIAGLRNERTDAVRLARLRRSMARKVKGSANHGKARLKVARAHARIADRRRDHLHKITTRIVRENQTVVIEDLPVRNLLGNHNLAGAISAASWRQMRDMLVYKAAWYGRELIVVDRWFPSSKTCSHCGAVRECLPLAIRSWECACGAVHDRDVNAARNILAAGPAERVNACGGPVRPSPRKRTRRGSKKQESLPVRAGIFWCEPR

SEQ ID NO: 11432 - protein, 475 aa, Butyrivibrio sp.
LAKGITTVYRTRQFRISKNNRLYGYCSDICRACAILYNRANFIIRQYSSAVEAMASYRPLYPNQMQVFRLVNNTLDGTKYQVKGSWLSYNALDYLLKTTKDKAYYGLPSQANQQILKLLLRDYKSFFEAVKAYVKTPSAFTGRPRMPRYVGEGKYKTAILTNQICRIKDDSLIRFPGTNDMLRLGEDFPSGKLKEVRIKPHGKDFVIDVVMDVETRGMATADDKEILKDLADMADISGIHVMAIDPGTDNIAAVVNNFGESPFVIKGGTIKAINQFYNKEMGRLASCAMRCNKRYRTRKMSILTEKRNRRIKDQFHKISRQLADYARDNRVDVVVMGHNVFQKQEADMGHISNQNFVQIPMLIFADMLRYKLAEYGIRFALTEESYTSKADFLAMDPIPMYEKGKNKEYSFSGRRIKRGLYRHYDGTLTNADINGAANILRKVFPKVTQWDRGIVDMPCSSGCHRHTEGSCRTAA

SEQ ID NO: 11433 - protein, 328 aa, Thaumarchaeota sp.
MICIISGFFVTMKGRLFVPLRRDKYFDLQLNHHVIRTLEGKRMRSLTITPDSLSFCYSQDIEEARVRTVYGVDRNEKNLTFGDSSKVVQVDMAEVVKVKQTTREILGSFRRNDVRVRGRLARKYWKRANNRTGQLLHAATNIIVDAAVRDGAALAIEDLTDIRKMYRKGNGQGEDYRFRLNSWPHRKAKHMLEYKSAWKGVTVIPLTKSETYGSSSTCSACGEKLHNPAKGDVAHARMLWCPRCKVWMHRDVNGALNLSERGLARFVSSHPQSGEKEESRSQASTSLVQAGEEGLAGEAMRGNGTKTLILRVDASKLIRRVSRRIDRT

SEQ ID NO: 11434 - protein, 379 aa, unknown
  TnpB Polypeptide
MQQVTITAKVQIVVTDKDKVLLDETGSVYRDACNYVSDYVFQTHDLKQFSLNKFLYSTLREKFGLKSQMTQSVLKTVIARYRTILENQNEWIQPAFKKLQYDLVWNRDYSLTQNCFSVNTLKDRVKLPYFAEGMSKYFDHTIYKFGTAKLINKHGKYYLHIPVTYDVEESNIFDICNVVGIDRGINFVVATYDSKHKSGFFSGKTIKQKRAHYSKLRKELQMRNTASARRRLKAIGQRENRWMQDINHCVSKALVESNPKYTLFVLEDLSGVRSVTERVRTKDRYVSVSWSFYDLEQKIIYKAKQNQSLVLKVDPRYTSQCCPVCGHIEKANRNKKIHLFACKNCGYKSNDDRIGAMNLYRMGINYLTDSQVPSIVTAE

SEQ ID NO: 11435 - protein, 416 aa, unknown
  TnpB Polypeptide
MNLVEQHVIGRDDPRFAAIDAAAFKSKNLYNAALYEIRQAFIHRGTYLNYSEMDRRMQSHEAYRALPAKVSQQVLKQLDDAWTSFFEALDAYKENPSKFAGRPRLPKYKHKTEGRNVLVYTLQALWGGRSKKGIQRRIRPSGLPIEVQTRQQSIDQVRIVPRNGYYVVEVIYSKDPIQTPVDPSFCIAIDLGVTNLAAITSNREGFVPRLVNGRTLKARNQWYNKRMKELKMCLPKAERDCVTKQMQRITNKRNRQMDHYLHAASKAIIDLMVKEGAGTLIIGKNPLWKQEVDNGRRNNQNFVNIPHARFIDMLTYKAALVGIQVEIQEESYTSKASFLDLDPIPTYRSDDETEYPFSGKRMGRRNRLYRTKDGRKICADVNGSYNILRKRRPDAFSEAKGVAAYVVQPLRLAVTV

SEQ ID NO: 11436 - protein, 359 aa, Alkalibacterium sp.
MLKAYKYRLYPNEEQKNYFANCFGCARFIYNQMLSDKIDHYKETKQMLNNTPAQYKEAFPFMKAVDSLALANAQQNLERAYKNFFRDKSIGFPKFKSKHRSKASYTTNNQGGNIRIEDGKIKLPKIGCVKLVQHRTFQGKIKSCTISMNKSGNYFISILVESADETPQLVERKIGIDLGISDFAITTNDLGETEKHKNPKPLYKSEKKLKKAQRSLSLKQKGGKNRNKARLKVAKKHEKIANQRKDFLHKLSKKITDENQVIVIETLSSKNLMKNHKLAKSIGDAGWYEFVRQLEYKSKQKGRTLIKADRFYPSSQVCSSCGHRDGKKPLNIREWDCPTCGEYLDRDINASKNLLALAK

SEQ ID NO: 11437 - protein, 388 aa, Alkalibacterium sp.
MLYGIKGQLTLKPTQQAQVLQNIGNARFVWNQFLNMWNQRYGNNPSLPTLGEYDLNKLLPTLKKEYAFLKLSDSTSLQQVSSELAGAFKQFFTNKGHFKHPRFKGKYHARQSYTSKNVNNAIRYENGYLRLPKIGFVRFRCGQTIKGNIKRATICLTPSGIFECSLLVEDESQVITTKTNQSVGIDMGVADLMVLSTGDKMPTIRYDKLLSGKRLYWEKRVARRARLAKAKDIPLSEAKNYQKAKQQRAKVFQKEKNQRMDRLHKLTTTLVKEFDVIVLEDLNTSKMMKNSQLARSIAAQSWREIRTMLAYKCVKYGKELIVVNPYKTSQICSSCGHDGGKQELSIREWLCTSCHDHHDRDINAAKNILSIGLGQALVNQPKPLPVYP

SEQ ID NO: 11438 - protein, 521 aa, Streptomyces sp.
VHDRSVHAAGEVSAQDAGGDALEAVHEARHGDLRRVVHEQVHVVVLAVELDQLGLEILAHLPHGRLAHGQHVVVEHAAPVSGHEDQVNVHRRNHVSAAPVLAIGSHRPKDRITVVQLRYNFRVYPEPAQRHALARAFGCARVVFNDGLRARQEAHAAGLSYVKDTDLQKQVVTAAKRTDERAWLGEVSSVVLVQSLRDLHTAYRNFFNSVTGKRKGPKIAPPRFKSKRDSRQSIRLTANGFSLRDNGRLYVAKVGDLRVRWSRRLPAVPTSVTVTMDAAGRYWASFVVDTDPDFFPETAAETGIDLGLSAFAVLSDGQKIASPRLLRRAERKLKRLQKDLSRKAKGSKNRAKARIKVARQHARVADRRRDWHHKESTKIVRENQAVYVEDLAVSGLARTRLARSVHDAGWSAFVGMLEYKAARHGRYFSRIGRFEPTSQVCSACGIKDGPKPLSVREWTCQECGTVHDRDINAARNILAAGRADRLNACGAKVRRAPVPAPRREAGSPQKGQTAQVGIPVL

SEQ ID NO: 11439 - protein, 576 aa, unknown
  TnpB Polypeptide
MQNTEVKSEAGLKQFHKVTNRHVLVLEADIQEQDKRRLLHMSNTIRIAGNELIAIMKRQYEQLLRTKRYRYLQEMYAKAKKAEDKKQMGVIADIMTDMQKSYHVTWEFCRKSMIEINQRYKINSIFALSKAEDVWQAVEKCLYSDGHTIHFKKYGDYPEIRAKQVNRGIVVSADNKGIVLKIGKMRFSPIVNKPKHIKTRKGSRIQVQESHDIFAESEMEAILSYLSNPEVVDKAALDLYNKKGRVMDTFRPCFASISFKEIRGNMRVYIHITIEGRPKPKHKKDGTMRHQYGKGFVGCDIGPQSIAYTSKNEVGLKNLAERGSSIKSREQKEARLLRKMDRSRRAANPDNYNDDGTIRKGKKTWKKSNRYKKLCCQYRNICRIASENRHFSINEEVNHIRALGDIFVAEPKNTKKLQKRAKKTARQDTASIIKKSDGTEISVHKYKRKKRHGKSIKNRCPGYFQAQAKAKFERTGGTYIEAPVTYRASQYDHTCNKYIKKALSQRMYELANGTRVQRDWYSSFLMYCIASDLQSISRYKCKRYFDELYAKYLKVEQHIINNKIIVMNSGIKLKSA

SEQ ID NO: 11440 - protein, 448 aa, Natronomonas sp.
  misc_feature (285)..(326): Xaa can be any naturally occurring amino acid
MYYAYKYRLKPSDAHREELDRHRDICRQLYNHTLYRLNEYQDEHGELPSMTSLRSELPDLKEWWDDLSDVYSKVLQTVVERLFDNLKGLSKLKENGYGVGQLKWKPPREFRSFTYSQSGFKLDKKGGQTVLSLSKLADIPIRLHRAIPDDATLKQVTVKKEPTGEWFATFGVEMDREPPEPPENPEKCVGIDVGILTYAHDTDGAAVGSLDLSDERDRLEREKRKLSRKQHGSNNYEKQRRRVAECHADLRRKRRDFLHKLSAYYAREYDLVAVEDLNVKGMMEXXXXXXXXXXXXXXXXXXXXXXXXXXXXXXXXXXXXXXXXXXEGTHFVAVNPRGTTKECASCGVSTDKPLWVREHSCPACGFEADRDANAAWNILSRGLEDVGVGHSESTSPEIFEFWCANESQGDSLTPVETALPVDTPVSAKRVVEAGSPTLKERTASAVSE

SEQ ID NO: 11441 - protein, 422 aa, Gloeocapsopsis sp.
MLTLNYSYRIYPDSEQVALLDEWLETCRLSYNYALRELKDWIASRKCPIDRCSLESEYIMPADYPFPGYHKQQNNLPKAKKLFPRLAAVPSQVLQTNIRRLHDAWDFFQKRGYGFARFKKYGQMKSILFPQFKVNPITGWQLSLPKLGKVQINLHRPIPDGFVVKQVRIVKKAMGWFAIVSISSDVEIPPPLPHGHFIGVDVGLLNYLATSDGFIEPGRKFFKTEHRRLKVLQRRLSKKVKRSQNYEKARKRVEKQHNHIYFKRKDYQFKLAHKLCNMADSIFVEDIDFRIMAKGFLGKHTIDAAFGQFRSILKYVGWIRGKFVAEVDHKGSSQVCPNCRIEVRKELGDRRHSCPECLYECDRDIASAQELCNRGLETYPGTLEKQEIDSQVVLSGVMSLDKWRRGVMPSSDVGKPALYSQG

SEQ ID NO: 11442 - protein, 367 aa, unknown
  TnpB Polypeptide
MLKAYKYRIYPNNEQKIQIAKTFGCCRFVYNQTLVYRKEVYEKEKKSVSKTDCNNYCNRQLKKEYEWLKEVDKFALTNAIYNMDAAYQKFFKEHAGYPKFKSKHDNHKSYTTNFTNGNITVDFGCNRVKLPKLKGIKAKLHRNFSGQIKSATISQVPSGKYYVSILVETEHTELPHTNQNTGIDLGIKELCITSDGKKYENPKIIRKYEKKLVKLQRQLAHKEKRSQNYYKTKKKIALCHEKITNTRKDYLHKMSHEIISENQVIVSEDLQIKNMVKNHHLAKSISDVSWHELTRQLEYKAKWNGRKYVKIDTFYASSQLCSVCEYQNTETKNLSVREWICPVCGTNHDRDINAAKNILEEGLRQIA

SEQ ID NO: 11443 - protein, 359 aa, Aphanothece sp.
MLLSIKTKLKLNKRQKVLMAKHAGLARYTFNWGLAAWDDLYKAGLKPNKYLLKKFFNNHVKPECVWIKEKGVCQKVTQYAFDNLGHAFDRYFQKLGEYPKFKKKFKDDSFTIDAGGKPLAVGGTSVKLPTIGWVKTYEGLPHVTTSKLTISRTADDWFIAFASLQEHIPEPKKYEVVGCDVGVKTLLTLSTGVTIPNPKHYRKELAKLKLLSKQLARKKKGSKNRFKARMKLAKHHARIANLRKDTLHKVTNYLCKNHAMIVIEDLNVKGMMANHKLASAIADCGFHEFKRQLTYKSEKFGNQLIRSDRWFASSKTCSNCGCKKEKLTLSDRIFECFDCNFSLDRDLNAAINLSRLAKA

SEQ ID NO: 11444 - protein, 555 aa, unknown
  TnpB Polypeptide
VSLVNDRQTNYQTSGLKATETKTRKGGNSMPKARKRKDSEFQTTLTKSVFLYGNPNKGKWIVLQQIQDSFTKLVNRDIQILSEDRSVLLQIVKNDKKDPDMRRLEKSLRPSGINSAFCQNAFDMAVTHLSNRMDNIRKDLMQEDTGIFSRSKVLFAMSILQCEKKDMVTAMQSLPQKFHKECAEELTQMSDEEFGFRQAEFLVKYQTACLEYQIPVLRNCSVPLDSRLMRMEVSNHTAMPYVIFISNPFHPGERIAVPVNTSRHSLHKIQTNHMAGTVMMQVRNSVLRIGWSYDAEKKQPKTTTCTGVDTGITDSFYTSDGRAIGSMSEVIGFYHKEVEPAFAALSDLKNKKRAIRHYLRTHDVPEDVRRSLIKNMDRLEHMIRTMSIPYRKKRHYYNLLDQEIKNSVKTYMENLSPDTLTVVEKLDIKEFQKSRQVNGMFSVFARGKLQKTLLSTLNEKGYDFLEVVPDFTSQVCPVCQSLDPKNREHKTFFCTCCGYKDDADHVGAVNIKTRAADQEILDLCQKYQYKHKELQKAMKIVYAGRNQTYRKAASA

SEQ ID NO: 11445 - protein, 419 aa, Anabaena sp.
MRLSYQYRLRLTKQQIATFEHWLELCRRQYNYRLAERFNWWEQNRCDVNSCSLEVCHLPQLKDKPNYYSQKRDLSNTKALFPDYKEIPSHTLQDLIARVEKTFDRWLKGDSNAKRSCRPRFKGKGRYRSLTFPDPIKSEHIQGKFIQLPKIGKVKMILHRSIPDGFKIKTATITCKADGWYISLSLEDVTVPSTKVDVTPVMDNTVGIDMGLKSFLVTSDNQEVQIPQYYRQVEKRLKRLQRQLSRKKKGSNRRQKAVKRVAKAYLKVANQRKDFHYKTAIWLLNQSQVIAHENLNIKGLAKSILAKSITDAGWGQFLQILNTKAASAGCLVVAVNPNGTSQQCSDCEATVLKTLSDRWHNCQCGASYCRDHNAARNIKHRAEGHPVHIKAQSMSDPLGGVAEKPSLSRMAARGVCHNR

SEQ ID NO: 11446 - protein, 351 aa, unknown
  TnpB Polypeptide
MAQQILKEVDGTFKSFFRLLKLAKKDKYNHNKIHLPRYLPMDGYSTLIIGFIRLHGNQLVLPYSRQFKQQHEPVVITIPPILLNKRIKEIRIIPKADARFFEIQYTYEVREEQRNLNKKHALAIDFGVNNLAACVTSTGKSFLIDGRRLKALNQWYNKENARLQSIKDRQNFGKGRTNRQKTLTRKRNNKVNDYMSKTARYIINYCLTQDIGTLVVGYHESFQKNSRLGKRNNQNFVNIPFGKLCRKLEYLSKLYGIVFVKQEESYTSKASFFDHDSIPVYQNEQTGKVVFFNCQSSGRRIRRGLYETSSGKRLNADINGALNILKKSSVVSLAALYSRGAVDTPIRIRVA

SEQ ID NO: 11447 - protein, 442 aa, unknown
  TnpB Polypeptide
MQIISSYGVELRKQNITIRQTLEIYRSAVSYLIGIYVQVWEELAEIPDAKRRFNAAEHLVHTTKKNHACFDFNIRFPKMPSYLRRSAIRHALGTVSSYKTRLDLWEKTDGKSGKPRLVYENHAMPVFYRDVMYREGAEGKDEAYLKLYDGHDWKWFCVRLEHTDMEYLRKYWSGKKASAPTLEKRHRKYFLRFSYTEEVTLTKTPVKEQIICSVDLGINTDAVCTIMRADGTVLGRRFIDHPSEKDRMYRTLGRIRRSQREHGSAQTQGRWAYTKRLNTELGKKTAGAIVRYAEENHADVIVFEYLEMQGKISGKKKQKLHLWRKRDIQKCCEHQAHRKGMRVSRICAWNTSRLAYDGSGMVTRDWENHSLCTFQTGKRYHCDLSASCNIGARYFIRELLKPLPATERSLLEAKVPPVKRRTSCVYADLKKLHSEMELLKAA

SEQ ID NO: 11448 - protein, 622 aa, unknown
  TnpB Polypeptide
MRDLSRKFFHRGVDKPLLLTYVYDGQSEMKKSIEFKLRTSSAHQRLLLKLLDKGKGIYNLGLSECKKRLNRLRSDKEYQTFNSLRHDLKRANLPTRQVDQLLRDIVTKRYFLTKTDIEKYVKDNAGYLITGFNSQFAQTLADRAFDTIQKVLYGKSKKVRFKGKWDNILASVNSKSTDTGIMFDSKSFSISYMGVSIPLVLDYRKDDGYHKWYLEQIVEDYEKHKAFNVSYIRIVRRVIKGHDVFYVQFVINVRPIGMTDEKAKQVNLTIAEHNQSLISKSFAGGNPTNRLRLKHAVSSIIEFPTGNKTVEMIRELGLYGQFQSCIDMGPKHFAAFLRGEHYSIAILQPIFDRLKEYADELRILQRKLDRQRRANNPDNYNTNGMIRKGKCLRWKRSQGYIETNNRIKELYRLITEMRKSAIRELSSIIAALSKKVSAEDLSYKTLQKNYGRSVGNFAPSYFMKDIFSKAESAGNENVEIPLIAALSQLCVCGARKKKKLSERLHECNCWCLAQRDVLSAYLGTYYVPNPGEWEGSDPARQYHSEDRLLLTASHRVYPSQTASRRGQGIGFALGLDKRPSSGSCGKTGEYPSENSVRKLMVCKDLKSLIGELGSLSSRILGF

SEQ ID NO: 11449 - protein, 622 aa, unknown; identical to SEQ ID NO: 11448
  TnpB Polypeptide

SEQ ID NO: 11450 - protein, 348 aa, unknown
  TnpB Polypeptide
MQITVKLRLRDRHVADLNRQARAVNVVWNYCNERQRQAVRECRRWLSYPVLAALTAGTGSDLSLHSHTIQRVCRAYVEAHRMHKKPWLRWRGRRSLGWVPFNTGHVAFDGSAFTFRGVRYETMHLRDILAGATIGAGSFNADSRGRWYINLPVAVPEATSASIQHVGIDLGLKDLATLSTGEKIAPPCFYRASEQVLATAQRARKTKRVRAIHAKAADRRRDFLHQQSAKIVKTHGLIVVGDVNASTLAQTAMAKSVLDVGWSSFRAMLRYKARLRGGGACLEVSEYGSTQTCSACGSVPSSRPRGIAGLRERVWTCSDCGTVHDRDVNAARNILRLGQQTLGGGAHG

SEQ ID NO: 11451 - protein, 397 aa, Clostridioides sp.
MIKAIKVRLYPTKKQEVLMFKSAGISRFSYNWGLAFLNKYYEENNKFLQIDKLRKEFTRLRNNNEFSWLKEVSSEIPQQALKDLGESFKKFFKKESLYPRFKKKGKCEVSFFHLNNKFVVKENYIKLEKIGYVKMKDEGRLPIGNYKKDKIKVLNPRVKFNGKYWYLSLAMEVEEKTNIKLTNESVGVDLGIKDLAIVSNIDEPFKNINKSKEVKRLNKKLRKLQRQVSRKYDMLKSGNTFQKGEKLVKTKNIIKVEKQIKLVYKKLSDIRLNHIHQTTNTIVKTKPCRIVVEDLNVRGLLKNKHLSKSISEQCFNKFINILEYKCKWNKIEFVKADRFYPSSKMCSCCGTIKKDLKLKDRTYVCSNEKCNLVIDRDKNASINLANYKSNYKCGYLN

SEQ ID NO: 11452 - protein, 440 aa, Moorea sp.
MEFKAVLKEPQKLAINEAIRTARFVRNKVLRYWMDNRGAGKKELYRYNTQLRDEFKFVKDLNSHACQASVENVERAIKRFFDNCKKKSPGKKGYPRFKKHSRSVEYKQSGWKLSPDKKSIKFTDKKGIGRLRLKGTWDLWRFDSAKPTLREQKLIKRVRIVQKADGYYVQFCVKIDSSEQLEATGFTVGLDVGLKEFYTDSDGYSEPNPRFYRKGEKRAIFYQRRVSRKKKGSANRNKAINRLGRQHLKISRQREEHAKRLVRSYRKIVEPYYKRFNPFMQSRTPIKAPLSKVSSPARCVIRSNDLVAYEDLKVKNLVKNHCLAKSINDAGWYQFREWLEYFGQKFGRITVAVNPAYTSQNCSSCGEVVKKSLSTRTHVCKCGCQLDRDHNAAKNILTRALSTVGHTGTFQNAWGESTSTLLGSDLVEQVGSLNRESPGF

SEQ ID NO: 11453 - protein, 258 aa, Moorea sp.
MIVREAKLLNGSKTQYQALDSAIRTAQFIRNKAVRLWRDQPKVDKARLSLLCKELAHNQEYPWVKKLNSMAPQASAERAWNSISSFYRRCKEGVNKKGYPKFRKHCRSVEYKTSGWKLSSDCLTINFTDGFKAGRFSLFCNRETREDLFRLKINRVRVVRRADGYYAQFCFDANRFDKRNYTGNVVGIDLGLKYFYKDQNDNVAIYPKYLRRSEKRIKKLQRRLSRKFVKEKKPQSNNYHKARIRLGKTHLLALACRR

SEQ ID NO: 11454 - protein, 423 aa, Ktedonobacter sp.
MSIKAFTYRIYANTATTEKLHWVLDRCRELYNAGLQERRDAYEMAVKRHPNYYDDQARKQLTREYALGYYEQKRELVDIKEERPEYQEIASHVLQDVILRLKRAYDNFFRRVHNGEQPGYPRFQGRNRYDSFTYPDGAGWKLDAVARPADKKGIVRVNLKLSKIGTVKLHLHRDIAGTIKTLTIKREGEHFYAIFTCEIGKPDPFPTSHEDVGIDLGVSHYAALSNGEFIDHPRYFRKAEKKLAAAQQALSRKKRGSHRRKKAVQRVATCHRKIANQRKDFQHKASRKLVNQYQVIVFEDLRVKNLTKAPAAKQDENGKYLPNGASAKAGLNKSILDAGWSTLTAMVSVKAAWAGRTVVFVNPFMTSQLCSGCGVVVKKDLSERWHSCSCGIELDRDTNSAKLILNLGYQQLSVGTRPTSATA

SEQ ID NO: 11455 - protein, 363 aa, Deinococcus sp.
MAFNDLDTYSTRNHKESYPKLDALFDGQPSQLAKCGPRGRLFDLPTGLHVTALDSNYLQIGDLVIRTEVHALPSAPLIAVIDASPNFRQYTGLDELLTILRDPDANVTLFRERITDVVARGLHAGQPPQLVTPSSGFTAVWHPARTQFIRTPDGHWFTRLAFELTPTADLEPAAQLTTFGLDLGSSPVVCAAGGDGRVEMFGGPLPLLNALRRRDDYSAEERRVLRLLTYAAGREEAEAAIRFLARTASMVYAEQLTIEGMWGGFIATGRLQATLDFHFSWLPQALFRAGVPFERVNARGTSQVCHVHPDTIGKRDGKRFVCPRCVGVQHVDVNAARNVHARGLRQYGVRPSFHWRRQRRRAA

SEQ ID NO: 11456 - protein, 375 aa, unknown
  TnpB Polypeptide
MKMFKYRLYPTKSQRTKMQTILDCCRWVYNKTLDLRKKAWEERQESLSLYDTNKMLPDWKKEHPWLKDGHAQTMQNAQVRLDLAFQAFFRRVKTGEKPGYPYFRGKDRYDSFTYPQEKSNWRCLDDERVRLSKVGNVKIKMHRPLEGNIKMLTIKRDRLGNWWAAFSCEIEPEPLPPTPDVVGIDLGLTHFATFSTDEQIENPRFFRQDEKALAKAQRRLSRCEKSAPEYRKCKRVIQHIHQRIANRRSDFAHKLSRKLVNSFQIIAFEKLDIQDMQDGNWCSINKSIGDTAWGQLVALTQCKAEWAGRTVVTVDPRNTTQMCSGCNQIVKKDLSVRVHDCPFCGLVLDRDHNAALNILARGLACVGSIPRSFPL

SEQ ID NO: 11457 - protein, 410 aa, unknown
  TnpB Polypeptide
MNTGESYMAELTYNAEIRFRTKEDHEYWSSLLALSREAYNRCANILDSNNVHIDLQSVHKAVYNILREEYPTIPSQGVIKIYKECISAFRSIKSNGHNKHKIPEKTGLSMRLDKRLYSKFNRNSIALCSGKSCRRAVADIVGYDRLDSLFVQYTTADPLIFMRNGRFFLAITFNVPDVPLYDDNCIGLDMGERRFAISSDGIMFHDKEYNARRRKLRYLKRCLQKKGTKSAHRHSRKLSIKEQNQSTDMCRKIANAVIQSTSASIIVMEDLSGIKKKTSKSKEGFKRKSHNRRMHQIPFYKFKQILSYKAPLYGKTVETVSPFMTSQIDCTINKKEGIRKNRRFYSTNGTVLDADWNAAINIARKSKHPFSFKMPLDGALRTWKAGCMSTTQSYISLPAETTGAVQAHRL

SEQ ID NO: 11458 - protein, 445 aa, unknown
  TnpB Polypeptide
MKASVKLRILPDDMQVSTIMKTCGCTRVMFNTCLDTWTGNYQAWVDGGKQEGQFDSSLPTLRQLKEQHPWIAEADSIAVTSAQMDFKKALDSWSKSRKKLRKGEKVGFPKHKKKGKCKYSYRTCNQNGSIRFNDDFTQIKLPKLGWVDVVVHRPLPNGTIGRVYVSMNKAEEFYVSIVFDVEDPAPVAKKVDHTDNPKVVGLDMSLSRFCVSSDESDDAIAKYVRNYRKEEEHLKKLQRVLSRKVKHTEVEIHGRKVKVETRNHRKARLKLARAHLKVSRRRREFCIKMARYFANKYDLICIEDLNMRAMSQCLRLGKSVMDVGWGQFTRWLDYECQKFGAALIKADKWFASSKTCNHCGSVNKDLSLSDREWVCPVCGCVIDRDRNAAMNLMGYAKERINPVGTSGLDDRGVLGLARETVSDTMPEKGETSSKTESKEAAKSSA

SEQ ID NO: 11459 - protein, 413 aa, unknown
  TnpB Polypeptide
MMRSQKIRLKLTKEQENLAFWYSKVSRNFWNLLVDIDKRNNKGEFDEILNKNGNKTYYSKFHNRDVYKLNQSDYLNLAKIVVAKNSEEDSEKWSWYYQPNQSFIYNYLSRELVKIRRQNKGKLNFRSMDKIQPNFNVMCCISANKKRPSRIYLKENGKLQIPTIGDVSFGSVRKGFDLSCKKQVANISFDGKYWYLSYTEDIENSVTNLPDYTDGLGVDLGIKTLATVSDGTAIPNIKTFRRVRILNKRLKRLQRKVSRKYIINKCNKHNKTKNIIKVERQIKLIHRSLKNIRINHIRKFVSELVKKQPQYIAIEDLNVKGMMKNKYLAKDIANCSFFAIREHLIRKATERRIAVRLVDRFYPSSKTCSHCGSYKKDLKLNQRVFHCNSCQEKIDRDLNASLNIAKTDKYALA

SEQ ID NO: 11460 - protein, 456 aa, Okeania sp.
MVEKAYKFRFYPTPEQENLLRRTLGCVRLVYNKALAARAQGWYDNKERVSYKQTSAMLTNWKKQEDLDFLTEVSSVPLQQGLRHLQTAFPTECYANTNFFSGRAKYPNFKKKRNGGSAEFTKSAFKWENGQVYLAKCAEPLPIRWSRQLPPNCVPSTITVKLGPCGRWSVSLRVNDTRDLKLKPVKKQIGIDLGITSLITTSDGEKVANPKNLNKLHKKLRLALKSLDRKTKGTNNYQKARLKVARIHAKIKDSREDYTHKLTTQLIRENQTIVVEDLAVKNMVKNHKLARAISDANWGEIVRQLEYKAEWYGRELIKIDRYFPSASFRGASLTKRCSNCGHVVEKLPLKIREWDCHSCGSHHDRDINASINILRMGTRVGDRRKGTPTKKAAGLAVSVCGATVSSEGNKSQRTGAMRQKAPNSNARESRAVSRIAASGGCQLIGFTSSVVLPKFI

SEQ ID NO: 11461 - protein, 277 aa, unknown
  TnpB Polypeptide
VKAGDEPGYPRFKGKRFFNSFTYPQSGFRLTGDKLVLSRVGSCRLRLSRPVEGTIKTCTIKRQADGWFVIFTVAENHCRFIPKNGEATGIDVGLENFATLSNGEVIENPRLLKQAQRAIRIAQREVSKRKLRGANRRKAVGSLARKHLKVANQRQDFFHKLSNQVIKEYDVIGVEELNIRGLVKNHHLAKAISDAAWGTFIQILRVKAESAGRKVVKVPAAYTSQDCSSCGDRVRKSLTQREHRCIGCGFVAHRDHNAAINIQARAVPLVRVNVMTR

SEQ ID NO: 11462 - protein, 376 aa, unknown
  TnpB Polypeptide
MMLLTIKAKLNPTDEQRQALSATMERFNEACNYVSSLSFQEQTFGKRTLQKQHYRYIRDNYGLSAQLAVRAIAKVSESYRGKGHRQEPHTFKPHSAVVYDQRILSFKALDLVSILTLEGRKLIPLSIGAYAQLEQRRVRGQADLVLQKGVFYLCVVVEVEEDTLYNAEGCLGVDLGLVNIATTSDGQHFSGDNADSVRTRYTKLEAALQSKGTKSAKRHLKRTSGKERKFKTNLNHCISKLIVGMAKDTKRAIALEDLTHIRSQVTVRNSGKAQRGRLGKWAFGQLRQFIDYKAQLNGISTFVVDPRNTSKQCSECGHIDKANRKTQSEFVCVACGRAENADINAAKNIASRAVVNQPIVSLKQKEIQAHNFSVGN

SEQ ID NO: 11463 - protein, 376 aa, unknown; identical to SEQ ID NO: 11462
  TnpB Polypeptide

SEQ ID NO: 11464 - protein, 393 aa, unknown
  TnpB Polypeptide
VIKTIRVMLLPNNKQKTRLFQYAGTARFSYNWALEREQENHKNGGKFMSDADLRKEFTQLKKNPKYAWLNEVSNNVTKQAIKDACNAYQRFFKGIAQFPHFKSRKHSPPSFYQDNVKIQFTETHVKVEGFACSKKKNKQKLNWIKLAEHNRIPVENVKYSNPRIKYDGINWWISVGIEYEPSNILPSNEGIGIDLGIKDLAVGSDKKNYENINRTQKVKKLEKRKRRLQRCIARRYEKNKKGESYCKTHNIIKGEKELLKLNHKLTNIRQNHLHQTTSSIIKREPSFICLEDLNVKGMMKNRHLSKAVQQQGFYEFRRQIEYKSGWNNIQVIIADRFFPSSKLCNCCGRMKKDLKLSDRIYRCECGNRIDRDYQAALNLKGYGEMYLKQQSAG

SEQ ID NO: 11465 - protein, 358 aa, unknown
  TnpB Polypeptide
MTVTLSHKICLDPTFKQEQYFKQACGIARFTWNWALAEWKTQYEAGLKPSALALKKQFNAIKPIDFPWMYDVTKYASQQPFIHLQSAFNRFFQGTSRYPQFKKRGHHDRFYIGNDSIKLEGQRVKFPKLGWIRMREALRIEGKVISATVSSKANKWFVSLNVELDQTPKSCENQAGVGVDLGVKTLATLSNGETFEAPKPFKRFTKKLKRMQRSLSRRKKGSQNRHRLRQKIAKVHARITNLRQDSLHKLTSYLTDNFTGIVIEDLNVKGMLSNRKLSGAITDLGFYEFRRQLEYKSKYKGNYLKIADRWFPSSKACSKCGHKKEQLKLSERVYHCEACGQSLDRDLNAAINLKNLLY

SEQ ID NO: 11466 - protein, 428 aa, unknown
  TnpB Polypeptide
MAKKKKKKKDCFYRAVKHSLTYANKCKKANVCAFLSDYQIAIQESINFIWNNKIITDGYILDIQNNIFSSPMFIDYNLINYSVNLSARALRSVCDQALGIVLGVVYKKACLFYGLRKATEENNLKAVEYITKKLNKLTISKPIVNENIKAELCSNCVDLQIGKTSFDCFVRLKSLGKQYGHIKLPIKFNKVDKKWASKGQLISSILLSKNVVELRYKVNKPALKTVGITVGADTGVKSVITLPDGQTPPTTNKTGHSLDSVLTIMSRKKAGSKAFKRSEAHRKNIINWSINQLNLINIAHVKLEHISNLFFGKNTSRKLKRFTNSAIESKAERLFEETGVLLTLEDSVYKSQRCFGCTVVRKANRKNKIYLCSYCGYTEDADLNAAKNNEISLPIIPNWLKKRGYNTKGFFWKEDGFYNLEGQELVSP

SEQ ID NO: 11467 - protein, 415 aa, unknown
  TnpB Polypeptide
MQVRYRYRLEPTPAQQRMLARVFGCCRVVFNDALRVRDEAYQAGAKLSDSEIQRRVITQAKKTTQRRWLAEVPSVALVQSVNDSRRAWRNFFDSHTGKRKGRKLGRPKMKSKKDHRRSFRLIRNGFSIRPNARLFVAKVGQVQVRWSRELPSEPSSVTIIREPAGCYYASFVVDVAATPLPVLDREAGLDVGISRLATVATSDGVRTDIENPEHLGRKLRKLRRFEREKSRRQKGSLNRDKTRRKVAIAHGKVARSRRDYHHKQALALVRDNQVIHVEDLNIVGMVANRRLARAISGAGWGQFVRIVAEKAERYGRRVNSAARWLASSKTCSACGHRLDELALQVRQWMCPACRAVHDRDYNAAKVILAAGRAERINASHESGRDRQSGPGGAPVRPPITREAQGDEAGSAPTAA

SEQ ID NO: 11468 - protein, 421 aa, Sedimenticola sp.
VQINVLFSIDQKYNATMLIRKAFKYRLDTTVETEQLMSQYAGNCRFLWNKALALNLHHLDNKEPLLWYQELDWFSKLWKQSDDYGFLALSPAQTLQQTLKQLERAFRDAFDKTQPLKQIPTFKKRGDRDSFTFPQGFKIEGKRIFLPKIGWVNFRKSRDIVGTAKNVTVSRQGKHWFVSIQVEIELPEPIHPSPAMVGVDMGVKRLFTLSDGDFEEPVEVKVWQDKIKRLQKRLAKKVKFSNNWRKLKDKINRLHTKIANIRCDILHKLSTTLSKSHAVIVLEDLQITNMTKSAKGDWENPGRMVKQKSGLNRVILNQGWGMFKTFLEYKQQWLGGQVLYVDPRHTSQTCPDCHHVRKDNRQTQERFACVVCGHVEHADVVGAKNILERGHRLLACGEPWVAKLCEAGTGKLSDKLEPVTV

SEQ ID NO: 11469 - protein, 320 aa, unknown
  TnpB Polypeptide
LSANLAIRAIARVCAALKVPAKMHSTFEPTSADYDARLFSFREWDWTFSLTLLHHRAHLATKLGPYQQRALHGRLPTSATLVKRRDGTFFVHVVLTGTAPEPEEPHGIIGGDLGVKNLATTDDGENFSGDAVEAVRKRYGRMRRTCQQAGTKSAKRKLQKIRMRESRMRANENHRMSHRLIAKAKDTTSAIACEDLAGIGDRITARKAQRSRLKGWAFFQLRTFITYKAKREGILVLPVDPRNTSRTCSTCGHCEKRNRPSRDAFVCRQCGYALPADWNAAKNIKARGEVMHPVVGPVDAGPRNLAEGTNKPRHLSGSGS

SEQ ID NO: 11470 - protein, 440 aa, unknown
  TnpB Polypeptide
VQQDVDEPGNIRRSQFACRTARTTLRTFKYRIYPSGKQLTRLDHQFSLCREMYNTLLKRCREGYRTDGTRLNGRNRLYRMTKDIKDEEPKFNTVYSQSRQNVADRLAKAYQHFFRRVKERKAGRQVKVGYPRAKRRVISITYPQFGFRFTGEDKLHVSRIGSIPIMLHRLPQGRIKTLTIKRNRAGQWFACFACEVDEDTRTPIDGEVGIDVGIEHFVTLSDGSVIENPRHLLKSEKRAKRLHRRVSRKKKGSRDRRTAVRRLARYHIYVADQRRDFLHRTSRALVDRYGTIAVEKLNESNMLKNHCLAKHIQDASWNTFIDMLRYKAVAAGGELVEVDPRNTSQICSRCGDIVPKALSVRVHQCPRCGFETHRDVNAALNILARARAGRARSHACGNPTSTLATKAGASGIAEAGTKRDEPFGAIDAGSLRLYRLSDNS

SEQ ID NO: 11471 - protein, 417 aa, unknown
  TnpB Polypeptide
LNTSLYNRTLYILRQAFSGKHENIPEYTDIIRKEKFISVFDLITRMRKLNDKDFRSLLKDNEAAQTVKKCAESFSTWFRSLNSYKKNPQKFTGKPRMPRYKKEANGDKLFSVAFSYNDAKIQKDGTINIRKDFKLPIKTKLTSLQELRLVPKQGCIEIQIFYKTKISPVDLDYNKAVGIDIGIDNLMAVTSNEGSISHLVNGRPLKSINQYYNKTYAEIVSKLAERDMNTSKKLRRLTRKRNNKTKDYMHKASRSVVDLMVENKIGNCFIGHNDGWKQEVNIGKRSNQNFVSIPHSQLIWMLSYKASEAGINVETHNESHTSKCSFLDDEDICHYDEYMGKRKKRGLFVSSVGYMLNADINGAANILRRGLGKTFSPHKSMFNPIKIDIEKKHPMSVSDQGVEGGASPIVLMVTSTH

SEQ ID NO: 11472 - protein, 255 aa, Moorea sp.
VYEKPDIEPVPLTNNVLGIDPGLNNWLTCVSTTGKSFIIDGRKVKSQNQWYNKQVSKIKKGKPQDYWDEPLAFLTEKRNRQMRDNINKVARFVVNWCLRHQVSTVVFGWNQRNKDSINIGNKNNQEFVQIPTARLKNPIEQLCIQHGIKFVETEESYTSIASFLDNDFLPTLGAKPKGWKPSGKRIRRGLYRSANNELINADCNGACNILRKVATQLGVDLAEVGRAALNLPQRYRLDSLSSQYCKHHAARFQPA

SEQ ID NO: 11473 - protein, 262 aa, Stanieria sp.
MTERAYKFRFYPTLSQENLLRRTMGCVRLVYNKALAARTIAWYEKQTRIDYKQTSSLLTSWKKTEELDFLNEVSCVPLQQCLRHLQKAFSNFWGKRAKYPRFKKKRNGGSAEFTKSAFKYRDGKVWLAKCSEPLNIVWSRYLPQGCEPSTVTVKLEPSGRWFVSLLVDDYTVEVLPPTEQKIGLDVGVSSLLSTSDGDKIANPKHFNRLYQKLACAQKELSRKTKGSSNRERARLKVARIHAKIKDARTDFLHKLTTRLVRL

SEQ ID NO: 11474 - protein, 442 aa, Stanieria sp.
MHQIITAKLKLHTNTEQTLLLREVSLAYRDALNYTSQRNFENGKSANGTKIQKLVYLDLRSKFSLPSQMACNVPRQVGATYKGLLTKLKQNQEAIKKGKTKKKFKGLDQAPKYVSRTCNLNYLRDFTFKNNQQVSLITLKGRIIVNYSGYNKHLELIKKGSRIKGAKIYYSKPTKTYYLLVSLQIELPELKPTDLKQTVGVDVGRRFLAVTTDLNNKSQFFSGKEIIHKANKYQRARKTLQQKGTRSATRRLVALSGRERRFTADTNHKISKQIIKPNTLFGLEDLTHIRERTSPKRKGKKASKKPKKAQRKQAKWSFAELHFFLDYKAVFVKSLAIKVDANYTSKMCPKCGHVSDNNRPNKGLIFHCEACNFELHADLAASRNIALRTLLFRQDWERTGILSVCPDVSNVEAKAERLDRYSELRWSSDTSPRLLVREAMGS

SEQ ID NO: 11475 - protein, 320 aa, Stanieria sp.
MCLQQVCLNLGIAFNNFFERRAMYPRFKSKHGKQSLQYPSNVKLQEEYLIVPKIGSIVARVHRPIEGKIKTVTISKNPSGQYYASILFEDGLEKPAQSSEGKAIGLDLGLTHFCITSEGSKFNHPGWLKKHELNLKRKQQQLSRKQKGSNNRNKARIKVARIHNKISRCREDFHHKLSRRIVNENQVIGVESLAVSNMVRNRSLAKAISQVGWGQFCTILKYKAENEGKVYIEVDRFFASSKTCNNCLFQVSELSLEIRFWDCPSCNNKNIDRDVNAARNIRDEALRILKTSGSGDQACRQTVRRSNRGRKKSTTALVSG

SEQ ID NO: 11476 - protein, 411 aa, Stanieria sp.
MTERAYKFRFYPTSSQEILLRRTMGCVRLVYNKALATRTIAWYEKQERIDYKQTSSLLTDWKKTKELDFLNEVSCVPLQQCLRHLQKAFANFWGKRAKYPRFKKKRNGGSAEFTKSAFKYRDGKLWLAKCNEPLNIVWSRYLSKGCEPSTVTIKLEPSGRWFVSLLVDDYTVEVLPPTDKKIGLDAGLTSLLSTSDGEKITNPKHFNRLYRKLSVAQKKLSRKTKGSSNRERARLKVARIHAKIKDARTDFLHKLTTRLVRLYSLIAIEDLAVRNIVKNHKLARSISDAAWGEMRAQLEYKCEWYGRKLVKIDRFFPSSKRCHHCGFVMDKLPLNIRSWDCPSCKTTDIDRDINAGKNILAAGLAVIVCGADIRPDNHKVKGASAVMGETPMSNSRRQLRKTRKRKKQKPK

SEQ ID NO: 11477 - protein, 465 aa, Stanieria sp.
MEDLKPNYQTQKILLSGNVSDETESYLIWACHLSNNLSNSTLFSVRQAHFARCPRREFFDKNDFYRSEFKDRYVSVSYAQLCKDFKFNHNYIGLGGQQAQQCIKSVVESIQSYNQLLKKYWQKEIDIKPKLPNYRKSGGLNQVTFPSQAVTYNKYEGYCSLAISNEARPNLEIKKLIIPSGVDFKPEQLVEVRITPSNGKLWAEYVYKSDKKQANDLDYSQAIGLDPGVNNWLTGVSTLGKSFILCGKKIKSINQKYNKLVAKYKKGKSNFSWDSFLANLTHKRNCQRRDVVNKAARFIINYCLVNKIGNIVFGWGKEIKQNSNLGKINNQNFVAIPTARLKKRIKELAEAIGIKFIETEEAYTSKSDYLAEDCLFKFGEKPEQYRFSVRRITRGNYRSKFGIICADALGAINIIKKVAIQLGISLVEVGRESLIVPKRYDLFSNLKKLYRKRSEMVLRLSRSNA

SEQ ID NO: 11478 - protein, 149 aa, Stanieria sp.
LIAIEDLAVSNMVKNRKLARSLSDAAICQMFRQLEYKCEWYGRKLVKIDRFFPSSKRCHHCGFVMDKLPLNIRSWDCPSCKTTGIDRDINAGKNILAAGLAVIVCGADIRPDNHSVKGASAVLGVSPMSNSRRQLRKTAHSGRKQKPKS

SEQ ID NO: 11479 - protein, 487 aa, Stanieria sp.
MVKHNIRTDKWQIVASEITESPAREPSSRARLAQEQKELLHKTVCEFRCLVRCLVGVIYTHWSAIGVLDAKAQIPAVEKLIHQTAKNPNSKYQYFNSRFHKFPSYYRRGAIQFAVGQVSSFVTRYRMWQSGIRNRKDTLPPRLNADCGAYPPLYKGQCIKFAEDLNTAAIKVYTGTDWVWITVGLMGHRQRHLDLANKRKSPYLIVNKKGSHLSVPFQCQKSKLPEGEITASPAREFISRARGTQSVLSVDLGINTTATVSVVNYDGTVSHREFIHHGRDIDRRDKRLKRISTKASRTGKLQKGFCRGLYRKANNINREIGQKISSRLVKIAKQFGVKYIVFEHLKGWRPKGGKKRSTLRQRFHGWLHRRIVNLTQMKWSEIGGSVSFVNPRGTSSYAYDDSGKLKRDKSNYAIAIFASGKQYNCDLSASYNIGARFIYRLMSRNGSQDKKGQNSCLSPRSRVTLSILWSQPISIVEQDTQSSRKQG

SEQ ID NO: 11480 - protein, 396 aa, Stanieria sp.
MLNFTYEYKLIPTKSQIAEIERTLGICKSVWNYALAERKDWVNFRKCLVNACSLEKEYIIPADTKFPNYHVQAKALTKARANNSELKSVNAQLLQQVLRTLDRAWEDIRKRNFGFPRFKNAVRMRSFIFPQFKSNPVKGNKIKLPQLGWVKFRKSREIPEGFQVKQARVVRRATGYYLMLSIQLDVNVVNPIPHGHALGIDIGLDKYLATSDGELINRPKFFNSLHRKLKLLQRRLRNKQKRSNNRFRLNRRIAKIHEKIAATRKDFHFKLAHKLCEQAGMIFVEDIDFKSWAKGMLRKHTLDASFGQFFQILQYVAWKTDTYFLEVDKNYTSQICPNCETKGGKKLLSERTHNCPACGYTTNRDVAAAQVIRNKGLVAVGQPVNQNACGDVSSGG

SEQ ID NO: 11481 - protein, 410 aa, Stanieria sp.
MTERAFKYRFYPTAEQENLLRRTMGCVRLVYNKALAARTEAWYSKQERVDYKQTSGLLTNWKKTEDLQFLNEVSSVPLQQCLRHLQKAFSNFWSKRANYPRFKKKRNGGSAEFTKAAFRYKEGKLWLAKCEEPLNIVWSRYIPQGCEPSTVTVKLEPSGRWFVSLLVDDYTVEVLPPTDKKIGLDAGVTSLVSTSDGEKIVNPKHFNRLYKKLKAAQKELSRKTKGSRNREKARLKVARIHAKIKDARTDFLHKLTTRLVQSNSLIAIEDLAVRNMVKNRKLARSISDAAWGEMRAQLEYKCEWYGRKLVKIDRFFPSSKRCQCGFVIEKLPLNVRSWDCPSCMTIGIDRDINAAKNILAAGLAVIVCGADIRPDNHSVKGASAVLGVSPTRLSRGQLRKTRKRKKQKPK

SEQ ID NO: 11482 - protein, 427 aa, Stanieria sp.
MVERAYKYRFYPTSEQEELLRRTMGCVRLVYNKALAARTEGWYQQQERIGYNQTSSLLTAWKKEEELSFLNEVSCVPLQQTLRHLSKAFENFWAKRAKYPNFKKKRNGGNAEFTRSAFKWKNGNLWLAKCKEPLNLVWSRYFPEECSPSTVTVKLTPSGRWYVSFLVEDPTVKPLPPTTKNIGLDAGLTSLVTTSDGEKVTNPKHFNNKYRRLRAAQKALSRKQKDSKNREKARIAVAKLQAKIADSRKDFLHKLTTQLVRENQVIAVEDLAVRNMVKNRSLARSISDAGWGELIRQLEYKCQWYGRELVKIDRWFPSSKRCGNCGFVIDKLPLNVRGWDCPECRTTHDRDVNASRNILAAGLAVTVCGSSVRPDRHSSKGASAVLGRGCDSNLVRVLVRPVVSPMSNSRRQLSKTAHSGRKQKPKS

SEQ ID NO: 11483 - protein, 454 aa, Stanieria sp.
MYGCQQVLLKPNKELSAILEFLCRQAHSLTNMGIYYARQLYLKTKRYVGKYDLEKLYKNNIHYKVFHSQAAQQILRSVYESFFSYKKLVKAYKEGKLEDRPRLPKYRKKGGLALVSYPGQALKLKDGSIRVPLGKQVKCWFELDSFQLPMPSNINLADVKELRILPRNKCFYAEFVYKKEIQTLEVDKQNVLGIDPGLNNWLTCVSNIGTSFIIDGKHIKSMNRWYNKQVSTLKEGKPQGFWSNKLAAITEKRNRQIKDGINKAALIVMNHCLENRIGTIVFGWNKRNKKEIELGKKNNSEFVPIPTARLKDRIEQLCLEYGIQFVETEESYTSKASFLDGDTLPIYGEKPKCENWKPSGKRTKRGLYRTANNWYINADAQSAGNIIRKVSITLGIDLSGVCRATLTSPHRIKLWSANKETTRSNVALARCEATSLESPSEAVLDSGGAVNSDN

SEQ ID NO: 11484 - protein, 439 aa, Stanieria sp.
MYGCQQVLVTQDKNLINVLTFLCEESHKLINMGIFYARQLYFKAKKIIGKFDLIEQYKTNYHYKILHSQAAQQILLSVAESFKSYKGLVKAFKEGEITDKPRIPNYRKKGGLATISYPKQALKLKDNKLRVPLGKTCKRWFGIDSFKISMPSNLNFSDIKELRILPRNKCFYFEFVYEKQTQKAKLNRNNVLGIDPGLNNWLTCVSNVETSFIVDGKHLKSMNRWYNKQVAKIKQNKPQGFWNKKLAAITEKRNRQMRDAINKAARIVIDHCLENRIGIIVFGWNKGNKKEIELGKKNNSEFVPIPTARLKDRIEQLCLDYGIEFVETEESYTSKASFLDGDNLPKYGEKPKVASSEETSEACDDRKDWKPSGKRTKRGLYRVGYGQWYINADCNGAANIIRKVSRTLGLELNRLSRGVLTRPQRLTLWSVNKEALLPY

SEQ ID NO: 11485 - protein, 396 aa, Stanieria sp.
VLVYEFKVKANKHQCQAINEAIRISQFIRNKCLRLWLDSSKEDKINCFALNKLTKVLADNKAEFPFVANLNSMARQASAERAWFAISRFYDNCKKKITGKKGFPKFKKNSRSVEYKTSGWKLSQDRKYLTITDKTGIGGLKLIGTYDLHYYQIEQIKRIRLIKRADGYYAQFCIDQKRLEDCTPTHNALGLDVGLESFYTDSNGDKVENPRFLRKAEKKLKRLQRSLSRKRGGSNNRSKARQKLARQHLKVSRQRKDFAVKLARCVMISNDIVVIENLNIKGLARTRMAKSVTDASWSLFRQWLEYFAKVFQRKLVAVNPNYTSQDCSSCGERVKKSLSTRTHICECGIVLCRDHNAAINILNKGLDAVGRTESLNDSGQINLCLVSESLLDKLAG

SEQ ID NO: 11486 - protein, 370 aa, Stanieria sp.
MLTAWKKEEELSFLNEVSCVPLQQTLRHLSKAFENFWAKRAKYPNFKKKRNGGNAEFTRSAFKWKEGKLWLAKCKEPLNIVWSRLLPSGCNPSTVTVKLEPSGRWFISFLVDDPTVKPLPPTNKNIGLDAGQTSLVITSDGKKITNPEHFNNKYQKLRAAQKTLSRRQKGSKNREKARIAVARIQAKIADSRKDFLHKLTTQLVRENQVVAVEDLAVRNMVKNRSLARSISDAGWGELVRQLEYKCQWHGRELVKIDRWFPSSKRCGNCGFVIDKLPLNVREWECPECNTTHDRDINASRNILAAGLAVTVCGANVRPDRHSSKGASAVLGRGCDSNQVRVLVRPVVSPMSNSRRQLQKPRKGRKQKPKS

SEQ ID NO: 11487 - protein, 400 aa, Stanieria sp.
MPNYFVRKLKLEKTPQLDSLARAAGELYSRTLVSFWRTVRKKDIWLSGYIMERWHTSSSLHAHSSDAVTQSFYGSLKSWRTRRKTDPHSKPPKRRRWYFKVTWKKAAIKLKNGKLFLSNGRGNKSLVVDWRWKKPKTVELGWNKASQCYELRACYSDTIPNTGEAKGVAAADLGEIHPMVIADGVNTDIFNGRYLRSVRRYQNKVKGKLAKLIDKKKRGSKRRKRLIRSKQKQLAKFNNQIKDIEHKLTSRAVSMLKLRGIQTLVIGDMRDIKDDLDYGKKNNQKLHQWSFGSIRHKLEYKCARAGIKTTLITEEYTSQECLCCRTRNKPKKRNYLCNSCHAKFHRDQVGSNNIRAKYLGEVPVVGIMAVPSGVRYHSHLQCNLSEAILLGNSLASSYGE

SEQ ID NO: 11488 - protein, 388 aa, Stanieria sp.
MLTRRITFRLYPSTAQEQKMFWARRMHAYLYNAAVANRKTQYQKFAHSVDYFEQQASLPGFKETWIEYKELNAGSLQATLKRVDFAFVRFFQGLAKYPKFKPFKAYSGWTYPDARQGFKVHSSGKNGYLELRDLGIIIQMRGQARIWGQPTTCTIVYRNSRWYASVTVKCLPTRETGKGSIGLDFGCKTAVAMSNGILVEPSKFLTNTQNQINRLSKQLRRKRKPEKKKHKASRRWKKIQAKISKLKKKVANRRQNWVHQVAVDIVRSNSLIVTEKLQIKNMTRKASSGSKRKRQKTGLNRSMLDIGIGMLRDAIAYKVKEAGGVFLEAPTQSLKPTQRCVKCWELTKKSLSDRLHICSNQSCRHTEDRDINSAQVCLSWARGQVIQH

SEQ ID NO: 11489 - protein, 405 aa, Stanieria sp.
MFVLEYKLRGKESQYRAIDEAIRTVQFVRNKCLRYWEDNKGIGQKDIYRYTTVLRNEFDFVKDLNSTACQQACERTWTSILKFYTNCKQNIPGKKGYPKYSKRTRSVEFKKSGWKLNRDTKRITFTDGKNIGELKLIGSRDLLYFQEWQIQRVRIIRRADGYFVQLMLKLDPRDITLQLEPTKKCVAIDVGLKYFYCDSNNETVECPKYYRKAEKRLNKLNRRKSRKFKKNQKQSKNYIKARNKYAKAHLKVTRQREEFAKEKALRLIQSNDLIAYEDLKVKNLVRNKKLAKSINDAAWSQLRKWIEYFGLKYGRLTIAVPPHYTTSDCPGCGKRVKKSLSTRTHVCDCGIPVLDRDYAASLCILQKATIGHIGSWSNEILDLNAWGDTTSILVGSNTCQSKLSQ

SEQ ID NO: 11490 - protein, 438 aa, Stanieria sp.
MIILEYKIKAKPHQYLAIDQAIRTGQFVRNKALRYWMDNKKVNKYDLNKYCRILAKEYVFADKLNSTARQSSAERAWSGIARFFDNCKKRTAHAEETSACGRSKQKVKGKKADATDPSSYGGSHAHQAGYPKFKKHSRSVEYKQSGWKLDEATKKNITFTDKIGIGRVKLVGSRDIYFYQPEQIKRVRLVRRADGYYCQLGISIEVKEDMQPTGKAIGLDMGLKYFYADSNGYIEENPRFYRKSEKRLNRLNRRKSKKYQKGKKQSKNYHNARKSYAKLHLKVSRQREEHAKRVARCVCASNDCIVYEDLNVRNLVRNRRLSKSISDAGWTQFRKWVEYFGWKFGKITIAVPPHYTSQDCPACERRIKKSLSTRTHVCECGYTEDRDIAASINILKKGLSTLGHSGSYAWGETPSWAVGVSLSSNGDSLNQESQGAVV

SEQ ID NO: 11491 - protein, 448 aa, Stanieria sp.
MDNLIIRSDNWDLNPNKEQIQYALDTEKVYRQFARALIGVVYTHWTLIANASSPCAAVEKLIHKTNKNPNPRYQYFTCNFYKFPSYLRRAVIQAAIGQVSSFVIRYRQWLSGDRKRRDANPPKLNAVTNLRTVLYQGQCILFLKNSVKIKLYKGKDWSWETIPVKNTGQRHLLPESKTMSPSMMVTNTGISLSVPFKIKPPQTPKVKKVCSVDLGINTIAVASVVNPNGTVTARKFFNSCAADIDRRDKRLQAIRKKARLTMGKTGKLTKGFCRDIYRKAHNINKQIAHKVSRELINFATTNGAAVIVFEYMTGWKPRGGRRGSTLRQRFHGWLKSSIVSLTTEKYVELGGKTSQVNPRGTSSWAYDGSGKVRRNKKNYALATFASGKKYNADLSASYNIGARYWLKLVRRNRNESGMGQSTQPEQRMPGLLCQLWSEIEAAYVPEGS

SEQ ID NO: 11492 - protein, 382 aa, Stanieria sp.
MATKRITFRLYPTKTQNQQLHYWRKLHCLLYNACAYHRKTSYKRFGKSVSYYDQQNCLPEFKDCWAEYKELGSHALQATVKRVDYAFTRFFKLKSGYPKFKSSRFYKGWTYPCKAGWKACSSGKNGYLKLTNIGNIKMRGQARDWGIPKTCTMMFKQGKWYASITVDCLPSRLQTDKGAVGLDFGTYHAVADSNGNVIDNPRFIKSAQAKVNSIAKQSRRKRPPKKGVKASRKWKKANRAVAKIQAKVARQRQDWQHKVAVEIVSCNSLIATEKLNLKAMTRKSKGKRKKQKSGLNRSLLDVGISNLKSLIEYKVTEAGGFYIEIPTQKVKPSQTCPNCGHQKKKALSERIHSCEKCLYTCDRDVASAIVCLNYARGQVIQH

SEQ ID NO: 11493 - protein, 397 aa, Stanieria sp.
MYKAYKYRIYPTQEQKKLLAQHLGNVRWFWNYALNKSETTYRETGKGLTRNAIQKLLPELKKEYEWLGLCYSQCLQVVALNLSTAYKNFFEKRGGYPRYKSKKGRQSIQYPQNVKLEGDYLKLPGAVGKIYCRLSRNFEGTIKTTTISLTPSGQYYASILVDDGKAIPQASKEGKAIGIDVGVTDIAVTSDNEKFSNPKWMAKHEKNRIRKERKFTRKQKGSKRRDKARIIVAKVHNHIANCRSDFLHKLSRRIVDENQVICVESLNVKAMTKNRKLSRAISQVGWGMLCTMLKYKAEWEGKTYIEVDRFFPSSKTCSHCYHKVEELPLNIRSWQCPKCNTQHDRDINAATNIRDEGLRILSVGRIDRGVTRRATAHSNLRTAQGRTVRLTSVSKGD

SEQ ID NO: 11494 - protein, 413 aa, Stanieria sp.
MTERAYKFRFYPTLSQENLLRRTMGCVRLVYNKALAARTIAWYEKQTRIDYKQTSSLLTSWKKTEELDFLNEVSCVPLQQCLRHLQKAFSNFWGKRAKYPRFKKKRNGGSAEFTKSAFKYRDGKVWLAKCSEPLNIVWSRYLPQGCEPSTVTVKLEPSGRWFVSLLVDDYTVEVLPPTEQKIGLDVGVSSLLSTSDGDKIANPKHFNRLYQKLACAQKELSRKTKGSSNRERARLKVARIHAKIKDARTDFLHKLTTRLVRLYSLIAIEDLAVSNMVKNRKLARSLSDAAICQMFRQLEYKCEWYGRKLVKIDRFFPSSKRCHHCGFVMDKLPLNIRSWDCPSCKTTGIDRDINAGKNILAAGLAVIVCGADIRPDNHSVKGASAVLGVSPMSNSRRQLRKTAHSGRKQKPKS

SEQ ID NO: 11495 - protein, 408 aa, Stanieria sp.
MEQVLTIVCKLNPTKEIAQEIEATLFAFADACNYANEQVKPNITSKTTIQNMVYQTLREKFGLSANLAVRACARVGANRKTAKLKNNHGAYKVRRFPLHTASPVKKFAPTSADYDARIFAYREKDESVSLTLLSGRYHIPLDIGNYQRGKLKGRNPTSAQLCKHRDGKYYIHIQVKDEPQSPISSNKVIGVDFGRTDIAVTSNNQKWSGKQITQVRDKYSKIRASLQKKASKGTRSSRRRCRRLVKLLSMREKRFQAWVNHNISKTIINQALKSNALVSIEDLTGIRDRTNQKPRSKRERRLSNSWSFYQLRSFLEYKGIKYGVEVLAVPPQYTSQTCYRCLHIGLRSAKSFKCVNSNCLWHGDADWNGSLMIQALGLSVRQPEGSRLFCSLDRDDSGLLKAIGLQPA

SEQ ID NO: 11496 - protein, 397 aa, Stanieria sp.
MLKVVKVRLYPDTQQKQQLAKAFGSCRWVWNYFLNLMNETYQDTGKGLSGYDIKKMLPTLKKQQETAWLSETYSMCLQQVCLNLGIAFNNFFERRAMYPRFKSKHGKQSLQYPSNVKLQEEYLIVPKIGSIVAIVHRPVEGKIKTVTISKNPSGQYYASILFEDGLDKPIQSSEGKAIGLDLGLNHFAITSNGNKFDNPRWLKKHELNLKRKQQQLSRKQKGSNNRNKSRIKVAKVYNKISRCREDFHHKLSRRIVNENQVIGVESLAVQNMVRNHKLSKAISQVGWGQFCTMLKYKAENEGKIYIEVDRFFASSKTCNNCLFQVSELSLEIRFWDCPSCNNKNIDRDVNAARNIRDEALRILKTSGSGGQAYCPDVRRSRRSNRGRKKSTTVLSAG

SEQ ID NO: 11497 - protein, 408 aa, Stanieria sp.
MFAVKRKLKLNNKEKTVMAKQAGFSRVVYNYGLSLFWDSLDCKASDSKRLGEIKKCLTNITKKRSEYAWMNEMSSRVYQNAFRDLASAFKRWREGLANKPTQKLKKHGQSFTVDSSNGVVLVPEGKVIKIPTLGTFRLQEPLAESYIAQTFTISYKAGDWYVSFAVKAERIAPIVHEVYDQTGIDLGVTCFATLSDGTEIIAPKPFKQAKTKLAKLQYRARNKLLGNKKQGIKASNNAKKYFQKVTKLHARTANIRQDFLQQTTTNLLRKYHTLRIEDLNVKGMIANRKLASAISDLGFYEFRRLLEYKVSWYAGFVEIVDRWYPSSKLCRKCNERHTELKLKDRLFICPTCNHTESRDLQAAINLANTPEEFITTRIGSIRSNACGLDSADTSRMKQEVNTIVDSYR

SEQ ID NO: 11498 - protein, 414 aa, Stanieria sp.
MLTMNYKFRIYPTNHQQTLMLTWLETCRRLYNQCLRDLKDWMNSRQCSLSSCSLEREYIMSPDVPFPSYLEQKRQLTQWKKTNPYYQDVHSQVTQDVVKRLHNTWEAFKARGYGFPRFKKYGRYQSFLFPQFKDNPITGNVIKLPKIGKVVINCHRPIPDGFKVKGVRIVSRARGTIWYAVVSIQSDISVPDPLPMGRGIGCDVGLKSFLVTSDNLRIEPARFFRDLQSRLKELQRQGSRKKKKSKNWEKAQLKVARLHHKIANSRRNFHFQTSHLLCDQADMIFVEDIDFRVSAKGFLGKHMLDGGFGQFRNLLSWVCWKRGKYFAEVDHKYSSQICPECGTHTGKKELSERIHLCPECNYTTSRDHASARVLLQRGLESIVPVDCGERKLPSECELPRIEISRQVQRRNVLM

SEQ ID NO: 11499 - protein, 399 aa, Stanieria sp.
MRQVEKHVIKKSNQWWQEIDDLAFKSKNLFNLANYEYRQYYFAEGKTMGLPSLYHKVKNADAYRALPTKVSKQIIKNLTEVWTGYVNAHNDWEKNPHKYLGEPRIPKYKDKTKGRNLVIYPDESIYKKTLKDGICHLSMSNIKIQTQVKVIDQVRIVPTNSAYVVEIIYEKPELEQSQSSDLAGIDLGISNLIALTSNQPGFTPLLINGRKLKSINQFFNKRKAQLQSQLKGNQKTSKRLKGLTDKRNRVVDNFIHVTSRLVVDILKACEIGILVIGKNDGWKHNVAIGKKNNQQFVQIPHAKLIEKITYKAQLEGIKVITINESYTSKTSALDLEQPVKQTTYKGKRVKRGLFKTASGIVWNADINGSCQIVRKYAPDAFKQEELVRLAVNPLLVNPV

SEQ ID NO: 11500 - protein, 551 aa, unknown
  TnpB Polypeptide
MSPQTLSQSVQLDHNKRLANLVKTSHRIAQTFLDKHQLPTLLQEYQNWKQKTNAKPYVFFCQTNKYGPFEPETRYYYSRFKRCTYSLIARQLETHSSKYNAFQFLQNNYADYETVEALEDKLFDHDDFVNYDSFKQVFKEYEKHMSNTGSTPDKYTDLNTIEKLPFELSLTPDDNSIHDLEFKNNQLTLSVQTPDCDTHESHHDYSETILTTSIHPHLSELLEAGEACKPTIRLANGTLYVDVPVKIETVEFDTTKDKVLSCDLGVRTQVTSTVVRKPDGNDHDHLCQESQPEFYNHPDKQKLYRVIANRKKVRSNTRQHDNLTDREVNLRDQIQHDTANYIVNKALINNCEKIVLEDLSDLEAPPGLAKTSEQISSWARGDLFDKLEYKASLVGLEVETVNPWGTSQFCPKCGCHGKRVNASNDLTENETGGWFYCEQCGFSADRDYIGALNVGRVFLSSTDRITECKPVEYTSSGNQHAWFDSEAVKADERRSPSVQPAITQPVESHGFTSEVGDERCKKQNSVTRPALGLANNAVMPTPIQHVLNHTM

SEQ ID NO: 11501 - protein, 381 aa, unknown
  TnpB Polypeptide
MLVDKGFKFRLYPTAEQQQVMSQIFGSCRFVYNRFLAQAQEDYKNRLKLKSTYDFQKDLTLLKKQPEFAWLSQSDSQALNSAIANLGVAYARFFKGLGRYPQFKRKSNQQSYTTYCTNPKCLSIEGNRIYVPKVGWVKVKQHRKLDGRTTSGTITRTCSGKYFISLHCRDCSVEEMPKTGSEIGLDLGIQSLITTSSGTRINSPLHLRRAIDKLKIEQQRLAAKRVGSNNWHKQRIKVARAHERVANQRKQFLHQLSHDIIKNHDFIAAEDLDIQGMLESDLADLSKQQLKSFHRNITDVSWGELLRQLTYKAQWYGKQFVQVDQYFPSSQLCSNCGYKNPIVKDLKVRKWTCPNCGAYHDRDHNAAVNIIAEGRKLVLLT

SEQ ID NO: 11502 - protein, 461 aa, unknown
  TnpB Polypeptide
MIRLAHKIQLKPNNQAQTYFKKASGTARFAYNWALQQWKSQYQAGLKPSAYGLSKELNAIKGTEFPWMLEVTKWAPQKAILDLGNAFEKFFKKEAKYPKFKKKGKTKDSFYLNANHIKVEGKKLWVPKLGWVKMAQEVRFPGKTKSVTISKDTDDRWYAAFSVEIDESQWTYPHLCKCKNHAQAAVGIDLGIKSFAVLSDTHEVIENPRHFLKLQRKLRKAQKKLSRSVKGSKNYGKAKLAVAKIHFRIKSARRDFLHKLSSRVVGEFRWIGIEDLHILGMLKNKKLAKHIQDAGWGEFGRELKYKGKLSGSSVVEADRWFPSSKLCSTPDCGYVYKELTLGIRFWTCPFCGKRHDRDGNSSDNLKEVALGYKETLNACGEGSSGLIEVDGVKLLSVKQESGKRATLVVTLEVPTAKAALFLKHRAIAQDLQRKWIEEGVGEEESYCCALSGCFPEEEQEG

SEQ ID NO: 11503 - protein, 654 aa, unknown
  TnpB Polypeptide
METPKEKPPEFFKSTKTSLKSILKHPEINTKKINDVVIKAHKIVIHTLQFLKLYLIHHYDNYSHNLPVIDKVLILNIMKVVCGEKHNNQGRKPNTETLELQEKLISFYNEHYKPYTQPEQLDYEYMSNMLSYLCEDILTMYENNIQSHYVDYVERFVNVVWKKKMLIERIRKIFHTKKEKESRIRKLEQTLRKIKNDLLNVDNKVHYTSNPSYHTWINQQKKHILPNKEKFQKQSIYYDLKCSPMDYFPCMITMMKQVENDEETISNVFPLRSSISPGYIRLDTITLVYLLLRKEQGKKSDYNNQGNTKKHEDKIWKFFFRTEKKVFRKTDFSFHHMISTDGVGVSILFIRDDLVGKRLPSANKGVSRELYIDELVDYSALQNKKIVGIDPGKEDLIYCVDDDSKAANVFRYSQNQRRKETKMKKYNNIILGMKTNKIQGKSVIDYETELSLYNRKTLCISKFKTYINEKNRINHILFDFYAKQLFRNLKFGRHINIKRNEQRMIRDFRKMYGNPENVVICIGDWEQRQQMKYKEPTLGIGIRTLFRKNKYKVYLVDEFRSSCKCSNCHGGICEKFMVRKNPRPNKHEMRLVHGLLRCKSGCGLWNRDRNGSSNIYKIAYQAINNLERPSYLCREIKSNQAVLPNCYKQNIHKV

SEQ ID NO: 11504 - protein, 277 aa, unknown
  TnpB Polypeptide
MLVLEYKVKGKQNQYNAIEDAIRTTQFIRNKANCLQQRFAIRYWMDAPQELKMDKFALNKYSTKLRSYFPFAAELNSMAVQSAAERGWSAISRFYDNCKSKKSGKKGYPRFQKNCRSVEYKTSGWKLHKTKRRITFTDKKGIGELKLLGKWDIQSYELKDIKGVRLIRRADGYYAQFCIGIDVVDIQPKTGNEIGLDVGIELFYTDSNGHHEPNPQFLRKAEKSIKHSQRRIYKYQQLININFYIKNYELVATTQQKPFSTNWGNCPLMFLFSSNWC

SEQ ID NO: 11505 - protein, 366 aa, unknown
  TnpB Polypeptide
LYNIGLHQRILIYKEVGKSIGYHQQAKELVQCKKEEELSWLKQVPSQTLQGALEQLDRSYQNFFNGLKSGRTVGFPKFAAKHGFNSFVIKSVKKDTYNRILIPKLGSIKYYNSRELKGNLKRATIIKESDGWYVSIVSEVKHISTPAIESQEVGLDFGVARFYTLSNGDWVENPRFFQKYKEQKTELQQSLAKKKKGSHNWLNVKRQLNRLESKIARSRKDWQHKLSTNLVKQYNGIFIEKLKIKNMTKQAKPKLAEDGKTYLPNNGAAKSGLNRSILDLAPFQFAGMIEYKCIWEERLFAAVNPANTSRECSQCGHTCKENRKTQSAFECVACGFKCNADENAGKNIKGRGYTSLQSSQGLSLAA

SEQ ID NO: 11506 - protein, 374 aa, Lacrimispora sp.
MIKAVKVRLKPTNEQEAQLLKSAGVARFAYNWALGREKENRDNDGKFLNDQELRKEFTQLKQKEEYAWLYDTSNNLSKQAIKDACDAYKRFFKSQAGFPRFKSKRCTQPKFYNDNIKLKFKDGRFLIEKVGWVKISEPERIQVDKFHNPRVSFDGKYWYISVGIDMPIPTVELTDGIIGIDVGIKDLAVCSNKMKFENINKTKRTKKQAKKLRRLQRKASRKYEKNKNGKEYVKTSNIIKLEKQIRVTHRKIANTRLNHIHQAAAAIVKTKPSRVVMENLNVKGMMRNRHLSKAIGEQGFNLFMCILMYKCLFYGIEFVKADRFYPSSKTCCNCGYVKKDLKLNERVYQCPVCHNEIDRDYQASINLARYMDTA

SEQ ID NO: 11507 - protein, 410 aa, Uncultured sp.
MKNIKQPFVKGEVKKFVKGFKFPIYPNESQKELLGQTFGCCRYIWNRALSEVKTEFDYYNAHKDLITITPTINPNVTGYGLVNRLISYKRDPNCIWLNDVSSVALQQNMLHLGTAFSTFFKNRKGFPKFKKMQNKQSFTLMKNSFRFKEEKFYIANCKDSLIIDFTRKLPSEPSSAVISKTASGNYYISFVCEYFPIATIGSGVIGIDLGLKDFLVTSDGIKVPNPKNTKKYSKQLKRKQQSLSRKQKASKNREKARVVVAKQYERISNCRNDFQHKLSRNLVNENQVIGLEKLVVKNMVKNHKLAKSISDVAWSNFTNKLNYKSMETQNCSLVYMDSYFPSTNVCNLDGYKLPIKLKLSERSWICPQCKTMHDRDINAAINIRNEAILTLHAFKVPEHACVRVLANSLH

SEQ ID NO: 11508 - protein, 399 aa, unknown
  TnpB Polypeptide
MPAVQRSYRVRAYLNGAQIRLLNSWFGASRWLWNWSLSSRTKAYERRKESVTGIDISRRLTKIKKLPRFAWLQGPPATCLTQTLRDQDVAFAHFFRRVKAGEVPGYPKFRKRGMSASLRFQDVSLAKWAKGVVSLPKLGAVKLAENLPGVACPDTVTLKREADGRYYVTFSATVDIPLLPTTGKVIGVDLGLTHLATLSDGTKIENPRKLARRLKYLKQQQRCLARRQKGSKRRERQRRRVARIHRKVADQRAYALHALTTRLTREFDVICIEDLQVKNMIQHPTLARHIADASFGEFRRMIEYKSGWYGRTVVTVDRWFPSSKTCSCCGHRLERLALSVRGWVCPECGTTHDRDHNAAQNIVAAGMLQLAGREGRDLRRDGAFVDAPDELRTGRIMSE

SEQ ID NO: 11509 - protein, 452 aa, unknown
  TnpB Polypeptide
MATVSYGIMIKNCNRVFDQTMTVYRAAVSYLVDVALRHYDELFLIKGTDNATAQQMRQQYMEHLIHSTAACPAQYCTFDKRFYKFPSYLRRDAINTAVGKVFSYRSLLKNWEESGRKGRKPFLNRTQDVMPCLYRGNTFIQDGTRAAIKIYDGHDWIWLYADLRKTDLDYITRHVSDWKESAPVLTKRYHKYELRFTYTKSGAKFPKYVKDKDVDAVIGVDLGMNTDAVCSVVHKDGTVTGEKFINSPVEKDRMDGLLNTVRKAQQHGNRKNHRLWRFIDNYNTAIAKRTASEIVSFAVEHHAQVIVFEHLNMYGKRHGSKKQRLSLWRKREIQHRAEDLASRYGIRVSYICAVNTSKLAYDGSGKVIRGKEAGFKNQQLCVFQTGKIYNCDLSASKNIGARYFIRVLLKSMSAKTLLSVQANVPELDRRTKCTLATLNSCYAVLHTSKTAA

SEQ ID NO: 11510 - protein, 211 aa, Archaeon sp.
LKLKLEYLFRNDFKKINQIKINKEYAFISVSLPEPELYETEGYIKVDLNTTGHCAVVGNPKTGKVLKMDKMAYHIHKKYKSISRYLQTKGKYRKVKQIRNREQRIVSDMNHKISRKIVDMAKDSKSGLKMEDLKGIHNAKSTKSFRYSVNSWSFYQLRQMIEYKAKLLGVHIVYVDPQYTSGVFKMWTDRRHNRNGKVFKCPHCGHVDHAA

SEQ ID NO: 11511 - protein, 500 aa, Salipiger sp.
MQIRKPSSTPGFLVPVKLLPSIGKYRFFGNDIQTRELPVTLPLDSISVDEASSPYWNALCAETQSEWWLPHRTVSPDPDSRSSDTSSNYLEVESSFWKSKIKPILSTCANSLRLSLPSATPSMESAHIKGTEKIRVYPRDEAFVIGLCRQHRRAYNQAIGCFVEADEGYIDRNDPDLRKVNLRRIIRDFVRAEAHERGETFGSAACDEAVVEAFKTRDAVIKKRMRGEKCDYSFKSLKEVRQGFIIQKLTPYFVTRNFHVSEALPEEAFGAQTRIISERGQWFICAQKHITTVGQDEIQAQSVVAIDPGVRTFATAYSVDQCTTYGEDFYITRIWPLLEKLDELIGKRAKSRNSQWTRHFQKKIDRAMVRVRNLVDDLHKRVAHDLVKSFDVILLPTFETSQMVEKQERKINTKTVRSMLGLGHYRFRQRLEWMCRKYGKRLVMVNEAYTSKTRSWDGVIHDNLGGAKKISDGTIVVDRDVNGARGIMLRALYGDQEPCT

SEQ ID NO: 11512 - protein, 424 aa, unknown
  TnpB Polypeptide
MEVRRTVRVKLDVGSADAALLHKTVDEFLWAANYVVDHAWQGEYKTTSRTTLQAETYETVRENTRLHANLVQNARNEAADAVKSVVARWKQGIHAGKPQFSAPTVVYDKRCATFYDEYASLATVEGRIEVDYILPDSDRETPHSRYLNNDDYEVTGAELHNDDGEWYLHLRTKAELETDTPDQETTEHPTVLGVDLGVNQLAVTSTGAFWSGQELDHWRREYEKRRTSLQQCGSRHAHEAIQAVGRKETGRLKKMIHEIANGIVEEAFENGCTVIAFEELTGIRRRLPTASWLHKWAFEQLSACVEYKAEVYGINIEQVDPEHTSQRCSTCGYTHPDNRNGEDFNCGACGYQNHADYNAAKNVGLRSLRRHQTGDGGGAPVGVRLNRGMLNANGELESPASNGQSGSPRENLTRNEARSSDRAE

SEQ ID NO: 11513 - protein, 394 aa, Streptomyces sp.
MIHRNSVFCVKIVAQVKLLPASAHDADALAATLRACNRAANAASEVAFAKDLKRRNVLQDAVYHRIKADFDLGAQAAVRTVKKVCDAYATLKANLRAGNYGLEGSKRRAKVEAKPIRFREGAAQPYDDRILTWNLDAQTVSIWTVAGRIKGIPFVCAPEAMTLLASRKGESDLVMRDGMFFLVATIDAPEPEAYEPDGFLGVDLGIVNIATTSDGEIMAGRQVNRYRQRKRDLRTKLQKKRTKSTARVFKRQRRKESRYATQRNHIIAKKLVATAERTSRGIGLEDLSGIRQRVTAKKDQRARLHSWAFAQLGSFVEYKARRAGVPVVHVDPRNTSRQCSECWHTHRSNRTSQARFACKSCGIVLHADHNGSRNIAHRADAAWKRGAVNRPSTA

SEQ ID NO: 11514 - protein, 419 aa, unknown
  TnpB Polypeptide
MPAGYAVPVRLTVKQERYCRRAIGITRFIFNLCVATHRFCRTNRLPWPSWQDLYKAFNASKREDYPFVTEVASRVQEGAFMDFGAAVKNWRDPNHPTGSPRFRKRRRTGAGSFRAASGVAQLRYDGKRRIRLPVIGSVKLVHTLPAGIPYEAHISLRHDRWVLSLKYWREPTEQPAPDSRIAVGAVDTGINPMATDSGGQFWENPKAYYLAERKLRRWQRAQARRTPGSRGWREAQRRIDRLQRRVTGLRRNAQHQMTSALVNKFQSLVIEDLNVKGMMAGLTPKAQADAGMGEIKRQIIYKGEWHHCKVLLADRYYPSSKTCSTCGVVNAKLKRERRWRCGSCGTTHDRNLNAAVNLRNLLTLPSGRGVTLRDGKALATGSACRETGPDDRRTAQPEQVFSNADCVLATSPELNVNTP

SEQ ID NO: 11515 - protein, 538 aa, unknown
  TnpB Polypeptide
MTLVVISDTADLPPALILKSASMLWYNRSMVAHKKDKLTVTYQTRISGNEDALTAYANLYGTLQRRMFADVSAGHAASSLKSKYISHNRIPARMFNALRVSLEGRMSSARESQKLHRDTLQGLIARANRRIASLSLKGKPHQVHHKRRRLENLRHRLEKVESDIDAGRLRLCFGSRKLWRAQHHLQANGYTDHEEWLSDWRDARGSEFFVLGSRDESAGCQLCVATVADDGALTLRLRMPDCLAEQYGKYITVVNVRFAYGHEHIVAALQSNADYRKYRRQHGESAARESRLGQAISYRFKRDRRGWRVFTTTKMVRTPLVTDRRLGAIGVDLNADHLAVTETDRSGNLVNAFSVPLVTYGKSAHQTEALIGDAVARVVEYARESRKPLVIERLDFRQKRAALEGESPGRSRMLSSFSYGKVKAYLLSRGYREGVEVFEVNPAYSSMIGRVKYMERYGLSVHQAAALVLARRLLGCREGIPRRWIVPLDRGGHVTFRVPVRKRVKHVWTYWAAVSRQLGPALAAQHRLVRANPVRAPA

SEQ ID NO: 11516 - protein, 394 aa, unknown
  TnpB Polypeptide
MGLVHKTYQHRAYANAAGYDRLDFVMLNCARLYNAALEEWRAAYKHSRISRTLYDQMKELTGVRHDDPEFWGAISIQVGRGVLVRLERARQSFFRRVRDGETPGFPRFKSSARWNTIEIAEPSRAMVKQVGDRHAIKIKGLPTIRLRKGLELPDTGSLKALTITRRGRRLFVNLTYAVERESLPSSGAVVGIDMGVSDRMTLSTGEALRRRRKPNGKLRQSQQRLSRCRKGSRRWKQRRATLANHQYRERVRNRNECHRVTTELVRRFGLIAVEDLPIRNMTASARGTVEEPGRYVKQKAGLNRSVTEQTWGIMRNQLTYKAEWAGRELVAVDPKFTSQRCSGCGAVSAEHRQGKRYKCAECGMTKDADVNAALNILHKALTGGDFPVAVPDAA

SEQ ID NO: 11517 - protein, 410 aa, Halorhabdus sp.
MHYNYKYRLDPPGALTETRHHHVDTCRQLYNHVLYKLNEGDEIPARYKVQDTLPDLKEWWDDLNGIHSKVLQMVVKRVYDNLATLKAQKENGRAVGMLKWKPPREYRSLTYNQSGFELKNTSGRPVLWLSKLGEIPIHLPRDLPENATIKQVTVKQEATGEWFATFGIDMDETTPEKPANPEKCVGIDVGVLKYAHDTDGTAVASLDLSDESERVERAQRNLSRKEHGSANWVKQQQVVAERHAELKRKRRDFLHKLSNYYATEYHLVAVEDLDAKGLVELPGNSRNRAGAAWGTFLQMLEYKCEQEGTHFVAVDPKDTTKECASCGVKTDKPLWVREHSCPSCGFEADRDANAAWNILSRGLEDLGVVHSESMPVETALPTDTNSVSAKRVVEAGSPALKERTAKAVSE

SEQ ID NO: 11518 - protein, 454 aa, unknown
  TnpB Polypeptide
MEQQCGRKIGLLPTKAQIRTMRRMCAVSRRAYNWKLAIQNAEYKAAKKAAPEGEKPKCRLGTPRDWHKEWCVHKKEPGNEWITSVSKFCGQEALIDLGFAWKRFFKGLARHPKFHHYGVDESFRCSGGVFIGRDFVQLPTLGKVRLAEKDYIKIPDGSDKVPIAMVTVSVDAVGHWFVSFAYHTDVVPLYEEVTSITEDDIIGVDLGIKDSAITSDGVAYANPKAYKRYMKRIKRIQKTVSRRKKKSKNRKKARILLAKAWHKVTSIRINHAHQLTADLTYKAKPKMVVMETLRPVNMAKNHNLSMSVLDANFGRIKEYMKYKCKWLGIKLVLAPQFYASSQFCSHCGCYKNENLTLKDREWTCPVCGEHHDRDVNAARNLQFYGLWLSGLVQTSENDAARLAVGGSSAEACPSVYRKEGMTYVNPRDRRLQFFLAEEPCRLLKQELSTMNSLT

SEQ ID NO: 11519 - protein, 380 aa, unknown
  TnpB Polypeptide
MFKAFVFRLFPSKSQHARLEAVRQTCRHFYNDLLRDRKDAYELHGISITRTDQLRKVKVEKDTSPYALDIHSHILQNVVADLDKAFQAFFRRVKAGEDPGYPRFKGRNRFAGFGFKEYGNGFKVDGRRLKLWGIGRIAVRWHREIEGTIKTARIYCRAGKWYVSFACEVEKPEPLPRTGEEIGVDVGLLRLATLSNGEPVENPRWYRKILRELRVLQRKIARATFGGRNRRKLVRTLQKLLAKVANCRKDFLNKFADDLIKRFDRIVLEDLRVAAMARGRFAMSILDAGWAYLLTRLTHKAASAGREIVLVDPAYTSRTCSGCGAIFEHLTLSDRWVSCGCGVSLDRDHNAAIIVLQRGRNGPLGAKLPVAGVCPEAARL

SEQ ID NO: 11520 - protein, 496 aa, unknown
  TnpB Polypeptide
MRIVLSVASHFTPVKVAAVECAIKLNLELSPDDERIIEGQMKICNWLYNQLVQRANELRDSYVQNQDAEVAKTLYGNRGLRDLVPAIKETHPFLKSVHSSPLKNAALQLTRAIQDYQKSRKGKRQGKPTGWPSFRSHKVKPFSLLYDEPGKGFKLEGRTLRLSLGQTSEGRRIYVTGTVEKPLSSFDDAEIKQLRIKREHDRYFAVFSVVRKFRPESRQGASAQAPQVIALDPNHKNLAYGVDSSGQAIEIVNFRGTKYFDREIDRVKSKRDLCQRKSIPVTEDGKFIYFKPSRRYQRLQKTHRRLLQKRRDQTKLMLQTIANFLCKHYSVIAIGDYTPRGGGISKSMRRGMNNQSLIGRFKLVLKWVAARSGRIYIEWPEHGSTRTCSECGYKLATGLTPDIRRWDCPACGTHHLRDENAAINGLKQVMHKDLSCSDQIPPVTRRHSARFSGSGIERTPLDATGKPSVTTTRVVELRTKRCEPDGRRSVPHGATA

SEQ ID NO: 11521 - protein, 391 aa, unknown
  TnpB Polypeptide
LIRTYRYRLYPTSAQTRALDFLLWQGRTLYNAALEQRITVYKETGKGVSYYQQWAHFRDLRNASPDTLGYLNATSVQQMLRRLDKAFIAFFRRLKAGEKPGFPRFKGSNRFNSLEYRHGDGCKLRPGGRVMLYVQNVGEIKVKYHRRLPDGATINHVVIKRCAHRWYACLMIDLPVPVVPEHTGPEVGVDMGISHLLALSDGTLISNPRWLRGRLSQLRVAQRRLSRRKKGSNRHRKAAAQVARLHERIANQRRDFWHKITRQLVDTYRLIALEDLTLNFMTANHHLALSTYDAGLSEFQQLLAYKAESAGTRIVTVNPAYTSQTCSDCGAIVPKDLRIRVHVCPDCGLTLDRDVNAARNILKQAVNGARTGPPGRNVAGSGERALGSSLL

SEQ ID NO: 11522 - protein, 384 aa, unknown
  TnpB Polypeptide
MKKKRKKKQHRRVYKYQIREHPKNVRLGNMLDDLCDVHNHFMKLENRYYRIYGKYAGRYRLQPHLTKLLERTDQYWSWIPRDTLDAVIIRLHLAWERFFDIPGTGRPKFKRKGRYRSAKFQSGYKLEAGRVRLSFKEWDAPSQSFKFNKRWFSFHQHREWKGNVKYIQILRDAAGTYWLYVVTDNTSKEVLPATGESVGADFGMDTYLTLSTGEKIDSPQFLKHALTELRKRYKSLSRKIKGSNNWLWCVRQIARLYRHISNQRKDWHWKLATDLCRRFDLIVIETLNLDGMKRLWGRKVSDLSFGQFVEILKFKCFKHNREFSQVGQWTPTTKPCSDCGYQNKDLMLSDRQWSCPECGSDHDRDINAAINILRAACDPVVEQM

SEQ ID NO: 11523 - protein, 402 aa, Escherichia sp.
VKRLQAFKFQLRPGDQQECEMRRFAGACRFVFNRALALQNENHEAGNKYIPYGKMASWLVEWKNATETQWLKDSPSQPLQQSLKGLERAYKNFFQKRAAFPRFKKRGQNDAFRYPQGVKLDQENSRIFLPKLGWMRYRNSRQVTGVVKNVTVSQSCGKWYISIQTESEVSTPVHPSASMVGLDAGVAKLATLSDGTVFEPVNSFQKNQKTPARLQRQLSRKVKFSNNWQKQKRKIQRLHSRIANIRRDYLHKVTTTVSKNHAMIVIEDLKVSNMSKSAAGTVSQPGRNVRAKSGLNRSILDQGWYEMRRQLEYKQLWRGGQVLAVPPAYTSQRCACCGHTAKENRLSQSQFRCQVCGYTANADVNGARNILAAGHAVLACGGMVQSGRPLKQEPTEMIQATA

SEQ ID NO: 11524 - protein, 452 aa, Moorea sp.
MKHKAVKVRIYPTKEQVMILAQHFGCARWWWNYALNQCIETYKETGKGLKQSALNSMLPKLKKEKETEWLKECYSQVLQSVSLNLSRAYQNFFVRVAWPIGQGRAKYPRFKSYHHRQSIQYPQNVKQVGNSLKFPGKLGVVKAVIHRPLEGEIKTVTVSFDPSGKYYASILVEYESTEVKVSQEGNVIGIDLGIKDFAITYDGENNSKFGNPKHLAKYEKKLAKKQRIAARKKKGSNGCKKARKIVAKVYERIGNVRQDYLHKLSRKIVDQNQVVVVENLNVKGMLCATRTLRERNHKLAKAISDLGWGTFVNFLSYKCEKEGKILLEINRWFPSSKTCSNCHYRIKELPLDVRSWTCPNCGSHHDRDGNAAKNMFSRRYQNAILLWDGGGQRQGRRSKTKTRTSIQVEVRPVANLIRRRKAHLRHSSVFAFAQRRLRRKRGQRPSWKPLPQ

SEQ ID NO: 11525 - protein, 479 aa, Lachnospiraceae sp.
MLHKGDTMPSRMYTIETRIPNNTELVEYLNVYVTKYSAVTREIWHDLTSPDFAIQFSKMSRYVSYICRKHGLLKRTVNSIRFDVQGRMKSLMEQKKTELRQTEIKISVKKKMIKGIKEKLDAFKSKAVANSITKKELEKYRKLKTSLYWQKNKLNELRQRREKLEYQIENRIYSMCYGSKEMFRKQYHLSENGFKTHEKWHNCFVKKRDKNIFYLGSADESYGNQLCRLKYNMETGLFRLELRKENDYCQGNRRYDKYIYLSGLDFKYRKKELIAILQSYDKAKKGDCPMTFRFHRNGNRWYLQVIFEQWFENYRTVSKYGTIGLDYNDGFIELSETDRSGNLIYQRHYDLKYHGTGNRAESEIRNAIADIVKYAESRCKDIIIENLNFKRVKARQSPSIRVKGRRYNRTRHQLDYRRYKQTLLNTGFNHRVNVVMVDPKNTSKIGKQKYCNSRKLNIHQAASYVIARRGQGYIDRLAI

SEQ ID NO: 11526 - protein, 775 aa, Firmicutes sp.
MELLSIGEAAKKLGVHPNRLRAWEKQGLIKPVRLPSGQRRYPVEEINRILGTGGMKTESEAVVLYARVSTKKQADAGNLERQMERLRAYAREKGYRIVAEYLDVASGLNQNRRGLERVLKSAERGEFKKLIIEYPDRLARFGYGYLERHLRYCGAEIEITSQKESEDAYTELLQDLLSIVTSFSARLYGARGGKKVRQGFRELIRKWCGMKKRKKELINPKSGMKYTVCGEFFPEVYPAFRAERWSRGEETPLDTEMRLFGACMRWAFNRLQEGHTREELKKQGQKTFGLNSRFADDAILKAKEIIISQKELLNLEIKEAEAKLTRAKKKLGRVEKDLERAIRVNDPVRIEKAKLTMRGRRARVKKLSDKLEKLKNYRDSNAMPKIVFGGRTLWKQVCKGRATREEWQNARRNRLYARGDKTKGGNPNIKLSWRNGEFYLAVTISHLSEQKEVDSAGRPLMTRAPKVSGKLWLLEKHKVKVLELLLSGAPYSVELIKGSDSRYRVHVTFTAELPLTQTNLNRGYLGVDTNPDGVALANAGFNGQPEPWLDGFVVPYPKALHKYAGEFQVTIHPNGFLYIKIPELAYGRGYRRAYLIGALVKVVTDTAKALGKPIALENLEFGKDRLDTNKKFNRMAANFPYRKVTEAIMRRAFKEDIGVKPVWPAHTSTIGWWKYMRQYGITVHHAAALVIARRASGFKECITGELKQKIQAIREELNQKVNSLPGEGKGMSRKVKRLFKRLEEKISVHNGLTRFKQESFYSVWHDLKELVLLSR

SEQ ID NO: 11527 - protein, 405 aa, Chloroflexi sp.
MMVLRAFKTELDLNNVQKTACAKHAGAARFAYNWGLSRKIEAYKAGEKTPTAIDLHRELNVLKKTEWPWMYEVSKCAPQEALRNLDQAYAHFFRRVKEKRNGKKAKVGFPRFKSKKRGLGSFRLTGAIHVFEDAIQLPRLGRLRLKERGYLPVSEVHILSATVSERAGRWFVSLQVEIDQPNPTENRQPVAGVDLGIARLATVSDGTGIENPRALKSNLCKIRRLQRTVSRRQKGSRNRKKAVQRLAKAHLRVANIRKNALHQATSLLAKTKSAVVLEDLNVNGMMKNHYLAQAIADVGLYEFRRQLTYKGEWYGCQVVLADPYYPSTKRCSHCGNVKAKMDLGERVYECEVCGLVIDRDLNAAQNLAQLITASSAGIDACGEGVRPEFPAGLVEAGTEQQSALA

SEQ ID NO: 11528 - protein, 394 aa, Anaerolineae sp.
VKTVTLVEKRVINKSDNVYAAVDATSFATKNLYNLVNYHIRQPYFQEKPHYLQMKELWSIIKPTDAYCALPRKVSNQVILHVYHDWGAYYKAVAVWRVAPEKFKARPGIPHYLPKADGRTLITYEKGAINRKNLKKFGIISPSGLALPIKTDRNVVQIRIVPKKEHYFLELVYRVDVPENKKLDRILVAGIDIGVNNLAALTSNKIGFQPKLVNGRPLKAINQNYNKEKAELQSKLSYGKKARFISPKIKQLGVKRERQINNYMHTASRRIVDLLVAENAGVLAIGHNKSWKQNVNIGDKNNQDFVSIPFNNFIEMLEYKASLVDIDVIITEESYTSKCSFLDDEPLCHHKKYMGCRKYRGLFVSATGKKIHADLQGSYNIVKRYTLTLSGARG

SEQ ID NO: 11529 - protein, 166 aa, Clostridioides sp.
  misc_feature (127)..(161): Xaa can be any naturally occurring amino acid
MLLYLKSQVVDIEAFENTNNQIGLDLGIKEFCISSCGEFIENPKYLKKSLNKLAKLQRELSRKTIGSLNRNKARLKVARLQEHIANQRNDFLQKLSTKLIKENDIICIEDLQVKNMIRNRKLSRLIXXXXXXXXXXXXXXXXXXXXXXXXXXXXXXXXXXXMVDKL

SEQ ID NO: 11530 - protein, 456 aa, unknown
  TnpB Polypeptide
MQAYRFALDPSPDQEIALRSHCGAQRFAYNWGLARIKANHSQRKAEASYGLEGDEITPPLDWSAYSLRKDWNQVKGEVAPWWSENSKEAYSSGLANLAAALGNWRDSRKGKRKGPKVRFPRFKGKRAGLSCRFTTGGFGLAGTDRRHVKLPRIGMVRTHESTRKLARHIERGTARIRSATVSLRGGRWFVSFTTEISRHDRSPARPESTVGVDLGVKSLAVLSTGEIIPNPAHLQVALRELRRMQRQAARRIGPDKRAKQMPSARWRKSQSRIAKLHAKAASARRDGLHKLTTRLVRTHGTIVLEDLNIVGMMSNRKLARRIADAGMGELRRQVEYKAAWVGARTHLASRWYPSSKTCSGCGAVKAKLRLSERIFRCEQCGYALDRDLNAARNLTALVETSSPSCGATVNEPTGNPRKPRTVRAAGIATGRPVPDGAGQRRRRKSPTQDTHIFICP

SEQ ID NO: 11531 - protein, 435 aa, unknown
  TnpB Polypeptide
MTRHTTFCFTLKPTPSQAEALARHVGAARFAFNQCLAFVRDALASKSDEGPSPFVPWSGFDLINAFNRWKTTAAAGADESGAPGLPWRTQVCQQVFEEAAVDLGSALAAFSAGRKGERKGKRARFPRFKKKTRDRPSFRLRNKGHGAKSAIRLGVGDDPRMLRLPKLGDLAVRECTRRLRRMLAKGRAKILFATVALRSSGRWMVSMNVAAQELHSALRHASPLDSPVVGIDRGLTTFAVLAEASGREVERIDAPKPLRNSLPALRKASQSLSRKKGDSRNRARARAALAKMHARIGAIRRDFVHRESTRLAKTHGRLVLEDLCTKGLMKTTLARSLADSAWAMFASVLAYKMKWRGAELMVPPLQHLWSRRREARAQRAHVSLRPLRARGRPRHQRCSEPGELWRDRVRGRARLSVSRRREARGDAKRLWRGKR

SEQ ID NO: 11532 - protein, 493 aa, Moorea sp.
MPRKVGATKRISTQVVPVIGVTESVELELLSTMRKLGIVRSESYNKLGSINHWGLDWKKAYPEVRSFRTPESLGLPSKLAEWTVSDVAKAITAQQAACIEAVVKKIYRRFSGKENQNKRKEYATLLLTLAFLENTLLHRLVRKEFQRGHSWIKNQIVYQQGGYKGKRLSRNTYQLELAGLRRGKRNRIVVRSNRKIKGQIRLIYNQLLQRFEVHFMVDHGTVGITSERRSVGVDKGYTEAFYDSEGQAHGKGLGKVTTKKSVRVAWPFGHRICRKNRNRGKLWALHRKLEKIDPAKSARILENNLTRKTENRRYRQDQSELTAMIGAASKSLFNGESLKVFAEDLTRPIRNKRQSKAVSRKLNSWMKGIMRDSLQKWANWTGSVVTEVQPSYTSQIDSRNGTLLGKRTGDNFTGFDGVVLQADHNAAKNILARGTDKEITRYMSRAEVQAVLLRRTARYLEGMGLSLIDAVELGWLDCKHTKTQAFKQLLKGI

SEQ ID NO: 11533 - protein, 177 aa, Streptomyces sp.
MTVEPASRMRRRPAATGRVVGIDLGIANFLADSDGGFVPNPRHGRLAAAKLEAAQQALSRFPRGKARARTANHQRAVDKVAQLHGRERRQRLDHAHKTALGLVRAHDFIAHEDLRIRHMSRIPAPKPDPGQAGAFLPNGAAAKAGLNTSINDAGWGVFLTILHAKTPHGCNVSSSGG

SEQ ID NO: 11534 - protein, 388 aa, unknown
  TnpB Polypeptide
VAIKSYKIPIESPKDLIEAYFEAKKKALEEIMNHVPYSRSGKVHLSLKAEDRKKLRNNLLKDWKYSKHYIDSAINSVIGLVKGWIKLHNRRKAKSKPEITRKTVYIKSTLFTYKNGKLKISIEPNKRYLEVDLTRYDYLPKDFDVIGGLLLTESELIINFKKSVKILKPRDWASFDVNLTNVTALINGRIVRYDLRQLYHVHRVYEEKRRSVQKLSKHKPKTAERLMQKYSRREKNRAKDFTHKLTTKIVRELKELQSGAILENLKNIKDRVLNRSKKLNRKLSKWNARTFQFMLGYKLRWLGLPVKYIDPKNSSKKCPVCSGRLSAYRGRLMKCEKCGFIKDRDIIAVLNLQMWGSGVTPKALLGHLSPMIGKQLIDLRSSMNVYQP

SEQ ID NO: 11535 - protein, 291 aa, unknown
  TnpB Polypeptide
VKVTQAYRFALDPAPEQERALRSHAGAARFAWNWGLARCKERHEAEGKWYSAVDLHKLWNAEKKTEPALAWWPENSKCVYQEAFRDLDRALRDFIRSKKGQRRGKRLGFPRFKKRGKCRDSFRFTTGVIRCDCGTVTLPRLGTIRTHESARKLARRVGNGPARILSATVSRTAQRWFASFTVEVERDVPHSHARPGSAVGIDLGVKALLTGADNQGNVIAVSGPKPLRAALRKLRRASRAHSRKQPGSANRRQSAGRLGRVHARVADVRADALHKATPMLAARYETIGVHD

SEQ ID NO: 11536 - protein, 404 aa, Actinosynnema sp.
VVVQARYRYRIEPTDAQRSMLARTFGCARVVFNDAIRCRDDAWRAGEKLSPTEVQRRVITEAKTREVRAWLGEVASVALVQSVRDAHRAFANFVDSVKGRRRGRKVGRPRFKSRKDNRQSFRLTRNGFTLRPDGALYLAKVGDVRVRWSRDLPSEPSSVTVIREPDGHYYVSFVVGVEPSPLPSVEREAGVDLGITRLATVVDTSGRRTDVANPRHLARKQRKLARLEREKARRTKGGANRAKTRRKVAVQHGKVARARRDYHHKQALTLVRENQTVHVEDLNIAGMVHNRRLARAISDAGWGRFVRLLEEKAERHSRTVMKVSRWLPSSKTCSHCGHVMHDMPLKIRTWVCPGCGGTHDRDANAARNILAAGQAERLNARGAHVRPPSGEAMGEEAGTTPDAA

SEQ ID NO: 11537 - protein, 196 aa, Actinosynnema sp.
VCAWYGTEPSPNATARESNNRRKAKTKVARAHRKVRTARQDFLHRTSTRLVRDYDLIAIEDLMVKNMVRNRRLARVISDASWGEFRRQLEYEAERAGRTLVVVDRWYPSSKTCSECGHRLAELTLSVRHWTCPACRTHHDRDINAAKNILAAGRAVARSHTSGEACGAGVRRQGLVLSQSATKQEPHPARGGIHSL

SEQ ID NO: 11538 - protein, 271 aa, unknown
  TnpB Polypeptide
LPVLAAPGPDGVHLDDHRADARPDLHRPARPPGTAGHPPSGRVGLDPAWEELVPDRHRRPARCCAGRSNFRVRRGGPGYRNIAVTHNPTTGEHHDWSGKAVKDRRHKNRLLRTKLQTKGTKSAKRLLKARSRKETRFAADINHQISKTIVAEAKRTGCGIAVEDLTGIRERVRLRKPQRAMHSSWAFAQLGSFLTYKAAREGVLMVQVDPAYTSQQCSACGHIDRKNRPNQAEFCCQKCGFSLGADRNASINISMRGQDQYVAAVNQPNAA

SEQ ID NO: 11539 - protein, 391 aa, unknown
  TnpB Polypeptide
MKLRWTFRCYPTPEQAEHLNRTFGCCRYVWNWALKSRSDAYRAGERMNYPESSKALTALKIDSEHEWLNDVSCVPLQQSLRDLQTAFSNFFAKQAKYPALKKKESRQSANYRVGGFTFDSQNRFLTLAKIGAVKVKWSRKHIPQPSAVRMIRTASGKFFVSMVVEVEQNDLPKTGESVGIDFGVSRLATLSNGERVANPKHGAKQQKKLAFCQNRLARKKKGSKRRELAKKRVAKVHEKISNCRTDSMHKFSTEMVKRFDVICVEDLNLRGMVKNHNLARSLSDASIGTAIRMIEEKAERYGKEVVKIDRWYPSSKTCSVCGHVIEKLPLSIREWDCEECHSHHDRDENAAINILAVGQTVLAHGGTVRLKTATAVKSKSHRSENHLSALA

SEQ ID NO: 11540 - protein, 408 aa, unknown
  TnpB Polypeptide
MSETLTRTICIKLDVGGNEAALAETQQQFNAAATWIATVCWEERITNTNTAHHRVYGETRARFGLGAQLSVCARAKAMEAIKATKTQESERKARWRKEHARRRDKGKKALPPPEPATCPQFGPRSSIRYDARTYRLLALDRVSLNTLRGRIACRLLPGKWQHDMLVDPTWEIGGAELVWRRGVYSLHVAQTRSAPAHASPEDGAAIGIDLGLVHIATDSSGEHFTGAPVRKARSRYVARRAALQRVGTKAAKRRLKQMSGRERRYMKDINHRIAKSLVHKAVVSRKALALEDLTGIRDATMVRREHRYERHCWAFFQLRLFLAYKAAWAGVEVRLVDPAYTSQTCSRCGYCAASNRQSQSSFLCQQCGFCCHADYNAAVNISLVARQAANGSSGTSLATSPRASAGGS

SEQ ID NO: 11541 - protein, 396 aa, unknown
  TnpB Polypeptide
METTTVRRVYRFRLEPNSSQEEGFRRYAGARRFIWNWALHQKRDHYQTTGKGLSEKELSARLTVLKGEPDTAWLKEIDSQLLQQVLADLKRAFANFFDRRAHFPRFRSRKRDTARFRIPQRVTLTDGSLTVPKIGRVKVRQSQEVEGVTKSATFKRDACGHWFVSLVAEMEIPAISLALPAAERVVGVDLGLKDAVVTSDGERVAAPRFYRAAQRKLRRAQRGQSRKQKGSKNRRKARVRVARVHQKIAAKRNDFCHKLTTRLVKEHDAVCIEDLNVKGLAKTKLATSILDASMGTIRRQLQYKGAWYGVHVVAVGRFYPSSRLCHDCGYKHDRLTLSDREWACPSCGSIVDRDLNAARNIKQEGLRILAAGHADSLNACGQGVRPAMPAALAIPA

SEQ ID NO: 11542 - protein, 479 aa, Burkholderiales sp.
MQIGNRFRCSPTPAQAQTLLAWIGCQRFIYNAKVGEDQYFRRFARRSLTHTGEFAPIDQQYSHFKTELTPWLSDVPSQILRNGAVLWKQAYGRYFSKLAGRPAIHRKSGEQSVWITSELFAFKPVVDKATGEITSYALHIGTRKFALGQIKFTAHKDFKPAASLHISVNAGRWHASFNYDDGVSEPSVQESTEYLMQFSENELRFATVGLDRGVNLPLAASDGQKFGFTVVQDKRILAQERHKKRWQRRQARRIKGSHNWVKAKRKVARYQRYGADVRRDVAHKTSLKLATEPRYKLFVFEALKVANMTKRAKPKQDEQGRWVKSGAAAKSGLNKAILASTWGKTKEFLSYKARRSGKLVIEVPAFYSSQECAACGHTHSDNRPSQAEFVCQSCNHTDHADHNGAAVIAKRGVRLVLSGASVQKKSKKCGIRKNKVGEVICEQVASVPSKLGETEVSRLGGNIPALWSLTQETPATAQA

SEQ ID NO: 11543 - protein, 594 aa, Ktedonobacteraceae sp.
MFVAGEKMRTSHTHHPLTYDVRLPAEAQADALRLLDASREVVNQALTMLWSSLDEFGSERAGPAWKQVGKYMGSPLPHGDRQWRCESEVVGRLLRQQAERKKAFLLIAPILSDGFIRPKTEKRPAGKNRSAIKEAITALQKSLDEDETSFVTLQNVVEQACHYFFHYDRFPSSYEELQPVPLLKVGILTYAGDDGREKGQAYRLAVDLDAGVARFRFRYPDEAGVWHWRKEDTIMALPECLKERLSVGEMMAPTLREECRADGERFAVLDFIVEVEKKALPAWQSVERVLGADWGVHSLLTATAVDEQNVQVGRPFFLDTGSFDGKQARIRRQIDELKKKVARFEQERDALPADHPKSSWYQERLTLYRREVERCWRKYERRNRALAHLASNVLLLLCQIHGCSLLSMESLKTLKTTGRGRGVRGRWRNYCNNSTIRGEIWRLLRYKCHLIGLRFQTCPPRGTSHTCPHCGKPAQTYREPSHRSEAVKWGRWMWCEACNFNGDRDYCASLNIARLGVAYLLQMKTLGKARSCSITDPRVKPVSYTGAGSALLLPPTSSHARPHHAGKICYYPGWFGSAFLQSSQPKAVFLRLCG

SEQ ID NO: 11544 - protein, 442 aa, unknown
  TnpB Polypeptide
MQIISSYGVELRKQNIPIRQTLEIYRSAVSYLIGIYVQVWEELAEIPDAKRRFNAAEHLVHTTKKNHACFDFDIRFPKMPSYLRRSVIRHALGTVFSYRTRLDLWEKTDGKSGKPRLVYENHAMPVFYRDVMYREGAEGKDEAYLKLYDGHDWKWSCVRLEHTDMEYLRKYWSGKKASAPTLEKRHRKYFLRFSYTEEVTLTKTPVKEQIICSVDLGINTDAVCTIMRADGTVLGRRFIDYPSEKDRMYRALGRIRRFQREHGSAQTQGRWTYTKRLNTELGKKIAGAIVRYAEENHADVIVFEYLEMQGKIPGKKKQKLHLWRKRDIQRRCEHQAHRKRMRVSRICAWNTSRLAYDGSGAVTRDWEDYSLCTFQTGKRYNCDLSASYNIGARYFIRELLKPLPVTERSLLEAKVPPVKRRTSCVYADLRKLHSEMELLKAA

SEQ ID NO: 11545 - protein, 802 aa, Massilia sp.
MIALVPVLLDLVTGQLHRDRQEAHRFAACHQPCIALGDDGQQLGLGHDRGHAQEAGQVQHHVALDLLARQDLVDDRVTRAGSPHAHMSFLAQSVDRERLAHARMGFRDQADEVLVEQLLLVEAGFQVRHEADGEIDDAVGQFAWRVGRNARDLEMDAGGDGTQVVEDARQQHDLADVGHADAKAPRAGGGIEHGLVGQRVLQGRDRAAHVLDRVLRARRGHHALGGAAEQLVLEMLAQLGQGEADARLRQAEIVRGPGHVPRLENLVEHQQQFQVESLHGQPNMWIPDYSNQEPSIFNILPLRHSSGMTAAIRSYTLVLRIMEKCEQASARCAPAGMTEPARYRPGPTVHCPQRFVDMLLAHRIRLDPAPVQRDYFARAAGTARRVWNWALAEWQRQMVAGQRPDAMALKKQFNAIKYAHPDWLNADGQPWLRSIHRDAHSQPFANLAKAWGRYFAALREHRPAHRPVFKKKGRCRDIFYVANDKLRLVGKCVVLPKVGPVPLRESLRWPGKIMGASVSREADHWFLALQVEVPEQVALLHRSGDGVTGVDLGLSTAATLSSGEKIDAPRPLKAALRRLRIRNRRQSRKVKAAKVASGISGRIPKGTRLPVSANRTKGARTLARLHARIACVRKDFIHKLTTRLCRENQSVVIEDLNVSGMLANARLARAIADVGFYEFRRQLQYKATRYGTTLVLADRWYPSSKLCSRCGIRHGGLMLGERTWTCDHCGAQHDRDVNAAINLQRLATGAFAAQSALPVASLAATPGTAADIGSAGGGKVTPVRHEHGQQDGSGQEQNDAHF

SEQ ID NO: 11546 - protein, 470 aa, Actinoplanes sp.
MKVTRIAYSRHLNAGKWAALTEQARRLGRVRSQVWQWYGSVAGADLRDRQVRDQWLTDGTADRFAVLANPWKETLRDAMADIAANRASAKVEVRRAVGRHAATETERKRLFTALKAEKWTDDPYLSRQMRKHWPRGANHTHNQIVVRADQFRTFTLTDGGNVWLAVPSLERGRRVAIPLNTTVSPTGTLRLILRAGRVEVHYQIDAADMPTSQRPCGEATVGVDKGYTEVLTDSDGNHHGQNLGRLLTEQSDRLKERNRRRAKLRSIANNAAQRGNSAKADRIHKHNLGTAKRDRQAARWRARVRTETFTAVHAVVDKAGMVVAEDLTKTFAGRKKLSKNMNRRLAAWTKGVTAEALQNVSERRGSALVLVNAAYTSQVDPDSGSLVVRRGDRLHCASGVVWQADHAAAVNILYRHGDPDIALHTPYKRVKQILQERTDRQRARLPAQDSSREQSTAESETSELLRPAQV

SEQ ID NO: 11547 - protein, 358 aa, Psychrobacter sp.
MKTLKLRIKDKHAGQLNILAGAVNFVWNYVNELSFKHLQRTGHFFSAYDLAAYIKGAGEYLNLHSQTLQAITETHAKSRKQFKKDKLNWRTNNPKAKRRNLGWIPFKKTAIKHLATRQSGKKSLKTTLQLSLAKGQKLIIDLWDSYNLALYSINTCELVQDSRGNWYACITVKEFPKTVCGTGQVGIDLGCKESAVTSDGDVLTTKLTHKYAEKLAIAQRAKHKKRVRAIHAKIKNTRQDLIHKFTNTLVKANNLIVVGKIKSKSFTSTNLAKSVYDAGWFEIKRQLDYKCKNAGCHYIEVNEAYTTQTCSCCGSRQDSPKGRADLGVRVWFCSSCQTVHQRDVNGAKNILAVGLDRL

SEQ ID NO: 11548 - protein, 705 aa, Vulcanisaeta sp.
  misc_feature (381)..(387): Xaa can be any naturally occurring amino acid
VAVELEVPKDVSKLLYSVESVYLSIVREVVTYAVANNVLSATELQGIFYRKYRLEYQGLHAHLIIQAIRQAVQIARSFITRRRRGLVDKPYPEVRSVSIRFTEDAWSYEQFIRSTAPVRVELSLLGGRREVWLRLHKRFWLYWWRVLTGEAELASTLILKRKRDKWYAIFVFELKPRVEKPQLIIAFDINENTVAVGKIDVKTTVGKVAGWNRQYVTPQLYTIKTDFGRLARRYERVRNAIIERLKPHFALPDGKYMNVTNTREYRKQVKRLRERVRKVGRVRHVANELTKTPAIIITEELGSNPQESMIEDVGKDELRHRIKQTPFKALEKAVEDKALERGSKLFRVSAYRNSRVCPIHFTRLEETDDWHFLKCPKGHYXXXXXXXRPTGQGGGRLQLGVPKLNEGVINEIANELSKSLNNLTIGTTYLGIIIALRDIIASVIKIIERYNLRGKRVVVIYDDIDKYVGKHDQDALMAAANAIADKIVHEYIPRRLWVKVIFAVSDNAATRELDRLGSKGGYTPYLLWNLPKRAFREVVDEVVMKTGVKDVDFDLLWNLLGGNVRELGIIITGYNWNMKAWLQDRAINRVKETFRRHAESSGFGSVEKALAWLIEKGRVAARDYGLGEFTGQPDAVEGVLGLLENNIMIDISPPGVWRLSELPSEPWIGKDYAYQIPAYYWAIRAMVKAGKANVTSEDLLKIMQH

SEQ ID NO: 11549 - protein, 395 aa, unknown
  TnpB Polypeptide
MRTSYQYRLKPTKKQAEIIDNTLDMLRYQYNYQLAQRFEWYEQNRSPVDRCSLIVCHLPELKDKPNRFSQQATLTQLKKDRPWYKSIHSQVLQEVPKKVEIAFDRWLKGDANGKRSGKPRFKGKGQYKTFTYPQFKREHLNNDKITLSKIGIVKVIVHRQVPHGFDIKTVAVTKKADGYYVTLSLEDKTVPTIKPDFDVNNIVGIDVGLIDFIVTSDDERIAAPKFLRKAERKLKSAQRRVSRRKKGSNRRKKAIVKLGKQHKKVADTRKDFHFKTANNLLKKYDVIAIEKLNIKGLAKTRLAKSINDAGWGQFISILTVKAENAGLRVIAVNPRGTSQECSSCSQKVLKPLSQRIHNCPNCKVSLCRDLNASLNIKNRGTHDLKAQKMSSMRSL

SEQ ID NO: 11550 - protein, 376 aa, unknown
  TnpB Polypeptide
VEELEVKKTLKFKAIPLSNKDGELLNYLITEYNKLVRKCLLYAKYSRIYVKPSKSRLHKLTYTRLRCESDLHSNHITSARDMVIEMIKASAYHKVFPNPKRLLPVRLFRGKTYYLDNGLVRIVVKPRIYAYIRLLGAEEWFRLLDLARGALLIKRDNEYYLHVVLEKELYLPKSIDYVIGIDTNLDNLTLSCINVRSGELIVHHNISLRHIVGKRIYYRNRRAHLQSIGKSTQKESAVCRVVLERVVEEVLKFVRPYMPKCIVAIEELKGIRDKLIKLSKRKDKKYLYSTTFYKRLLKRIKEKLEWERIRVIEVSPEYTSIICSNCGRRGYRRGKMYSCPYCGLITNADLNASINIAKRAIPQFLPSLKQGVSVRL

SEQ ID NO: 11551 - protein, 524 aa, unknown
  TnpB Polypeptide
VGINSRSELSELTVLPTRFTKLSRVISTEPKISNLIHKNSSVSGKLSGFSPGRETTRVVLTTVNLNLMLSLQKNSIPSQKLRYNRSIFSETPMYTTQKNQIRNLTAKEFEAMRMLCRLTKNLYNAGLYTVRQYFFAERKHLKYESNYHQCKTNENYQLLNTDIGQQTLKVVDRTFNSFFGLLELKNKGRYQAKVNFPHYLPKEGYFPLLIPGGMATRTDRKTGIKTRHPRIPIKDGKFRIPMSNEFRKTYGEVWLHFPERIDISKLKEIRIHPKYDARFFEVEFISASEIEPQPVDPSKALSIDLGVNNLATCISTDGASFIVDGKQIKSINHWYNKENARLQSEKDRRGIKGFTRKQATVAISRKNRVRDYLNKAARHIINFCIANKIGKIIVGYNPGIKQEVNMGGINNQNFVQIPFWNFRGKLKSLCERYGLLYQEIEESYTSKASFLDRDEIPVYNADNPQEYKFSGQRVKRGLYKTQNKRLINADLNGAANILVKSKHNLDFERVSIGFLAKPLRTRFA

SEQ ID NO: 11552 - protein, 362 aa, Desulfurococcaceae sp.
VESGYKALQEKLHEAFYGKLRKLGFRAHHVKQIYIYAKSIVESAKSNGGKKPALRKLTARIDRYDYRLELDTMSLTLKLHSDYEFRLKLLAPRERVEKYRGWSNYELVVKYESGELWVSIYFKKTVKYVRPRTVMAIDVNFDSLTLAVFTLSGKLVRLKRFRTPLRRILTHRIWIERIQKRYPESWRFIKGVKRAIERHGERIKNISWDYAHKVGDCIAELAHRYRSVVVLEDLDKLRENAKKDRRFNKKLTLWFYRRIQFCIEYEATERGLRVAKVNPRGTSSECPRCGSKLAENGYRALRCNNCNYIGDRDVVAVINLYKKFTFHSRCGAPGVALNAPEQMQPQEAMRGCFVVDVYGLGL

SEQ ID NO: 11553 - protein, 427 aa, Desulfurococcaceae sp.
VRTVVVRSAPLPRRVFRVFAELEGMYRNMVEQLTMYAVRNSVTSFTKLKALKYRDLRTLYPHLPSHYAYTACQDASTRVKSFLRLKKKGLTNREYPDVRRVSIWLDDHLWKPGGLTSIEIATHKSWVRVELEPHKQYWKYFNTSLRLASEAKVKLDRKSRRLVAYLTFKKRVEAYEPKGFVAVDVNEDHVAVLVDGSTYLFEAGFRDIILGYYYRRKRVQEKYDKVYGVSCRVKRRALRKLRERKVKNDLRWKLANIIVRIAKESWYAVVLEKLGKNPAREMINHIRDDQLRHRIYQASFKGVQRAVEEKAKEYGVPAIYIDPRNTSRLCPAHGAPIVYSNGSRVGRCSVGGELWHRDVVACWNIFFRALRGDGSRAPSPAGLLVDGSPVPLGSTATHDPTGIPREAWARWKSLDATSKNKLMRMNI

SEQ ID NO: 11554 - protein, 459 aa, Planosporangium sp.
MPSATGDDDTPLVSHTGAPLTRPVTFVFTLDPTAEQDQLCFQYAGAFRLVFNHHIARVFANLDQRAAEKSYGITDAELTPALSWSKVSFINHMNAWKNGYAPDSPVTEIADGTVVRGLPWRGAVSADVFETASVNAAQALKNWRDSFRGERKGKKVGRPRFKAKHRTTPAFRLRCKYTEGKTPPVRPAGPRAMRLPKLGEIRVAEHTGKLSRMLETGRFHAYAAAFTYRNGRWQVAVTGMATQHHHLRRSARHRHDRPAGVDLGVKALAVVADSDGLVLHEWTGVKPLQRAQARLKLANQALARTKQGSNGRRKAVRSLGKIHARIRQLRRQLLHDITTTLVTRCSTLVIEDLNVTGMVRNRSLARHISDAALGELRRQLEYKTAWYGARLVVADRWYPSSKTCSRCGHVDDGLTLADRTYRCAACGLELDRDVNAAINLATLALERAPDAPPPQPVAV

SEQ ID NO: 11555 - protein, 401 aa, Streptomyces sp.
MLNEPDRKAVGRTAALAAMLRDHCGLYNGALQERRDAYRHVSKTSIKYGQQSAQLKEIRAFDPERHGRWSFSSQQATLRRLDKAFQAFFRRIKAGETPGYPRFRGVNWFNTVDFPKDGDGCRWDATAHDPVTRVRLQGVGHVKVNQHRAVVGKVKTVSVKREGRKWFVVLTAEQPQPEPLPKTGRVVGIDMGIASFLTDSNGLHVANPRHARKAAAKLEAAQRALSRYPRRKAKNRTNNHQRAVERVAALHGKVRRQRLDHAHKTALGLVREHDVIAHEDLKIHSMSKTVAPKPDPDKPGAFLPNGAAAKSGLNRSIADAGWGVFLTIMHAKAESAAREVIAVDPRNTSRQCPECGHTAKENRPTQEKFHCVSCGHQAHADEVGALNVLRAGLARRDADQA

SEQ ID NO: 11556 - protein, 440 aa, unknown
  TnpB Polypeptide
LRTIKLPYNTTTTNLDLISKLQQQYSIIFKYSFNRFIENKTEKEIRFLCKSLNNVELLDSWLVQNAIKDANYLYKSKLERDEDLGYSSKLIFNKSNFMKRLTAKISTEQFKTNKKYYSISSQGETPKYGNRKFKIDLTNNKIIFKYNKHNHIDLVLPNLKQNVKSILSTIETLSSTNKTNFTIKLNSKHIHISFSEIITKPKNITKLNTNRILSIDLNPNNIGVSVLEFRGEDYDVIKVFNYDISKLTNSDSIHNKLRHETVEVVKKVVNICKSYGCMYVGVEDLDIKVSDKGKGKRYNRLVNNKWLRNLFIDNIEKRANIEGIELVKVGAHYSSYIGNLQHGYIDSINSSIEIGRRAYWYKVKKDKGKYFPVFKLKDSIKDQWKESNIERFRDWKELCLFLKNSGMRYRVSYDDCKNKPHKFFRLNCTNKSLINIIEFI

SEQ ID NO: 11557 - protein, 393 aa, unknown
  TnpB Polypeptide
VKEATQITTANKNTKVIFGGKKNFFNRLNNKITKDEYKILKLSPLYSIGEKSNPSVKANRKFHIEQDLLNITFKPNKLTKIPLKLPILKQNYLKILKTLYLRQEQKNISITYKIDTKYIYISFDEKELSVNPNRPYTENRVLSIDLNPNYIGWSIVDWLSESEFRVVKSGVYSLKYLNDIERELGLSSSDSRRKYISDKRRYEVLEICKNLVGKGLYYGVEMIGIEDLSIRGSDKGKGKMFNRLCNNNWLRNDMVNNIGKRCNIYGIRMQKVRAEYSSFVGNMVFRGLKLPDMVLSAIEIGRRAYEYLNQYIKKTKDKKKNIIIPNDKFYKDLVVKSLEEFDIKFEFSNLVELYYLVKKSKIRYRLSLDDLSLKFLRQRHKKYEAIILYCYIF

SEQ ID NO: 11558 - protein, 366 aa, Moraxella sp.
MKTLKLRIYTKHTNQLEKLSSSVNYVWNYVNELSYKYLQRTGKFFSAYDLNQYTKGSGELLSLHSQTIQAINETHAKSRKQFKKAKLNWRTNNPKAKRKSLGWLPFKNSAIKLLKTYQTGKKALKSKLQLSLAKGQKLTITVFDQYNLSNHHINTCEIIQDSRNRWYACITVKDFPKNQCGTKSIGLDLGLKDSVTTSDGDKLITKFTQKYANKLAKAQRANKKKQIKAIHAKIKNSRLNAIHQFTSKLVKQNALIVIGKLKSKTFTSSKLAKSVYDASWYELKRQLDYKCKHAGCLFEEVNESFTTQTCSCCLSISNNSPKGRAGLAIREWTCGACNTTHDRDINAAKNILRLGRETLAVGSPLL

SEQ ID NO: 11559 - protein, 389 aa, Thermofilum sp.
VFKAYKIPIEAPRDLIEAYFEVKRKALREILSHIIYSQTGKAHLDFRADERRELRNRLLKDWRYSKHYIDSVINSVIGLVKGWIKLYNRGKAKSSPEITKKTVYIKNNLFSYKNGVLKISIEPRRRHLEVDLRRYDYLPKDFDSIGGLVLTEGELIITFKKLAKNVKPKKWASFDVNLTNITALINEKIVRYDVRQLYHIHRVYEIKRRKIQKLAGHKPKTAERLMEKYSRRERSRAGDFMHKLTTEIARELSKMESGAILENLKNIKSRALHKSKNLNRKLSKWNARMFQSKLEYKLKWLGLPVKYVNPKNSSKTCPLCSGRMATYGGRLMKCLKCGLVLDRDAVAVLNLQMWGSGATLKALLEAPASMMGKRLIDQNPQISMKVYQP

SEQ ID NO: 11560 - protein, 307 aa, unknown
  TnpB Polypeptide
VSFKTAGFKHDAQFTRVRLSKGRNRKEHRSDFVLCEYELRPDVDLSEWDIQQVRAVHKYDEGRLHFVCRKVIDPEPPGDETAGIDLGISNIAALSFGGESILFPDNALKEDEYYFGRKKAKCDDSRSNERLRLDQKHTKRRTHFLHTLSKHIVSECIERGIGTIVIGDLGGIRDDEYGEPRNRGKHGNLDLHGWAFDRFTSILDYKAESEGIDVTVESEHDTSKTCSACGTKDGNQRVERGLYVCEECDTVANADVNVNGAENIRQKVTPSPSQDKSNGWLAQSSVHLFDCSEGLFAPREQAVECKP

SEQ ID NO: 11561 - protein, 345 aa, unknown
  TnpB Polypeptide
MLNKQQEVREQSGKHLSAFDMINLLKPLKNDGEHEWLYNVSSASLQIVCQDLQKAYDKFFKKTSGFPKFKSRKYSKPSYPIRQNIWFAGNIVTIEKLGKIRFKTSFTFSEGRGRKFSNPRITNQNGKWILSFGMECENQALQLTDTSMGIDLGIKDLAIVENDGNKIVFYNINKSKKMKRLIKKQKYIQRSISRKYEANKQGKKYIKTKNIERLEEKYRHISAHITNIRENYIHQCTHKLISLLPKRIVMEDLNVSGMMKNRHLSRAIQEQKWYEFIRQMKYKSEWAGIEFVQVSRFYPSSKTCSYCGNVKKDLKLSDRTYICNMCGAVIDRDYNAAINLSRYVI

SEQ ID NO: 11562 - protein, 538 aa, unknown
  TnpB Polypeptide
MTVEVFVAIGCVVGIELCFGRGALAKNQTYRAFVARPSHVLDLNGEILDSARVLASLASEVRDISGYATYVVRNDEALGDELAHITATQPAAAGRRAGVTMPEFLASGRTGKSRKERLVQYNVVTSYRSYEERVKAANGDSSKYVSQGWKRTVNGSAPSYGEDYVNLGAVDKQYAAVENNPFADGEIILKMVIQGEWHRLIFNFDNKRFTEGRVTLPIIKVENGQPVFIFTVVTDNPVVQFSGDYTIGVDVGINNYATVVVRSVETGRIVYETTLSQRVHSLWNSVRMSERQVRFLKKKSDRLLSKRQERMAALDEAQLHRQAASRKKRELAILAAQEIAALSHVWGNAVVAVEDLGWVANTMRNGRWNRGELVRWLTHYVTQNGGWVVSVNSSNTSQLCYKCSSKVTHPTHKESVCPEHGVMDRDVNAAVNIAARAVPRVTKARVTRAKNRKLRPQAPLKTPVARNSLKYPGRDRTKNAPTPKRKSHRFISKGVILPSCPARAQAPRLMASVLADQGILGTVQAALKQGNVVYKCRL

SEQ ID NO: 11563 - protein, 216 aa, unknown
  TnpB Polypeptide
VKHLATLSDGAVIPNPRALNTKRRALRKAQKALSRKVVGSARREKAKEHVARLYARVADVRADAMNKATTMIAETYSVVCVEDLNVAGMVKNHCIARSLSDAALGEFRRQLEYKTARTGAVLRVVDRWFPSSKTCSNCGTVKAKLPLAERVFNCDTCGMSMDRDLNAAINIRVAGSAPETLNARGEDVRRADLVSGSADLGEARTKRRRKPRETWS

SEQ ID NO: 11564 - protein, 331 aa, Enterococcus sp.
MKLGVLKAYKFRIYPNGQQKQFFIETFGCVRFTYNQLLKAKMDELANKEVKLGLTPAKLKKDYPFLKETDSLALANAQRNLERAFRNYFQKRAGFPKMKTKKSIWQSYTTNNQQHTIYFVEDQLKLPKLKSLVPVKQHRAIKGTIKSATISAKNGTEFYVSILCLEEVEPLPKKQQKIALIFDPQLLVQANHSLPVACTHALATLQKLARAENKLTIKAKAVKRKKILLNNARNYQKQKGKVAKLYRLHGCQKREYIDQMSYHLVKQYDTIYIEKISEDAQVSGNYTISDWHQFVRKMQYKAKWYGKELHFVALSATDNRKMPELLAQMGS

SEQ ID NO: 11565 - protein, 410 aa, Saccharothrix sp.
VQLRYNFRVEPTPSQQQLLARAFGCARVVFNDGLRARQAAREAGLPYIPDGELSKQVITCAKGTPERAWLSEVSAVVLQQALADLNVAYRNFFAAISGRRKGRKVAPPRFRSRKDNRQAIRFTANARFRVLDNGRLRLPKIGDLRVRWSRELPAPPSSATIIRDAAGRYFASFVVRASDAPLPLVEPRVDIDLGLTHFAVLSDGTKVAAPRFLRQAARRLRTLQKALSRKAKGSNRRRKAVVAVARAHARVADTRRDFHHKLSTTIVRDNQAVYVEDLAVAGLARTRLAKSAHDAGWARFTAMLEYKAARHGRAFAQVDRWFPSTRRCSACGAVGEKLPLNVRSWTCPCGVVHDRDVNAARNVLAAGRADNSNDRGARVRPAPVSAARREAVTHPDAARATRSVEGIPVL

SEQ ID NO: 11566 - protein, 438 aa, Mycobacterium sp.
MARLKVPEGWCVQAFRFTLNPTQTQAASLARHFGARRKAFNWTVTALKADIKAWRADGTESAKPSLRVLRKRWNTVKDQVCVNAQTGQVWWPECSKEAYADGIAGAVDAYWNWQSCRAGKRAGKTVGVPRFKKKGRDADRVCFTTGAMRVEPDRRHLTLPVIGTIRTYENTRRVERLIAKGRARVLAITVRRNGTRLDASVRVLVQRPQQRRVALPDSRVGVDVGVRRLATVADAEGTVLEQVPNPRPLDAALRGLRRVSRARSRCTKGSRRYCERTTELSRLHRRVNDVRTHHLHVLTTRLAKTHGRIVVEGLDAAGMLRQKGLPGARARRRALSDAALATPRRHLSYKTGWYGSSLVVADRWFPSSKTCHACRHVQDIGWGEIWQCDGCSITHQRDDNAAINLARYEEPPSVVGPVGAAVKRGADRKTGPGPAGWP

SEQ ID NO: 11567 - protein, 383 aa, unknown
  TnpB Polypeptide
MKAFKFKIKRPSQAVVAKLDNTLDLTRELYNCALQERIGAYKERQISLNYYTQANQLAEIKESRIELNNVHSQILQDVLKRLEKTFKAFFGRVKRGEKAGFPRYKGKNWFNSFTFPQSGFRLDGNNLFLSKIGKVQIHLSQKMIGKVKTCTIKREVSGWFVIFTVETPNILLEKTHKSIGIDAGIENFMTLSNGEQIENFKYYEQSQKELRRKQRSVARKVKGSKSRKEAVRQLRKVHQKIKNQRNDFAHKVSTKLVQNFDLIAIEDLNILGMSRGILSKQIHDVAWNSFFQKLEYKAENAGRKLIKVNPNGTSQTCICGVKVKKTLAQRWHHCLECGYSNHRDIVSAKVILNRAVGQTVEDVTYAVGQSVSLESPSIIGFAI

SEQ ID NO: 11568 - protein, 370 aa, unknown
  TnpB Polypeptide
MLKGYKYRIYPNKQQEKQIQKTFGCCRFVYNQTLAHRKDKYEKDKESMNKTSYNNYVNQILKKEYEWLKDVDKFALTNSVYNMDSAYQKFFKEHTGYPKFKSKHNNYKSYTTNFTNNNIEVTFENNKIKLPKLKWVKAKVHREFVGKIKSATISQVPSGKYFVSVLVETEHTPMESTGCCVGFDLGIKDLLITSDGEKKENPKHIKKYEDKLAKEQRKLSHKKKGSNNWNKQRIKVARIHEKIHNTRIDNLHKISNELVIENQVIVSEDLAVSNMVKNRHLAKAISDCGWSELTRQISYKSDWNNRQYVKIGRFTKSSKPCHVCGYINTDTKDLSVREWTCHKCGAVHDRDVNAAINILNEGLRILRESA

SEQ ID NO: 11569 - protein, 396 aa, unknown
  TnpB Polypeptide
MIVLEFKLGGAAAQYAALDEAIRTTQFIRNKCVRKWMDERGVKPYDLNKYCAILAKEYDFAGKLNSQARQAAAERASAAVLRFYQNCRAKKLGTKGYPQFQRDCRSVEYKQTGWTLDAARTRLTLPDGFKAGTFRLRGTRDLLGYALDQVKRVRVVKRADGYYAQFGVAAERRVASVATGHAVGIDLGLAHFYTDSEGATAENPRHLRRSEKALKRLHRRVSSKVKGSKNRAKARGRLARKHLKVSRQRRDFAVKAARALVMSNDVIAYEDLRVAHMVKNRRLSKSISDAGWRAFVTWLDYLAQVYGKVVVAVPPHYTSQDCSGCGERVKKTLSERTHVCPRCKTTLDRDHNAARNILALGLRRLAKTTAGHAERNAWGQSALYSPGATPVNMAAG

SEQ ID NO: 11570 - protein, 404 aa, Nonomuraea sp.
VLAGRKYRVEFDPGQRIFAERLGGICRSVWNTGLQQRREYRKRGGRLGYAEQCAQLADAKKDPYCAWLADAPAQVIQQILKDLDQACSRHGTWKVNWKSKTRWKPSFRFPTAKHIPVERINRTWGRVFLPKFGWVKFRMSRPLGGVVKSATVSLDGEFFDRRHATTDGVSSWVIPPAAKQDRTSDLGYLTRGEAERYLRLQRRLARSAKGSKRRKAIIARLGEIMHRVRWRRSDFNAQTAHRLTRDYGVVILEDLKTTNLTSAARPKPDPGRPGAFLPNGRAAKSGLNKAILDKGWYGLEIALRSKARYTGTVIAEVPAPYTSQTCPAPACGVVDGKSRKSQALFSCTACGHTEHADIVGAKNTLAKYQAAGLVVSGRGDPSGSVKRQAPRSTARAAPAARTAA

SEQ ID NO: 11571 - protein, 396 aa, Calothrix sp.
MLVFEFKTYGKALQFQAIDEAIRTTQFIRNKAIRLWMDGLAKSWIELSRHCALLAKEFPFANKLNSMARQAAAERAWAAISRFYDNCKKKISGKKGFPQFQKNCHSVEYKSSGWKLAQDRKSITFTDKNGIGKLKLKGTRELHFYQINQIKRVRLVKRADGVYAQFCVDVNRKELIEPTHRTVGLDVGLESFYTDSFGQHVENPRFYRTGERKMKRSQRLVSRKVKGSNNRRKARNTLGRVHLKISRQRKDHAVKLARCVITSNDAVVYEDLRIKNMVKNHCLAKSISDAGWYQFRVWLEYFGKVFKRITIAANPSYTSQKCSNCGVIVKKSLSTRTHVCQCGCVMDRDENAAKNILNLGLGTVGHIGTSTLDVGNALGESTSTLVGVIQSVQVDS

SEQ ID NO: 11572 - protein, 207 aa, Nostocales sp.
MLLSVKTKLKLNKTQEILMAKHAGIARFTYNWGLATWAWLYNNGLKPNKYLLKKFFNNHVKPEFEWIKEKGICQKITQYAFDHLGDAFSRFFSGKGGYPNFKKKGHQDSFTIDAGGKPIPVGGKSIKLPTIGWVKTYEGLPHTTCKSITISRTAGDWFIALAYEQKCEPTVKQHDAVGVDVGVKELCTLSTGVLGLCFLIPNITKQI

SEQ ID NO: 11573 - protein, 158 aa, Nostocales sp.
MHSQHWGTGVVFPNPKHYKTNLEKLRRLSRNFARKNKGSHNRHKAKIQLAKHHLRIANLRKDTLHQITTFLCKNHAKIVVEDLNVSGMLSNHKLAQVIADCGFHEFKRQLEYKAKKFGCQIIIADRWYPSSKTCSHCGLLCPTELITVKGVVLKWIGI

SEQ ID NO: 11574 - protein, 393 aa, Bacillus sp.
MLINKAYKFRIYPNKKQIVLINKTIGCSRFVFNFFLGKQQEKDAYWYIVEEMVQNGQLPVNNWKGHFLNKYETVKSLPELKKHYSFLKEVDSIALQKSVENLADSYHRYYKKQNKKPRFKSKRNKVQSYTTKQTNGNITVMNNHVKLPKLGLVRFAKSREVEGRILNVTIRRNPSGKYFVSLGTEIEVEELPKTNAVVGIDVGIKDLAILSDGTIYSNPKFFRTLEEKLAKAQQVMSRRTPGGANWYKAKRKVACIHERITNARKDYLDKISTHIVKNHDIIGMEDLSVSNMLKNHHLAKAISDVSWSQFKSMIEYKAKWYGRHVITVAKNFASSQLCSCCGYQNKDVKNLAIREWECPQCLSYHENRDINASINLKNEAIRLLTAGTAGLAY

SEQ ID NO: 11575 - protein, 319 aa, unknown
  TnpB Polypeptide
LAIQDLGNAWQNFFDKAQPGWGKPKFKSKKAPRQGFKMDQAKIKDGCLFLEKPRAVKETWNGFKLSSAPLSDDFGTISFYKEKNRYYASIPFKISDPEDKPKTGRYTGVDINVGHFNYRDGQCIVMPKSLAAVYCKIKHYQRQLSKKRVVNGKIKGMQSKRYMKARNKLQAAYARAKNIQNDLMQKFTTKLVSEYDSIVIEDLSVKGMLMSHVASKGMHRSMFGRFRQILTYKCEWYGKKLIVANKLYPSTQRCAACGLVKKGDEKITLRGNKKHGTKHNEFVCYNPNCRNYNKKVDRDENAMLNLIILVKHPELNKAL

SEQ ID NO: 11576 - protein, 442 aa, unknown
  TnpB Polypeptide
MKRKYTIVVPLNYKSNKELIDYFEKEVSNFSKMERKLFYIFRSNISININNLNKKLQYEYSVSKRTANSAIKDIKGRVKALTELKEREIKQKERKIESLEKDIFILSERINEYKNRLQNKEKIDLVNYRNLKRKYTSKKIRLNKFKDRLSSLKWRLENNKLKLCFGSKRLLKQNFAKFIEQRDSQMSYVGSYEETACNQMLQLRYINKINQFSIKLRRDFEYKNAKGNEKWVYGKCYFSFNKNKIIEILKNKTSPLTYSIIRKNNRYYLHCTFEIENDIKNFITRRSYGTLGIDFNKGFIAVSETNEFGSLVDTYTLKYRFGKGNKTDNDFKQIINQVVKKAIKVGKDVIIESLDFIDKKAKTTKGKSKKGLEYNNMLHSLAYSKFSDIIDNICFKNRVTLIKVNPAYTSKIGKEKYTNSMKLNIHNAASYVIARRGMKLVS

SEQ ID NO: 11577 - protein, 265 aa, unknown
  TnpB Polypeptide
VACLRGGLWCPIQLPDNQASLLEECDIRECKLIRKGDHWSVHIVVQEEVPEPFHNPAQPVLAVDLGEVRPATAMLLRDGRMTAHIMASRKVREVRMHYNWLRQKLGEKKCLDANRKIGRTEHRQVDAQLHELSKEIVQLAKENDAVIVLGDLAGIRERTKNKGRKFRAKIARMPSFRMAQLIEYKAQWAGVLVFSIDEAYTSKTCHACGSLGMRRHQGLFVCPHCGLQYNADLNGAMNIGRRFLDQVFGNSGALATPPNFGDVRS

SEQ ID NO: 11578 - protein, 339 aa, unknown
  TnpB Polypeptide
MLLTYKLKHNRDFSDELAKARKVAEYAIEHRSRSSADVRHNGLKSAIANQVLRKYGNDRRAKTVGKVVLTVPGQGVKYDAENRSIRMPCLKLELDAGHLPLFGKINQVEVNEEYAFMTMTIPEPTLIGAQNFLGVDRNTTGHIAVAANPATGKVWKLGKQCHHVHEKYESIRRRLQEQGRYKEVKKLKNRENRIVRDINHEVSKKIVDVAVQNACGIKMEQLDGIRNSRKQASSFRHSLNSWSFYQLQQMIEYRARLRGIPVAYVAPQYTSQECSRCGLIGNRNGKSFSCPHCGHVDHADANASFNIALRPPLEEGVGRFDADRDALKGRIDTPLEAPA

SEQ ID NO: 11579 - protein, 373 aa, Sporosarcina sp.
MILSRKVRLRPTKDQEQQLWKSAGTARWAYNWVLNRQQENYKQGVKFISDRDLRKELTQLKKTEELKWLNDVSNNITKQAIKDACLAFRRFFKGQAKFPKFKSKRKSKASFYNDTDKLKIKNELVLFEKVGWVKVSEQLPMGVKYTNPRISFDNKYWYISVGIEERIEQPQLTDEVVGIDLGIKELAVCSNGQVFKNINRMEEIRKTEKRLRRLQRSVSRKYEMNREGSRFVKTSNIIKSEKQIQLLHRRLTNIRNNHIHQTTNAIVKTKPSKVVMEDLNVQGMMKNRHLSRAIANQKFHEFTRQMKYKCEKYGIGFMQADRFYPSSKTCSSCGTIKKDIKLSDRVYSCECGLILDRDVNASLNLASYGKLTA

SEQ ID NO: 11580 - protein, 428 aa, Coprobacillus sp.
MKYTSSYKVKIINEFKTINQTVCIYQRAVKYIIDVSLEEYESIKDLSPNSAMNYIEKLIHATSSREAKYKGFNQKFYKMPSYLRRNAIISANTIVKSYKSQLEHWQINGGIGKKPRLNRNQLSMPCLYRGNMFSLNDDGTCNIKVFKDNDWKWVTVNLRATDLAYITKRFDINSSSAPVIQKINHRYYLRFVFQNKVELPQTSDAICAVDLGINHDAVCSIISGDGTVKARKFINFAKDKDYLNRLRKQIREAQSRGNRHPNKLWRLHNSRNRQLSIQIARAITVFAVEHRCDCIVFEHLDLKGVKSNQKITLWRKREVQRITESLAHKNGLRLARVCAWNTSKLAYDGSGEVKRNKDNYSLCTFSNGKQYNCDLSASYNIGARYFIKDIMNGLSSKIKSQVEAKVPELGKRTTCTLNSLINLNAVLQ

SEQ ID NO: 11581 - protein, 238 aa, Bacillus sp.
VEGKQKQFWANENIVGIDKGYRTLLATSTDQLYGEKLNDFLSKETERLHKKNQKRNQVWALMEKYKEAGDMEKAERIRTHNFGKKKYTKQKLKHDETVKRYINFSLNQFFIVENPSEVVSEDLTFATWKKKFPKHIKRKLSRWIKGYIRERLEFKCEQRNITFTKVNAAYTSQTCHRCGRFGKREVDIFTCPKCGQMHADNNASHNIKKRKDDKEITLYTPYKKVKEMLEKRLELQTV

SEQ ID NO: 11582 - protein, 377 aa, Clostridium sp.
VIKSIKVRLLPTKEQEELMFKSVGIARFTYNWGLNKWGELYEEGSKPSKSAIKKEFNNTVKKSQEYKWLYEVSAQITSQAFSDLDTAFKKFFKKESGYPKFKSKKKSRKSFYVRYDAIKFEDNRVNLEKIGKVKYKTNHIIPGLPKYNNPRCHFDGKYWYLTLGFEQGEKQTELNNDLSIGIDLGIKSLAVLSCLDKPIKNINKSYEVRRLNKKLKRLQRQVSRKYEMNKVDSKFVKTNNIIKLEKEIKLIYRRLANIRSNHIHQATNRIVKLKPYRVVMEDLNISGMMKNKHLSKAIAEQCLYEFIRQMKYKCKFNGIEFVQADKWYASSKTCSSCGAIKKDLKLSDRTYICTDCGLSIDRDLNAAINLSKYKLVS

SEQ ID NO: 11583 - protein, 532 aa, unknown
  TnpB Polypeptide
MKKPKKKKTINPAEGVKYTVCGEWFPEVYPASPSQKWSRGEENPLGTEMRLFSACERWAFNRLLEGRSREELKRQGQEVFGLNSRYTDDAIMKAGAVIESQKELLALEIEETESKLSRAKKKLRWAEKDLDKAIKANDPAKIEQAKRTLHGRKARVKKLAVKLAELQRHRDGGTIPKIVFGGRSLWRRVSKGRATREEWKNARQNRLYARGDETKGGNPNLKVAYQEGRFTLAVTISHLSEQKGTDRKGRPVMTRAPRVTGKLWLPEKSRNRVWKLLYSGAPYSVELIRGQDGRYRIHVTFSVKRTEWMTNSNLGYLGIDTNPDGVALANVNHLGQPAPWPAYGGSFRRAYLSGVLAQAVVGIAKRLGKAIALEDLDFGKDRMDTGKRFNRMAANFPFQKMVEAVLRRADKEGVGVKMVWPAHTSTIGWWKYRERYGITVHEAAALTIARRATGFKERITKELKQKIEAIKEKSNQKVDTLPGEGKGMTRKVKRLFKRLGEKISVHNGLSRYRQEGFWSAWQDLKGLALSSR

SEQ ID NO: 11584 - protein, 391 aa, unknown
  TnpB Polypeptide
MNENDGLGMRFMGEYIRGVVVKLHLTLEQEVMFKQNYGCTRKTHNELLNKYKAKYGDSNKIPTKKELNRFLNESKKELPYLMETESTSLQQARDDLHKAFKNSFKSKRHNPPKFHSKKKTRPSFRQTIRKDKRPVEKNTLTLRKHGKVTFSTSVEYLDLLNSPDTKFNNITVYYDGLNHYASFNIETQPPEQLPLTGEHIGCDINSNKNGWLVTSEGQKEFFEVDHDNQMIKHINRLMSKCRNMSRRWKKLQKRLQKWYNKRTNQLNDYIEKLTYNLVKKYDTIVFEENYSTIKILIGGEQNMIFPLSRFIKRLKDKFQLYKPEADGVQFVKPHNTSRTCHHCGHINKELKIKTRNWKCQKCGKTLDRDTNAAINILNRWFNGDSLKKYLN

SEQ ID NO: 11585 - protein, 410 aa, unknown
  TnpB Polypeptide
VSDYHRRTAVTRLQVSSEQRQLLEATIDEWRRAANVAVAIGWEADETAKTKLQSLGYEEVREQTELGSQHAILAIHEAAQALASAREVDRTQATSKPTFTAPTVQYDARSMTVFDGEASVSLATVADRVRCDLVLPDDADGYQQQYLHDDSWELSASSLTVRDGEFYLHLGFRTPKGSIESPKDRTVLGVDLGIENLAVTSTAHFESGAELLHERREFERVKAGLQRTGTESAHRTLDARSDREQRFCRDYLHRVSNRIVAEAERHDCSHVVFEDLRHIRDSMPGGLKFHEWAHRQLVQYVRYKAEYRDIVVEFVDPENTSRECSECSHVSEQNRPNRDRFACRECGATANADYNAAKTIGLRYVRRGHQSSRRTGDRRLALKSGTVRPSGEFVPYPSGFEAENADKSVP

SEQ ID NO: 11586 - protein, 205 aa, unknown
  TnpB Polypeptide
VSILVETEHEELPHKNQNIGLDLGIKDLCITSEGVRYENLRIIKKYERKLSRLQRQLAHKKKGSSNYRKKKKEIALCHEKITNTRKDHLHKISHEIVSENQVIVSENLQIKNMVKNHHLAKSISDVSWYELTRQLEYKSKWNGRKYVKIDRFYPSSQLCSLCGYQNPNIKDLSVRTWICPECGTEHDRDINAAKNILVEGLRQIA

SEQ ID NO: 11587 - protein, 419 aa, Cyanobacteria sp.
MLTMNYRYRLYPDATQALMLLEWMETCRSAYNYGLREIKDWCNSRKCLVDRCSIEQEYILAADWKFPGEVQQLNALPRAKKEFPRLGEVPSQVLQQAIKQLHKAWEGFQARGFGFPRFKKFGQFKSLLFPQFKDNPIVGNCLKLPKIGEIAVNLHRPIPDEFVVKQVRIIRKADLWYASINIQLDVNVPDPMPHGHAIGVDLGLEKFLATSDGVLVKPPKFFKQMQSKLKLLQRRLSRKQKRSKNYEKQRLKVARMHHTIDNTRKDFHFKQAHTLCDTADMVFMEDLDYRVSAKGMLGKHMLDAAFGQFRNLTKYVCWKRGKYFAEVDANGTSQTCPECGARVRKDLSVRIHRCPECGYTTDRDVAAGQVIRNRGIVLISTPGLGGMETACADELPGVGVTQSRQVSKSRKGITRKAKK

SEQ ID NO: 11588 - protein, 550 aa, unknown
  TnpB Polypeptide
LYIAIKGKIDKEKKVQGLLNFMLKNPQQLVEWIIFGRSPYTERSLEKYWKLKRRYIINLLISTRTQTDSYRRKKHKHNYSINFQQFNALLPTYSQSEVLQSLDDAVFYQQNEVSFNPQPTKNQQTFLNKLQFLKKEQNIVIPFLTSWINSLQSSRWKSLKELAEQLATIMGNPSRKLFSAVRQIVVFTLFDHYMQSVPQLVKALPLANIVPQPFKQKKKGRLPIKLLMKKSYVITRQGNAQELTDQVKKQGWTEFGFPKKGKQRLTAQVNFPPKLLEYLNNGAHIKVFQISSGHAPSYKPRVDAVLEGVHDCFHSSTLLHSYLSQIPGKKTSVIRVDINRIGQYMAVFNIPVPLPNDLLNLANHYDHLSTKVITELNQGYLRKRKEYDTHGSCKLKNELLRVYSRRHRILREITRLFPHFLAAVLVKKKCKVLKIERLTANPTGTRGALAKAIYTMPDSLFIYKKAVWLASLELGYDVKLETVSPYQTSTIHYRCGGSLIRQQGQYDVAPCTKCSQQVNTHFNAAQNIASLQGNFLPNNLFPSSHMRGPT

SEQ ID NO: 11589 - protein, 396 aa, unknown
  TnpB Polypeptide
MKKLLRAYKVEIKPTLEQKMKIDQSIGICRYLYNFYLGKNKELYQQYKDGLIDKKQAFMSANNFDKYINNEVKVLEEYQWINKCGSKARKKAICNAEAAYKKFFKGESKFPRFKKKNKSDVKLYFPKNNKRDWKVYRHKIMIPSLKNVRLKEYGYIPTSAEVKSGTVSKSADRYYVSVLVETDIVNLNISTNDGIGVDLGLKDFAVISNRIFKKNINKTVTVKKLEKKLKREQRKLSRKYESLKLRNKNKKEEATRQNIQKQVVKVQKIHQTLANIRTNYINKVVFDIVKQNPSFITIEDLNIKGMMKNKHLSKAVAGQKFFEFRTKLTNKCNWMSIELRIVDRFYPSSKLCHECSSIKKDLKLSDRIYRCECGYEEDRDINASLNLRDAKIYKIA

SEQ ID NO: 11590 - protein, 471 aa, unknown
  TnpB Polypeptide
MKIAKKKDDTLSRVEKHIIKSNHKLYDYLDKYCFLSKNLYNYANYQIRQIFIITSKLAKSEEVTQEQLNYLKDINNKVDKFNELRKLNFEKAKIKAIKNNKEFKKKLKTIKYFDKDNKYPCYDFIEFLVKDGIDYKSLMAQVSQQTLKLLDKNWISFFETMKKWSKNKTGFSGRPKLPKYLKKNGKNIVIFTNQNCKQENDYIKMPTCFNKYELNTSIGNNKLQQVRILPRNKYFVLEVVYNMPKHQLKQDNNKYVSIDIGLDNLATITNNCNITPIIINGRKLKSINKYYNKQLSYYREIAKRMNDLNWTNKMNRLTIKRNNMITDMIHKASKSVIDYTLSCGANTIIIGNNKDWKRESSMSKKVNQSFVGIPHQLFIEKIQYKAENVELRVIITEESYTSGTSFLDNEEPIKENYNKSRRVKRGLFVSNTGRKINSDVNGSLQIMKKVFPNVIDHGIEDFGLNPIRVGI

SEQ ID NO: 11591 - protein, 452 aa, Lactobacillus sp.
MAEPWVQEKRSRSKTLAFTEKFKVTLSCEQIVQHEHALVVQDQLFNYSLNYMYKTYGRKHIDRNIPTGIDRHKLINHIIRMFLNEKYQLNRWSHKVLSLSSHNAQLFLQTLIINFTEYQKLLRAGFKWSDIIKFQFKQNIIKDKHGKHKNPHHNSWYKRGHLRFNLKSRTRSIEIQKNTPIQVLSAHVIKVPNFGILHLHKNAKEYDFSDVKIIKLKRKGDGTYQFQIAHVQPKAKSNVQAEPAIGIDWNMTNNVAYHDSNNKQYRLPPDVIAKADHYERLIKKFKSKRSLLRGSTKNLTQKIQRLSAKRAQLLKEAYRKLAIELVAPIKVLVMEKLGAKDMRKSTGKAKNRKLALLKPYEAKQVIQNRAFKQGVTVVEVDAYKTSQVEYGTDVIDKHPLSQREWISPVTGKVIDRDRNAAQNILEWGLHPRRHIKVKLFSKVTVAMVSSII

SEQ ID NO: 11592 - protein, 401 aa, unknown
  TnpB Polypeptide
MRKINRTYRFRLYPNKVQIDLLSKHFGCARFVYNYFLNQRIEQYKLTGKSDNYYTQAKFLTELKKQETTTWLKEVNSQTLQFAIRCLEVAYTNFFQRCTKFPKFKSKRSKNSFTVPQFASIINNRLFIPKFREGIKCRVHREIKGKIGKVTVSKTPSGKYFVSVFTEEEYTTPLKKTDKSVGLDLGLKDLVVTSDGETFNNNRYTRKYEHKLAIAQRHLSRKKKGSIGFENQRLKVTRLYEKISNSRADYLHKCSISLVRRYDTICIEDLNIKGMLKNHRLAKSISDASWGSFVAMLTYKAEWNDKKVVKVDRYFPSSQTCSACGYISKQIKNLSVRNWECPMCHTHHNRDINAAINILNFGLNDISAGTVDYTDGEGVRVYHLKDHSSMKSEAHESLDHE

SEQ ID NO: 11593 - protein, 456 aa, Bacillus sp.
MAEQTKTIKCKVLSHGENTFEQTLIVYREALSFIVDVIDSEFNSLGSLSTKSCVTAVEKLIHRTKSNPSPKYDFSVKFYKFPSYFRRSAISKAFGIVKSYRSNLENWKEEREQVLSEGKKFKKKPPVLSFEHKVFPVFYKNNMFNQISKNEAQIKVFKNNDWVWETVVFNDKNLKNRVDNSWKENNPTLIKVGKKYFLNFSYSKKISLHKTKLRDQVIVAVDLGLTNSAVCSAMRFNGTVIGRKFINQPLEKDRLKTKANKLKKAQSQSGKISAPHFWRKINGLQKHIINNTSSEIIKFAEKFNADVIVFEYLGKMKMPKGYYGAKKLRHKLHHWCKLGIQNKVEEMAHYRGMRIRRVNAKYTSALAFDGTGELTRNSKKDLAVFRTGKVYHADLNATYNIGARYFIRELLKSFSEKKRLSVEAKVPSLTTGTRLTLASFISLHQALSTEGAKQLA

SEQ ID NO: 11594 - protein, 397 aa, Clostridia sp.
VHLKPNNKQKTKLELYSNAAKFIYNWTLEKQLKHYAETKRFLKNGDLRKELTVLKRTEEFKWLQDVDNNVPKQAIKDCCEVFLNYYNGNIAKPKFKNSNSKKSFYQDPLKLKITESYIKVAKFAKNTKANKQKLNWIRLGEKVNVPKDTPLCNPRIIYDGKYWYFTVSFLQESLVNAKQNNKGIGIDLGVKNLAICSDGVTYSNINKSGTVCKLKDKIKHTQRKIQRKYFINNKNQPFTKGRKLHKTSNISKLDKYLKDLYKRLYNIRVNYLHQATANIIKNNPKFIVLEDISIKGIIKNNKYSKYILEQNWHKFRWYIEYKCLKNNIQFILADKWFPSTKKCIKCGNIKEFIHIKERDYICYSCGNIIDRDIQASLNLEEYGEKQLTLVNKNIPIR

SEQ ID NO: 11595 - protein, 369 aa, unknown
  TnpB Polypeptide
MKIAYKFRLYPSKKQKERIINSLKVCKTIYNKLLESSIKSYKESKKTLRKFDYNKLIKGKYPVHSRVAQNVSDRVHKAFSNFFRRVKDKSCKQKGFPRFKSRVNSLTFPQSGFKILSDKRLHLSKIGNIPFVMHRIPKGKINTLTIKQNKAGQWFAIFSCELPNIIVKHPSFEKVGIDVGIENFATLSTGDIIANPKHILKSENRLKLLQRRLSKKVKGSLNRRKAIFKLAKQHVKVANQRKDFLHKISHVITKSYSLIAVEKLNINNMIKNNWLAKNINDASWNTFVQMLSYKAVICGGQLVKVNPRNTSKTCSKCGIITEMPLGKREFLCPNCGFVCHRDLNASINILNGMGGLPKIYKPVKTNPLQ

SEQ ID NO: 11596 - protein, 374 aa, Shigella sp.
  misc_feature (256)..(301): Xaa can be any naturally occurring amino acid
VKRLQAFKFQLRPGGQQEREMRRFAGACRFVFNRALALQNENHEAGNKYIPYGKMASWLVEWKNATETQWLKDSPSQPLQQSLKDLERAYKNFFQKRAAFPRFKKRGQNAAFRYPQDVKLDQENSRIFLPKLGWMRYRNSRQVTGVVKNVTVSQSCGTWYISIQTESEVSTPVHPSASMIGLDAGVAKLATLSDGTVFEPVNSFQKNQKTLARLQRQLSRKVKFSNNWQKQKRKIQRLHSCIANIRRDYLHKVTTXXXXXXXXXXXXXXXXXXXXXXXXXXXXXXXXXXXXXXXXXXXXXXTSQRCACCGHTAKENRLSQSKFRCQVCGYTANADVNGARNILAAGHAVLACGEMVQSGRSLKQEPTEMIQATA

SEQ ID NO: 11597 - protein, 428 aa, Peptococcaceae sp.
VKRKKKKLDLFGQPIIEEPHQLLTAQAKIVNLSDSDALLLGLTGYVATKMWNVANHERKAVWQETGKIPGFADQCKTLKNNRWYKLLPSQTSQEVLAELDDSYLSWYGHRRNGDMAAKPPGFRKKDTLSTLTFKQNAFGMLDGNKVLLKLPQKTYERTRLELAYILPPDTTLGKVQQVKLSYEPKTGEWYLLIYHKVKIEYLPPANILAFDLGIVNIVAGYFSTGQSFVVPGGELLALDRYFHKMKAKTNSSRSRKCRGLNRKWSRQRKHYLHVLTKNIVEQAAAHNVSHILVGELKGIHQDKDWGAKQNQELHAWPYRKIIQTLTYKAALKGILVQEVSERNTSTTCPICGKRVKSARVERGLFVHCGQATNADAVGAFNILQRYLRDNGKTLLEVVGELARPVVNLFVWRKSTPLGREQGTFRSVA

SEQ ID NO: 11598 - protein, 596 aa, unknown
  TnpB Polypeptide
VECSRTCAATPRLRTTASPAYLAAPSRRSRQWAASAQQCVRASPTSLAAPSTRASRPCNADRTRRRRKHRPKPLQPARARRRSRQHKPKPRCKKSSDAPTSPTRSDATHSQIHPSRPRSKPKAPPPASTPRSRQALRNSWAARAQRERVSVVLEAVKVALDPSPAQERLLLSHAGAARFAFNAGLAHVQEAIEAGVKPEWSFYSLVRWWNANKDTLAVGDDGVPWWAENSKEAANTGLRSLAAALSNWAKSRKGQRKGKRVGFPRFRAKDRATPRFAYTTGRFGLIDGDPKALRLPRIGRVHCMENVAARVGGARVLRMTVSRRAGRWYASLTVERDDKPVTKPPRGVAVGVDLGVKTLATLSDGTVIENPRYLRKSERRLKMAQKALSRKVKGSNRRAKARAKVTRIHAHVANQRQDAIHKATTMIAQTYLHISVEDLNVVGMVKNHRLAKAVSDAAFAEFHRQLEYKTAKTGARLHVVDRWYPSSKTCSKCGRVKAKLSLAERVYRCDGCGLVMDRDLNAAVNILVAGSAPETINAHRGTVRRGGQPGRATQVPVKCEPSVGGNVVSDLERVPARTPCKLQQSSLQRAKKGEAK

SEQ ID NO: 11599 - protein, 381 aa, unknown
  TnpB Polypeptide
MFRTIRIRLERTAGLVQTVSVFNQACQRVLDWGQENHEYNKTRLHHATYRGIRTDFPSLPSGLVQTARDQASEMMRRKEFEHRIFKKPFGAIRYDKRTLSVFLESGHCSISTVFGRMRYTFTLAEYYRQYMAWKVQSAQLIVGRNACYLNVQVEGEAPPLNSGDRRLGIDLGINNIAVCSDNTFFNSKHWKNVKGKYQHLKAELQSKGTRSARRKLKAISGRERRFVRDLNHRVAKEIVNKPYDVLVFEDLTAIRDVKKNKAFNRKLGNWSFAQLFRFVEYKAEALGKKVLVINPYHTSQTCSKCGHVSRSNRKKRQFKCVECGFSLDADLNASRNIATFSRRVGGRSNVSRPNVAGAEAEGRKAFEAEPSYKPTISIVGC

SEQ ID NO: 11600 - protein, 348 aa, Noviherbaspirillum sp.
MIRSFQYRIKDSSCANHLDGLARAVNFNWNFCNDTQKHALKWGKKWPSGFDLSNLCAGASKELGLHSQTIQAVCETYAARRSEKNRPFLRYRGRRHTGWIPFKASGIKVKSNGFAYGGKLFKVWMSRPLPSHAKIKTGSFSQDAQGHWYISITFSVPDVHAMPVTNEVGIDLGLKEFAAFSNGEKEEANRFYRDLEPELTKSQRANKKRRVKAIHAKIANRRIDYLHKLSTALVRTYGLIVVGNVNASKLAKTKMAKSVMDAGWSSFRDMLKYKAVAHSAFVLEVNEAFTTVTCSACLSHSGPSGLKELRIREWTCEHCGQHHDRDVNSAKNTLRLGHQALAAGIPAP

SEQ ID NO: 11601 - protein, 375 aa, Holophagaceae sp.
MKGLLLSRRLFRFRNDQLWVGSSGWQVGQLRMKVHRPHGIPAMIVIRETQAGRWFCSFSWEDDRPDPPTDRTLKKQLKAAGEGAMTGKVLGMDRGIRPVVALSTGEDLGLDDILHGRSVKRLLACRRRLKRKLSRQKDLGSRRRLKTKRQLARNIERQQDIRWDAFRKAVHQLVQGPMEVFVMETLKLKGIRKSLLAKTPAGRMGTQPREMRRRVARAMTRSSLGEFARMLRVAASRAGKLVLGVPPQHSSTTCSVCGHNSPGNRPDRDTFKCTACHQALDPDINAARNLAQLGIRTLFPKPKSPAGPAGAKARGGADRPVRGTASKPGTKTSRNEKPSHRVNPVGQRQATNNPAARAVKHLGTDQPKQPSSRST

SEQ ID NO: 11602 - protein, 150 aa, Clostridium sp.
MLGDRIKSYEENKSIDIKTMKYPTPAQYKGEFEWLKEVDSLALANAQMNLDKAYKNFFRDKSVGFPKFKKKTNTNNYTTNNQKGTIYIENNHIKVPSGKYFISILVETEIVELAKTDKKIGVDLGIKEFAITSDGVFFSNAKHLKKSEKS

SEQ ID NO: 11603 - protein, 416 aa, unknown
  TnpB Polypeptide
MPIRNYKFRLYPNSNQEYKLQNNLAVCRWLYNKFVEQTQKSFLSRNDMNYILTELKQSEPWLYNYHSKMLQMVSTQIEGSEKALIELSKKGHKIGQLKFARYNEFKTFTYNQSGYKIETHGDKTLLYLSKIGYVEIRKHREFPDNTNIKQVIITKSKSGKWHVCITVDVEESLIYIPKISFAKAVGIDVGIKSFTYDSDGYSTPNPLNLKKMLKPLARVQRKVSRRKKGSNNRLKAILRMQKIHEKIVNQRKDFQHKLSAQYAKNNDVVFVEKLEKLNMVKNHRLARSIMDSSWGLFLQKLEYKCKLLVEVSSKNTTVDCSRCGNKVPKSLAVRIHRCNKCNLILNRDYNASINILQKGLKIFKQDKLPQELRKVTPAEILMRSRKQEEVTQFLCGSSPSFLKDSIGICLKYACRQ

SEQ ID NO: 11604 - protein, 386 aa, unknown
  TnpB Polypeptide
MSWMMISYKFRMYPNKEQTAILEDTLETCRRLWNAALADRKNTYKETGKGRTYNQQAAILTIEKKEDPGLKAVFSQVLQNVLKRVDLGVAAFFRRLREGARNPGFPRFRSEGQYKSFTYPQAGFKLEDNHLTLSKIGTIRIFKHREIEGRIKTCTITRDRTGCWYCSLVSEKDDVPKIAVQTAIGVDVGLKHMVAISNGEYIEYPEYYYQTEEKLADAQEKLSRKEKGSSNYREAKRKVAGIHKHIANQRADFSHKVSRKLIDMADVVVFEDLNILNLLKNHHLAKAISDHAWGMLTRNTISKAESAGKTVVLVNPRNTSQRCSNCGTGVPKDLSARVHVCPHCGLVMCRDRNAALNILADGLSVSAYRDLASTVGEPLLQATSMK

SEQ ID NO: 11605 - protein, 554 aa, Planktothrix sp.
VDKGDTTFQALQLSLPGLGLPSFMPVSRRPSKGKICSVNVNISNLNTLAQSLSQKWEEDLTTKERKCLPYWNGLCQEMSNVLWSHIKTDSSDLASICLLGYVPNTLAKSWYSTKLNYLPNENWLKTSLQSSTASQQDCTDSESTSLKSLKIRLYPDQTLHQTWKIWLAASRYCYNQAIEYQRKNGSIGKFDLRKIILAYVPEWVSQTPYSFRVQAVYDAKEAYDKSRKKGTKQHEAGRFRSIRDRIKSIRFRQEDYKNGTWFPSLTKDLSFKSAEPLPAKDVEYQVKQKDGSYIIRCRKQSWESETQLVYDKKRWFAIFPVEFIPELSDSQKIIALDPGVRTFMTGFDGAKFVEIGNNDIRRIYRLCNHVDKLISRKSKLKGRRNKHQRQKLQRKIDRIFNRVRNLVDEVHRKTAAWLTTEYRLIFLPTFETSQMVAKNRNKKRKINTKTVRQMLGWAHYRFKQVLKFHALKRGCHVVDVTEEYTSKTCTKCGHVHPKLGGSKVFKCPHCGHKIPRDYNGALGIFLKALRDIAGLDGFTDSVSLCPTSTPDVRA

SEQ ID NO: 11606 - protein, 410 aa, Oscillatoriales sp.
MFQAYKYRIYPTIEQQTSLAKSFGCCRWYWNYTLNLCQETYKTTGKGLSRTVIQGLLPQLKKEYPWLTDAYSQCLQVVALNLSTAYKNFFEKRARLPRLKSKHGRQSISYPQNVKFQGDYLKLPGKVGLVYCVRHRPYEGTIKTVTVSKNSDGKYYVSVLVDDGKETPNLSTNGKAIGIDLGLTHFAITSDGDKYSNPKHLAKHERNLKRKQQKLSRKQKGSNSRQKARLKVAKVHANISRCREDFLHKLSRKIVNENQVIAVEDLGVKNLVKNPKLAKAISDCGWGMFCTMLKYKAEKEGKTYIEVDRFFPSSKTCHVCLNQVGSLPLDVRSWTCEHCQTTHDRDINASINIKNEALRILRLCSVQVLSLGTSDTAMLRGCKSSEQTSVSSDAPPVETGSPHLLVEKCG

SEQ ID NO: 11607 - protein, 392 aa, unknown
  TnpB Polypeptide
MKTGYSIKTWKMRLFCPEKQMIETTEALYREAVAFYYELLKEREELWAENLLTIQGHLEKLTVPGRDGREPKYIPPGGKLPVYFRRSAMNKAAMAVKTAASAESFPEKIDANITFFKGMYRDLTDTSVVLKLWNGKKWIWVLCGLTGRPFPKEAALLSPTLVHEEKWLMFHVPVKQENSDARTAKERMQEGARVCSVRFTNTDSFAVCTVLDEGSRQLAVKNCRGGNAYRHHCKALLKKVEASRAFTDKDNVSQPNRKYYMHLKHLNEHYAHQVSKEIIDFCKENHTGILVLPEYDEDFPGYPCIEAAIIRSSLKYPHPELSEIQSLGRRNPGTRAARRRNRKAMFHLRSHRKKQGSIFICQNGHQVNRFLNGARNLGRKCQESFRKNNKPS

SEQ ID NO: 11608 - protein, 588 aa, unknown
  TnpB Polypeptide
MFVRGENMRTGRDQQPLSYAIRLPDEVQQDALRLLDASRSVVNAALIKLWPKLDDFLQTRRGPAWKHVVELIDSPDPHGNRQWRCEAETAGRIMRGQAERKQVFALIQPILSDGFIRSKTEKRPAGKNRKSIKEAIEALQKTLGEDDTAFVTLHNVIEQGCNFFLEHGVFPETYEEMQAIPLLKVGMLTYAGDDGGANGQSYRLSCDVAAGTVSLLFRFPDAAGTWQWKQEPITLKLPACVVERLKEGVRMAPTLRELVKADGGRIAVLDVVVQVPQKPLADWRDVERVLGFDWGVKGLISAVVVSRNPAEPDTPVQISRPLFLDTGGLDGHQARTRRQIDQLQAARENLAEGNPKRAFYEQEMTRCWRLFEARNRELAHLAANLLLLFASVWECSLISGESLGTLKSTGRGKGVRGKWRNWRNNTTIRADIWHIVRYKSHLLGMRFRSELPRGTSHTCPRCGKPAQTYRSSRLHHRNDPVKWGRWLVCSHCAYNGDRDYCAAVNIARLGVAFLTQMQATGKAQACSVTDETSVKPCPYMAHGAVLLFPPQTQMTCLLEAGKIYINGWKKSCTIRSSYATPLILRLCS

SEQ ID NO: 11609 - protein, 416 aa, unknown
  TnpB Polypeptide
VLTGRRFRVEFTGEQAQFAQRIGDGCRAVWNTGLQQRREYRRRGAWMNYREQAHELAEAKAEHSWLAQVPGHCLQQTLMDLDKACRTHGTFKVRWRSGRRWVPSFRFPEGNKMVVELLNRRHARVKLPKLGWVRFRLSRPLDDVVIRSATVSRDGQQWFVSFVVEDGKAVPETHARPGSAVGVDRGVVVAIATSDGALLDREFSTAGERRRALRLQRRLSRAGKHSRNRVKTRAALARIRGRERRRRQDFCVQSAHQLAQHNAVVVLEALKTKQMTKSAKGTIEAPGHNVRAKAGLNRAILSKGWHRFNLVLDSAARYSGTLVMKVPAQYTSQRCSACGQVNPNSRESQAVFRCLYCPHVEHADVNAARNILAAGLAVTACEDNARPAGRAASAKQEPAGNREELLPQPPTAATAA

SEQ ID NO: 11610 - protein, 403 aa, unknown
  TnpB Polypeptide
MSNERIRTVVAILVEPTAHKERKLRRLQSAYREALEAAVKAGATTMTAVNDIVTPYDLPYQAKDALKRHVPQLLEDGTPDLDAAQPVRFTNRAATFDHSAARTHEFCWEIPQPGRGTNFWIPLAINPAQRDWWDQLLAGDATAGQLQLVHQPRHDRWELHVPLTLPTPDTDVDHDSCTPIGFDVGEAILLTGCALRNGRPVDPLLIDGGRARDLHQTLQTTLQRLQERDAAAWRIDQQAEYFRNALGDEIETATRRAVDYAAGFEQPMIVLEALESLQEDLDVGPHLTRRLHAWAFARLQTRFADKAADAGIPVRYVDPAYTSQICHACGHIGTRPAQAEFRCTNDDCWVSVYQADINAAANIASRLDPWGESCPWEPASDDTLRSGRTRDSATGPREQSRSQ

SEQ ID NO: 11611 - protein, 512 aa, unknown
  TnpB Polypeptide
MPTRTAAPNATAQPPVIRAERYRVRFDHRGQAALCAQTAGANRFVWNLFLAYNDWSYRVARRAKGYGRWTDLPEAQRPLLVDPGRTWQTMYKRFAALRRGCFDREFQAFLQSPEGSVYADRDLSWLRDLPAAPVRHVLKYLDTAYRRFYKAHAAARAEGVALPRRKSDGKPKYFPRRKGRQGGKADGFTIPDQVRMDGHRLHIPRIGWVRLDRGHARYRGCRAKTVRVRKEGTERHPKWYATVVYEVPADLLKPPARAGALGLDRNVGQATDSEGEVYAQPDMAKLDANIKRKERKAAKARERSRRSGQSLSNRGRRICGQLRKLHRKQKRRRENAAHQHSRQLADRAHTVVIENLNTQGMTRSAKGTAGKPGTNVKQKAGLNRGILASGWGRLEHNLDYKAGLVVRVDPAYTSQTCAACGHVGQANRKTQALFQCTACGHTANADRNAAVNILARGLPLARQARGAGASARREAIPLGTSTTREPGRRGPPPPVRSGPDGPDRVSNVNHSI

SEQ ID NO: 11612 - protein, 536 aa, unknown
  TnpB Polypeptide
VYVYKLHIKTNRRQEKVMWRIHVVLVKHAQKLIRIMKRNRMYQDAAMGYKTACETIDILEKELDRTRKARKNKKLSRKEKMKYRRVQDIQADIQAAKADKAMFAEAMNTVRESIGLTESGLQGYVKVQQHKYAEHLQSQEVQKEASRVWDGVEKVLFGNGRKLKIPKLNDIRSICGKQKGTGIRFILGEGKVLWNGLDLKCDMKAFDGHILPRNAYETVALGEDFSYCEIVRLPFPEGCRYYLHVYMRGEAPDATPAAPVKDNGIDPGVSTMASVSEDGRCALEELAPDIKKYNRIIQKLNTRLEEERRRSNPGNYLPDGRIRRGRKVWIRTEKYNRIEMKLRSWYRKRSGYVKTAHGTLANQIIRNGSRILVEKMRYSALAKRSRKTDRQDKESTITKKDGTSQQIRKYKKKKRFGRSLNNRSPALFLQILKKKAVSVGGSYAEVDTRKLCPSQYDHTQGKNIRVKLNCRMKEVGGHKVQRDLYSAFIVVNVKEDLSTPDREKCNSRFASFLKEHDKLINEIKSKKQVRPACFGF

SEQ ID NO: 11613 - protein, 372 aa, unknown
  TnpB Polypeptide
MLNFKYRIYPTRKQETTMNHWLEECRWLYNHFLAERKNAWEQEKKSLNYYAQAVSIVKLKQGKQSLSDVYSQVLQNVAVRVDLAFKSFFRRVKAGEKAGYPRFKSNGCYDSVTFPQTGFKITKQGLKLSKIGTIEIFLHRQPDGEIKTCTIRKSAVGKWYVCFSCITKNKPLPKSNKAVGIDVGLVSFATFSDGNKIDNPRFFRKDEKDLVKVQKKLSEAEKGSPKRKKRRKAVAKVHERISNRRNNFCHQEARKIVNEYDTICIEDLSINRMLHNRCLAKSISDAAWSQFAQYLAYKAENAGRRLIRVNPAFTSQDCSRCGYRQVKKLSDRVHHCPSCGFEIDRDHNAALNILSLGLQRIGNQSVEAVCFS

SEQ ID NO: 11614 - protein, 405 aa, unknown
  TnpB Polypeptide
MKITRSTKCSVKFATQKKRSELEAILVEYGKVVNIFINYFWDKKVDKTQLLKPIVDIPKDSWLSARLRKVAAREALDMVGSVKNVFEWNKEQIQNTINALEKKIRETKPTDKKNRRKINNWHKKLKANKSKISMIQPHKPKHKGNKMSVSCTIAELQTPKEQGNFDAWLHLASIGNKMVLDIPIKFHKHYRRLLLNGQRVNSYVITKDYVQFAFERETGPKKNGKSVVGLDTGINALASTSDKLQFGKDIKTLIEKSKRCQKGSKGKQRAINAIRQRINEVAKQVIQNKDLVVVEKLSNLNSNSKLKGRLSKNIRSSIGSWNYAYWLMRLEMNCEENRVSFRTVPSYYTSQQCPICNHTESGNRNGEVFKCQACGYTGNADINAALNILNRFLSGPYGAAYKPIN

SEQ ID NO: 11615 - protein, 605 aa, unknown
  TnpB Polypeptide
MIKRAYKYRFYPQNDLKVILAKTFGCVRFVYNQTLDFSEKHYANKIVLESQGLKYKPLTGSDRVNFVKSLKDSIEDDKDKPNFGQLKYPWLNEVSSIALQQAARHLNDAYSRFFKGQSGKPQFKSKHHNHHSFTITGKNSLHFDKDFNKNNLFYLPKYDKPLNIKWGKSNKAKNKTTKRNFNYLAVSSVTVSQNPSGQYFISFLVEEQITSIQPINDKTSFDLGLKTMAKVYQGKIDSEGKPEFTNFNLPDLLKAIDKKLRKAQRELSRKTKGSKNKDKQRLKVARLHQKRINIITDYYQKKSTIMVNENQEIVMEDLNISGMKRNRKLSRAIHNVAWKRFINMILYKAKWHNRIITRAHRFYPSSKTCSSCGHIYHGLKLSHREWTCEHCNAHHDRDENACLNLFNYNNSFVGLNGKNQYIAGTANYACGGNVRPKTSNKIISKKSRAVSNEAGISCLWWELFKYKFLLLAALLSSNSFAESIIIIDVNGNRNYINYERVQPLPPSHIYYDQYGNKIIQPAPIVVSPNTTIYPAPYIEGQQSSIIINSQTINNDPSALPFASGYLLGNIIGRKNNPQPPINNQIMEEHYRIREEQLKLLNQNKK

SEQ ID NO: 11616 - protein, 400 aa, Aphanothece sp.
LLTCNYQFKLKPTLRQIVEIEKYLTACRKVWNYALAERKDWSNSRKSNIDRCSLEKEYIIPADAPYPSYKLQAASLTEARKVCTDLKEINAQVLQQVLRQLDRAFAEMKSLNKGFPRFKNKYRMRSFVFPQFKTNPITNNYIKLPGIGVVKMKLSRHIPQGFILKQARVIRKASGYFINLCFQASVNVPNPYPHGLPLGIDIGLDYFVATSNNELIKRPKFFNKLHRQLRLLQRRLKNKKKGSNNRYKLNRKIARVNQTISDTRKDFHYKLSHRLCDGNGMIFVEDIDFKAWGRNMLSKHNLDASFGQFFEILSHVCWKRDVYFAKVNKNYTSQICPNCGVHTGKKKLNERTHTCPECGFTCNRDFAASLVIRNRGVGVVLGSPQVEQLTWINAVGQSVL

SEQ ID NO: 11617 - protein, 380 aa, Aphanothece sp.
MGNKAYKFRIYPNQEQQAFLAKCFGCSRFVYNHFIRVTTDIYAESKKHFRYKEWANLLVKLKREFDWLSEVNSQSLQQTLKDLESAFTRFFKKLGKFPRFKRKSNRQSFRVPQHFSITEDNKLKLPKMDAIYMVIHREIEGTIKSVTISKTPSGKYFASILTEQALPKAPLNGEKIGLDLGLKDFCITSKPEKFPNPRYFKKSLRRLKIRQRRLSRKAKESNNRNKARLTVARIHEKVANQRLDYQHKISLKLVCENQAISCEDLNIKGMVKNRKLSKQISDVAWGQFLNLLEYKGELYGCEIHRVDRFFPSSKRCSRCGYIKEDLTLKDREWDCPECHVHHDRDINACHNLLAFSELKILSEGQESTPKNAVEMQRINS

SEQ ID NO: 11618 - protein, 371 aa, unknown
  TnpB Polypeptide
MICAHRIRLNPTPKQAECFVCVAGVRRFVYNWALTEWIRQREAGQKPSIYKIKAQFNAIRRELFPWSYDTTKCAVEGAFMDLREAFNRFFESLKDNTKKRVGFPKFKAKKRSKAGFYVANDRFSVSGNTIRLPHIGDVNMTEKLRLEGKILSARITQSGKWWFVSITVETTKKPRKVPTSGAVGVDLGINRLATVSDGTVFENQKHLQKRLKRLKGLQKSLSRKQKGSKNREKARMKLAIQHYRVTCSRDDFLHKLTTELAEEFSLIGIESLNVSGMMKNHELAQALADASFSKLSKFLTNKAEVTGAKVVLVGMFFPSSKRCSACHHIKADLTLSDRAYTCHNCGMVCDRDLNARINIMQEAIRLSESSP

SEQ ID NO: 11619 - protein, 201 aa, unknown
  TnpB Polypeptide
VETGHEELPHRNQSIGLDLGIKDLCITSAGRKYKNPKTIKKYEKTLAKLQRQLSHKEKGSKNYYRKRKQIAICHERITNTRKDYLHKITHEIISENQVIVSENLRIKNMVKNHHLAKSISDVSWYELTRQLEYKAEWNGRKYVKVDTFYASSQRCSACGYQNADIKDLSVREWICPVCQAEHDRDVNAANNILAEGLRQIA

SEQ ID NO: 11620 - protein, 370 aa, unknown
  TnpB Polypeptide
MEYSYKFRIYPTPLQENLIQRTFGCCRFVFNHFLAERMEQYKQTGKSPTRFQQDKSLTALKSEFKWLREVDSTALQASLQTLDTAYQNFFRRVKQGQKPGYPRFKSKREHRRSYKSKCIGTNIKVLDTEVQLPKLGLVKCRVSKQVKGRILSATVSQNPSGKYFVSLCCTDVEIEPLPATGAAVGIDMGLKAFAITSDGVEYPNHKYLTKSQQKLAKLQRQMSRKSKSSNRREKARIQVARLHEHISNQRSDMLYKLSASIVRNYDLIAIEDLAPANMVKNHKLARSISDASWAEFRRQLEYKAVWYRKQVVTVDRFFPSSQLCSCCGTQWPGTKDLSVREWICPNCGAVHDRDVNAAKNILNEGLRLLA

SEQ ID NO: 11621 - protein, 531 aa, unknown
  TnpB Polypeptide
MQFSEPLRPVNTLVRARRRHSAIGLTRSKREQVRALAVAFTAARQGVIEAYWAPLYASAILSSPRAMIQDRRRNGTLKQAGLTTHYSALATASAFAALKGSWQTTIAEARDLVSRNPNLTDAERHWLRYVLRWPAHLQTSLDGKTVRLEQDWAAAIDEGLLSRKLRRLILRHRASLPGTPKSVWLELDTNCYRAFARPNDRAFKGAWLAVTGSGNRRRINIPLAGRGLDEFKPRTQKENSRPGLRVSISGDRIVFNLVEHVAVATAVGAQTAGIDKGYRTLVTLSISHPESALSYGHGEDVTIAAIAEAQTTRLKHRRRLAAYERSVRNTDVAKARRIRRNNLHRTKLQRRSEADTARLRQDIGRALNEMFASNPHIGVINCEALDFVGNRLARTPNRRLGRWLKGYLQSALTYKAELHGVKLNVVNAAYTSQTCPRCGYLSQKNRSGERFLCRACSYTAGADAVAATNVLRRGSDPAITRRTSKGEVRQILEARWRSAPIGGAWDSPSSGTRHGETSRDQLLTLLASVGA

SEQ ID NO: 11622 - protein, 638 aa, Streptomyces sp.
VDEKTGEFLTASVLARRVGWCAGLVSGMASGLLAERWNGADVEALASGVDAGGRRLPSNAWMALRRLGWTVTPPEGVRVNDRVVRMVQEQAGRVLRSAAWRAALTAGVLAAWPADPARRTAAEWDAVRDAVPGGRSLPSSVITSRTRQIQAFVRKTGRLPADVFDLEPPPRTPRMLLLSVCDGQQATIERADDPGRALLRLQLPTRPDPASYRDWTWVACPVALPPTVPAGAVLHLPTLRTHQGRVRADLAYTHTVPKATRTGHTIALGVDWGLNTLLSAGAVRLHQDGRITELGTGGGQFRAAGVLARQHRLRRLSEHLHVKADQYLRLTDGDEQHPLAARHQVLADEIGHVSNRRTRLNDALAWSAARWAVDQAIAAGASVIYVEDLRSMEARGMGRTMNTRLSQQVRGRIVDRMRHVAAETGIAVVTVPARNTSRLCPRCLTPLRHRKAPDRPTTAGWKWALCPDRTGCGWQGDRDHGAWRRIAARGLTHQTRTVADRTSGAMVIRSVADTLEARAVVTPATPETSRKDRSKTGPTRPRTTRPAPRRRRAPSPTAPTGPAGKRPEGHAPTDRRTLPRAAHRHQDVNTTSTPTTGRHRPRGAALGAGFHLHAHATPPRWETIQPIPHLTDHTRSPS

SEQ ID NO: 11623 - protein, 716 aa, unknown
  TnpB Polypeptide
MLAPRVFTATTFDRKPYNIDFMPTIVDGIECYELKSKDFHYGYMTEALVNKAFETRPGSKDRYVDSFSFETKVKDNQQYLKLKNRLILDLPSKIDEANAFSSFSFYGVKYADDPKKEPIFISSKIGFSLSGVSSEIEFIFPDNKLNCGGFNINDLNKGLTTIEIDVPNGNIKSININGFTYSSDEGNDAHLSVTFGKEWGELLINNFYIPTYPGESGYLRIKTGDQLSLVNGGINSDNQKDLDLLLLESSKSIVIHDAHLFFSQTEKYLKDRPFVGISGDGSIHLLYNDCYISGLVQNDQSLEVVAPNPKETYKRYSFFITNSTFKSPVTLSLPKKDRTYPKAIEIDAVVKNALNNRGIHYKTVIIQQARMHAGDALVRATTKKGFGFPQFKNSKLDSQSFSWNNQACSLIDRDNLKFKTLKVMKQEFLLRYHRDLPEKYKLCELTISRRAGKYYASFNIEYEKDVVLISKDNLDIKRAVGIDINVENIAFSNGFKLITKSKLIAKTKYDKKMKRLQGKQSRRILRSKSTKTPLGKNFKKCQKKVCRIYDRASSIKRDSLHKISNAIVNNFDAIAVEDLTVKDMTVKKQEGITARQARAYNRAVRDASFYCLLNFIEYKAKQNGKMLAKIDPAYTSKTCHRCNHINYNLTVNDRVFNCPSFGLVMDRDEQSSINIHNIGMKSLGLGISLQTINVKPFKIVKLSSLQLGSSHLFRCE

SEQ ID NO: 11624 - protein, 378 aa, unknown
  TnpB Polypeptide
MQLSETIKLYMTKEQKSLVVMTMNEYINTVNSLVSAASNGTSISKYTTADVKASLPSALTNQCIRDARSIVNRYNKDCRKFSAKNKKTANQKSNITIKKPAVPVLKRPCCYVNNQNFKIKDNCIEFPVLINGKSRRIAVRTSMTDNQKLIFANAKHGTMRIVYKGSKIVAQVVYEVNEPEYTDDGSAMGVDLGIKCPAVSYTSDGSVKFYGNGRKNKYMRRHYKYLRKKPGKAKKPDAIKRINNKEQRIMKDIDHKISREIVETAVVHDVKVIKLERLANIRSTTRTSRKNNPSLHTWSFYRLAQFIEYKAKLAGIKVEYVNPAYTSQRCPVCGSVHHARDRNYTCSCGFRIHRDLLGAINICNSTEYVGDSNIRHTA

SEQ ID NO: 11625 - protein, 354 aa, unknown
  TnpB Polypeptide
MLLRKGFRFRLDPTDSQRQLCSQFAGASRFLYNRGLAQRKQVYEETGKSVSYFEQNNDLVPLKKQQPTAWLKDIHSQVLQQALKNLDAAFQNFFQNLKKGKKPGFPRFKCKGIRDSFRYPQGVHIENSQVYLPKIGYVLFRKSREIEGTLKQTTILREGSHWYVSFSCEIEINDPVPAPIAEEKAIGIDMGLKSFAVMASGPNNTAKRIDNPRFFTQDLPRLRVLSRRLCKKVKGSKNWLRAKLQLSKLHARIRHCREDFAHKLSTEIIKSHDIICVESLDIPNLLQTGTRSLSRAIADASWRFFLGCLKYKAKEKGKHFVETGQYFPSTQTCNSCWHRQKMELGDRIYRCIVA

SEQ ID NO: 11626 - protein, 360 aa, Microvirga sp.
MVRTDQELAYLTFSYRVKDATSGKHLVAMGNATNTVWNFCNEISERSARRSPKWATKKQLRDLTKGASKELGLPSQVIQEIIDEFIDKRKKVGRPKLRWRVSRGARRSLGWIPFTNQDVEIIGSIALFRGRKIRLWKHREIQGRFKSGNFSQDARGRWYCNIVCEVERQTTNRTHIVGIDLNHKVAAKCSDGPELPQARFYRDLEDKLAEAQRRGRKRQAQTIHAKIANRRKDGLHKFSRAVVNRAGAVFVGNISSTWQIASGAGKATVDVSWSMLRNFLDYKCDHAGVAFAEVNEAYTTQTCSRCHARSGPQGREGLALRQWVCSECGSVHDRDQNAALNIARLGCETLGLKGPGSLGL

SEQ ID NO: 11627 - protein, 431 aa, Burkholderia sp.
VQGFSLTKRGRWMSVCDSQNTSSYSKIRTYIRVRGVSAVIVNKAYKFRIYPNKKQMELINKTIGCVRFTYNFFLGKQKEKDAYWYIVEKMVQNSQLPTNNWKEKCLNKYETVKAIPELKKHYSFLKEVDSIALQKSVENLADSFKRYYKKQNKYPRFKSKKNPVQSYTTKHTNGNIAVEGNYMKLPKLGLVRFAKSREVEGKIRSATIRRNPSGKYFLSIGAEVEVIELPKTHSAIGVDLGLKNFAILSDGTTFSNPKFFRTLEEKLAEFQRIMSRRTVGGSNWYKVKRKVARIHEKMANARKDYLHKISTDIVKNHDIIGMEDLSVSNMLKNHNLAKAISEVSWSAFKTMMEYKAKWYGKQVVTVAKNFPSSQLCSCCGYQNKVVKNLGLREWECPKCHTHHENRDINAAINLKKEALRLLTAGTAGVAY

SEQ ID NO: 11628 - protein, 503 aa, unknown
  TnpB Polypeptide
VSRTYPRVPYAAFGENGEPLDLVEVLDGIRKDAELVAHYALREMTEQNLALVTYFDGLKPAEAGRRMGLFLPDNVKKRFRSGSSRLERMFREQVVTNLRSWAARTGATSGNYTGYVSAGWKRAASNSKPTLMQPRLSLPAADRQYREMTVKSDRIELMMVVQGEKRVLHFPTPPQLLEQGCNPGVPDIWVDKNNRVMFGFHGAVDPGRPEFSSRYVVGVDVGVTNPAAYVVWDTEKKEVVERSLLGQRACSLSNKIKRGTRQVAALRRKGKDKESVSHREHLSNRRRELSILIAQEIADAAWRYDNAIVSFEDLSHISNTMRFGRWFRGEVLRRTRDMVEADGGRVLKVNAAYTSRKCHVCQSALDMSDYSQPHCTTCGITHHRDINAAANIAQRANVKKACQTRKRHATKTKRIRRSKCRVRPLKHPGTKNKPTPKAPQNRPKTHVHTHTTTPTREVSVRMCPADTRVSAVDHNVWFQTTSGTTNPKESLSINVVDWVYTKE

SEQ ID NO: 11629 - protein, 376 aa, Streptosporangium sp.
MAQTLKRAFKFRFYPTPEQAEELARTFGCVRLVYNRTLEERHRAYTLEGRSVSYVESSAALTAWKRTDELAFLNEVSAVPLQQALRHLQAAFANFFAKRARYPAFKSRKKSRASAEYTRSAFTYQGGRLTLAKMDGPLNIVWSRPLPEGAEPSTVTVSKDAAGRWFVSILCQDTIRPLNPTGEAVGIDAGITALVTLSRPIRGMTDADGKVVNPRHERADRRKLARAQRALARKEKGSANRRKAKLKVARVYARIADRRRNFLHKLTTSIVRENQTVAIEDLTVRNLVKNHSLARAVSDASWREMRTMLEYKAQWYGRELLVVDRWFPSSKLCSTCGTIAQSMPLGVREWECACGAVHDRDVNAAKNILAAGLAER

SEQ ID NO: 11630 - protein, 382 aa, unknown
  TnpB Polypeptide
MISYKFRMYPNKQQIERLDFALEMCRQTYNNLLGELKEQAVIDKNMIQQHILDLKIINPILKQIYSKTLQYECYRLFSNLSALSALKKKGRKVGALRFKGKNWFKTISYNQSGFSLEHTYKKNGRLKLSKVGDIKIKMHRQVEGNIKQITIKKENDKWFAFVISDGIKRLEHGNKVLGIDLGINNYLVDSEGNKVEHPKYYEKILPKLRKVHRNLSRKKKGSKNRLKARKSLNRIYEKLNNQRNDFLHKTSTDLIRKSKIIVFEDLNIKGMMMQKYFNAKNIADSSWNKFIKMLEYKAENAGVQVIKVNPRNTTKLCSNCGAMKSMHLWDRTYKCAECGYKANRDENSAINILGKGLAFVEMMSDFPSGEQLSMKQEAITST

SEQ ID NO: 11631 - protein, 484 aa, unknown
  TnpB Polypeptide
MRDRSTIYGTVQHVREATESKADTGRSKPLVSHTGVLLTRDVAYRFALDPTLAQEQTLRTYAGAARYAYNHHVARVLANLNQRQAEATYDVEPGGMTPSLSWSEFSLINEFNAFKNGQLATSPVGPDGTAGLPWRGEVAWDVFECASVDAAAALANFAGSRTGTRKGKKAGMARFKSRHKTTPSFRLRSKSKPGKTAPLRVTGPKTLRLPRIGQIRVHGSTRTVRRMLASGRLHLRGCAVRFERGRWWVSLQGVAAQFHAARRGRAASDPALTVRHTAGAGVDRGITSLAVVADIHGALLHVAKGVKALRHAQVALRRANKTHSRTKEGSKGRQQARERLVRIHARVANLRKHAAHEASTWCAGNLTRLAVEELYIAGMVQNHALALAVSDAGMGQVGRMLEYKASWYNLELVPVDRWYPSSKTCSGCGNVKDTLSLSQRLYECAVCGLSIDRDVNAAVNLARWPDRDDAQPGTAAVTAAPSSA

SEQ ID NO: 11632 - protein, 538 aa, Streptomyces sp.
LAASFVVPAPAGVAIRDRLRVSEADARVLTEVGTFLGSLAAGDLAERSRQGLAHDAAGWAVRKRELTGRSSARWAGSIAKATHDQWALARRGQAAHMRWLRGQIASMEARLARPLGTKANQREGLARGYGSRREWHAKSRRLHTLKARLVAVEADWKAGRVRVVRGGKQLANARHHLQAAGLDEAAWRARWQAARMFLAADGESGKRFGNETLRVTDTGQVSVKLPAALAHLANAPHGRYVLDATVRFQHRGQEWLDRIAASRAVAYRIHHDVLRGRWYLTASWQRAAAPVLALDAALVRGVVGVDMNDDHLAAWRLDVHGNPVGEPQRFYYDLAGNADHRDAQIRHALSRLLHYTQRCGAAAIALEDLDFTDGTSRERHGRNKRFRRLLARFPTAKLKARLVSMAAEQDIAVVAVDSAYTSRWGAQHWQKPLTTPARMISRHDAASIAVGRRALGHPIRRRTAPPPQHQSDAAGHRTVQARPETRRREEPRPHLPGPRTGCAPPGGGAKAGDQCAQNRSGRAAEHESWHQDSLPLSL

SEQ ID NO: 11633 - protein, 398 aa, Synechococcales sp.
MRITYQYKLRPTVEQEALMQSWLDMLRAQYNWMLGERFNWWETHRSPVNACPLEQYAGIPSERPNYYSQKRSLVQLKQNRPWYKSVQSQVLQEMVKRVDLTFQQYLKGDKDGKRSGKPRFKKAGRYRTFTFPQLKNSQLIGSRLKLPKIGEMKLILHRPIPGGFSLKTGTVTRKADGWYISLLLENKDVPVSTPDVNTALSVGIDMGLKDFLVTSDGASIPIPQFFRKSEKKMAKLQRQLARQVKFSNRWRKQVARIGKLHLKISRQRRDFFSKVWDELFSQYDVVAHEKLNIKGLARTRLAKSILDAAWGQFLEMGKFKAEKAGKLTAPQNPRRTSIDCSDCGCAVPKTLSDRLHVCPNCGSQMCRDQNAARNILYRAVGNQALNISGNVLAVAGSH

SEQ ID NO: 11634 - protein, 417 aa, Lactobacillus sp.
VKTMSELKYYYGLKMRFYPSTKQKQIIKMNSDVSRAVYNAMVAIDRELYQLKRVKLPIDTIQTRITELEKRKKTQRNLANHYCYMNHPYIDSDCRSTAMRSYKAAWNIFRKVHNAGTPKFHKKTYEEKYQTSNHYKSKKPINMWTGSIRFIDKKHIQIPKLGKLRVSGSYRRILDEKDDIRIGTVTISKDNTDKYYVSMQLGSDTPFFKELPKTNSRIGIDLNTENFLTTSDGQIIDNPRYYRTIKHKLAKAQRKLSRRQLRAKKEGRSLRDSKNYQKQRMVVSRLMNRVRNQRNKFLDEMSITLIKNHDLVVAENLRSSNLLKNHALAMSISDVGWRTFLQKLEYKAELYGKTFVTVNPKNTTQTCSKCGHIMGTEGTDKLTLKDRSWTCPSCDTYHIRDVNAAKNILDKGLKQLA

SEQ ID NO: 11635 - protein, 529 aa, unknown
  TnpB Polypeptide
VYFWEGALAKNQTYRAFVARPSHILDLNGELLDSARVLVSLACEVRDISAYATYVVRNDEGLADELARITAVQPAVAGRRAGVNMPDFLASGKSGRSRKEWLMRHNAVAACRSWQERDKAANGESAKYVSQGWKRTANGSAPSYGVDYVNLGAVDKQYAVIENDPLTDGEIVLKMVIQGQWYRLIFNFDNKRFTEGRVTLPVIKVEDGQPVFIFTVVTDNPIVQFSGDYTIGVDVGINNYATVVVRSTETGRVVYETTLSQRVHSLWNSVRASERQVRVLKKKAGTLLHDRQARMSTLDEAQFHREAASRKKRELAILAAQEIANLSHTFDNAVVAVEDLGWIANTMQNGRWNRGELVKWLAHYVSQNGGWVVAVNPANTSQQCHTCGSKVTHPTHEVSVCAEHGTMDRDVNAAANIAARAVPRVVKARVTRAKNRKLQPQAALKTPIARNSLKYPGRDRTKNKPTPKRKNHRRTVREVNLPLRPARAQAHSLEASVLADQSACSALGTIKAALKQGNTAYKSRLCSLI

SEQ ID NO: 11636 - protein, 445 aa, unknown
  TnpB Polypeptide
MPDFLVSGKSGRSRKEMLVQHRVVTEFRSWQERDKAANGESSKYVSQGWKRTVNVSPPSYGEDYVNLGAVDKCYAAIENNPFTDGEIILKMVIQGTWYRLIFDFDNKRFTEGKVALPVIKVEDGQPVFIFTVVTDNPVVQFSGDYVIGVDVGINNYATVVVREVETGRIVYETTLSQRVHSLWNSVRASERQVRFLKKKSDGILSRRQARMSALDEAQLHREAASRKKRELAILAAQEIAYLSHVWDNAVVAVEDLGWIRNTMRNGRWNRGELVRWLTHYVTQNGGWVVSVNPANTSQLCYKCGSKVTHPTHEVSACPEHGVMGRDVNAATNIAARAVPRVAKARVTRAKNKKLRSQPPLRTSPARDSLKYPGRDRTKNKPTPKRKNHRLASREVILPVCPARAQAYGLVARVLADQGARVALGTSEAALKQGNTAYKSRLCYLI

SEQ ID NO: 11637 - protein, 409 aa, Arthrobacter sp.
MSLKQRMYPTEAQRALMVMHAEHARFVYNLGLEQRSMWTKDKRHFEQKITVYSQGKELTELRQELDWLRAGSSSVQREALRDLDRAFQNFFARRARLPRFRSARDPKSGFAIRDLVLRRINRRWGKVLIPKVGWVKFRLTYPYRDAQQGTSARAVHHNGRWHVSITTPPRPKVPACTGAKVGIDVGVANTVASSDGIFIQAPSWTRGEQRRFLALQRRLARQEKGSKQRARTLAKLAGLRRTLKDRRTNWVEQTTTALARIYDLAAVEDLKIANMVRRPAPRPDPDIPGSFLPNNARAKAGLNRAILASCWRQFTTRLAQKMDVIRVDPRNTSRQCQSCQNIDARNRESQAVFTCMECGHQAHADTNAAQNILDRALITNPGTPGVRTQKPWRRAASTIPSATAQPAQG

SEQ ID NO: 11638 - protein, 383 aa, unknown
  TnpB Polypeptide
MTLVNKGLRIRIYPNKDMMQKIEQNIGNARFTWNKLLQMYSETYRLFKQYGYTKLRCNMTTFNTMLNMLKVEYSFLGLSESTSLQQVFRDLINAFNKFFNEGAGYPRMKSKRNPKQSFRIQNNKKRNTVHVKGCYLHLPKLGDVKFRTSKEYKELLVDSVINNVNVCKEKGLYFAVVNIETIHTPIKSEKDCAVGIDLGLKNLATLSTGLKIVNLNFEKEDERINFYQQQMSRRTKGSRGYKEAQGKYWKWVNRKKNRKTDAYHRFTHYLITHFNTICMENLNIRGMLQNNKWSPKLQRNGLYQLVEQLKYKCDWNDVCFVQVDRFYPSSQLCNNCGYQHHDLGIGVREWVCPECKTCHDRDINASLNIRDEGLRLTKNIMII

SEQ ID NO: 11639 - protein, 441 aa, Micromonospora sp.
VQLRYQSRVFPTPGQQVELAKAFGCARVVFNDGLRLRRTAREAGDKYISDVELSRRLITEAKQTPQRAWLGEVSAVVLQQALADLNSAYRNFFASVSGKRKGRKVAPPRCRSRKDNRQAIRFTRNSRFKVLDNGHLRLPKIGGLVIRWSRSLPSAPSSVTVIKDAMGRYFASFVVQTTNDEDLPPVESEVGVDLGLTHFAVLSDGTKVTAPRFLRRAARKIKRLQQALSRKQKGSANRKKAVEKVARAHARVADTRRDWQHKLSTAIIRENQAVYVEDLRVAGLARTRLAKSVHDAGWASFTAMLEYKAARYGRTFARVNRFFPSTRMCSQCGCINDKMALNVRAWDCPCGAAHDRDVNAAINVLAAGRAESLNDRGAQIRPGLVPAPRGEAVTHPDAACSTRSVEGISILQGGEDVNTSTRGKLNCHHHARRRPVRQAIR

SEQ ID NO: 11640 - protein, 296 aa, unknown
  TnpB Polypeptide
VFRRPQADLVRGRDYSFVTADDGQKLLSLNTLKKRIKVTFDLPKKFKEYFDGTWSFGSGKIVSMNGNWYFHIPMTKNVSEEFSMDHVKHVVGIDRGIRFMVTSYDEKGKVTFVSGKEIQKKREHFQQVRSELQSKGTKSAKRALKRISGRENRWMSDVNHQISKTLVTKYKAGTLFVLEDLKGVSFSDDLLGKRSAKDRQELRTWTFYQFEQDLTYKAQAIGSQVLKVKPDYTSQRCPKCGRIQKENRHHDIHEYICDCCGYRSNDDRVGAMNIQILGTMYVSGDSNPRFGVRKVN

SEQ ID NO: 11641 - protein, 273 aa, unknown
  TnpB Polypeptide
VQVRRAYKFLLRPTSKQAAALSACLEDHGQTLRRLDKAFAAFFRRVKAGDRKPGYPRFKGRGWFDSIEWPAEKNGARWGSVPHPAVTRVCLLGIGHVRVHGYRAVKGRVKTITAKREGSRWYVVLPCDDVPAEPLPATGKVRRSRLDHAHKTALALVRDYDVIAHEALNVANMTRRPAPRAAGDGTYEPNRAAAKAGLNRSILDAGWGVFLNILHAKAESAGRGAQCGHVATGNRVSQAMFRCLACGSEAHADVNAAINILKAGLALQGAEAA

SEQ ID NO: 11642 - protein, 316 aa, Shigella sp.
  misc_feature (297)..(300): Xaa can be any naturally occurring amino acid
VKRLQAFKFQLRPGGQQEREMRRFAGACRFVFNRALALQNENHEAGNKYIPYGKMASWLVEWKNATETQWLKDSPSQPLQQSLKDLERAYKNFFQKRAAFPRFKKRGQNAAFRYPQDVKLDQENSRIFLPKLGWMRYRNSRQVTGVVKNVTVSQSCGTWYISIQTESEVSTPVHPSASMIGLDAGVAKLATLSDGTVFEPVNSFQKNQKTLARLQRQLSRKVKFSNNWQKQKRKIQRLHSCIANIRRDYLHKVTTTVSKNHAMIVIEDLKVSNMSKSAAGTVSQPGRNVRAKSGLNXXXXRVRSASRGAMSGQNQV

SEQ ID NO: 11643 - protein, 418 aa, Cupriavidus sp.
LRRWIVSLVRNAPKIGCVSCSWPSLKRAARRAIGLAFEVKRARWFNLRRTFLCWAGEHHAVHLPGSTALFSQKSKAARPRAPGLRECPVMLIAHRIALDPNNVQATYLARAAGTARFAYNWALATWGRQYEAWKADNALIKPSQAALRRQLNAIKREQFPWMMEVTKNAPQMAIIQLGDAFKNFFAGRARYPQLRKKGGHDRFTLANDQFRIDASRIRIPNLGWGRMRETLRFAGKIMSATISRVADRWFVSITVDTPDRSHLPEAENQGAVGADLGVSALATRSAGESIHGPKALLPRLRKLSRSLSRKVKGSANRRKAKAKLTKLHASITAIRSDALHKLTTDLTRRFHTIGIEDLNVRGMVKNRHLARSIADMSFFELWRQLEYKADRRGGKVVVAGRFYASSKTCSACLAAGCA

SEQ ID NO: 11644 - protein, 382 aa, Giesbergeria sp.
MILVYRYRVKSLNGLLNQQARAVNFVWNFCNDRQKDALRFGRPWHTGFDLNKLTTGSSKELGLHSGTVNAVCEQYAKSRSQKKRPYLRYRGKKSLGWVPLKGRELKREGDAFRFAGHTFRVFNSRVLPVGKIKDGTNFSRDSRGNWFLNIVIDVEVVAMGVRQPVKGVGIDLGLKEFATLSTGEKIEAQRIYRGAEQALAVAQRAHKKRRVKVIHAQIANRRNDFHHQLSTRIVREFDYIAVGNVCAAGLAKTSMAKSVLDAGWTSFRTQLAYKAVKHGAWFEEVNESYSTQTCSDCGALPDSRPKGIAGLGIRNWICSECGGVHDRDVNAAKNILNQLSFRVGHDTPVVGIPFLLGGEDVKKKPPARCAVAVLQQGASRKR

SEQ ID NO: 11645 - protein, 550 aa, unknown
  TnpB Polypeptide
MGKLEVPPGWVCQAYRFEVDRPSRHPSISSHEGGRRFAWNWARTLIEDQLHARETFRVLALRQGATLPEAEEFATGASRIPYLVEMNEQRGRKHEKLNPVSEWCPWSKEAMRYIWNRVKDEVAPWWAENSKECYSSAFEALAQAFKNHFDSKDAKRKGPQVGWPKYKSRRGPQSVAFTTGAIAVLDRHHVQLPVIGVLRVKEPTDKLGRHLAEGTARILRATLTTEGPKAFVSFSVLAHRDRPARVPVGVCGHDVGISALVTSSDSHVVENPRAKEQVGKKVSRYQRKMDRQHRTGSPACFNPDGTHIQGTCHWKQRSKRSVKNQVRLKRAHAKAANVRRDTISKASYRAAATHAVNVVEDLNASGMGARGRGKSGFNAALRDAALAELRRQLSYKAPWHGSSLWLAQRWYPSSKLCSTCRTPNAGLSRSARVFHCDTCGLSIDRDLNAAKNLAALAELACVCLMAQLMTGEPVDWSKLPVRPSGWEPDHSTRSSRGCARAGGPRTEGGERKTARCNAAGDRSFDREAAVATGTVSILDSASPSPKKAVA

SEQ ID NO: 11646 - protein, 285 aa, unknown
  TnpB Polypeptide
MLPEDETGTPFDEYLNGNEWEFRTSTLHYKPFTDEFWFHIGFKRIENEEEERKTDSESDTDGPDDSTVLGIDLGVETLAVASTGRFWTGDELDHWHREFQRRRADLQKTGTHEAHRTLQRVSKNETAYYKQYLYTVANEIVEEAVEHDCSVIAFEDLTDIRKRAPEATWHHRWRFRRLYEYVAYKTDAYGIDVEELERSPQARTVPAYYTSQRCSSCGFTHEDNRPTQEHFECQQCGYQNHADYNAAKNVAIRCCRRLLRRNQTGGDGGAPVNVALNGGTMTVNV

SEQ ID NO: 11647 - protein, 381 aa, unknown
  TnpB Polypeptide
MTVVKKSVRVRLYPSDSQKVLIDKTIGCARFVYNQTLTDCKRSYEQTKHFPSKNERLKNLVPLKEKYVFLKEVDSQALQQSVRDFNYALDNFFRNRNHFGFPKFKSKRNLKQSYRTPHGKRGAEVLDNKHIKLPKLGRVRTKRFDMPEVYKIFNIAVEKTPSGKYYATICIETEVQMLPKTGKQIGFDLGLIDLLIGSDGTRFERPKFNYINKDKLAKEQRKLSKMRTKLERAKLNLDECKNYQKQKRKVAKLYEHASNCARDFNHKLSRKLVEECDFIAMEDLNVRGMKKNRYLAYSVADVRWSQLLNFIRYKCLWYGKEFKQIDRFYASSKICSCCGTYHKDMVNSLSIREWTCPNCGMRHDRDVNAARNILIQALSVA

SEQ ID NO: 11648 - protein, 416 aa, Acholeplasmataceae sp.
  misc_feature (406)..(407): Xaa can be any naturally occurring amino acid
MPYKSLKTRLYLDPHQHRFLLSLMRASRSLYNQALYNVRQHFILTNQYLTYNENYHLLKGSEHYLYLNSTQAQMVIRKVDEAMKGFFGSLKSKVKQTVRLPRFLKRNTYYPLIDRMVYKPNVDVYTLPRSNFVKNVSKELEQSSHQVRKYTNALNEMDSLYLDIRTPECIQTKPIKEITIKSLYDGQYIEVIYVYEVETKKASEHQKSETMGIDFGYNNLAFCSVTNNEHLLVDGKRLKSMNQFYHKSIARLASNRPNQNILTKKMIRLMDKRHHQMEYGIHKAAKLIMDHAIQQHVKLIVIGYNDTFKDERLSDTYNQWTKSIPIARLRDRLVFLANQFGIETKVINEAYTSKASYLNQDEMVKGEFSGTRVKRGLYKSKNGILINADQNAALNMIRKGNPNALXXVIDHLFVLV

SEQ ID NO: 11649 - protein, 370 aa, Escherichia sp.
  misc_feature (312)..(345): Xaa can be any naturally occurring amino acid
VKRLQAFKFQLRPGGQQEREMRRFAGACRFVFNRALARQNENHEVGNKYIPYGKMAFWLVEWKNATETQWLKDAPSQPLQQSLKDLERAYKNFFQNRAAFPRFKKRGQNDVFRYPQGVKLDQENSRIFLPKLGWMRYRNSRQVTGVVKNVTVSQSCGKWYISIQTESEVSTPVHPSASMVGLDAGVAKLATLSDGTVFEPVNSFQKNQKKLARLQRQLSRKVKFSNNWQKQKRKIQRLHSCIANIRRDYLHKVTTTVSKNHAMIVIEDLKVSNMSKSAAGTVSQPGRNVRAKSGLNRSILDQGWYEMRRQLXXXXXXXXXXXXXXXXXXXXXXXXXXXXXXXXXXRSATCQSQQRVRSASRGAMSGQNQV

SEQ ID NO: 11650 - protein, 475 aa, unknown
  TnpB Polypeptide
MFHFGRVVESISSSSSESLFMQQILTAKLKLITTPERFQALRATQLAYRDALNAVSHYAFEYGKTSSVTTLHKGMYAELRTRYHLPSQLACSVERQVASTYKGLWTKLLKNKEHRRKKMTKKRFQGLDKPPTYSSPTVQYTYARDYTFKLDQQVSLGTLGGRINVPYRGYDEHVALIRHGANIGDAKLWYDKPKKCFYVLVSLAIDIPEPICQQLSEVVGVDIGIRYLAVTSTSTGKATFHPGKRVRHKSNHYARLRKRLQKKGTRGAKRRLKRIEQRERRLKLQANHIIAKQIIKQHPQTLIGLKDLTSIRERTKRRKRKRKKNGKGYQRVSPKARKANRVYSQWSFAELQALISYKATLSGSLVIKVDADYTSKRCPMCGHTTDENRPRKGLLFVCQDPNCRYTLHADLIGARNLVMRTLLVRHDWTRTGTLSMCPDASDREAKAVRLKRYSELRWSPDVSRKASLRSLSGGD

SEQ ID NO: 11651 - protein, 291 aa, Moorea sp.
LKARYQYRFYPTDQQKQDLARLFGCVRVVWNDALAICKKSKKVLKSGDLQKLVITQAKKTEERKWLSEVSVVPLQQSVADLGVAFKNFFESHNGKRKGRKVRSPRFKKRSNNQSARLTRRGFSIQGDGVYLAKIGVVKPIWSRELPSDPSSVTIILDCANNYFLSFVVDIEPVQVDAKNQSIGIDLGIKTFAVMSDGGHVKSPDYSKLDRKLRKQTRKFARQAKGSNRREQTRIKIARLNNKIANKRKDFLHKFSTRIVSENQVIVLEDLNVSGMVKNRKLARAISQQGWS

SEQ ID NO: 11652 - protein, 312 aa, unknown
  TnpB Polypeptide
LKEVDSLALANAQLNLDKAYKNFFRDKSVGFPRFKSKKNPVQSYTTNNQKGTVTLIDNKFIKVPKLKSLLRIKLHRQPQGIIKSATISCHASGKYYVSLLCKEEIVELPKTNSVIGIDLGITDFAILSDGQKIDNNKFTSKMEKTLKREQRKLSRRALLAKKKGINLFEAKNYQKQKRKVARLHEKVLNQRTDFLNKLSTEIIKNNGIICIEDLNTKGMLRNHKLAKSISDVSWSSFVTKLQYKADWYGREIIKVGQWFASTQICSGCGHKDGVKPLRIREWTCPICHAHHDRDINASVNILTEGLRIKRLA

SEQ ID NO: 11653 - protein, 397 aa, Halobacteriales sp.
MWEEMGQIPDNSDLKRELKTHNKYKGLHSQSSQRVLEELAEAFNSWYGKRKNDSYANPPGHRKKNYYDQDGNRVHEEHPRSTVTWKQKGIRHDTENNRVRLSKGANHKEHPRAWEYILVEYETRPGVTVENLQQVRAVYDTAKGRWELHFVCKHEVETPDAPGNETAGIDLGIGNFAAVAYSTEEANLYPGNRLKQDGYYFPKEIAKCDDSGGEEATRLHRKWSERRTHFFHSLAKHIAETCVERGVGRVNIGKLAGVRKDENSDSKNWGKHGNLDLHEWAFDRFTRILTYKAKVKGIEVVEVSERDTSKTCCVCGREDSSQRVERGLYVCEECDAAFNVDVNGAENIRLDVNQSNSASAPRLGGDRSTGWLAQPGVYLHDLSCGFQLQEQVVDRKP

SEQ ID NO: 11654 - protein, 429 aa, unknown
  TnpB Polypeptide
MEDHTPGYPTRSCASLSSEQPVYDAYRYCSRYQRTIFSCLERRVSCLEEIAESVDTFNILQHSGQCKRGNHSEVRRKAKQNLMLIFEYKLDGSKKQYAAIDEAVRIVQFIRNKCLRLWMDERGISKNDLQCSCAVLAKDYPFATRLNSQARQASAERAWFAISRFYDNCKTQKPGKKGYPRFQHDNRSIEYKTTGWRLSSDGKHITLTDGCGIGCLRLVGNPKQKIAAFPLEQIKRVRIVHRADGYYVQFAVKAERAVVHQPTGKQVGIDVGLKAYYTDSDGNTVDNPRHYRKAEQRLKRLQRQLSRKQKKSQNRKKARKHLARAHLQVQRQREDFARKTASTLVSSHNVIAYEDVQIRNMVKNHHLAKSIHDAGWGTFISWVKAYGLMHNVPVIAVAPHFTSQECSACGAMVKKSLSVRMDCAPKTGQ

SEQ ID NO: 11655 - protein, 409 aa, unknown
  TnpB Polypeptide
LNRAYKYQIYPTFEQQTILTEYFGSVRYVWNKMLEANINEYQACKKFVWSQQYQKNLPAMKKTDPWLKLIPSQALQQKCDDLQKALKMTVSKRAKRFGFPKFKSKHANKQSFRIPQQNNQIKILTNQIIIPKLGAINWKYHRPANGAVKFVTIKRHNNKYYAIVLCELPDKQKTPIDKDQTAGIDLGLTTFAVLSNGQEIATPKFYRKQQGKLKRAQQRLSRRQKGSANRNKAKHHVQKIHNKIANQRHNFIHQESRWIANTYSAVYVEDLNIDAIKKRFGKSTSDQGWGMFVNALAYKCNHFDQIGRFVPSTKTCSNCGAIHEMKLSDREMHCNQCGHRQSRDLNAAINIRFWGLASTDPTLFVNTSGTEEIHACGDEHSTNIAADILVNASLKQEKFLGQPKKPSVL

SEQ ID NO: 11656 - protein, 1248 aa, unknown
  TnpB Polypeptide
MARFDVPEGWRVQAFRFTLDPTEDQARRLARHFGARRKAYNWAVATLKADIQAWHTAGMATAKPSLQVLRKRWNTVKDDVCVNTETGAVWWPECSKEAYADGITGAVNAYWNWQSSRAGRRAGKRVGFPRFKRKGRDHDRVCFSTGAMRVEPDRRHLTLPVIGTVRTHENTRRIERLIRAGRARVLAISVRRNGTRLDASVRVLVQRPQQPSVALSGSRVGVDVGVRHLATVATAGGTVIERVENPRPLHTALRELRHVSRACSRCVKGSRRYRERTTELSRLHRRVNDVRTHHLHVLTTRLAKTHGRIVVEGLDAAGMLRQKGLPGARARRRGLSDAALATPRRQLSYKTGWYGSQLVVADRWFPSSKTCHACGHVQDIGWAEHWQCATCSVSHQRDDNAAINLARWELPSTAVGPVGAAVKRGADRKTRRGRAGGCEARKGTGHPACWGTTPRWGASRVTTNDHSLATDRMLPISNVPNRERKCMAIIETDNEVHTPFEQDVAATQRYIDGSRFAGITRLYTARQVVEQRGTIPTDYTVARDAAAAFYDRLRELYAQKKSITTFGPYSPGQAVSMKRMGIEGIYLGGWATSAKGSTTEDPGPDLASYPLSQVPDDAAVLVRALLTADRNQHYQRLQMTDAQRAAAKEYDFRPFIIADADTGHGGDPHVRNLIRRFVEVGVPGYHIEDQRPGTKKCGHQGGKVLVPSDEQIKRLNAARFQLDIMRVPGIIVARTDAEAANLIDSRSDERDQAFLLGATNLGIPSYKGCFLALVRRFYELGVKELNGHLLYALADGEYAFANAWLEREGILGLVSDAVNTWRENGKGSIDDLFDQVESRFVAAWEDAAGVMTYGDAVAELLAFGVSEDEPAHMSPEEWRKFAARTSHYAAREKARELGADPPWDPELARSPEGYYQIRGGIPYAIAKSLAAAPFADILWMETKTADLADARQFAEAIHAEFPDQMLAYNLSPSFNWDTTGMTDEQMKEFPEELGKMGFVFNFITYGGHQIDGVAAEEFATNLRQDGMLALARLQRKMRLVESPYRTPQTLVGGPRSDAALAASSGRTATTKSMGAGSTQHQHLVQTEVPKKLLEEWLTMWSEYYQLPEKLRVQLRPRRAGSDVLELGIYGDGDEPLANVIVDPIKDRHGRSILTVRDQNTYAENLRQKRLMTLIHLWLVHRFKADAVYYVTPTEDNIYQTEKMKSHGIFSEVNQDVGEIIVAEVNRPRIAELLKPDRVELRKLITKEA

SEQ ID NO: 11657 - protein, 1248 aa, unknown; identical to SEQ ID NO: 11656
  TnpB Polypeptide

SEQ ID NO: 11658 - protein, 306 aa, unknown
  TnpB Polypeptide
MLEEKQQAYKKKERIPRPTPAKDKQEFPFLKEVDSLALCNVQLQLEKAFRDHFRNRKQFKLPKLKNKKDKQSYTTNNVQNSIRVDFEKSLLYLPKIREGIEIELHRRFDGKIQSVSVSRTSDGKYYASILVETENPINKVVEPKSRSCGIDLGLEHFVTVTNDFGSYKVEHPKYLHRGEERLRRLQRRFSRKQKGSKNSEKARLRLAKQHAYISNARNDFLHKLSKAIIDENQVVVVEDINVRGLLKTRLAKSIADSGWSKFLNYLKYKSEWYGRTFIQVDRLFPSSKLCHRCGYKNEDLALHDRT

SEQ ID NO: 11659 - protein, 358 aa, unknown
  TnpB Polypeptide
MRQAFVYRLYPSRTQERTMESILITTRSFYNSLLAERTQAWEERGERVTKVQQLRRVKERKATNPDAASVHSHILQVVADDLDKAFRAFFRRIRTGEKPGYPRFQGANRWTSFGLKELGNGFKIDGRQLKVPGVGRIPVRWHRPIEGDIKTVRISKKAGKWYAAFSCVVPDKEPLPATGTSIGIDVALTHLLTTSEGDTIENPRWYRTEQTKLRIIQRRIARRKKGGSNRSKAVAQVQRQHERIGNRRKDYLNKLVADLVHSHDLIAIEDLRITNMTRNHHSRRAFSIQAGATWQATSCARQHAPAVRCAWSIHRTHRKRAPAVVSNSRRRLPSPCGGSPAKRAVSRSTATTTRPVTF

SEQ ID NO: 11660 - protein, 380 aa, unknown
  TnpB Polypeptide
MSTRTIALTLRPDAAQADALARLQRQFNAACTYISGVAWEAQEFNKVRLQRLTYATVRADYGLMAQHAIRAIAVVADSYKTDKERKHTFRSTAAVVLDTPRLYRIIHNRASITTLDGRIKVQLGIGGHQRQMLKDAMKLAEADLVCDEKGRWRLKVCAHCPDAPTSAPRDVLGVDLGIVTIASDSDGVQYSGAKVLGLRARYAHMRRKLQKKGTSSARKLRRKRSKREHRFQADVNHVISKAIVQRAASSSRAVALEDLTHLRTRVRLHRSQRRTHSSWSYADLRAKIAYKGAMHGVVVVAVDPRYTSQTCSWCGHCERANRQSQSSFLCRSCGFAAHADLNAAHVIADRGRAAVRLPYIPRPGVSNGAGTSPRSLAVGI

SEQ ID NO: 11661 - protein, 235 aa, Thermoflavimicrobium sp.
LNTKRLQPINSATIRRNPSGKYFVSIKCEMNYCPYKPAHKEKAIGIDLDLKNFTILSNGEKINAPKYFRKYEKQLAKWYRIMSRRQYGGSNWSEARLKVARIHEKIINARHDFLHKLSTKLIHENQVICLEDLQIKNMVKNHKLAKSITDASWSEFVAMLEYKAKWFGRTIIKVDKTFPSSQLCSNCGYKNKEVKSLNLREWTCPECGTHHDRDINVSINILQEGMRLIAAGLAV

SEQ ID NO: 11662 - protein, 304 aa, Actinomadura sp.
LQQALRHLQTAFTAFFDKRARYPRFKSRKKSRASAEYTRSAFTFRDGELTLAKVSGPLDIRWSRPLPQGVVPSTVTVWRDAAGRWFVSILCEDRITPLDPCGTAVGIDAGVTSLVTLSTGKKVANPRHERRDRERLAKAQKALARKAKGSTNREKARRKVARVHARIADRRRDFLHKLTTRLVHENQVVVIEDLSIGNMVRNHFLARAISDAARRQLRTMLEYVDVPVVPGAAPAALPLPHLKGQLLVHGPALRARAGGGEPPVHHDQFTPVPSALPRLRREIPAVARRVSCFDTDRPVREDSP

SEQ ID NO: 11663 - protein, 404 aa, Actinomadura sp.
MACTVKRAFKYRFYPTDGQAAELARTFGCVRLVYNKALEERTRAWRCERRSMSYGDTSAALTGWKQTAELAFLSQVSCVPLQQALRHLQAAFTAFFDNRAGYPRFKSRKKSRASAEYTRSAFTFRGGELRLAKVSGPLDIRWSRPLPEGAVPSTVTVSRDAAGRWFVSILCEDRITPLAPAETTVGVDAGVTSLVTLSTGEKVANPRHERRDRERLAKAQKNLARKAKDSANRDKARRKVARVHARIADQRRDFLHKLTTRLVHENQVVVIEDLNVRNMVQNRSLARAISDAAWRQLRAMLEYKCAWYGRELVVVDRWFPSTRTCSRCGTVHEKLPLEVREWECGGCGARHDRDVNAARNLVAAGPAVSACGAGVRPRRESSSRTGRSVPKQETRRATAGISRL

SEQ ID NO: 11664 - protein, 733 aa, Actinomadura sp.
VFIMLHTATGHGDAVSYAAPPGAEVGDGHATGERRFRGRNKGPAWRRSHDGPVTVVRLRLVPDPAARHRLEQLFAAGWSLKRALQRDARSRALAYQAGHHRRRSPAAAKQWRTRLGLSRDALERAAYRHLDASGHLKHHLSKAVGMHLADEVWTGVERHLFADASGRRHGMPGVGTWWGFKRIPGRARSHTRARKWETFRLHGTLAGHLAAYPSPGLSPGITPQQAASLPPGTSVLAQPRAPTPPQPPRGRGRGKGVWWEYDGPLTVVFAGGPDGCRGDLVVAVRLPQGTGQWPHLVHTLDDPDTWHKVDLVRRRAPSEPGGWVYEAHLMVLKAAYIPASTAARRAAAPSARRGGVDGNVSNLAVVSVPADSPTGTPDAPAASAGSVVSSRVTLPETERTRIARRERKWRGRRRALERSRRATNTTQYRLSKRQAKREHRRRAAGLPSKQVTVPGGPRDARTDGKPRRSHRHDFLSNAYLRLRAADTAAEQRAAQSRTTRARQIAAGLVGVHGPDLVVEDCDITTWFRLWGAACARFTPGMLITALRAECAAAGGRLLRASTRATALSQHCPCGRRTPKTLGVRTHHCPIEDGGCGLTGDRDLVAAALAAFVRFDDPDDSSTARVDFQVSRSVLCAGGPGLPGALTESTAPIPAPVTGTSGAGEGKAAAINPRTRRNRRQVGERAASARRTRTSTVPTPDEPPPPTWAGQVVAPGRHRPRTRLFNTPPNCGTR

SEQ ID NO: 11665 - protein, 371 aa, Actinomadura sp.
VQLGYAFRLYPTRGQQQALARAFGCARVVYNDALRAREDARGQGLPFPKAAELSAAMTAAKKTPERAWLGEVSAVVLQQSLRDLETAYRNFFDGLAGKRPRMGPPRFKSRKDNRQSVRFTANARWSITPGGKLSLPKIGEVKVKWSRRLPSVPSTVTVVKDAAGRFFCSFVVETGAVPDPPDATAEVGIDLGLEHFAVLSDGRKITSPRFLRRAQNKLRKAQKDLSRKQKGSSNKGKARVKVARAHAQVADARREFHHHLSTTLVRDNQALYVEDLCVKGLARTRLATSVHDAGWSAFTAMLEYKATRYGRTFARVDRRFPSSQICSGCGRRDGPKPLHVRAWVCGGCGAGHDRDVNAARNILDQGRRITT

SEQ ID NO: 11666 - protein, 522 aa, unknown
  TnpB Polypeptide
VQRLQAFKYELLPNSQQERQMRRFAGSCRFVYNKALALQKERHEQGQKKLGYAGLCQLLTAWRHSADTAWLADAPVHPLQQALQDLERAYSHFFAQRAGFPKFKKKGRSDSFRYPEPKQIQLDQANSRIFLPKLGWLRYRNSRDVVGKVKSVTVSKHAGKWFVSIQTEREVEQPNPQGGAVGIDVGIARLATLSDGTFYAPLNSFKRHEARLRKAQQALSRKVKFSNNWKKAKARLQRIHSQMANARRDFLHKVSTAISKSHAMVCIEDLQVRNMSKLAAGTADAPGKNVRAKSALNKAILDQGWYEFRCMLEYKLAWKGGRLIVVPPQNPSRTCPCCGHVSSDNRQTQAWFECVACGYENNADRGSGPEAFRGSGPEAFLGSVPSTSLLAGYSCCETKGRTRPTLRSGCGWVKPPVSARMAFRGSGPEAFRGSGPEAFLVGAINILARGIQLLRDEGQDTADAAVGMRVGEPPVSARMACGSNCTGGRKQEPAETTAQGAIHAQRGRNLRPSGRGGCQGIL

SEQ ID NO: 11667 - protein, 504 aa, unknown
  TnpB Polypeptide
MHTVQLLLKTTAYDRQVMEKRFHAVSHVHNVLVKHAKKCLIRLNHDKEYLSAKAEYGVLLKKDKLSKKEEALKKHLSATMNAHTKQYGLSEHAFQSYIKVCGKRFCKCLSSQQVQKEATRVWRGVEDVLFGDGDDIHFKKYRKFSTIGGKSNTNGAKFRAESLLVEWIGLKLQCKLPKDNPYVMESLNADVSYCEIKRMMFPNGWHYYVIVYLKGDAPHKLSKVGSKYNITGIDIGTSTVAAVSDDMATLKELAPNYESYNKRIKQLSKHLDNSRRAYNPDKYNPDGTINKANHNIWAYTKTYFKNLDRLKSLYRQKAAYIKQSHEQMANELLANSITFIVENMSFKGLQRRPKSTERQDGATDIIQKDGSVKQVHKFKRKKRFGKSLNNRSPAKFITILGRKAALYGGKVDKVKTKDFKASQYDHVEDTYTKMKLSERYKYIGDYKVQRDLYSAFLLKNSNADHSKPDRDKCIYGFGKFLELQNHLIDEMMKNNISMKQCFGF

SEQ ID NO: 11668 - protein, 386 aa, unknown
  TnpB Polypeptide
MRKLLKSFKTEINPTDEQKVKINKTIGTCRYIYNFYLGYNKELHDKGEKFMTGKRFSVWLNNEYIPNNPDKTWIKEVYARAVKKSIENGCTAFIRFFKHQSAFPNFKKKGKSDVKMYFAKSNPKDLPCERHRIKIPTLGWVRIKEKGYIPTTKDGWKIKSGTISIKAGRYYVSILVEIPDINIANNSNDGIGIDLGLKDLAVVSDGKIYKNINKSARVKKLEKKLRREQRCLSRKYENLKKGESTQKNIQKQKLKVQKLYHKIDNIRTDYINKTIAEIVKTKPSYIAIEDLNVSGMMKNRHLSQAVASQKFYEFRTKLKAKCDANGIELRVVDRWYPSSKMCHCCGAIKKDLKLSDRTYRCDCGYIEDRDFNASLNLRDAVTYEVA

SEQ ID NO: 11669 - protein, 463 aa, Bacillus sp.
  misc_feature (182)..(416): Xaa can be any naturally occurring amino acid
MEVNQMIINKAYKFRIYPNQAQAILINKTIGCSRFVFNHFLSLWDHAYKETGKGLTYGTCSAKLPAMKKEFVWLKEVDSIAIQSSVRNLADAYTRFFKKQNSAPHFKSKKNNVQSYTTKQTNENIAVVGNKIKLPKLGLVRLAKSREVEGGIVNATVRRNPSGRYFVSLLVETEVQELPKTXXXXXXXXXXXXXXXXXXXXXXXXXXXXXXXXXXXXXXXXXXXXXXXXXXXXXXXXXXXXXXXXXXXXXXXXXXXXXXXXXXXXXXXXXXXXXXXXXXXXXXXXXXXXXXXXXXXXXXXXXXXXXXXXXXXXXXXXXXXXXXXXXXXXXXXXXXXXXXXXXXXXXXXXXXXXXXXXXXXXXXXXXXXXXXXXXXXXXXXXXXXXXXXXXXXXXXXXXXXXXXXXXXXXXXXXXXXNKDVKNLNLREWDCPSCCTHHDRDINASINLKNEAIRLLTERTAGLA

SEQ ID NO: 11670 - protein, 417 aa, unknown
  TnpB Polypeptide
MLLSYKTTVEISENESNIIGHLCYAASKLWNVCNYERLHYKELGLEKYPDWYYQKSHHKADLWFKSLPSQTAQEVCKLLDKSWKSFFVLQKTGGVMNPRPPRFKQCGIAVTYMQNGIKHEGESELIRLSIPKKLTEYLKANYNINDNYLFLKNKLFKSIDNIKQLHIYPPENGKCQVIVVYEIEGKEIQADNSHYLSVDLGLHNLMTCYDSKGGSFIIGRRYLSICRKYDKEIARVQSQWAKQQSRKGIRYPKPSKHVLKLHQKKRDCVKDYLHKTTHSIVEYCIENDIHTVIVGDIRNIRKGKDLGNKNNQKLHGLPYEKIYGMLEYKLKLAGIRLMKQEESYTSQCSPYTDNVSKVTAQKSNRKERGLYIEKGKVFNADAVGAYNIMRKYFSVSGIEKELSVSGLTNVRVQKVAV

SEQ ID NO: 11671 - protein, 410 aa, Haloplanus sp.
VDEWVRRTAITRLSVDDEQRELFEQTISAYKRGCQIATNLAWKRCNEKREAQSLAYEPIREKTALGSQHALLATHQAAEAITGCIARRSTGKKTSKPQFTASTVTYDTRSMTLFDDETVSLATTTDRVRCPLVLPDDEDGYQRQYLDSDDWQVTESTLTARDGEYFLHLGFRRRKNETERDTAEDGTVLGVDLGIENLAVTSTAHFVSGRELTHTLREFENVRAGLQQTGTRSAHRTLVRSSGRELRYIRDVLHQTSNSIVEEALRYDCDVIAFENLSHIRARTRASWGHRWAFRTLYEQVEYKAEAVGLTVKQVLARNTSKRCAECRFTATENRPTRNTFHCQECGARANADYNAAKNIGLRYVRQGHQSSRRTGTSQLALKSGTVTPKGGFTAYPNGFEAEFTDKPRP

SEQ ID NO: 11672 - protein, 406 aa, unknown
  TnpB Polypeptide
MKIYVERHIFVNVSMLDELCFKSKNLYNKANYVIRQKFIETSKQAKDGELERAEWIRYIQIDKIAKQEDWPEYKELPAQTSQQILRLLDKNWLSFFKAINIWKKDKTKFSGRPKLPKYKKKDGKNIVIFTGQQVRLRDGFIHFPQKANLSSLKTKIDKIQQVRIIPQATCYVIEVVYKVNPEQIDVDKNNILTIDLGLDNLATCVNNVEKSFIINGKPLKSMNQYFNKLKALFQSYVDSNGTSNRIRKLTHKRNMKVQNYLHQISAFIRKYCIEYKIGTVIIGKNIGWKQDINLGKKTNQNFVNIPFDTLIKQLQYKLSDIGIDVILVEESYTSKIDHLAYESLEKHEHYLGKRIKRGLFQSSIGKLINADVNGCIGIGRKVIGDSFIEMIANRGHAYCPVRFNVA

SEQ ID NO: 11673 - protein, 565 aa, Anaerobacillus sp.
MKRAYFSKRIYKNTILENMQHAISHALRVFNQAKHFSFQLQVKEKRSKQSKRKESMHLTVKNKYSFNDYYANSVVQEANALFSSQEELKKMYIQNKKEQINSIKKKIKSTKSRLTVLQKIKDSFVKGKPKFNKSSREQQKGNYFVVEFKKQTNIYYHAYQFEHEYLDKEITFLKAKLGRLNFKLDRFNKQRHSLETGVKSVVFGGKKLFKHQHTLEQYKDNHPLWKQKFHQQRYKEMLISGRKDAKDGNFVFHYDPDTHALSFQTPNGVSMEINNLLFPYGQKEVNEAIELQNTCNKKLAGKPISWVIEDHGDYYIFKCIVDVPENPSTNYSKSTGVIGVDLNYDHIAWSNINRIGQYIKSGILPFSLEGKTGGQITKMIEVEAIALVDIAVKANKPIALEKLNTTKSKVSNAYGHKKATLKMSMFAYNKLISAIKSRADKMGVAVFEVNPAYTSQIGKMKYMKRFGISIHEAASFVIARRAMGFKEKLPPMLHSLVPEKKLGLHHWAQWESVSTILKDMRTCTYYQSELFDVHRFRESGLLFHGALTDYEIKGMAKLKSRKTTA

SEQ ID NO: 11674 - protein, 484 aa, Mycobacterium sp.
VGGGTLIVMSRHTTFRYCLDPTVEQYEVLARHAGASRFAFNQCLQFVKAALTNRKTDPSVEVPWTGFDLINTFNAWKKSEAAGRVFTVDGDGVAETTVTGLAWRREVYQQVFEEAAVDVSKGLTAWSNSRSGKRKGSRVGFPRFKKKAGDVASFRLRNKHAKGKPAAIRVGDNNRPRSVTLPGVGSIAVRDDTRRLRRMLATGRAKILFSTISRRGGRWWVALNVEAADLHPAQQHPVCDRVTEDGWVGVDLGLTTFLVAATADGTEVARVTNAPKALSAGLKQQRRLSKSLSRKKKGSHHRKDAVARLGRHHHRVANMRRHFLHQVSNELVKTHDRLVIENLNVTGMLRNHRLARAISDAGWSEFARLLTYKQVWRGGQLIEADRWYPSTRLCPHCGAVNSAMTLADRVFTCGCGYSADRDRNAATNLARWGQAHYNLHRSPDPKAGGRATNVRRRDGADQHPRVGETSPVDAGTDVHTAPAA

SEQ ID NO: 11675 - protein, 224 aa, unknown
  TnpB Polypeptide
MKVEHINNVTVEVTPTDKYFVILNVDFEPERRANNGCAIGIDVGIKEFYSDSNGRVVTNPKYLENSVRKLVRAQRKLSRKKKGSNNYNKQRIRLAKVHEKIANQRNDFLQKQSTMLISENQTICIEDLDIRRMVRNHKFAKSISSASWGKFFMMLRYKAMWYGNDVIEVPTMYPSSQICSCCGYKNPVVKNLAIRRWECPKCHAIHDRDVNASINILRKGLSII

SEQ ID NO: 11676 - protein, 513 aa, unknown
  TnpB Polypeptide
MECVRRAVAVDVENPPPELYAVEEPYRKIVEEVAAYVAERGRLEKEKYNELYRRFRKQYHLPAQLIQQAINQGVETGKSFLALKRDGRIHKPRPEVRRVSIRFAKDSWSYRKAISSVAPVRLGLSLPSGRREVWIKPHRRFWLYWWKVLSKEAELASTLMLKRQRGRWYAIFVFDVMPKREPPAEVVAFDVNENSVAVAKVSLLSTVDAVAQWNRQYVDPAVYLIRTDFGRLAKRYETVRNAKLEELKRKYPFAGRDEEERRQNVADTREFRKFARRLRERRRKEGRVRQIAREMTKSPAVVITEELGKNPQEEMIGVEKKKVGKRELRHRIKQTPFKKLVRAVDDKARETGSAVFYVSSFRNSKVCPIHFSLLKNGGWHTLHCPHCHVVDRDAAAVLNMLWKTTPTGWVKGIWWDVKEVGKRLKKGIMPKEAVGKANPIIPRPVVYAVWASLMALKAGDKWPAVLARAAPMTPARGADEGGTRAPPRPKGTPALQGGEEVRPLLHLTAPSSS

SEQ ID NO: 11677 - protein, 339 aa, Erysipelotrichaceae sp.
MIRKAYKYRIYPNTEQKVFFAKCFGCVRFFYNKSLSDMNEIYKSTGKFKNITPASYKEDYSFLKEVDSFALCNAQLNRNTAFKSFFSHRSNFPKFKSKRNDQSYTTNNQGSVKFSSNNRYISVPKCPRIRIKKHRDFIGTIKSITVSMTTDNKYYISLLVETNVEPLKESNTSIGLDLGIKDLIVDSNGHKYKNHKHLTKSQNKLAKEQRKLSKMVKGSNNRNKQRIKIARLHKHIQNQRNDYLHKLSKKIIDENQIICIEDLKVKNMEQNHKLARNIVDASWSRFVSMLVYKADWYGRKVIKVPSTYPSSQLCSLCGYQNKEVKNLSMIEIVTLRKIF

SEQ ID NO: 11678 - protein, 415 aa, Streptomyces sp.
VEEEQGGRLVIRAYKFLLRPTARQTAALGEMLRDHCSLYNGALQERRDAWRHTSKTSIKYGNQSAQLKEIRAFDPERQGRWSFSSQQATLRRLDKAFQAFFKRVKAGQNPGYPRFKGVGHFDTVTFPKDGDGCRWNSTPHDRQTRVRLQGVGHVRVHQHRPVQGRVKTISVKCEGNRWYVVLACDNVPAQELPPTGAVIGVDMGVTHFLTTSEGEHVPNPRFLGTVAEEPAAAQQHLATFPKRTRQRTKRHRAAARKVAKLHAKVRRQRLDFHHKTARALVADNDVIAHERLNTAGMTRSPAPKPDPGTDGAFLPNGAAAKAGLNRSILDAGWGQFFAILANKAESAGRLVIPVDPRNTSRTCPPGLGGCGHVDGKSRVTQAKFQCAACGFTANADHVGASNISDRAGLVLCAAA

SEQ ID NO: 11679 - protein, 433 aa, Streptomyces sp.
MSRFRMYPTPAQAEQMLLHCAHARYVWNLAVEQHAHWQPGRKAAPSFAEQCRQLTEARAASDWLRAGNQTVQAQALKDFAKAKNARFTSGFGEPTWRKKHRHEGFRVIGDDRVPECNEDGTPKLNVKTGKQVMGRAVTVQKLNRRWAQVKVPGCGWVRIRLSPGGKGAVLPSAKSFRVTYKNGQWHAAFAVVPEPIEAPGTGEVIGIDRGVKITAALSDGRRLNCPQLTAKERAQVRKHQRRAARAPKGSDLKTAECAKVAKLKAREANRRKDWAEKTSTMLARTYDLVRFEKLNIRTMTRSAKGTVDAPGRNVRAKSGLNRSILAQGWGLLRQRTEHKAPGRVEDVPAPYTSLRCSACGWIEKKSRKSQADFVCVSCGFTCNADENAAINVAAGQGGIPRPRRSAGAGGTTPPNKRSSVREPQPEWVGIPVF

SEQ ID NO: 11680 - protein, 457 aa, unknown
  TnpB Polypeptide
MSNTTKEYLRSVSEYIDFEPEVAQMLIDSITVYDQALYFLRQEYFRCRDLNWSELPKYPSKFDLMELTKACANVKSTHLDINVKKDVVFQARSDWDSWTKSKEDFKKNPSKYLGEPKMPRYKYRFSTYNTITIDKTRFRGDCDNEIKLPCSDTYIKIPNNIKKNWIVMLKIKYVYGRFKASFIYDNNLKHLEKKNARRLSTKDANTGCLGIDLGSKNIVTGVTYKCSHNQSFIIRGTEYKQVIRQVNHKIADLESKAILCANAEITKISKKDGLLKLYKNSSAMNSLWRYYNDFSETYMHTISNMIIDFCLENCIGTLVVGHNDGWKQESELTKENNKIFCSIRHSVLIEYLRYKCKDAGITFMTTEESYTSKCDHLAGESMEHHEKYLGKRPHRGIFVSSKRGRMNADCNGAIGMLRKANIIQDADIVSLLDRGDIVSPVVVNVKGFKRPKQSVRK

SEQ ID NO: 11681 - protein, 406 aa, Lactobacillus sp.
LVKLRRTIKLRLYPDTDQAERFLAMSKEYQRLANVVSQWIFDHDFQLSWLKVNYHLYKIFRQESELNSQMIQSVFRTVSARYKTVREQMRQHSYRYKNEENKWVQVPRDLNWLVKPIQFRQPQADLVRQSNYSFVDDMQQISITTLSKRTKLAFTNKGFEKYFTGDWKLGTAKLVYSRGKWFLHIGITKKVNDFDSKDSPQIVGIDRGLRFLATAFDNEGRTLFFDGQKILHRRKKFLEIRRQLQSKGTKSAKKKLKQLAQRENRWMTGVNHRLAKTLVTAYGSHTLFVLEDLTHVTFNTDDLPKSLRNSHRSWAFFQLESFLTYKAQAIQSTVVKVNPAFTSQRCPKCGLVEKTNRHHDTHEYWCKQCQYRCNDDRLGAMNIEILGQKWLSGVKRPKIKKLTTIG

SEQ ID NO: 11682 - protein, 399 aa, Frankia sp.
VRRTFRFQLRPTARQAAALTAMVGDHRALYNAALQERRGAYRHPSRTTVRYGDQSAQLTEIRAADPEQGRWSFSSQQATLRRLDKAFAGFFRRVKAGQKPGYPRFRGAGWFHTVTWPKDGDGCRWNSQPDHPTQTRVRFQGVGHVKVNQHRPVAGTVKTISVTREGRRWYVLLSCDDVPAAPLPATGAVVGVDLGVASLAPLSDGRHIGNPRYLATAARRLTRAQQELPRKKRGSGRRRKVVAKVAALHRTVRRRRLDLAHKTALRLVREHDLIAVEALRVGNMTRRAAPRPDPSASGVFLPNGQGAKSGLNRSVLDAGWGVFLAVLHAKAESAGRVVVEVNPAHTSRTCAVCGHCHAGNRRTQAVFACTACGHTAHADVNAAVNILRAGLARQAGHAA

SEQ ID NO: 11683 - protein, 375 aa, unknown
  TnpB Polypeptide
MQLSETVKVYPTEYQKSLIAQTMTEYIDTVNSLVSDAVSGHSIAKTTTADISANLPSALTNQCIRDAKSIVRKHYKYCHQAVIKNRCFKKRGSGIRVNAPSLPILKKSCCYINNQNFKVGDNCIEFPVMINGKSKRISVLVKLTDRQKALFANAKFGTMRIVTKNHTLVAQIIYEVAEPELKSDGNAMGIDLGIKCPAVSYCSDGSVKFYGNGRKNKYMRRHYAYLRKKLQTSKKTKAVKRINDKEQRIMRDIDHKLSHDIVETAVAHNVKVIKLEQLQNIRSTTRKSHKNNHSLHTWSFYRLAQFIGYKAKLAGISVEYVNPAYTSQTCPICGYVHHADDRDYTCKCGFHIHRDLLGAMNICNSTEFVGNRQTA

SEQ ID NO: 11684 - protein, 298 aa, unknown
  TnpB Polypeptide
LLKLTKQGKYAFRDCKLPHYLPKDGYATLVIGFVRLNGNKLILPFSNNFKKTHKAVEITIPPVLLDKKVKEIRIIPKAGARFFEIQYTYESECIQRNLNKNNALALDLGINNLVTAVSNSGKTFIIDGRKLKSINQWFNKENVRLQSIKDKQHFGKKTTNRQKAIARDRNNKVNDYMSKVARKVIDYCVANDIGTLVVGYNETFQRSSKIGKQNNQNFVNISYVRLRSKLKYLCELNSIVFEKQEESYTSKASFWDRDDIPVYNADNPKEYQSVEAEYIVVCTKRQVAKQSMQMLTGH

SEQ ID NO: 11685 - protein, 552 aa, unknown
  TnpB Polypeptide
VVLGDVLTKQTTRVIVPLVGFEARLLNIKSTHVAVHAKLEFLSNEDKREVLDLMRRFSSAYRWIYKRIVEGGNPAELKRAFGPMDKFGLNSRYKDSAVQLALVKLRTMESLGVNPKKVIFGSRRLFERLCRKGDLKSRAKAKRKWRERRKGVLKGLGSKADISGNVNLTPLLINGELWLRINIKTGTNPESGKKESRYVYAKVKTSHPYLSHILEVVGKRGAVPISVHLKLIDGKVYAIFTKKIDLPEPVLTKYYGVLGVDINARPLHLALAVVEPDGNLRKYTTISLEEVIRIRERYKGKSSNVLDNFYWLVAHQVVDLAKNEGVAIAIEDISNLPKGFRGDGNKKLRRILHRFAYRSILERIVRVASREGVEVWGVNPAYTSVIGMLKYAPMYSLSKDVAAAYVIGRRALGFSEKVPKRYLQLMASPEYRGSVINWFNQELSALEKRIGGERNEYKLNRLRKEKESLEKAFNWLNRFLSPGGSPEGLQRGLTYGRNPEEPKGDSLHLWKALQVGVLRPLLGQKVPRDLSVLKPLLVGGVWKCGKVEEGYT

SEQ ID NO: 11686 - protein, 374 aa, Ruminococcus sp.
MQMTVTAKIQLNVTTEYCEWLIATAKTYRNACNFVSEYVFRTHNLKQFSLNQELYYEIREKFGLGSQMTQSVFKTVIARYKTIQTNQHQWIQPEFKVPQFDLVWNRDYSLNQNYFSVNTLHGRIKLTYHSKGMEKYFDKEIYKFGTAKLVCKHKQYFLHIPVTFEVSECADSGICNVVGIDRGINFIVATYDSKHQSRFVSGKTIKQKRGHYKNLRKQLQQIGTPSSRKRLKAIGQRENRWMQDVNHCVSKALVENNPEHTLFVLEDLTGIRSVTEKVRVKDRYVSVSWSFYDLEQKLIYKAIQHHDKVIKVNPAYTSQCCPMCGHTEKANRNKKIHLFCCRNCGYQSNDDRIGAMNLYRMGIEYLVPDTVTAE

SEQ ID NO: 11687 - protein, 390 aa, unknown
  TnpB Polypeptide
MLIKRSIPIILEKSHAVLDTVEEFNRYQKSISESCFNEGSPRNALALHKEVYNTEASSLNSQMRCSSIRLVAGAYQSAKSNKKPAQRPFIFRRKRALFLIGKRGRDASFSKCGKLSISTIQGREKIGFKIPLAFREDFDNAIIRDSLNIGSDGKGFLCITLDVKDPKGVIPVGIDLGIHNAFVASTKGKTLVISGSELSEKRKRIRKTRARLQAKKSSKKELGKDTRGVRRVLKSLSKKQRNKTKTFCGEAAAKLCKWAPEDSVLVFEDLRIKRTSKKERIRKGTRRKLNSFCYNLMIQSVTNRAQRDGLAIAFVDPAYTSQICNQCGLIGQRFGSKFSCSACSHHDCADRNASLNILSRFIVLRDGAHQSMCAEARASATGKPPALAVG

SEQ ID NO: 11688 - protein, 404 aa, unknown
  TnpB Polypeptide
MISRKVKIFLSGAQKHEFLKWLGTCRYSYNLAIDELNNSYKTGKLISKYDLRTKLVTELPKELEWLALTPQGMREGAVFDAYDAFMTNLKSGKKFQMKYRSRKARSQSCLLPVDSLKIGMKLYPKILKHLSHIKIHPTEEKHFSWRVKQIKDLKKMAEAVDKKKIIMKTCGQILESPIRIQKTRTGHWYLCIPSETHEIVPENQGNLKLVSLDPGVRTFLTGYCPDGELIKIGDNDINRIRNYCLKTDKFISKIGKMKGKKKYRCQKAKLKRFEKVRHTILDCHRKVVRYVVDNFDVIILPLFQTSAMSKRGNRKIHSKTVRNMLTWAHYKFRMMLADDLRKYPHKRLILTTEEYTSKTCPCCGYVKMNLGGNKTFKCDKCKTIIDRDVNGSRNILIKYLTEKC

SEQ ID NO: 11689 - protein, 388 aa, Streptomyces sp.
VIVKLVVQVKLMPDAVQAPTLERTLPAINEAANWVSAVGFEGFGLKASVRELRKLCYGELKMRGFGAQAAQHIIKRVADAYTTLRVNIRSGNLGPEGSKRRRKAEAKPVVFRPHAAHTYDDRCLSWNYDAKTVSIWTLGGRIKEVRFASSPEALKTLTEHRKGESDLVFRDGKWFLIATVDLPDPEVFEPKDFIGVDRGIVNLATTSDGDNHQGRRLGRHRRWQARKRAEIQAKQSRSAKQLLRKRARKEARHATHVNHKVAKDVVAVAQRTERGIALEELRGIRERVTVPRDPRARLSSWPFRQLGAFIEYKARRAGVPFIEVDPAYTSQRCPRCGHTERGNRRTRATFQCRRCGLAGPADHVAGVNVRNRARSAWVFVTMPEPVPT

SEQ ID NO: 11690 - protein, 274 aa, Streptomyces sp.
VKQVAFTASPEQLARLALYRKGESDLLHRDGMWFLQATCEIPEAEPNTDPAGFLGIDLGIVNIATTSDGQIMAGRALNRGRLRERTLRTKLQTKNTPSARRRLKKRRRKEARRARDINHKIAKHVVAEAERTGRGIALEELTGIRERVRFRKPQRATLHSWAFHQLGQFIAYKARRAGVPVVYVDPAHTSRTCAECGHIDKANRVSQAWFACRSCGFVDHADRNGSRNIRARAEELWRRGAQSTAPDPPPKPEGGTGRKRSTTASGARCASPGL

SEQ ID NO: 11691 - protein, 310 aa, unknown
  TnpB Polypeptide
MLAARGDRSREGNLCLRIEDNSSRLRICIGPHQWIHVPLFIPEKYRERYGALLDGSKPYTIILRRRLDKRGYDARIIIPTAPPAMPLEAKRVMTLDINSGHVDFAVAEKIDLKPIVVGKVNCSEMVNAGHGKKEILTQKLVNKVRNIAKHYGAEVVAGKLRTLHCKGRRRTNRKTQGMNQFRMRQVLRYKLPLRGIRYRDMSEAYTTQVGKKLSRPLGFDVHKAAAYAFSVKVIDYASFTFLRSVHADEGDGILSMRLNGGSELTAPHEATGLMCNYSHARACEEATPKFLGKGGLASNQFQTHILQVKV

SEQ ID NO: 11692 - protein, 169 aa, Salmonella sp.
HTANYAKRLALLQLRLSRKQKGSRNRIKVRLKVARLHAKIADCRMDAMYKATRKLNNENQVVCVESLKVKNMIRNLKLSKAIADAGWSELVRQLRYKGEWVGRSVVASCPQNAVVIAAIPCPKWRLTLVRSWGCPECGEYHDRDINEARNIKAAGLAVLAHDPESQHAA

SEQ ID NO: 11693 - protein, 210 aa, unknown
  TnpB Polypeptide
MVSNTGAALVVSGRGIRSLKRQRNMRHRKLAKKQARCQKYSRHWKKLQRARNKMAGRIERRVRDLRHKATRQVIDFCQEQQVGTLFIGNPHGVRQENKGRHHNQRMSQWEYGRDIDYLTHKSKQACIESFTGSERGTSSQCPVCRHKHKPKGRVWKCRKCGFKGHRDVVGSVNMHRLAYDQPVTFPRSVTYLRPGPSRRSSRADTPRASS

SEQ ID NO: 11694 - protein, 540 aa, unknown
  TnpB Polypeptide
MRPMKARRTERTKEHKDRKKQTPTFLLELPLVVNEGQAKRVRGHLEVGRQFYNALLSEGQRRLRRMQADPAWQEARAIPRTHKQERRAAFSALRERHGFSEYAFHELARELWVSWLADHLDAVLAQTLATRAYHALNRVCVGEARRVRFRSRGRGLSSIENKRNDTGLRFVLQKPEEGNRGFLIWKEDQLEAVIDWEDEVVTHGLRQRIKYARLVQRRASSERAAGADARGFRYVVQLALEGVPHQKAKHTVGVETIGLDLGPSSIAVVPREQEADLSVFCEELDPDAKAMRRLQRKMERQRRAANPENYDAQGRIKKRGKRGLRWKSSKGYQKTRQRIATRERKLAAHRKSLHGRKVHEIVAVGNTIILEKISYKAWQKCYGRSVGLRAPGMFVEHLRRTVASTGGSLTEVPTRSTKLSQWCHGCGKAVKKPLSQRWHHCPCGVGPVQRDLYSAFLAAYLDPATLLPSCAQYVIAWEGAEARLRLAHERVQQRANAGQSVPQSFGCARAGARRPESRSEPTQEPAFFLRRGQLEAWTER

SEQ ID NO: 11695 - protein, 154 aa, unknown
  TnpB Polypeptide
MEHQAGTLVLGENKRWKQDCDMGSQNNQNFVSMPTGLLKQMIIYKASDAGIKTIMQEESYTSQADITAMDYIPVYGVDAENAVFSGRRISRSLYRCFNGMIINADCNGAANIMRKAITDAWNSITDFSFLASPEVSGFHELNPLSISVKGIAAA

SEQ ID NO: 11696 - protein, 396 aa, unknown
  TnpB Polypeptide
MGRCRSYRYLLQPTVPQRNRLETLLRNQCELYNAALEERRGAWQWERRSVSYIDQSRTLTTLRAARPEILDHGVTVCRGTLKRLDRAFCAFYRRCRAGQTPGYPRFKSSRRWDSVQWEDTKCWRLNTEARRLRVVGIGEVKLRLHRELRGSPKAITVAREGRRWWVTVRCVDVPATPLPATGEHVGIDLGVCAQVATSDGQLVVDGRYARRAGARLAVAERELATKRRGSRHRERQVEAVAAAHRKIRNQRKDLAHKLSRQLVNRYDLIVHEDLKIANMVRRPRPRKAEDDTYEPNGAAAKAGLNRSIADAGWGQLLQFVAYKAEDAGREVIAVDPRHTSQRCSSCGHLDRENRRTQAEFRCQACGHAAHADVNAAINILRAGRARQAPACDGSAN

SEQ ID NO: 11697 - protein, 357 aa, unknown
  TnpB Polypeptide
MKRCSQHTLKFSNDCKIEYLDRLFQDYQLDLQDYIDLICNEKLPLEKYLSSKSLPKIRCNYSTYKGLIYKQASEMIRGQNKKKIKTKPEVKNVSIMLNDNLLKYSNNAKSFDEFISIRLPYKLEGYKNRYEKIRLPIKQHKQSLKFKDWNRKKTVQLKKINGNYYLTFFYEKEELIKKECGESLGIDIGYKKLIATSDNQFYGTEIVNIYDKISKKKQGSKNFKQALIQRDQTINQICNQLDLSNVSTLCIEALKGVKHKSKFSKKFNNKLQRWNYPKVIHKLEKLSEEQGINLVKVSPNYTSQTCSKCGFIHRENRRGEVYQCINCGIILDADYNASLNILHRGVYSPSTKERQLN

SEQ ID NO: 11698 - protein, 466 aa, unknown
  TnpB Polypeptide
VRGLELRALELEIVPLNAWARLLLEQFGDPRCSGGRWAQAQRVQVVRTDTLRLLTSPELDDFLRRVGDATARLINMENFRRRRLFFEAGKIDYSWMSAWARRFADYSDIYKLLGSMNFHEACRLIGEQWKSFLGLLRAAKEGKLEPWQKVRPPGYRKDKDGQRIPIVVVRYDNYRIDLERKVIRLGYWNVSIPFKGKPRWLTKPGAKQGRLIIIYDPVKRRWYARISVEVTLERKLNHGLKAGIDLGRERLIALVTEPVNESGEGVALLYRGGPLKADYFYFERKIAEIDRMLSDPKLEEADRAVLKEMRRRLYEKRRRRRAHLFANAAAHLIKMCEELGVAVLLLGYPRGVARDKPGKGNSNMWSYRRLERRIAVTAENRGIPVFKIPEDNTSKTCARHGCEVKRGPRGLVRCPHGHIMHSDLNAAMNILKRGGGKVPMRVKVLSFIPAASKVIPVNEKRNSNPA

SEQ ID NO: 11699 - protein, 378 aa, Microcoleus sp.
MMQKAFKYRFYPTSEQEILLRQTIGCTRLVYNRALSERTEAWYQRQERVGYIETNAMLTEWKKTENLQFLNAVSSVPLQQGLRHLQKAFSNFFAGRAKYPTFKKKRHGGSAEFTKSAFKFRDGQVFLAKSAEALNIRWSRQLPVGAEPSTITVKLSPAGRWTISLLVDIEIEPLLASPNQVGIDFGITSLVALSTGEKVVNPKAFAVKRRKLRRAQKALSRKQKGSNNGHKARIEVAKIHAEISNARIDFLHKLTTRLVRENQTIAVEDLAVKNVLNNRQLECSISDANCGELVRQLEYKCEWYGRTLVKLDRGFPSSKRCGHCGHVVEKLPLNVRSWVCPQCDTHHDRDVNVAQNILAAGLAVKVCGANVRPDKHTF

SEQ ID NO: 11700 - protein, 412 aa, unknown
  TnpB Polypeptide
MRSQKLRLKLTKEQEHLAWWYSKVSRNFWNLLVDIDKRNNKGEFDEILSKQGNKTYHSNFYDREIYRLAQSDYRNLAEIVVAKNYEEDKEQWSWYYQPNQSFIYNFLSRELVKIKKQNKGKLNFRSIDKIQPNFNVRCDVSANKKRSSRIYLKDNGKLQIPTIGDVRFGSVREGFDLSCKKQVANVSFDGKYWYLSYTEDVETQVNELPEYTDGVGIDLGIKTLATISDGTTVPNIKTFRRVRILNKRLKRLQRKVSRKYLINKCNKHNKTRNIIKLERQIKLIHRSLRNIRINHIRKFVSELVQKQPQYIAIEDLNVKGMMKNKYLAKDVANCSFYSIREHLIRKAKERHIAIRLVERFYPSSKICSNCGHYNKDLKLSQRVYHCNHCQEKIDRDFNASLNIAKTDNYVLA

SEQ ID NO: 11701 - protein, 553 aa, unknown
  TnpB Polypeptide
MRWINTSNPRKQLQLQRSQVKLFVDGLKKVKSELLRRRPTDINIIKKTFSIVLVSIYLLSRKKEKKFVIAELAPKSNWMIWKDKSYILKINSLSTELLQTSALVLTGKEKVFKPFWNSLLKENSRRLWLPTKIDYQELPLNSSSGYLKRMEVKSSLLIEKKKEPQNKNLQKTFSPSLQSTLVSKWEEEDIRVKKIKLKPNQKQKKILKEWISTSRAIYNSGVDKINKDSKNANFRKLRDELVTAKRIGVKNENVKDWMKNTPKDIRADTLKELVSGFKGNITKLKKGSIKFFDLKHRIKKVPTYSIPIPKTAIKILDKKVKIFNRYIEDGIKIRDKKGFKIEHDCKIEWKYPNEFSLIIPYEGKFKEIKKEKDIVALDPGIRKFMTSFSDEEICEFHITEKVKKYNKEIDNIKSNNKGRKGILKRTFKITNIIKEFHYGVINYLTRNYKTILLPSFDSQEFFGKRRVINKKSARTLNNLSHFKFKERLRHRCNLTNTSLFIVDESFTSKTCTGCGVINNVGGSETYKCCSCNLVIDRDVNGARNIFIKNTKWD

SEQ ID NO: 11702 - protein, 281 aa, unknown
  TnpB Polypeptide
LKSNPYFEGIKGDIKKFCQINIDRDGNIKLNLIKDKEKTFVDVPQTPKIALDLGLNNLFATDKGDLFGRQFKEKLLRYDKIITTLQSNIQKQGLKPGDSRRYRELIRKLRSHLKNEVRRIINRIITIYKPDEIIIEKLNFTSPDLSKRLNRLISRFGKREIENKFKSISEESAIEITFINPAYTSQECSRCGYIDKRNRKTVEFKCKLCSLNLHADVNGARCILKRSSLKEVSVYKSRRSVLRILTRNFLRDMEQHRRLYSKAKVLTAENPYFSSEIKGFT

SEQ ID NO: 11703 - protein, 532 aa, unknown
  TnpB Polypeptide
MLRCFMLNRCYTFRLYPSLQAETELRRILRVCAEVWNIALEERRYRYYQRGEHFDGMRQSKESLTPLIDACRTQPEIYGVPWMGGFTGFHEVPATAHRRVLTRMDDAYRAFFKRKSDGAGLPRFKSSRKYDSFTVQIGYGAGLIDDNLVLYWDKRNVTVSIPIVLHRPILGSPKFVTVRRNGHVWEATVQASDVPEAPLPKTGVIIGLDAGLKNFATLSDGTEIANPRFLKRAQKNLARAQKKASRSVRVVQRLFKTAEGKRLDTRSAWKKIAQGALTNPSDYGNLIVPSEKKGSNRLERKKAIVAKQNWRVGNSRKEHHCQTSARLVRKFDVIAIEKLNLVGLTRGILSKSFADAGIGMFFLRLQSAAEMACKSVIKVPAAGTTIDCSACGAAVPKTLADRIHVCACGLTIDRDLNAARNILARSSEVKSEPPKIKRPRYVRKPKVNAGKPAQPGDNGLLDVEADPQPKDARKGGEASSQTDQRSCDTGGTDTARAPAPTRKLKTPKDLPPRVRAKPASLESDGLNARNLG

SEQ ID NO: 11704 - protein, 390 aa, Clostridium sp.
MKKLKKAYKTEIKPTEEQIIKIHRTIGVSRFVYNFYVAHNKEVYEKEKKFVNGMDFSKWLNNEYIPSNVDKLWIKEVSSKAVKQAIMSGEKAFKKFFKGEAGFPKFKKKKNQDAKAYFPKNNKTDWTIERHRIKIPTLGWIRLKEYGYIPTNGRITSGTVSQKADRYYVSVLVDEDTKTNNKTTSIGIGIDLGIKEFAVYSNGITKKNINKTIKVKKIEKKLKREQRKLSRKYENLKLRNKKEKGETTRQNIQKQIVKVQKLHQRLTNIRTDYINKIVHELIKQKPSFITIEDLNVRGMMKNRHLAKAVAQQKFYEFRIKLISKSKQDGIEVRIVDRFYPSSKTCSCCGRIKKDLKLSDRVYKCDNCNTSIDRDLNASINLANAKEYKIA

SEQ ID NO: 11705 - protein, 309 aa, Clostridium sp.
MKKLKKAYKTEIKPTKEQIIKIHRTIGVSRFIYNFYISHNKEVYEKEKRFVSGMDFSKWLNNEYIPNNQDKLWIKEVSSKSVKQAIMNGEKAFKKFFKGKSGFPKFKKKKNQDVKAYFPRNNKTDWTIERHRIKMPTLGWVRLKEYGYIPANGRVTSGTVSQKADRYYVSILVEEDTQVNNKPHSEGIGVDLGLKNLAIFSNGITKKNINKTKTVKKAEKKLKHEQRKLSRKYESLKLRNKKEKGEAARQNIQKQIVKVQKLHQRLTNIRTDYINKTVSELIKQKPSFITIEDLNASINLANAKEYKIA

SEQ ID NO: 11706 - protein, 390 aa, Clostridium sp.
MKKLKKAYKTEIKPTKEQITKIHQTIGVSRFVYNFYIAHNKEVYEKEKRFVSGMDFSKWLNNEYIPNNIDKLWIKEVSSKAVKQAIMNGEKAFKKFFKGEAGFPKFKKKKNQDVKAYFPKNNKTDWTIERHRIKIPTLGWVRLKEYGYIPANGRITSGIVSQKADRYYVSVLVEEDIKINNKRCSEGIGVDLGLKDFAICSDGITKKNINKTSRVKKLEKKLKREQKKLSRKYESLKLRNKKKKGEAARKNIQKQIVKVQKLHQRLTNIRTDYINKTVSELIKQKPSFITIEDLNVSGMMKNRHLAKAVAQQKFYEFRIKLISKAKQNNIEIRIVDRFYPSSKTCSCCGNIKKDLKLSDRVYKCDNCNTSIDRDLNASINLANAKEYKIA

SEQ ID NO: 11707 - protein, 413 aa, Halorussus sp.
MEYSHRYHAYPTQEVAERLEHHLDVHRQLYNHVRWDYENSPEDDRPSEYDQNNKLPEWKQRWPVFGELHSKAAQATVARFHHNLTVLSELKEKGYSVGRLKRQAPAEYRSVTYNQSGFDLDEKRGHDKYAYVRFSKIGWVKIRYSRSIPDHATIKEVTFKKETTGEWFVSFGLETEDADLPEKPDVDSLDASNSVGIDLGILNYIHTSDGKTVDWLDLEDDYECLRREQRKLSRKDHGSRNYEKQRQKVAKVKYRIRRKVLDYQHKLTTWLVNEYDAVFVEDLDVKRMLQGDGNARNKQDAAWRQFIQILEYKANLYGTHVVQVETKGTTKECARCDVATLKPIWVREHSCPSCGFETDRDANAAMNILQRGFAELGLGWPEDTPVETVTATDTTQFEFVSARHVIETGSLPS

SEQ ID NO: 11708 - protein, 426 aa, Halorussus sp.
LNIVSDDEYHRRTAITRLAVSPSDEKLLRDTIKQWKQGCQIAVDKAWERCHSKSDIQQLAYDDVREATSLSSQHAILACHQAAENIKSCISRRQNGKKASKPTYTSPTITYDSRTMTLFPEKEEVTLTTHGDHSRTRVSLVLPDEETGYQYQYFDSDEWESTESTLHYRDGGWYLHIGFRKLTQDAEEETTENGTVLGVDLGVNEIAVTSTARFFSAGELSHKRREFKRVRGNLEDRGTRNAHRALQAVSGRENEYVKHILHRVANGIVEEALRYDCDGIVFEELDGIRERLPKADWHSEWAFHRLYEYVEYKAEAEGVFVDTTNPKNTSIRCAECGSIHRKNRSTRERFECQNCGNRNHADYNAAKNVADVYLRREQQSSRRRGVSQYALKSGTVTPNRGYTPYPDGFEAESADKPHSPRANPPG

SEQ ID NO: 11709 - protein, 386 aa, unknown
  TnpB Polypeptide
MIRSYRFRICMSDRIGRAFESAMLISNQIYNAALEERIGAWRKHRKSITKFDQMKSLTQVRADDPNVARYAVAMLRTPLVQVDEAFRGFFARLGRREKYGYPRFRSLKRLRSFGFNELSGWFLDGRKLTMKGLPAIGLKMHRELQGEPLKLTVKRDGRGRWFAVFVVRLPDVFGPTAPGALGLDLGVESMATDSSGIHYGRIHPERTNSIKRSKVERQLARGQLGSKRRKKTAKRLARLRQREADARRTKHFQLASRIVKEGCGIFVVENLAVRNMTRSAKGTVEQPGMNVSAKSGLNRSLQDAGLAQFVQILTDKAESAGRLVVMVDPKGTSQECSGCGTKVKKTLKIRRHKCSVCGLDIHRDHNAARNVLRRGVVVPERIGLAV

SEQ ID NO: 11710 - protein, 228 aa, unknown
  TnpB Polypeptide
LNESKEKGIKLKTYDTQNMIPSLKLENPKLNFVYSKVLQMVNYTLWSNIKGLSASKKNGRKVGNVRFKGYGWYKTMNYNQSGFKLDQDHGSLHLSKIGNIRIKMHRKVQGCIKAILIKREGRRWFAIVQADQEPEPLPETGRSVELDVGLKSFVVDTDGNSVENPRFADKAAARVKDIQRKLSRADKGSNNRRKLRDKLDEVHERINNQRNDFLHKLSRSYVNNYDII

SEQ ID NO: 11711 - protein, 393 aa, unknown
  TnpB Polypeptide
LGNCRERYAAERKWYSGAELHKLWNQAKKADPALAWWDQNSKCAYQESFRDLDRALRDFAKSKQGQRKGKRLGFPRFKKKGKCRDSFRLTGALRCGEGTVILPRLGMVRTHEPARKLARRLADGSARILSATVSRTAQRWHVCFTVEVDRDVPARHARPGTAIGIDLGIKALITGADDAGRVITVPGPRPLAAGLRRLRRACRAHARKQPGTAGRRKSAARLARLHARIASLRADALHKATSMLAARYETVVAEDLNVAGMTRNRRLARSIADQGFGAARRMLGYKTRWNGGTLVIADRWYPSSKTCSGCGTVKAKLGLSERTYRCDTCGLVLDRDVNAARNLLYLAASGAERRNAGGGTARPRPVRHVPANPEPGTPRGDQTGTATTTVAAA

SEQ ID NO: 11712 - protein, 410 aa, Natronococcus sp.
MNYNYRYQLNPSDDLRERFAWTVDTCRQVYNHFLHRLNRHDDTSSSYSEQKRLPDLKDWWNDLRDVHSKVLQKVVQRLYDNLSTLNSRKQNGYSVGELKWKAPGEYQSFTYSQSGFKLKNTSGRTRLWLSKIGDIPITFHRDLPDDATIKTVTVKREPTGKWYAILGVETPDDPPEKPDEVTDAVGIDVGILKYVHDSDGTAVESPDLSDERERLERAQRNLSRKEHGSNNWEEQRKTVARRHADLKRKRRDFLHKLSAYYAREYDLVAVEDLDTKGLVELPGNSRSRAGASWGMFLRMLEYKCEREGTYFVAVDPRGTTKECASCGVETDKPLWVRKHSCPSCGFEADRDANASWNILSRGLEQVGAGCPESTPVETALPTGTHSVPAKRVIEAGSPTLKERTASAVSE

SEQ ID NO: 11713 - protein, 428 aa, Natronococcus sp.
LSIVSGDDYHRRTAITRLAVSSTDESLLRDTIEEWKQGCQIAVDKAWMWCHSKSDVQQLAYDGVRENTNLGSQHAILACHQAAENIKSCISRRQDGKKASKPTYTSPTITYDSRTMTVFPEKEQVSLTTHGDHSRVRADLVLPDDKDGYQHQYLDSDEWEPTESTLHYRNGDWYLHLGFRKPKQDAEEATENGTVLGVDLGVNEIAVTSTARFFSAGELNHKRREFERVRGDLQKCGTRNAHRTMEAVSGREDRYVKHVLHSVANGIVEEALEHDCDGIVFEELDGIRERLPEAAWHSEWAFDRLYEYVEYKAEAEGLFVETTNPKNTSKRCAECGFIHDANRPSRDTFECQQCGNRNHADYNAAKNVADVSLRREQQSSRGRGVSQYALKSGTVTPNRGYTPYSTESEAESTDKSHPQRASPSGRAK

SEQ ID NO: 11714 - protein, 446 aa, Natronococcus sp.
MKRTNMFTVRPLSDSGEQLLRDLLDASAALWNQTNYERLMRYNDEDGYGGEDVWDADTGQLEGRYKGVLGASTAQQVIRKNSEAWRGFFRLKEQYYDDSDTSVTEHPEPPGFRGNEDDGRQLKTVIRNTSYTVEWGDRSRLEILVGSELKDRYDHTGRLRLEIAGDPNWPDYEKQGRLDLWYDEIDDTFRASQPVTVSDDAWDTPLASEKAALDIGANNLVACTTTTGQQYLYEGRDLFQRFRDTTRHIAELQSKLGDGRYSSERIRRRYRKRTRRRDHAQEALCRDLLDRLYAEGVDTVYIGRLTDVLETHWSVETNAKTHNFWAFRQFTERLACTAEEYGISVEVRSEAWTSQECPQCGSTDRTTRHQDTLICPCGFEGHADLTASETFLERQTDQAVRPMARPVRFEWDDHDWSELPRSHRPKNQRTDPSTVHFDGNVASRGS

SEQ ID NO: 11715 - protein, 444 aa, Natronococcus sp.
MEYSPRFRLLPTTKQRELLGWQRNTVRQVYNHALYRLDQLPKDPDQTVRQRVWKVRDELPDWKIKWDEWADVYSTVLQAAVERIYHSITGLAQKRDNGHKIGNLNWKKPREFQSFTYRQRGFELDKKSGPDGRGLVTLKKVRGETLEIPIRLHRNIDPNDIKHVTVKQEATGAWYASFSVERDEPEKPDPEDIDPEDTVGLDLGVLNFIHDSDGRSINRLDLSDDRDRLEREQRSLSRKEYESNNWYKQRQRVAEVHMDMRNKKRDYKHKLAHAYTTEYDAVFVEDLDVKSMLEGDGNARNKHEVGWREFIRILKHHGRKHGCHVVEVKPEGTTKECASCGVETAKPVWVREHSCPACGFELDRDFNASLNVLSRGLAELGVGHSEGTSSESPCDSAVRTRAPLSSTPVETATAVDTVSVSASRVVESGSPALKESPKAASRAG

SEQ ID NO: 11716 - protein, 428 aa, Natronococcus sp.
MNYNYRYRLEPSDGLRETLDRHRDLYRQVYNHFLHRLNHNDGTTKYDEINQLPSVKKWWTDLTDLYSRTLQNVVERLYNNLSRLKDAKDNGRVVGQLKWKAPNEYRSFTYRQSGFELKNTGGQTVLRLSKIGEIPVRLHRELPDDATIKQATVKKEPTGEWFAVLGVETPDDPPEKPENPKDIVGIDVGILKYAHDTDGHAIESVDLSDERDRLEREQRKLSDKEHGSNNYEKQRRRVAECHADLKRKRRDFLHKLSNYYAREYDLVAVEDLDAKGLVELDGNSRNRAGAAWGTFLRMLEYKCEREGTHFVAVNPSGTTKECAACGMSTDKPLWVREHSCPSCGFTADRDWNAAWNILSRGIKQLGAGRSESTSSESQGDSDVRTRAPLSSTPVETALPRGTHSVPAKRVIEAGSPTLKERTASAVSE

SEQ ID NO: 11717 - protein, 474 aa, Natronococcus sp.
LARREIVLCGLVVLAPVEPTERKRQIPLLTTLPVGRQRLPARKVRPVAGLFRSQFDVQKRDAELDGVDVGHPPLPFGGEPNAKQTPLRERREPFERLDRRIVRQSLEESLELRLLADRPKGQVGAVVAVRLFVLDLDRHLGYLPAYGLHDRLVRQRVLGDETHRAHPPRSVPPRDSRALPTDAARRVLATDRRPTRRSSRRALSRSMGVGSISRQLTFAGLVSVLKEQRQQAVSRKEHGSNNWNKARHRLTRAYERLSNKRQAYREALANAYTQRYDAVFLEDLNVGSMMQQNGNSRNIASMSWYETLQTFQRFGEKNGCHVIRVPPEGTTKRCVQCGVESEKPLWVREHSCPSCGFETDRDQNAVLEVQRLGLVELGVVEDSSGVGQELAESTSFERAPLSRDHERRKAPFERSAETGTVLRTDGSDGAHENGVLVDAAGSRSSSSRDVVPASAVVDTGSPTLKKRAAITASQ

SEQ ID NO: 11718 - protein, 417 aa, Natronococcus sp.
MDFSPRFRLYPTTPQREALGWQLDTVRQVYNDGLKRYNDLPPAEEDDRTVKQRVRHVRDQLPVLKNWWEELNLVWSTVLQEAVERIQTNITNLGKLKAAGYDVGSLNWKSPREYQSFTYRQSGFELDKKSGRSGRGRLILKKVNGETLEIPIRLHRDIDPDNIKNVTVKRESSGAWYASFDIEAETPEKPDVEDIDPEDTVGLDLGIVNFVFDSDGRAINRLDLSDARERLEREQRPLSRKHYESRNWEKQREAVAAVHESIRDKKRDYHHKLAHFYTTQYDAVFVEDFTIRELFEGPDNARNKVEVGWGNFKQILDSHGEKHACHVMEVPAYNTTTECYSCGVEVEKELWVREHACPSCGFETDRDYNAALNVKRRGLRFDLYVLEPFGLERAGLAPVGRVNRVRPLTGRRGVRVD

SEQ ID NO: 11719 - protein, 446 aa, Natronococcus sp.
VQSSKLTQTLSFGLDIDTGSDDDLQTGCIEARRIRNEANRLDRAGWNWSDITSTVVDNADHVNNTTQLIVDKALGEIEAYHDNKDDGWGRPYPYIDESYPIVMNHGEGYRLFPQDDRTVRFRITATRGTHVKGELHGSPDYFDRLRTAFTDEERRVGTAEVVHKHNEWRLHVTVTHETHQVASKHGADTIVGVDVNEDCIAVAAMSRSGSVKDSVVFEYPSVKEQRHAFFTKRKRMQKANQTAFETGVQTEERDYVHDCLHKVSRNVVEWISQFLAPVVVFEDLKEMRESIDYGARMNRRLHSLPFAALQEMVSYKAAWDGIPSDEVDPEYTSQRCPRTECQHTDRSNRHKKRFKCQQCGFQDHSDRKAAVCVVQNWLERETGNVPSLETLPRVWKVRRMASGAGGGPGSHGATFASGVYRHGTSAQDSSSQAREELKTVASAVQD

SEQ ID NO: 11720 - protein, 483 aa, Acidimicrobiaceae sp.
MDRPYRMRAVLAPLDPTPAQEQLLRSYCGASRFAYNWTVAIVKENLDTRKKERRAGIDEDELTKSLSWSAWSMTPLWNSVKDEVAPWHRNVTWHAFCSGVTNASVALKNHDDSKKGKRKGEPVGFPNFKNRRSKLSFTLIDFTRVGSWFSEDSRHVRLILPRLATDPRITRRREQLQWLHTTESLRRLKKKVTSGDWTVQSVTISFTGGRWQASFSVRQLVASAPSAVRQIGPLVGVDLGVKHLATLSLPVGGISDANGHVANPHHLDAELERLAKLNRQLSRCVMGSKNRAKIIMRRQRLHGRVTRSRELYLHRLSTTLAGSFETVVTEDLDVIGMVKKSNKNSTKELRRSILDAGFFELRRQLNYKTEDRGHRVIVVNRFYPSSKKCSHCGETKAKLALSERVFECSNCGISLDRDVNAARNIRDEGIRLLTNEASAVAGHQPETLNAVSRDRETKPLRRGRGDRYQSRTTQPIREFSPLA

SEQ ID NO: 11721 - protein, 436 aa, Thermococcus sp.
MKRSVTVKLQPSKGQEKTPKELADTGAKIWNRVNYLRRQQYFQEQIVDFNSTEKAIYGEFKREIGSATVQQIARKNAEAWRSFFSLLRKKRNGELPNWLKPKPPDYLKEDERRKPLIVLRNDQYKIDGNKLILKGLGKFKRLEVQFKGRIHLKGKQGRLEITYDPVRRKWHVHVSLTVEEKLEGKEWVSVPRTPKGSLSAGIDLGVNNLMAVYLENCESFLVNGRPLKSIDFYWRRKIAEYQSKLNKSGAKASRKLKRMHEKAKLQAKHYINTAVRQTVKKLYDLGVSRIVVGYPKGIARNSNKGKRQNFILSHVWRFNTVIKRLTEVAEEYGIRVVVVNEAFTSETCPVCGKPHEGARFVRGLYSCPATGLVFNADLVGAFNILKKAVKTITPNLSGFYAQRAGNGGETVPGGLKVRFELGLNEAPQTSPSIVRG

SEQ ID NO: 11722 - protein, 368 aa, Allochromatium sp.
LGLTRFFFVTIIVNMKVTLQLKLLPTPEQHAALLKTMQMFNDACNFIAEVAYRERCASKFALQKLVYADVREHFGLSAQLTIRAIAKVVEAYKRDKSKQCHFQPFGAVVYDQRILSFKGLEAASLLTLDGRLTIPMQMGAYQRTAFSRGHGQADLVLVNGQFYLLLVVETPQAPPMDPNGFIGIDLGIVNIATDSDGERYSGATVEAKRQRYQRLRQRLQACGSRSAKRHLQRLRKREARFRRNHNHVLSKRLVEKAKDTGRGLALEDLKGIRERTTVRKSDRAKHSGWSFHQLRQFIAYKALIAGVPVAIVDPRYTSRTCSVCGGVDKANRVSQSEFRCSACGHTANADVNAAINIAARAVCHACPS

SEQ ID NO: 11723 - protein, 409 aa, unknown
  TnpB Polypeptide
MKLVERHIRLNDKAIKDICFKSARLYNFCNYYKRQAYFGKISKFGEYELSKLLGEFNQEDYRNLPAQTSQQIIKLLFKNWKSYFKALKEYKKYPSKFKGKPKPPKYKKKDGYFICIFTNQQIKLKDKNIHFPKQTNIKPLKTKVNNIQQVRIIPQATCFIIEIIYNKKEVKHENIKEENILSIDLGVNNLITAIDNVGNYPFIINGKGLKSINQYFNKKKAKLMSYVGDKGTSNKIKKLTFDRNNKIENALHQVSSFILKYCLKNNIGTVIIGKNEQWKQKINIGTKNNQNFVFIPHSKLINKIKYKLELNNIKLIEQEESYTSKCDNLVLEPIQKQKVYLGKRIKRGLFLSSIGKVINADVNGAIGIMLKSKVIPECERFIQNIRNTGLGFNPYRINSIKSFELKCNV

SEQ ID NO: 11724 - protein, 347 aa, Thiomonas sp.
VLLKQDAERVWLNEVSSVALQQSLRHLDKGFANFFAGRAKYPRFKSKRDSVQAASYMANGFTLRDGNLTLAKHDAPLDVRWSRPLPEDVKPTSVTVTRNAAGHYHVSILVDVDVLPLPVTEKVVGIDMGLAHLAVTSDRQAIDNPRHLARKLARIQRWQRKLARKREAAKASMGLKGKSDPKGTRIPRSNNAWKVARRIARIHASVRDARRDHLHKVSTKLIRENQAICVEDLAVSNMVKNPNLARAIQDAGWRELRSMLEYKAALYARAFEVVNRWLPTSRRCSCCDYTLESLPLSTRSWTCPGCGAEHDRDVNAARNMLAAGMAQLHSTAGLAGIHACQVPKGAT

SEQ ID NO: 11725 - protein, 506 aa, Thiomonas sp.
MQRRKVTLKLYPNAAQAARLEAWTRLHCELYNAALEERIDAWRKAGKSISYYAQQNALPQIKADRPELNELGSHALQQTLRRLDLAFQSFFRRVKAGQTPGFPRFKAAKRFAGFAYPDPAGWKLMQHGGRGATLRIGSGDTALSIRACGLHRFGVEAKPNDITLTRKGGGWFVSVTLRVPDAACARERTADMRRGVDFGISDWATFDDGRTIDNPRWVREELPRLAALQRQRARKKNGSLRFKRLGRRIAQLHDRISNLRRDFVHKETTRMVRQCAVLATEQLAPKNMSRSTRGTVETPGRRVRQKAGLNREILSAGFGMAHPMLAYKAEEAGTRLHLSNTRQLKPSQRCAACWEIVPKTLSQRMHVCPCGHTAPRDQNSPMVVLIDAHNTQDTPGTGVAARPKPLPRQRGKSRPVTRETPATTPCVERRESSWKRPTKPGFANATPVHDPDRPGSGILRVSPSRPHPLVRICNARVQRRQPVDAWRIRHDGRGRDGNRQAIERRA

SEQ ID NO: 11726 - protein, 379 aa, Thiomonas sp.
MQVKRAYRFRFDPTPEQVDALARTFGCARFAYNHMLRLRSDAWMQRQERVGYHETSAALTMLKKTPEHAWLNEVSSVPVQQALRHLNTAFSNFFAKRARYPSFKRKDGPQAAEYTTSAFRWDAGRRELRLAKMDTPLDIRWSRTLPKVAKLTTVTISRDTAGRYFAALLCDDVVTSRKAASGQVGIDLGLTHFAILSNGEKIASPKAFRKNESGLAKWQRRMARAKLGSKNRAKLKLKVAALHAHITDARRDFLHKLSTRLISENQVIAVETLSVSNMQRNRSLAKSISDASWAEFVRQLEYKAQWYGRTLIGIDRWYPSSKRCSVCGHTKTTMPLSVRTWACPECGTTHDRDINAARNVLAAGLAVSAHGEAVSPVSL

SEQ ID NO: 11727 - protein, 428 aa, Thiomonas sp.
MQRRKVTLKLYPNAAQAARLEDWTRLHCELYNAALEERIDAWRKEGKSISSFDQQNVLPQIKADRPEFIALGSHALQQTLRRLDLAFAAFFRRVKAGQTPGFPRFKSSMRFSGFAYPDPAGWKLMQHGGRGATLRLGSGEAAMSIRARGRHRFGDQAKPNDITLTRKGGGWFVSVTLRVPDAACARERTADFRRGVDFGINDWATFDEGPPIANPRWLREELPHLAALQRQRARKKNGSLRFKRLGRRIARLHDRIGNLRRDFVQKETTRMVRQCAVLATEQLAPKTMSRSAKGTVDAPGRRVRQKAGLNREILSAGFGMVHRMLAYKAEEAGTRLHLSHTRQLKPSQRCAACWELVPKTLAQRVHGCPHCGHTAPRDQNSAMVVLIDAFNTQDTSGTGVAARPKPLPRQRGKSKSVTRETPATTPCV

SEQ ID NO: 11728 - protein, 416 aa, Thiomonas sp.
MQRRKVTLKLYPNAAQAQKLETWTRLHCELYNAALEERIDAWRKAGKSISYYDQQNVLPQIKVDRPEFIALGSHALQQTLRRLDLAFAAFFRRVKAGQTPGFPRFKSSMRFSGFAYPDPAGWKLMQHGGSGATLRIGSGEAALSIRARGRHRFGPDAKPNDITLTRRNGQWFVSVTLCVPDAACARERTADMRRGVDFGINDWATFDAGPPIANPRWVREELPRLAALQRQRARKRKGSVRHKRLGHGIARLHDGISNLRRDFVHKATTRLVQQCAVLATEQLTPKTMSRSAKGTVEAPGRRVRQKAGLNREILSAGFGMAHQMLTYKAEEAGTRLHLSNTRQLKPSQRCAACWEIAPKTLADRMHVCPHCGHTAPRDRNSALVVLIDAFNTQDTPGTGVAARPKPLTRQRASPGP

SEQ ID NO: 11729 - protein, 487 aa, Thiomonas sp.
MAPVIFRSEGHALGVSPAVREDVERTVAAFRRVVRGLCGVMLVHWADISHGKVKCASIEDLFHKTAQRPQVQYPELGRMFGKMPSYLRRAAIEQAHGAVSSFLSNWNNFLDGQIGGRDREEGARPPRLGLNNVYPSLYGGNMILYGTGMRTVQIKLLGADGQWRFSEPLRVKGRFVRVQPKAAKLDQSPSLIVRGAKVVLSCPVALRPRNYVTNTDFVHGKHRICSVDVGINTAATAAIVDSTGTVIARTFLTCGRHNDQRDALASVIAAKHRQSGPHVRGQKHCSAIHRRIEGLSLDAARTLASRLAAFAAQHGAKAFAVEDLKGWKPKGPSKQQRKRFHRFQHRALIQALALKAQEMGLRVLEVYARGTSRWAYDGSGKVIRSKRNAQLATFASGKKYNADLNGALNIAARGLAMLLWLKPKEMQGAATGKSSGAVERMPLVLADIWAHARLLRGASNRQVSSDGHQGRGMSPDVDAPNTAPLGA

SEQ ID NO: 11730 - protein, 343 aa, Anaerolineae sp.
VQSWFSNERTTPPILSAVSIQADTNVAELKPSGVKSFDFWVKLATLEKGHPVLLPVKLYPKASQTLKKYPCLFTGLRLEKVNGEWYLTLVVGKESKKGEASGVVGVDIGMKSMVVTSEGVFAGEISDKIRTRVEKSKEKFARKQKLNACLKKKGKQPVGLTDKRVESHVRNEAGRAINRMIRSLPANSAVAVERLNVKDMRFKSREMNRWLRASQLGFIHDRLKFKLDDAGIRYRSVQPAYSSQQCSACGYVYAGNRADQAHFCCKKCGFTANADFNASRNLAKRFGDDELNKCSFKEVKSILEQRFKAGLPVDRSATTGLELEGKTSQSALSTQIPMSINVY

SEQ ID NO: 11731 - protein, 290 aa, Spirulina sp.
MIVLEFKARVKPAQAAAIDEAIRTAQFVRNKAVRHWMDNRGVGKCDLSQHFAELAEGFPFAKKLNSMARQAAAERAWSSISRFYNNCKKKVKPAGFPRFKKHSRSVEYKTSGWKLLEPKRIKFTDGFGIGELRLIGTYDLARYDKSLIKRVRLVRRADGYYVQFCIQVDVQVQSEPIQKTVGLDLGLGYFIAASDGSVVEAPSFYRKSEHRLNRANRQKSRKYRKGAKPQSRNYHKARNRYARKHLRVSRQRNEWVNQHPAPWTNYRGTHGKLYAWGDWASGWVGEILLS

SEQ ID NO: 11732 - protein, 374 aa, unknown
  TnpB Polypeptide
VEYSYKFRIYPNAEQRALIQKTFGCSRFVYNHFLAQRISEYKATGKAPTRFQQDKMLTALKREILWLKEVDSIPLQAELQNLDSAYQGFFRRVKKGEKPGFPRFKSKRDRRKSYKTKQHITNGKPTIYVDDKHIRLPKLGLVKCRISKEVKGRILSATVSQNPSGKYFVALCCTDVEIAPLPSTGAVVGLDMGLKSFAITSDGVDYENHRHLCKSQKKLARLQRQLSRKTKGSKRWEKAKLQVARLHEHITNQRTDMLHKLSTALVRDYDLISIEDLAPKNMVKNHKLARSIADASWGEFRRQLEYKAAWYGKAVVRVDKFYPSSQLCSACGAQWPGTKDLSVREWTCPVCGTVHDRDVNAAKNILNEGLRLLA

SEQ ID NO: 11733 - protein, 319 aa, unknown
  TnpB Polypeptide
MIRAIRIRLYPTPDQKKYLAGLFGAVRFCYNKALYLKTHFYKVKGVNLHPIHDLKKLIAIAKKSKKYAWLAEYDCMALQESVRNLNKAYGRFFKKEAGYPRFKSRRGEQSSYHCTGVSAGDDFVKVPKMKKIKAVMHRKIEGKVKSITLSMDACGDYWASVLYEDGLPEAVPATCVRQSKTVGVDVGIETFGTCSDGEKIKSPKALKRAEKKLKKAQRAFSRKQKGSKNREKARKRLAKLHRKVRRRRSDFLHKTSRRLVIHGQLPFCKGWVSLLGYSFPLRARKPKRAPSFNSVAKPHSENVTRWSEAPASRVGARIG

SEQ ID NO: 11734 - protein, 319 aa, Ruminococcus sp.
MRVNISNNVTKQAIKDACTAYKNFFRGLQKFLGFKSKKRSMPKFYQDNVKIRFSNTHIKFEGFSSGRKANKKMNWVRLAEHGRIPTNAKYMNPRISFDGLNWWISVCVEFPDCRETLNDDGVGIDLGIKDLAVCSDGTKYKNINKSRKVKKLEKQKRRLQRSISRSYEKNKKGESYCKTNNVIRKEKLLLKRNHRLTNIRKNYLNQTISEIVNRKPRFICIEDLNVSGIMKNRHLSKAVQAQEFFGFRKQLEYRCSDKGNQLIVVDRFYPSSKLCSCCGNIKKDLKLSDRVYRCACGNMIDRDFQASINLKTYGEKFAG

SEQ ID NO: 11735 - protein, 383 aa, Micromonospora sp.
VLEVNAWRRRGGAPLVGYQRLCRELSASGPGTFGDLGTTGARSVLRRFSDAWFAAAKRRQAGDVSARFPRRRRGLVPVRWYHGTFTLDGRRVRVPTARGTAPLWVRLAREVPYPVEQVRSVTLLCEGGRLFLDVTAEVPVAVYPPGEEPDPARVAGVDLGIIHPYAVAGPDGEGLLVSGRAIRAEHRMHLADTKARRRAVARRAPKPGQKGSRRWRKYRRRARLVEGRHRRRVRQAQHEAARSVVSWAVRQRVGVLHVGDPRGVLDIDAGRRHNLRLRQWQIGRHLQVLTDKATLAGITVRLVDERGTSSTCPACRRRVPKPRGRTLSCPHCAFSGHRDLAAAASIDPHPGRRTHHPGSGCAAGGGHAPSSRPAPTRCRPVPT

SEQ ID NO: 11736 - protein, 348 aa, unknown
  TnpB Polypeptide
MENYYEYDDYNKPSHTKDGTYPLRANYEEGYNLSLTDDGDVAFRISAKPYKHVKGVLDGDDAHLDILKTALESDAWTIGTAEALFRNGNAELHVNVTCSEGTVRDKENSRTVVGVDVNEDNVALTALSEDSVEDTVVIEFPDIKFECHRYFTIRKRLREAGKLSVLDSVEGREERFVRDRLHKVSRHIVEWCQQFNTPCIVFEDLKEMRDGLDYGCRMNRRLHRLPFRALQHYTSYKAAFVGIPTAWINPEYTSQCCPMCGHTERANRHKKRFKCQSCSHQDHADRSASVNIAVKGIKKHQEWNVPALNSLPQVRTVRRQASGAVDAPTVTHDAVRGYQTDGVAGVSD

SEQ ID NO: 11737 - protein, 370 aa, unknown
  TnpB Polypeptide
MANVCLAAPVKLLASDEDSEALRETLERANNARCWIAEQGYAERRFARTALHRLVYDEARARFGLSAQMVVRAIGSVVECFSRDRRVLPHFRPNASFPYDSRILAIHPDRSEVSIWTVRGRLSIAFVCGEHQRQLLERALRFGECGLRRLADRRWMLDITVHVEAPDPHEPDGWLGIDLGVVNIATDSDGYRAGGGQLNGLRRRHRRMRRRLQKIGTRSARRRLRRRAGRERRFGADVNHRIAKQLVRRAERTGRGIALEDLKGIRGRIRARRPQRDALHSWAFAQLGQLILYKATLAGVPVVQVDPRNTSRQCPRCGHTHKRNRPSQARFQCVSCRHTGHADHIAASNIAGRAAVNRPNVPSNDHHGCA

SEQ ID NO: 11738 - protein, 445 aa, unknown
  TnpB Polypeptide
MEEEVIKKEIILKTRKIRIYPTTKQKIFYNKCFGATRYVYNKILEFVNNNKSKIYTQLDNQSKNGCTYYDKTSKQYCCQQIKDKYFCKKHNKSKIDFGFSLNIGSLRKNSKLFTAKYIKENPWLKNIPYDTRQLVINDFIAAYKAAITNLKNGNIKGFEMKFKSIKQNTCFFHIDKRAVKKDITIFKNKKLGKNRVRSKMKKWYDKNINDKITNNCKIIRYRPGIYYLLLTVKGQVKNENFKMKCVSLDPGVRTFQSFYSPDGIVGKLGDNFINNNTMKHAIKIDKLNSVKKKIKNKRTIRNIIKRQFLLRTKIKNAITDLHWQTTCFLCKNFETIIIPKFGCKNMSNKKISINSKISRKMLMLSHGSFLEKLKTKCKEYKRKLIIVNEAYTSKTCTHCGNIKNDLGGNKNYNCLKCKLKIDRDYNGARNILLKTVCKNLDTESI

SEQ ID NO: 11739 - protein, 354 aa, unknown
  TnpB Polypeptide
MKTLKLRIKDKHTKMLIQLASEANFVWNYCNDLSYKHLKRTGKFFSAFDIATYTKGTSKSGLNLHSQTIQAITEELVTRRKQFKKAKLNWRVSNPNSPKKSLGWIPFRASGIQYQNGQIKYAGHWFGLWDSYGLSKHKVKTGSFVQDSRGRWYVCLVVDKPEPTQTTEGKTPVGIDLGLKDFATLSNGQKIEAQRTYRKYQQKLGVAQRANQKQRVKSIHAKIKNIRSDFLHKLSRQLVNDHAAIFVGNVNAKGLAQTKLAKSVLDAGWTAFRTMLKYKSQQAGVWFEEVNEAYTTQTCSCCGSRDSSPKGRAGLGIREWTCQPCGTLHDRDVNAAKNILAAGHCRLAVGIPVL

SEQ ID NO: 11740 - protein, 455 aa, unknown
  TnpB Polypeptide
VKQIITAKLKLLATPEQFQDLHRTQLAYRDALNYISQYAFKHGKMSNEKRLHEGTYYEIRERFKLPSEMTNNAIRQVGVTYKGLWTKAKKNAEHRRNKITRKRFKGLDKPSKYVSPTVTYNFGYDYGFKSEQQLSIRVLERRIIMPYRGYEKHVALIRQGANCKAARLWYDKPHKQFYLLVALELAIVDLAPGVQQTIVGVDVGQRYLATTATMAEKQFFFPGKAVRAKADHYARLQKRLQRKGTRSATRRLRSLGGRERRFKLDVNHVIAKTIVEQHPQAFICLENLTGIRDRSIRRKRKCKGKKILPQTPKQRRANRHVSTWAFAKLHDMIMYQATLAGSVAIKVDADYTSQACPLCGYTDAKNRPGHGLLFICQNKLCQYQMRTGRSYTLHADLVGARNIAMRALCVWQDWMQTGQLSVVPGSECGPDASDSELKAAKRSRLERYADLRWES

SEQ ID NO: 11741 - protein, 370 aa, unknown
  TnpB Polypeptide
LKNKAYKFRIYPTKEQEILIQKTFGSCRFVYNRFLGLKIEMYKEEKKSLSYCQCCKQLTELKKEFEWLKEIDSDALQKELKNLNQAYENFFKRHIGFPKFKSKKNNHKSYTATQNRTMEVRDDLIKLPKLKWIKAKIHREVKGRILNATISQNPNGKYYVSLCCEEDIKELPLNDNQVGIDLGISDLAILSNGIKFGNPRFVKQSEKKLAREQRKLAKMEYGSNNYNKQKIRVANIHEHIKNQRKDYLHNITSYLVNNFDLICLEDLSSSNLMKNKHLSKAIADVSWFEFNRQLEYKCDWYGKHKKISKIDKWFPSSQICSDCGYRDGKKSLHIREWVCPICGVIHDRDINASINILNEGRRIASLQQAS

SEQ ID NO: 11742 - protein, 442 aa, Cyanothece sp.
MLVVEAKLKNGTPEQYKRLDESIRTAQFVRNLCVRYWMDNKGTTRNDLQKLCSQLAKNQETPWVTKLNSQARQSSADRAWQSINRFYQNCRAKIPGKKGFPKFKKHSRSVEYKVTGYKLSDDRRKIKFTDGFKAGEFDLWCSQRTLVYYSEQQIRRVRIVRRCDGYYCQFLIDVERQEHHEPTGQVTGIDLGLKEFYTDAQGNTVNNPRYLRKSEKRLKKAQRRLSKRFRKGKKQSNNYHKQRVKVAKLHLKVSRQRKDKAIKDALALVQSNDLVVYEALKVRNLVKNRKLAKSISDASWYQFTQWLNKLAKIYRIVCVAVPPHFTTQDCSVCGTRVQKSLSTRTHQCLNCKTVLDRDHNAAINILKKGLKYLGEHLNGTVGHTETGASAVLGSPQVEQLAYPNALGESGRWVLNGNIENLSRLVEQGISGSDTERIPHYNL

SEQ ID NO: 11743 - protein, 372 aa, Bacillus sp.
MILARKIRIRPNKEQEHQLWKSVGTARWAYNWTLGKQEENHKHGGKFLSDGILRKELTVLKQTEEYAWLYEVSNNITKQAIKDACQAYKRFFKGLTDKPRFKSRRKSKPSFYNDNVKLKVRNNEVLIEKVGWMKISESLPSDVKYTNPRIHFDGKYWYLSVGIEEEKLQQKLTSESLGIDVGIKELAVCSNGMKFKNINKTKVVKQAEKRLRRLQRQVSRKYEMNKEGSRFVKTSNIIKLEKKIQLLHRRLKNVRDNHIHQVTTAIVKTKPCRVVMEMLNIKGMMKNKHLSKAIAQQNLYDFKMKIQYKCEKYGIEYMEADKWFPSSKMCSTCGEIKKTLRLSERIYTCDCGHEIDRDFNASINLSRYQLAT

SEQ ID NO: 11744 - protein, 348 aa, Blautia sp.
  misc_feature (300)..(300): Xaa can be any naturally occurring amino acid
MQTVSSYGVELRKQNIPVRQTLEIYRSAVCYLTEIYEQVWEELAEIPDAKRRFNAAEHLVHTTKKNPARFDFDLRFPQMPSYLRRAAIQHALGSVSSYETRMDLWEKSGEKAGKPRLAYENHAMPVFYRDVMYREEKEGKDEAYLKLYDGHDWKWFCVRLNHTDMEYLRRNWSGKKASAPTLEKRHHKYFLRFSYTEKVTLTKTPVKEQIICSVDLGINTDAVCTIMRADGTVLGRKFINHPSEKDRMYRTLGRIRRFQREHGSAQSRGRWAYTKRLNIELGRKIAGAIVKNAEENHADXLTKHGWICGKSQEKKQGNPDWRMRIMPCLFFIVMSCTERKKKEKTKHT

SEQ ID NO: 11745 - protein, 490 aa, Moorea sp.
MLRKVGATRKISTQVVPVVEMTKSVELELLSTMKKLGIVRSESYNKLGSISHWGLDWKKAIPEVKSFRTPDTLGLPAKLMDWTINDVAKAITAQQAACTEAVIKKIYKRFPGKNNQKTRKELCKQLKTLAFLDSPLLHRLVRKEFQRGHSWVKNQIVYQQVGYKCKRLSRNTCQLELAGLKRGKRNKIVVRSNRKISGQIRLIYNQLLQRFEIHFLVDYGTIETPTERRSIGVDKGYTEAFYDSDGQAHGKGLGKVATKKSDRICAKNRNRGKLWALHRKLEKLDPAKSARILENNLTRKAENRRYRQNQSELTAIIGAASKSLFNGESLKVFSEDLTQPIKGKRQSKTMSRRLNSWMKGVMRDSLQKWANWTGSVVTEVQPSYTSQIDSVTGTLLGKRSGDSFTRFNGVVLQADCNAAKNILARGTDFEISRYMNRTEVQAVLLRRTARFLKGMGLSLLDAVELGWIDSKHSKTRAFKELLAEMPGTSK

SEQ ID NO: 11746 - protein, 430 aa, unknown
  TnpB Polypeptide
LEAVKVALDPTPTQERLLLSHAGAARFAFNVMLAHVKDSIDRGEKPEWSFWSLRKRWNAEKDTLAVDAEGYPWWQENSKEAYSSGIEALSKGLSNWSKSRKGDRKGRKVGFPKFKAKDRVTPKFTYRTGCFGLVKGDPKALKLPRIGRVHCMENVAALVGDAKVKRMTISQRAGRWYASLTVEREDKPVKRAPKGGAVGVDLGVKTLATLSDGTVVENPRYLKKSERKLKQAQQALSRKTKGSNRCDKAKAKVARLHAHVANQRLDAMHKLTTWLTEKYSDISIEDLHVAGMVKNRHLAKPISDAAFGEFRRQLEYKAARTGARLHVVDRWYRSSKTCSGCGGVKAKLSPNERTYRCDSCGLTMDRDLNAAINIKVAGSTPETLNAHGATVRRSDRSGHATLVAVKCEPSGGENRASLGAGGRKGALQTN

SEQ ID NO: 11747 - protein, 417 aa, Meiothermus sp.
MCYNGFVQTLTLRCTLKPTPEQAAALAATVRLFAQGCNHALRVAKEHGEFRRFKLHRLVYRDLRAMGLSANLAVQAIARVGKKKGSRAKFYQPTSCTFDPRTLSLREESVSLTTVAGRMLIPMKLGNYQRGVLKRARSVQGGVLTQGPKGRWYINLILRLDVPTPPTSGGKVVGVDLGQKALATLSSGVQFSGGSLKGKRLHYLAKRAEVRSKLDTERTRGLKNLWERLSGKERRFVDHTLHTLARRIVDGLEPGDTLAIEDLTGLRGRTTKRGKKERHLHNLWPYARFRSLLEYKAALKGVRVVAVDPRHTSQECPRCGHTARENRKSQALFRCQCCGFQHNADWVAAHNVALRAGPQALPQGIVAQRAGSMGIGREGFGRFAPDRCKPARIRGGLLCTVLPRKAPGFSRGVVYYP

SEQ ID NO: 11748 - protein, 317 aa, Saccharopolyspora sp.
LAQEAQARRLPSDRNRPGTSLPRRRNTAAQRQGQAGDVPLGGGAETQQTLGTSQSPGCGWVRFRLSRRQPPDAKTFRVTCHNGQWHVAFAVIPEPIEAPGNGETVGIDRGLTITAHLSDGRVLNCPQLTAKERARIRKHQRRAARAAKNSPAKQAEYAKVAQLRAREANRRKDWAEKTSTMLASEFDVIRFEKLNIRNMTRTARGTVAEPGRNVRAKAGLNRSILAQGWGMLRSRAEHKAPGRVEDVPAPYTSLRCSDCGWIEKNSRKSQAEFVCVSCGFTCNADLNASINVAAGHAGGTTTTPGRSPVREPQLASR

SEQ ID NO: 11749 - protein, 459 aa, Saccharopolyspora sp.
MSTVLQAYRFALDPNPGQESALRSHCGSQRFAFNWGLGKIKANLSQREAEASYGMGGDELTPLVGWSAYGLRKDWNQAKHEVAPWWAENSKEAYSSGLANLASALKNWRDSRVGRRQGRRLGFPRFKGKRAGLSCRFTTGSFGLVDQDRRHVRLPRIGVVRTHESTRTLARRVEKGTARIRSATVSYRARRWFVSFSVEITRNDSTPTRPGTTLGVDLGIKSLAVLSTGEVIANPRHLEVAQRELRRLQRQASRRQGPDRRHGQKASNRWSKTQARIRKLHADVANARRDGLHKLTTRLVRTYGAIVLEDLNVSGMVTNRRLARHVAGVGMAELRRQIEYKAAWAGVRVHIADRWYPSSKTCSGCGVVKAKLRLSDRVFACSSCGTSMDRDLNAARNLANLVEASSHSWWATENEPDGNPCQTRTMRAAGTATGRPAPHGAGQRRHRKAPTHETFSHVS

SEQ ID NO: 11750 - protein, 306 aa, Saccharopolyspora sp.
VAPRAATGELRRNLRATDCLEEDRRSVVPQRGAVGSSPADVAAPSGRVRGVFDKRAKYPRFKSRKKSRQSAEYTKSAFKWRDGLLTLAKVPEPLNIVWSRPLPEGAEPSTVTVSRDAAGRWFVSILVETHVEHLPTTGNAVGVDAGIESLVTLSTGEKVNNPRHERRDRARLARAQRELARKEKGSNHRAKARRKVARVHARITDRRRDYLHKLTTRLVRENQTVVIEDLQVRNMLRNGSLARAISDASWSEFRTMLEYKADWYGREVIAVDQWFPSSKTCSVRSPRWIDAASGAVMDLHRMRLDP

SEQ ID NO: 11751 - protein, 424 aa, Saccharopolyspora sp.
MIFVRTAYRVRAYPAPEQAAQLGRTFGCVRLVWNKTLAERHRAYHAHGKKTSYKETDAALTAWKKTDELAFLSEVSSVPLQQTLRHQHTAYANFFAGRARYPRFKPRNGRQSAHYTRSAFRLRGGKLTLAKHTAPLEFVWSWDDETLETLNPTMVIVSREPDGRWYVTLAVDTDDPEPQPETGSAVGVDLGVKDFAVLSTGEKIANPKHLDRKARNLARYQRQMARKQKGSNNRRKAKTKVARAHRKIRCARTDFLHRTTTNLVREHDVIAIEDLNIAGMARSAKGTVAKPGRNVRAKSGLNRAVMDAALGEFRRQLEYKTTRAGKTLVVIDRWYPSSKTCSACGHLLEKLSLSTRAWTCPGCRTRHDRDINAAKNILAAGRAVAGETPGDACGADVSPQGSSLRQSAVKQEPSGASPIAIPAL

SEQ ID NO: 11752 - protein, 450 aa, Acidimicrobiaceae sp.
VLSRAVTFQFALDPNAEQKILLAKCAGARRYTVNHHLARVKANLDTRSTEREMLSECGDPCEPSTPSLSWAALSFINEFNAWKNGQSDDALVNDDGTRGLAWRHELPGDVFECASVDAARALENFSTSRRGERSGSPVGFPRFQAKGKVTPSFRLRNRATSGMPPSSHPIRFNDPSHLRLPKFGPVKLFGSTRKVRRMIDVGRFHVYSATFTQLAGGWTVSLTGVAAEFHQAERSRTNRHAIPVGVDRGIISLRVAADANGIPFNSFEGVKTLKQAHASLKAANQALARTTPGSKGHQRARARLATRHRKVANIRRHLVHQASRALVDRCQVLVIEDLNVAGMMRNRRLAKSISDAAMGELSRQLRYKARWHGVEVRVADRFFPSSKTCSGCGEVKTNLDLLTRTYSCEVCGLVIDRDLNAAINLARWQPKETSEVSLLDPTPALLPSTA

SEQ ID NO: 11753 - protein, 374 aa, Nonomuraea sp.
MLSMSQIVKRAYKYRFYPTPEQADLLNRTFGCVRLVWNKALAERNRRYTDEHVSTSYVDTAKWLTAWKQDPELEFLREVSNVPLQQALRRQQVAFNNFFAKRARYPRFKSKHKSRASATFQNNAFSFRDGVVKLAKMDAPLDIVWSRPLPERAEPSTVTVSKDAAGRWFVSLLVEEKISPLPPVDAQIGMDAGLTHLLTLSTGEKITNPRCERRDRRRLAKAQRELARKAKGSANRAKAKLKVARAHARITDRRRDFLHKVTTRLVRENQTLAIEDLTVRNLVKNHSLARAISDASWRELRGMLEYKAAWYGRTLAAVDRWFPSSKLCSARGCGHVNGSMPLNVRSWTCPACGSVHDRDVNAAKNILAAGLVER

SEQ ID NO: 11754 - protein, 277 aa, Actinobacteria sp.
VKRAYRYRFYPTDAQAAELSRTFGCVRKVYNMALAARTEAWARQERVNYNQTSAMLTAWKKTEELAYLNEVSSVPLQQALRHLQMAFTHFFGKRAKYPRFKSRKKTRRSAEYTTSAFRFRDGALTLAKMTGPLAIVWSRPLPEGTAPSTVTVSQDSAGRWFVSLLCEDPGVQPLPANGDAVGIDAGLEHLLTLSTGEKIANPRHERRDRAVLAREQRRLAKKEKGSANRARARLKVAKIHARIADRRRDTLHKITTRLVRVVWRRRRRARRTGPGPG

SEQ ID NO: 11755 - protein, 521 aa, unknown
  TnpB Polypeptide
MQVEQMYLYKAHEEEASMAAKATTTIRQVMHYQPEHAAWFAANQVLFNQVAAFYFEVIQAHEKILDLGDQDALPALEKLTHATKKNPHPVMPLSVIGKEIPAMFRRAAIHAALGSARSFYAHLKKWRTRRANLLAKGKKFLERPPVPPRSWNKSATFYFGQWKERTSSSILLKVWTGSCWSWLKVRLTGRELPNEAEVGSPALVRRGKQWWLHTPVEKHFQRPPKIETQVTTNAATRICAVDLNLNEHLAVCTVQTVEGTILATRFIGGGREISGFRKRQLGRIARNRAKTGILAENEQDNAALWRKIRNADEQIAHLVSARIVQFTQDQGASILVFEHLGNLKPEKGKYSRRGNSKRAFWMKGRIFNFAKYKAWNLGILTSRVNPHHTSRECARCHSLIFRYAQGHPIEGYTPGTPLCLCQQCQMRGNADRNASLIIGQRLIARSQEPFKEKPPAPARRAGRVEKSTGVALSQEAKRKKGPSLSDAWHGDDNAHGTAQEGTLWMDERPSAIPTQLRLPPE

SEQ ID NO: 11756 - protein, 374 aa, Lentzea sp.
VKRAFKFRFYPSEAQAVELSRTFGCVRKVYNLALQARSEAWALRGERVGYEATSALLTAWKRTEELAFLAEVSSVPLQQALRHLQAAFGNFWARRARFPRFKSRKRSRASAEYTRSAFRWRDGVLTLAKMAEPLDIRWSRPMPEGATPSTVTVSRDSAGRWFVSLLCEDPSVTPLPATDAVVGIDVGLDHLLVLSTGEKIGNPRHERRDRTALAKAQRALCRKQKDSNNRAKARVKVARIHARITDRRTDYLHKITTRLVRETQTLVIEDLAVSNMVGNHRLARAINDASWRQFRQQLEYKASWHGRNVTVVDRWFPGLAVTVCGAGVRPQRNPPGGQSATKQKTPRREPQESPSFTRGRSQAVQYFRTASVEL

SEQ ID NO: 11757 - protein, 332 aa, unknown
  TnpB Polypeptide
MQTVSSYGIEVRKQNIPIRQTLELYRSAVSCLTEIYEQVWEELEEIPDAKRRFNAAEHLVHTTKKNSARFDFDLRFPKMPSYLRRAAIQHALGSVSSYKTRMDLWTKLGEKTEMPKLVYENHAMPVFYRDVMYREGAEGKEEAYLKLYDGHDWKWFCVRLNHIDMEYLRKNWSGKKASAPILEKRHHKYFLRFSYTEEITLTKTPAKEQIICSVDLGINTDAVCTIMRADGTVLGRKFIDHPSEKDRMHRTLGRIRRFQREHGSAQAQGRWAYTKRLNIELGKKIAGAIVKYAEENHADVIVFEYLEMQGKIPGKKKQKLHLWRKRGYPETL

SEQ ID NO: 11758 - protein, 437 aa, unknown
  TnpB Polypeptide
MRLVYKFRYPRSKHLDLLAHISKNLYNEANYIVRQEFFANGIWIRYYQLNMLLKASSRNYKLLKAQTSQQILKVVDKNWALFFKAIKDWKQHPEKYKGRPRIPRYQDKDGYFMLIFTNQNSKIINNNCELVITMSRSFKDAYPQCKEPLRIAIPHYPNKDFSSSYQQVRILSRRKYFEIEIVYHEKEVANPNLDKDCYLAIDLGVNNLVTAVENRNVKPFIISGRLLKSVNQFWNKKKTKLQSVKDKQQHRYTHQLDDITTNRNSLVYDYLHKAARFIIQYCLANGIGNICVGELKHIKDGVNLGKKNNQNFVNIPLQKFKQLIMYKASLAGIKTHELNEAYTSKCSALDLEAIKKHKKYLGRRITRGLFRGSHYLLNADVNGALNILRKVIGDDFIRKLVDRGCWFQPVRIRDLIHTSHQQFVNTTGATGATCVPC

SEQ ID NO: 11759 - protein, 419 aa, Hydrocoleum sp.
MIISHCYKIKPNQEQIAKIDNWLELLRRHWNYALGQRLDWLNRTRCQIDRCSLISCPIREIPSKPDYHFQSAELKETKKLFPEYKEIYFEVQQNNLKRLDKSWQRWLVPDQTGKRFGRPRFKKTGKLRSFNFSRVNHPKAAVKFDGKQIIISRFGAIRVIVHRPIPDGFVIKTATITKKADGYYVSLSLEDKSVPSLIPTNNIKTAVGIDVGLKEFLTTNTGETVSVPNFYRKYQSNLARKQSKAARKEIGSNNWKKAQNKVAKLHQHIARQREGFHYKTAHKLVKEYDLIAVENLNIKGLARNTKLSKSIYDVAWGTFIEKLNAVAVKRGVHVIKVNPHNTSQNCSNCGQKVPKILSVRTHYCPKCGTVLDRDENAAINILNKALCEVGIILPACGGLDTGQPMIQETSEIWVQLSLF

SEQ ID NO: 11760 - protein, 373 aa, unknown
  TnpB Polypeptide
MPKVNRYRIYPTKSQITKLNNTLELCRWVYNETLALRKNAWETEQKRISYYDSKKMIPIWKKDKPELKNVHSHTLQDVTMRVDLAFQAFFRRVKAGEKAGYPRFKGRGWYDSITYLQSGFSLNGNILTLSKIGNIKIKLHRSLEGNIKRLTIRRTSTGKWFVSILTDNDSYQSLEHSDKSVGIDVGILSFATLSNGTFVPNPRFYIQEEKALAKANKRFSKADKGTPERKKYLKTLCRVYERISNKREDFVQKLSKNLVDNYGIICFEDLNIKNLTKNHNLAKHILDAAWSKLVTYTFYKAENAGRKVILVNPKNTSKMCSNCGMLVEKDLSERVHNCPFCGLTLDRDLNAAINILRLGLQSGRKIGRCPSLQ

SEQ ID NO: 11761 - protein, 380 aa, Rubrobacter sp.
MMKTFEYRLYPTRVQRDQLLSCLQESRHLYNEMLEMVKAGYDETGKFLSRYDLTYRFKGRGGEHVPASTVQTLADRLDKALKRFFHRKELGCKTGFPRFKPANRWHSIQLRQYGSGRDVLLDPDTRRLRVPKKLGSRLKIKQHRPLEGTPKTAHLVYRADGHWYVLIVCDLGDAPDKRKGDAVGLDVGLKVFVADSDGNTVENPRCFKNSQKKLRRAQRKTARRKKGSHRKKKAARQTAKQHLKIARQRKDHAHKTARAYVDAYAFIAVEDLRIENMLKNHHLAKAIADAGWSAFINILTLKAEEAGARVIEVTAHFTSQRCFDCGEIVQKSLSVRTHVCGSCGYTDDRDVNAARNILARAEPSCPNVDVSLHGTRSRLL

SEQ ID NO: 11762 - protein, 362 aa, unknown
  TnpB Polypeptide
MKTTLKIKLCPSQEQFEALKTTMESFNKACSFAAEIAFAQKCFSKFKLQTLVYRTLRDKFQLSSQMAVRAIAKVIDAYKKDKSKQITFKIHGAVIYDQRIMAFKKLEHVSLLTISGRQLIPIVFGGYQLQRMRHIKGQADLVLVDKTFYLLCTVETPEPPPDKPTQYIGVDLGIIQLATDSTGETFSGDKIENKRQQISNLRSSLQSKGTKSAKRHLKKLKRKESLFRRDVNHCISKRLVEKAKDSHSAIALENLKGIRERTTVRKSQRAKHSGWSFYQLRSFISYKAATKGVKVVLVDPRDTSRECSTCGYTDKKNRKSQAKFKCLSCGHTENADLNAAKVISKRAEVNQPIVSSDLQKVA

SEQ ID NO: 11763 - protein, 407 aa, unknown
  TnpB Polypeptide
MKQLKAFKFRLTPNKQQKVLINKTLGCSRFLYNQMLNEKQVKYKSKDKSKNKTEKQYKEEFSFLKEVDSIALQQSRLNLKTAYDNFFRKLKSGEIQREVSRLLTVAKTPKQKAKALNYGKPKFKRKYNPKKSYRTVNINNSIRVEENKIKLPKLGFIKFKKSKEVLGTIKSITISKNILNRYYISVLCEVEIQKLSKLDTKIGIDLGIKEFCVTSNNEFASNPRHLRKLEKKLKKAQRILSHRVKKSNRRFKQQKKVFRIHQKISNQRLDFLHKLSTKLVNENQVICLEDLQVKNMVRNHCLAKSISDVSWSKFVELLKYKCNWYGRELIQIDKFFPSSKTCSSCGNIKKDLTLKDRKYNCDSCELVIDRDYNAALNILREGLRILKKNRRDDEVSLLNIQTLVCSS

SEQ ID NO: 11764 - protein, 398 aa, Streptomyces sp.
VAANHVKRAFRYRFYPTDAQAAELSRTFGCVRKVYNLALAARTEAWTRQVRVNYNATSAMLTAWKKTEELAFLNDVSSVPLQQTLRHLQTAFTHFFAKRAKYPRFKSRKRSRKSAEYTTSGFRFHDGRLTLAKMADPLDIVWSRRLPEGAKPSTVTVSQDAAGRWFVSMLCEDPAIKPLPATDEAVGVDVGLDHLLTLFTGEKVANPRHERRDRTRLAKAQRELSRKVRGEGANRRKARRKVAKIHARIADRRRDHLHKLTTRLVRENQTIVIEDLTVRNMVRNRPLARAISDAAWAEFRSLLEYKAAWYGREVIAVDRFFPSSRLCSACGTLQEKMPLNVRTWTCGCGTTHDRDTNAACNLLAAGLAVSACGAGVRPQRSTPGGQPVTKQESLRRKP

SEQ ID NO: 11765 - protein, 517 aa, Massilia sp.
MVALSAMRARFAHGPRCRASCRRAPHDQLPLAPPVRARRHARPAGNVIGHRRGRRDVSTRIAEGRTQPDAGAAKAWRHGEAAGFNSSFGTSLVFCALMQNKQVCSVQYGYQRSRRLDQHSCKNTMFVAHRIRLDPNNVQATYFARAAGTARFVYNWALSEWRKQYEVCKVDPMLPRPSEAALRRLLNSIKREQFPWMLAVTKNAPQMAIMQLGRAFENFFAGRARYPRFRRKGRDDRFTLTNDQFQVEGRRIRIPKLGWVRMRETLRFVGRIVSASVARVANYWYASITVETSDPPTSSAENQGTVGVDLGVKALVTLSTGETFEGPKALRFLLIRLRRLSRGLSRKVKGSRNRDKAKLKLARLHTRIANIRRDSLHQLSTSITRRFHTIGIEDLNVKGMLGNRHLARAIADMGFFELRRQLEYKAVWRGGQVVLADRWFPSSKLCSTCGYRLGELGLDVRQWTCPSCGVSHDRDVNAATNLRNMAVSSTASACGGEGAGPARERRVKPAPVKQESN

SEQ ID NO: 11766 - protein, 442 aa, Blautia sp.
MQIISSYGVELRKQNIPIRQTLEIYRSAVSYLIGIYVQVWEKLAEIPDAKKRFNAAEHLVHTTKKNHACFDFDIRFPKMPSYLRRSAIQHALGTVSSYKTRLDLWEKTDGKSGKPKLVYENHAMPVFYRDVMYREGAEGKDEAYLKLYDGHDWKWFCIRLEHTDMEYLRKYWSGKKASAPTLEKRHQKYFLRFSYTEAVTLTKTPVKEQVICSVDLGINTDAVCTIMRADGTVLGRKFINHPSEKDRMYRTLGRIRRSQREHGSAQTQGRWAYTKRLNTELGKKIAGAIVRYAEKNHVDVIVFEYLEMQGKISGKKKQKLHLWRKRDIQKCCEHQAHRKGMRVSRICAWNTSRLAYDGSGVVIRDWKNHSLCTFQTGKRYNCDLSASCNIGARYFIRELLKPLPVTERSLLEAKVPSVKRRTSCVYADLKELHLQMEILKAA

SEQ ID NO: 11767 - protein, 459 aa, unknown
  TnpB Polypeptide
MASEAVGQYLDMRSGSRSTPAIPTTQEVEFKNKRTSIVRLFPNGFQHRKLLKLADACAKLFNEANYERRQQFFHEGKVDFKGTEKKYYKKYKQALGVNAQQVINKNNEAWSSFFSLLKLKKQGRLPPHITHVSPPSYWKDKENKKRRRKVLIIRQDRYEVDEERCKIILKDFNMKVEFEGKLRWYGKQGRLEMVYDETTNKWYAHIPVEVGVETTKKGNKSKHIVHGDRKSVQVYSPKGNKVASIDLGINILASVVVDDGTWLLYKGVRAKEDYFYFEKKIAEVQSLADQAKKLGEYDAYEELAREKRRLSKKLRRRFLHVYRTLASALAERLHSLGVSTIYLGYPYNIGQDKGNKFSVNVWSYRELMDAVELKAQEYGIKVYEVVEYGTSRVCAYHDVEVKRNPRGVVACPFGHRVHSDLNGALNIRKKAVNEIVTAVKKPISFIVDHNGVAPVCKGV

SEQ ID NO: 11768 - protein, 265 aa, unknown
  TnpB Polypeptide
LEGPKDFRSFTYIQSGFEFDSKNGQPLLSLSETCGYSSHQTPRNPHTDTVKEITVKKEPTGEWFASFTVGDKETPKKPTNPDRCIGIDVGILKYAHDTDGTAVESLDLSDDRERLERAQRDLSRKEHGSANWERQRQVVAERHADLKRKRRDFLHKLSNYYATEYDLVAVEDLDAKELIEFPETHGTGRERRGERSSRCLNTSANAKERTSSKSIRGTRRKSARLAASRRTSHCGFVNTRARHVGSRRTGTRTQRGTFFLAVLKI

SEQ ID NO: 11769 - protein, 376 aa, Micromonospora sp.
SIPGGEHLPSNVIKGRTRQVVTFGKANGRLPVDVFELEGVPWIPRMLLLAACDRQQAIIERSDTDPARALLRLQLPTRPDPQTYRDWTWVECRITLPSTVPASAVLHLPTLRLTGGMVRADMAYTHAVPKARTTGHSVALGVDWGLNTLLGAGALRLGQDGRITVLGAGGQFRAAGILAKQHRLRRQSERLHAKADQYQRLIGGDSRHHLVGKHAVIRDEIRHVSARRQNLNDALAWAAARWTVDQAIAARATAIYLEDLRSMEAKGMGRTLNTRLSQQVRGKISDRMRHLAAEHGIAVVTVPARNTSKHCPQCLTPLQHRKAPDKPTVAGWKWAICPHQSCRCRATATTAPGGGSPPADSPTRPKPSPTRPPAPW

SEQ ID NO: 11770 - protein, 285 aa, unknown
  TnpB Polypeptide
MLTAWKRDPETAWLVEPSKGPLQAALRNLQAAYDRFWRKQNGFPKFKKKGKSKDSATYYANCFTFRDGKIKLAKQKEPLDIRWSRPLPGGAEPSQVTVSRDSQGRHHVSILVEEVITELPKNASAVGIDAGITTLYTLSTGEKITNPRQEKKDREKLSKAQRALSRKQKGSRNRAKARRKVAKIHGRIADRRRDHLHKLSTRLVRENQVIAIEDLSVRNMVKNHSLARSISDASWSSFRTMLEYKAQWYGRDVVAIKQDVLGVWSHHGVPSPEYSGLGVPVRCGA

SEQ ID NO: 11771 - protein, 291 aa, unknown
  TnpB Polypeptide
MLRRAVAVELEVTKELSKLLYSVETAYLSIVREVAAYAVANNVLSATQLHRLFYSRYRSEYQDLHSHLIIQAIKQASEIAKSFITRKRKGLVHKPYPEVRSVSIRFTEQAWGYEQFIRSTAPVRLELSLPNGRTVVWLRPHKRFWLFWWRVLTGGAKLASTLIIKRKTNKWYAIFVFELKPRVAKPQSIVAFDINENTVAISRIDIETTVDKVADWNRQYATPQLYTIKTDFGRLARRYERIRNTIIERLKPHFTLPNGKYINIANTREFRKRVRKLRERGRKVSRVRGIL

SEQ ID NO: 11772 - protein, 473 aa, Mycobacterium sp.
MSDHAAAARSTMAGGLGTRSRIRSYRYALAPSRLQEDQLRSHCGAQRFAYNWGLAQVKANLEQRSAESTYGICGKDLTPALNWSAYAMRRIWNRVKSDIAPWWQENSKEAYSSGLANLATALRNWAASATKRRQGRPVGFPRFKSKKSRLSCWFTTGALGLVASDRRHVKLPRIGIVRTHESTRKLARRLESGSARIRSATVAYDGGRWFVSFSVELQGTSVSAARSKDTVGVDVGILHLAVLSTPVRGLSDASGLIANPAHHEGAIKKLRRLQRKTARRVGPDRRAGTIPSARWRRARDDVRRQHAKIANQRADTLHWLTSALAERFGTVVIEDLNVAGMLRNRRLARRISAAAWAEMRRQLEYKTDWRGGRVLVADRFYPSSKTCSGCGVVKAKLRLSERVFTCDTCGLTIDRDRNAVRNLAALAADAGTSPEMSSPSCGATENEPAGNPNRDSLRGQGYCHGKPPEGNAA

SEQ ID NO: 11773 - protein, 335 aa, Mycobacterium sp.
MTRHTTFRFRLDPTAEQRETLARHAGAARFAYNQCLRMVRSAMHARRPDAGAAVPWSKYDLINAFNRWKKSESAGRVWAVGPDGTTEMVSAGLAWRDDVCQQVFEEAAVDCSRALRSWADRSSSRNGRRAGPPRFKKKAGTVPSFRMRNSSREGRRPAIRVGADGRPRSVTLPRVGAIAVRDDTRRLRRMIATGRARILFATVSHRGGRWWVSLNVEAADLHPSQRHSPRGGDDAAGWVGVDRGLIAFAVAATADGTKIVHVDAPPRPLRSALTRQRRLSRNLSRAQKGSHRRKRAGTKLRRHHAHVANVRKHFLHQVCNAWSRPTTGSSSKISM

SEQ ID NO: 11774 - protein, 459 aa, Streptomyces sp.
MERVTGEEAKRIKREALGVGDRVKHHARTATPLKSLTRTAGAQQRVYRFRFYPTPDQEAQLLQTFGACRWVYNEGLALRVKAWEQHRVSLGFAETCRSLTGWKRVKKTAWLREVSAPVLQQSLRHLDAAFSRFFRGSATYPKPKTKRRSRDSATYVRTAFRWVEDPERPGTASVSLAKQSAPLDVRWSRALPPGELPVKLTVVRDRAGRFFLSVLVEERVAALPEVFVAGTRAPKAVGLDLGLASLVTLDDGEKLAHPRLLKKYEKKLAGLQRELHRKRRGSKNREKVREKIARLYASIGDVRRDLLDQFTTRLVRENQVLVVEDLSIAGLMRPAVGKGWRRKARLNQAIRDAGWGELLKQLHYKCAWYGRTLVIVNKFFPSTRRCSACHVKGPRLDVSVREWTCAECGVVHDRDENAAVNLRNEGMRLYWLAAMRTPPGQAPPSVIKASELVDHSLVA

SEQ ID NO: 11775 - protein, 463 aa, Pseudomonas sp.
VLTGIRFKAYPDAEQAETLSQWIGCARVIWNAKCDEDDYLRTFARKYLPTGTFPALNKEYSHFKGEETAWLSQCPSQLLRNSATIWHKTYSNFLKGICGRPQRKKREKGNYIWLTRELFQIEKVAGLWQLRIGSKTNTIGILPVRWHRKPKNLPNSIWIKVINGRWSVSFSYENGQDDSQLNTPDEHLSWLRGATPEQLDEWVVGIDRGVARPIQTPYQFFAPDAKALAKQAKRERHIKRLQRRLARQKDKTSHKRKDTKLKIAGLHRKTRQVREDFLHQTSRTLVNQSKVIVLEDLKLKNMTRRAQPKQCPDTGKWLRNNASAKSGLNKALLGVGLFKFELFLSYKMARANKPMFKVSAYNTSRECAVCGHTHEANRPSQATFHCQSCGHTDNADRNAARVIKKHAILLIKHSGTELSERGVLRLSPTLGRAFNGSKTGAGKPATARRARSKNTAVVTLVTA

SEQ ID NO: 11776 - protein, 217 aa, unknown
  TnpB Polypeptide
MSWKMDQQIVSIWTIEGRIKIPFARGPRQAELLRTRQGESDLCLINGMFFLNATCDVEPLNSKDFTDFLGVDLGVANLATTSDGERFTGDAVEAVRMKYHRTRRSLGKKIARHHKRSTRRNARRALRRIGNREQRFRKHQNHVISKQIVARAEDTGRGIAVEELTGIRGRTRFRKGQRAKMGGWAFHQLRSFLSYKAQLHGVLLVTVDPRNTSRTCN

SEQ ID NO: 11777 - protein, 525 aa, unknown
  TnpB Polypeptide
MDFMDYKKYSIYPPWWSLYSILYSEELWIPLKNNNTKQYIPKAKFDSCSKDINYECFTENGLNKPIFPFVKFLGNSFFDGMEKQIILSKKTNAKIINLVKKKKFDQAIGAGKLYRKQLLHINEYIRSYKVKLILSNKQKSTIEKWAKIATIVYNNCVDKYNKANGKITLNFTKLKKEVIFSIPALLRKNCPYNIMSYEVKVFCSNVKSCLTQMKQNNITHYKLKHKNTKESQTISIEKQNINKNGFYTQSMGKVNHNDKSFSFSNIACDCKLTLNKKNGEYHLFIPQYIKGEQLNNRDPIVSLDPGEKSFLTFYGMDHAGMIGNDIRKKILGIEEQIKYIQRKMNKNKKKRKSLLKALRRKYRKIQGFVKELHHKSALYLCKNYNIILIPRFETQNMVSDKKKCIEKIKENKRNIKNNSQSNAELRNNLKRYKRVTRLLSRVKFVLNNLSHYKFKQHLLAKGKEYGCLIVEVGEEYTSKCCGKCGHISDQYKNRIKKCPMCNLEIDRDYNGSRNILIKNLLEIKG

SEQ ID NO: 11778 - protein, 401 aa, unknown
  TnpB Polypeptide
LTILSHRIRLNPNNVQKTFLERCAGTSRFTYNWGLARWIQLYNTGSKPSWQSLNAELNKIKSTAFPWMNELPWGIRNKALANLGSAFSHFFRRIQAGQTPGYPKFKSKKLAAMSFSVDSREVGIREHSVRIPKLGWVRTREPLRFPGKVISTQFTRNAGHWYVSIQVEVDESRWSYPRRCETQAAVGVDLGVRDLAVLSTGEKIEAPRVLRVREKQLRRLDKELSRRTKGGANWRKTKAKLGRLHERISNVRKDVTHNLTTSLVKRFRVIGIEDLNVVGMMKNRRLAKSVMDASMGEVGRQLGYKATLAGSEVVVADRWFPSSKICSDCGTKREGRLSLSIREWACESCGVVHDRDVNAAINLRTAALAGIACRQGSAGSGRKTETKLPLGQESSSVVDLG

SEQ ID NO: 11779 - protein, 386 aa, unknown
  TnpB Polypeptide
VIVVKLVVQVRLLPTAEQAAALAATLDACNAAANHVSQVSFERKVFSRNGLQNVTDGDLRERFGLGAQPAVRVVKKVVDAYTTLRASIRAGKLGGTTSRRRAKAESTPIEFRADAAQPFDDRILSWQHDIQAVSIWTMAGRMKSVRFVGHPNHLKTLAQSRLGETDLIRRDGMWFLLATCEVPEQAEFEPVDWLGVDRGIVNLATTSDGANFQGRRLGRYRRWQARKRSQLQAKRTASAKRLLGKRARREARHATHVNHRIGKEIVAVAQRTGRGIALEDLGGIRERVRPRRDQRAMHSSWPFHQLGKHIVYKARRAGVPVITVDAHYTSQRCPRCGHTARNNRSSRDWFLCRRCGLAGPADHVAGVNVRDRARSAWVFVNMPASA

SEQ ID NO: 11780 - protein, 352 aa, Actinopolyspora sp.
LPTPSTPTNGWLGQCSNIVLQQAIRDCDQAYKDFFDSLKSKRVGKRVGAPRFKSRKDNRQAIRLRTGGFSIRANGKLRLARIGDVTVSWSRDLPSAPSSVTVVKTADDRYFASFVVEVGDETLPEAVEEHGQDIEGGLDLGLSAFVVDQHGRVIDNPRFLRRAERKLKRAQRELSRKQRGSNNRAKARRRLARQHAKVADTRSDWLHKATTSIVQGNQLVVLEELAVSGLARTRLAKSVHDASWGTFRRLLSEKATRYGRELIVIDRWLPTSQTCSACGRIDGAKPLSVRTWSCPCGTVHDRDRNAAINILAAGRAERLNACGDQVRPHTGAQVDEAGSSATPRGDAAPRAA

SEQ ID NO: 11781 - protein, 236 aa, Mycobacterium sp.
VWTAGVVVAVATSDGELLDRAFVTTGEQRRTVALQRTLSRAAKGSANRNKTCAALAKVRARERRRRLDFCQKTAHQLAQNNAVVVLEKLPAKNMTRRAQPVPDPNNPGSFLPNGAAAKSGLNKAILSKGWYRFEQALRSVSRYTGTEVVKVPAAFTSQRCSACGHVDPKSRESQAVFRCTHCSRPAEHADINAAKNILAAGLAVTACRESAVPSGAAETPTQEPAGNREELLLQPV

SEQ ID NO: 11782 - protein, 245 aa, Mycobacterium sp.
MQMRYRYRIEPTSAQQEMLARVFGCCRVVFNDALRVRDEAYGARVKLSDSEIQRCVITAAKTTTERAWLCEVPSVALVQSVNDSRRAWRNFFDSTSGKRRGRRVGRPRFKSRKDHRQSFRLTRNGFSLKANGRLFVAKVGEVRVRWSRELPSTPSSVTIIREPDGHFYASFVVDVGASPLPVVDREVGVDVGSLGWPRPPPPMAVGPMSSIRSIWVASCGSCGGWSGRSLDGRKDRPAGTSRGAR

SEQ ID NO: 11783 - protein, 191 aa, Mycobacterium sp.
MQMRYRYRIEPTSAQQEMLARVFGCCRVVFNDALRVRDEAYGARVKLSDSEIQRCVITAAKTTTERAWLCEVPSVALVQSVNDSRRAWRNFFDSTSGKRRGRRVGPAAVQIPQGSPAVVSAYPQRVQPESQRPGCSWPKSARCGCAGHASYPARRRRSRSFGNPMAISTPVSLSTLGPHRCPWWTGRSVWM

SEQ ID NO: 11784 - protein, 268 aa, Mycobacterium sp.
VAKVGEVRVRWSRELPSTPSSVTIIREPDGHFYASFVVDVGASPLPVVDREVGVDVGVARLATTATTDGRRADVVNPKHLGRKLRKLRRLEREKSRRQKGSASRDKSRRKVAVAHNKVARARRDYHHKQALALVRENQVIHVEDLNIVGMVRNRRLARAISDAGWGQFVRIIDEKADRYGRTVHTVSRWLASSKTCSDCGHRLDELPLQIRSWTCPKCRVVHDRDHNAAKTILAAGRAERRNAGGASVSPPTTREARGDEAGSTPTAA

SEQ ID NO: 11785 - protein, 443 aa, Effusibacillus sp.
MTEVMFTFYSRLIPIQKYPKFINAYKSASSRLVKKEFPVIRKSLWKEYFWSRSYCLLSTEVPPLKLSKSTLKHKVNESDFRMDSVLHFEIRPTAEQEKQLFHTFDLCRKLYNYALDQRIRSYKETGKGLTYRDQQNMLPAFKEANPEYKAVQSQVLQDVLRRLDRAFVNFFEKRAGYPRFKDKLRFRSITIPQSDVRRNFGKEGYIYIPKIGHIKLNAHQAFDPSKVKIINVKFQNGKWYTNLTVETDSKPPVSDIQLAVGIDMGLFQIAVTSDGEQYENPRWITKSEKRLKKLQRRLSQKHKGSQNRQKAKHQLQKLHDHISNQRKDYLHKISHRLVQKYVLICIEDLQVKGMMKNHRLAKSIANASWNRLANYLEYKSRRFGKTLVKVNPKNTSQKCSNCRQIVKKNLSERIHQCPYCHVVLDRDLNAAINILQAGLNMIA

SEQ ID NO: 11786 - protein, 371 aa, unknown
  TnpB Polypeptide
MKAYRAILIPLPRECDARYIQRLMALANLAYHGYAVTIPDLLRYVQHQLLSCWQRFKQSLAFGTAPKRWLARAWVPLKTYRVFPEGRRIGDKSAPVALDFARGVVRVRQVCHNRPRYVVELPMPEWALERVTEGADIKFAAVGLKNGRPHLVLAAEREVQPIQPGDYALVVDVNSWRHGIAWALVRAGKVVSMKQERLCLDGLYRELLRLERKYGALRRLGLHETPEGKRLRREIGHKKRKLHAIVKDRAQWLAAKLAGKALKYRAKVVIDDVLEESRRGLLEERLPRGLAKIYLSGVRRFVRLLANQLQWYGIPFEFRRLYSTVCPRCGGRMRELPGRIVRCESCGLSMHRDLVPVMWYLKANGLPLTPA

SEQ ID NO: 11787 - protein, 384 aa, unknown
  TnpB Polypeptide
MTQRAFKYRFYPTPEQEFLLRRTIGCTRLVYNRALTAKTEAWYERQDRIGYAETSAMLTDWKKEDILTFLTEVSSLPLQQRLRHLQTAFTNFFAGRAKYPNFKQKHYGGSSEFTKSAFRWKDGQVYLAKCVEPLAIRWSRLLPKGVEPSTITVKLSPAGRWTVSLLVDVEIETLPESPNQVGLDQGITSLIALSTGEKISNPKAFQAKRRKLRKAQKALSRKQKGSKNRCKDRLKVAKIYAEISDARQDFIHKLTTNLVRENQTIAVEDLAVKNMMKNHKIARAISDASWGKLITQLEYKCEWYGRTFVKIDRWFPSYRRCRNYGNIVDKLPLNTRKLDFSKCRANHDRDINSAINILAAGLAVSVCEANVRPNRNTSVWQLVA

SEQ ID NO: 11788 - protein, 417 aa, Helicobacter sp.
MKFRIYPNAEQKVLMHKHFGCARVIYNYFLEYRQKQYALGIRENYFSMQKVLTTLKKQEAYSYLNECNSQSLQMALRQLTTAFDRFFSKLADYPRFKSKKYAKQSFCIPQHLEINLESNQIRLPKFKEPIKAKFHRFLSKNFAIKQGFISCVTDRYYFSVSYEDNKPIPKPKVIQKAVGLDMGLESLVIASNGVFYPYKKFFQNLQIKLIKAQRRLSKKLKGSHNSRKQIKKVAQIHASIRNSREDYLHKISNEITNQYDLVAVETLRVRNLVKNHKLAKGIANASWSRLVSLLEYKASWKGKTLLKIDQYFPSSQICSTCGSNTGKKPLHIRNFVCPCCKTRHHRDLNASINIRNYALGMLDDRHAIKVDKTRVGITRSYACGDSSNGVVTQYGLLLDTTSYGSLKQEAHPSLAGG

SEQ ID NO: 11789 - protein, 546 aa, unknown
  TnpB Polypeptide
MKHLVSNAQVNEKNEARLTLKCGLEFENAEGEELVKRAAEWYCKARIFLLSYALKNNKTRVQKIASLLKSEGFPSPPHPRLIDLLQRTITPAIKNMRRLRRRYPKTLRAWFDRVKKFAEEKGSDAAERLQPYVEDLLQLVKNLPINSPAWDTDAQEKWKELKKLWGKVRESDWKKGIVWKFQIPNPKKPPSTPAFRCADSSNIFVTADYRMSGKNARNSYDMKTDSEENLWVLVRLDDVDGDVKVRKDVWIKLCVDKSRYDLLRIGKITEIKILRNRDGRWEGRIVVKMNAGYNSPQVVVGVDVGASEHLIAAVGIPLDGSNNNFLLSVPASYFWKRVEQAERLWRRWQRLYTGRTSEKKKAPILPRRRKAYQILKRNRNWRREVTKHCIFHAVKKFVQLLPPNSVVVVENLKDIPPNVWKEDKDKRFRRWVYAFLLFTLKYKCQQRKIAVIAVSPHNTSQTCPRCGVVDPKSRGLWKDGELISRKHFCCTQCEFTHNADFVAAHNIAVLGAKALGITLPESWRALRGEVQYVIPYQNMPKVRKSW

SEQ ID NO: 11790 - protein, 341 aa, Aphanizomenon sp.
MVFKQVDKCFKSYQEAKKEYQLSPDKFLGEPKLPKYKHKLQGRNVLTFNNQAVSKKALKQGLISPSGLPISIKTKLTQIEEVRIIPKNNVYILEAVYEREETTIEVNNRIAAIDIGLNNLATVSSNCLDFQPFIVCGKAIKSCNQFYNKVKASLQSQLPNGSTALTVKNQKSSRKIEALTLKRNNKVDYYLHTASRFIINQLVSQNITHLIIGKNENWKQNINLGSKTNQNFTNIPHARFIQQLEYKAKLVGIKVQIVEESYTSKCSFLDFEPIKKHEQYLGKRVKRGLFRSKSGQPYSADLNGSLNILRKVVGESIFDRNSVERLVVSPVRCKPYQARNI

SEQ ID NO: 11791 - protein, 391 aa, unknown
  TnpB Polypeptide
MLISGLYTVFMLYNNSMKTLKFKLYQHKRNKYLKRSINAAGVIYNHCIALHKRYYRMWGKHLNCAKLQAHIAKIRKRKPFWQELGSQAVQDICQRISIAYQLFFKHHKKGVRPPNFKKVRKYKSFTLKQAGYKFLGGNRVKIGNRVYQFWKSREIEGTIKTVTIKRTPLGELFLAVVVVDNISDLEIKSATGKIAGFDFGLKTFLTCSDGSQIESPQFLKQSLSLIKRANRSHSKKVKGSANRERARKNLVRKHEDVANRRSDWFWKLAHELTDRFDVLCFETLNLKGMKKLWGRKVSDLAFREFTQILDWVATKKGKQVIYIDPWYPSSKTCSNCGHILEKLDLETRVWRCPSCQSINDRDENAAINICAVGASTVGLGDVRQSLTAIPA

SEQ ID NO: 11792 - protein, 548 aa, unknown
  TnpB Polypeptide
MSEVAIVAETTEKSKIAAETKVKGASSAFVRTSKILFKPNYTNQIKLDELSNFIDLCSDALNFYVVYFARYHQLDKLLFVHAKHKNNKIFDFGSNLTKLNNIFYDLVHDKEKNKDKFTLKLKFYPDGILENKDAESSTVNAAVDEEFRLKLSSRTLKSVKTQAMGIIRSWVQQILQSYQFGYFNRDKYKKTHRKNIRKYCDDKRKVVKNLISGAGKKDLKLNIDKFEFNSVNCQLLRAGIDDSFELSKNSEFCFDLLFSLHSMYTKEYSKRNYPNRKNKLHIPLRSHKHFNELKSGIVANTECKHEDILKSFLVSKDGIEVRFKFKSIAKESQFKSNLVGIDQGQRKLFSAVYVNEESNNKDIDCYLTETDLKEQLHSYAHAYNEVCDKIARRQKGSKGFKRAQAHRKNLINQAVNLLAQIFNFEDDVAEVRLEKLRRLGEGKKKSRKLQAFNYADLRHKIERKCIETNVELTETSNAYRSQRCSLCGFVHKKNRLNGGEEFKCLKCGYTADADINSAKNQVAKLPPIYVSRQNRNKYPNHTTGFYWL

SEQ ID NO: 11793 - protein, 456 aa, unknown
  TnpB Polypeptide
MSFLRTSKILFRPNCTNQVKLDELSDFIDLCNNALNFYIVRFIEFYKLDELLFVNAKHKNKKLFSKKHCSNLTKLNNIFYDLVYDKEKNIYKFSRKLKFYPDEIIIDYGSASTFDSTSLPFSLIALSGRTLKSVKTQAMGIIDSWLKEILKSYQFGYFNQDKYKKAHRKKLIKRCDEKCRIVKNLKKGKTKLNIDKFEFNSINCELLRCNVDEKFELSYDSQNSKESQESLDSNNNFDLLFNLNSMYSKEYIVRKNNKLSIPLRSHKHFNNLKNGIVSHVQCHLEQIVKSILVSKKGIEVRFKFKPLAKESQFKQRKLGIDQGQRKLFTAFSVGVDVAVDKNNVKNINDGLYLKEIDFNFKTTYNQICTKISKLEKGSKSFKRAQDHRKNIINQAVNILSKTKNFNFENDVAEICLEKIRHLGKGKKKSRKLQAFNYADLRYKLERKCIETNVKLT

SEQ ID NO: 11794 - protein, 370 aa, unknown
  TnpB Polypeptide
MFNINFNGNWIKFDFREQVNKLEYIQKKINNPNFVRFCKPKFVLLENENELKNANWYCILAIEFKKSLDNNVSNNHLIAGVDIGQVKPYSAVILSSHNKSSNNNSLFYQLNSKELTCSKETKQINIKLNRVKEHLSSIYQKINVYENIIKNNKNSQFTAHIMKKLEERNREKRELRRKRKELQKRKSYLAVRDLMKQLNFYNVKQVNIERLNWVENTGGSWDFSQQQDILIRKAMEHGIKVNKVYAANTSKENPFTTKSKQLLGEADRKTRRVSFKGKKYEIDRDVLGAINIALRKRSKNKIESVDVAKNTDTDKDKNDKDKNEIDVTTKNKQAKAKPRAKPKPKNTLIFNQRKLKNLIKQYINSTEVST

SEQ ID NO: 11795 - protein, 649 aa, unknown
  TnpB Polypeptide
MRTVKHQLKTLSVATEQKTKFLDVVYAYQFEKNYFSDQLLSHNNEVINLQSSYIQIRDKLVKNNYQSQYNLPARLWKMALKEAYDLHIRTHESQIALIKRNLNNNIYQYCNFELIKQVKANSQNQDKSEHCELSTFKICQSFESFLYFATNSLFYNFKTFSRFEAEFFSKKFKKARIYQRAKTILLNLLKRKAVKQEVLTKEEVKQLKQLLESNLNTLFNRLFEHYCHSLVKAIQKFRSFKPIQSQINPTITLDGDCYELYSKYDDEAKKNRWFVDIMSLESGKRIKGLELTGFHHAKQIMKHRKAANLTISFEPTGEVFAHFTFPVSLCKRKITKSKKHKNKNKIHKACFSNKTKLETLTTIGGDFGLTECFTFSDGWVAGRTQRNILKKIADNTKKDIEKIQSNSQKNYFGLEKNNPRNKRNHTKNCFNHNSRLKNINTNYRKRQKRYNRYLENYKHQIVSDIIHHFTTDNELGNYGNYASYKAYASENTDLTLVTLVFEDLTYTNLGRTKDDKRQINLIKGILTLLEEKTKLYNLPFKIKYVNPAYTSQSCPNCYYVDRKNRNSNENNFRCQHCGFTAINDERYKGLTETELSKPSEDDFVAACNIAQRLSVLPNSMKLHGRKIKELLMEKHRQVKGSCKMFTCEH

SEQ ID NO: 11796 - protein, 356 aa, unknown
  TnpB Polypeptide
LVKSIKNGKYQFKIDKFEFNSSNCNLLRRDSVAVVTDEETIGLFELSDKSPFDLLFVLSSMYKRKVKLLNNNKLTFPLRSHKHFNNLKNEIVANTKCELEEISNSFLVSKDGIEVRFKLSSIAKEAELKFNKVGIDQGQRKLFSAVASLLSDKENNLSKNNAFYSYLSETDLQVQLQSYAHSYKEACDKIARRQKGSKGFKRAQEHRKNLINQSVNILAKIFNFEDDVAEVRLEKLRRLGEGKKKSRKLQAFNYADLRYKLERKCQETNVNITETSNAYRSQRCSLCGFVHKKNRLNGGEEFACLKCGFALDADFNSAINQIAELPQLYHNRKLYSNSSTGFYWLSSGVAYLDTTA

SEQ ID NO: 11797 - protein, 377 aa, unknown
  TnpB Polypeptide
MSKYIYMAFKTKLDANNVQANYFARACGVARFAYNWGLEEWGKQYQEHLQDKTKPLPNEASLRKQLNAIKKTEFPFMLEVTKYAVQFGIQQLGKAFDNFFSNPQHFQYPKKRKKYVKDSFSIGNDQFQLNKKQNKIKIPKLGWVKMAETFNTNNTVKFGKFISATISRRADDWYLSICYRCVKTSTLNPNQDKVVGVDLGVSALATLSTGEKIVGAKPLKHLLTKLRKLSRNLSRKQKGSNNWRKAKTKLARLHLKISNIRKNCLHKLTSYLAKNFSHVVIEDLNVKGMMKNHKLARSIADMGFFEFKRQLIYKLELYNGQLTIVDRWFPSSKLCSTSGCDFKVDKMPLSVREWTCPQCKTKHDRDVNAAINLAKSR

SEQ ID NO: 11798 - protein, 669 aa, unknown
  TnpB Polypeptide
MRTVKHKLKPFGVGVDVGVATEQKTKFLDVVYAYQFEKNYFSDQLLNCSYKNEVINLQSSYIQIRDKLVKNNYQSKYHLPARLWKMALKEAYDLHIRTHEAQIALIKRNLNNNIYQYCNFELIESNKQNRNKLNQSEAEAEATPKLEIIKSFESFKTFEAFLYFATNSLFYNFKTFCQFEAEYFSKKFTKARIYQRAKIILLDLLKRGKVVEKEVLTKEEAKQLKQLLELGSDSNCSDTLFNRLFEHYCHNLVKAIQKFRSFKPIQSQINPTITLDDDCYDLYSKYDNEAKKNRWFLDIMSMESGKRIKGLELTGFHHAKQIMKHRKAANLTLSFDPTDLSCVYAHFIFPVKPTKNSQRKQKHKNKTKKANGHSNKVKLETLTTVGGDFGLTECFTFSDGWVAGRTQRNILKNIADNTKKDIERIQLNSQKNYFGLEKNNSTNKRNHKKNCFNHNSELKNINTNYRKRQKRYNRRLENYKHQIVSDIINHFTTDNEFGNYTSSNTDEDGINLTLVFEDLTYTNLGRTKDDKRQINLIKGVLTLLEEKIEAKTKPYNLPFKIKYVNPSYTSQSCPNCYYVDRKNRNSNQNNFRCQHCGFTANDDERYQELTGSEAIQRKDLPSEDDFIAACNIAERLSVLPNSMKLHRRKIKELLMEKHEQVKGSCKMFV

SEQ ID NO: 11799 - protein, 371 aa, Paenibacillus sp.
MITITAKIQLIVPQPAMESLQSTLNAYQQGLNWLSERVYETRELKQSALNALYYRKLRHQFGLKSQMAQSVMKTVIARYKAVQSNKHRWTLVCFKQPEYDLVWNRDYSLNDRLFSVNTLEGRMKISYIKKGMKKFFGGTWKFGTAKLIYRFNKWFLHIPMSKEKSPLNDDRIINVVGVDLGLNFLATTFDSKGKTRFFKGREVKHKRGKFKALRKQLQQCRTSSARHRLKQIGSRENRYVCDINHQITKALVEQYPDGTLFVLEDLSGVRKSTEKVHVRHRYVSVSWAFYQFRELLTYKAEMYGHMVVVVDPKYTSQTCPKCGHKDKRNRNKKAHAFTCCDCQYKSNDDRIGAMNLYRKGIEHISTVTAKV

SEQ ID NO: 11800 - protein, 448 aa, unknown
  TnpB Polypeptide
MARMMSAIAPMRAVSAWDAITGEAYSRHLPDVRSLLEFVRTESETIYQGDKERIESTVTTWKGAPQPAEFARQNDIKLVNRDELIANKVKAISRVEKLVQANLVSSVASHVSNPNPRKSTPTMSDRLILGAVDKQMITMSIIGKELTLLWKVWDKELLLEFEIPEYVIQKRKVLKWCLPTVTLSRKTGEVVFGFSYMEEPALARKDNGKRAGVDLGLVEPYSAVVLGARGGVEARYTASPWLRSVNAKRERILSDKARVLRKRDALLALGLSDRAGVLEQEARRLGGKASRLGTTVAQWGASELSRKLERHALHEVRVEYLKWATGARYGSKWNHGAQQEALEHALRRKGSRLKRVSPSGTSQYCSSCGGRITHRSSDRTVWCGSCKSRLDRDFNAALNIAKNKSYPADQRASGSDCTGGSVPPEVTGVIPGSVVRDRGSTHVAALVT

SEQ ID NO: 11801 - protein, 418 aa, unknown
  TnpB Polypeptide
MAKATSTIRSALHYQTQHAHCFAENAALFNRVVAFYFEVIQAHEGILSLKNKEALTALERLTHATEANPTPIMPLMRLAPDIPAMFRRAAINAALGSARSFFSSLSRWRTRKERYEAKPARRGKKKPFTERPPVPPRTWNKSAPFYAGQWKDRGEHSITLKVWTGSCWSWIKMRTLARDLPKGFELGSPQLVRHGKQWWLHTSIEKTFSTPPKIAEQVTSAQTKICAVDLNLGEQIAVCTVQTVEGTILATRFIGGGREIAGFRKCQLGRIARNRSQTGIIAENEQDNAALWASIRHRDEHMAHLVSMRIVQFAAEHGASMLIFEHLGNLQPEKGKYSRRGNTKRAYWMKGRIFRYAKYKAWNQKIITSRANPRNTSRECHRCHSLVVRYNADQAIEGYTAGALAGVVPTVPDARSCR

SEQ ID NO: 11802 - protein, 450 aa, unknown
  TnpB Polypeptide
VRSRESDENEVARMSEMRMVARGVVWFEDPEPIHRLMRSQCSAMRSAYQAIHKHGLKGNDVKVHIKQNYMDDLNQRYISDAVSRAKSIRQKGAIFGGKKAWDDLRSGRLSKDDWVALRNDQLYSRGDLSKTGNPNLRIVGEELWVNDPSKYGSWVRGRLFIPEKFGEELDCYDVRLTSRSDGRFDVLVTWEAEIPQIEVVPGAIGIDINPSGCAVVEVDGEGNLMSHTFLSQQRMQFASKEKRRSDFELMAVEIVRRAEESQKSVVIEDLKFRDKKGSKKFNRMRHNFLFAKITEAVERRAIRRGVPVIRITPAFTSDLGVLKYQQMYSINDHCSAALVIARRGLGITEKQTFDVFRESKPKGKGFRLNLEGRGRSLELSPKAWEWLRNKFLRPRNPSSQDRDPSLLGVLHPRDAGGSSGKRPKSRCEPRGEHVTNNWSVTSVAFATADS

SEQ ID NO: 11803 - protein, 385 aa, Meiothermus sp.
MQTLTLRCTLKPTPEQAAALEATVRLFAEGCNHALRVAKEHGEFRRFRLHRLVYRDLRSMGLSANLAVQAIARVGRKKGSRARFYQPTSCTFDQRTLSLRGEAVSLTTTAGRLVIPMKLGNYQRGMLVRARSVQGGMLTKGPKGKWYIHLSLRMATPEPPGGGGRVVGADLGQNALATLSGGVQFSGGLLKGVRIRYRNKRAEVRSRLDTQRTRGIKRLWERLSGREARFVKHTLHTLARRIVDSLNPGDTLAIEDLNGLQGRTAKRGREARHLHHLWPYGKLRLLLEYKAAMRGVRVVAVNPKHTSQECPRCGHTARENRKSQALFRCQGCGFQHNADWVAAHNIAQRAGSMGMGRCKPARILRVSSLHRLSSESPNQSALALG

SEQ ID NO: 11804 - protein, 265 aa, unknown
  TnpB Polypeptide
VKKYRSYTLKQAGYKIENNIIWLNGYKFKFWLSRAIEGKIKTITIKRDNVGDFYICVAIEKEYQKFNITSGKIVGIDFGLKTFLTLSDGKQINSPRYYLNYLKELRKLQKKLSKKVKSSNNYNQAKRKVAKLYQKVVNSRKDFFHKLVNQLAENYQYIAIEDLNIKAMQKLWGRKISDYGFSEFVSILEYKTNLIKIDRYYPSTKTCNICGYINHNITLKNREWICPECKTKHDRDINASINICKVGASTCGIGEVRPTIVGISV

SEQ ID NO: 11805 - protein, 368 aa, Herbidospora sp.
MAHVVKRAYKYRFYPTPGQAEELAKTFGCVRLVYNKALEERIRVREEEGRSVSYSQSSAALTEWKRTGDLAFLNEVSCVPLQQALRHLQAAFAHFFAKRARHPVFKSRKRSRASAEYTRSAFRWRDGRLTLAKMDAPLDIVWSRPLPDGVEPSTVTVSRDAAGRWFVCILVEDEIAPPPPTNVTVGVDLGITTLATLSTGEKIDNPRHEKADRRRLAKAQRALARKAKGSANRAKARLVVARVHARIADRRRDHLHKVTTRLVRENQTIAVEDLKVANMLKNRSLARAVADAGWREFRSMLSYKAAWYGRELLVIDRWFPSSKRCSACGAVTESLPLGVREWVCACGAAHDRDVNAAANILAAGLAES

SEQ ID NO: 11806 - protein, 402 aa, Escherichia sp.
VKRLQAFKFQLRPGGQQECEMRRFAGACRFVFNRALARQNENHEAGNKYIPYGKMASWLVEWKNATETQWLKDSPSQPLQQSLKDLERAYKNFFRKRAAFPRFKKRGQNDAFRYPQGVKLDQENSRIFLPKLGWMRYRNSRQVTGVVKNVTVSQSCGKWYISIQTESEVSTPVHPSASMIGLDAGVAKLATLSDGTVFEPVNSFQKNQKTLARLQRQLSRKVKFSNNWQKQKRKIQRLHSRIAYIRRDYLHKVTTTVSKNHAMIVIEDLKVSNMSKSAAGTVSQPGRNVRAKSGLNRSILDQGWYEMRRQLEYKQLWSGGQVLAVPPAYTSQRCACCGHTAKENRLSQSQFRCQVCGYTANADVNGARNILAAGHAVLACGEMVQSGRPLKQEPTEMIQATA

SEQ ID NO: 11807 - protein, 369 aa, unknown
  TnpB Polypeptide
MLKAYKYRLYPNKQQEEQIQKTFGCCRFVYNQTLDYRKKLYETDKKSMSKIDCNNYVNRVLKKEYIWLKEVDKFALTNSVYNMDNAYQKFFKENTGYPKFKSKRDNRKSYYTNSTNNNIEVSFDNNKIKLPKLKWIKAKVHREFTGKIKSATISQIPSGKYFVSVLVETEHISIPSTGCMIGIDLGITDLLITSDGDKFDNIRTTKKYEDKLAKEQRKLSHKQKGSENWNKQRIKVAKIHEKIRNTRIDNLHKISHKLISDNQVIVSEDLAVSNMVKNKNLAKAISDCGWYELTRQLQYKSDWNNRQYIKIGRFVPSSQICSNCGYQNKDTKDLAVRKWNCPTCGEKHDRDINAAKNILNEGLRLLNVA

SEQ ID NO: 11808 - protein, 370 aa, unknown
  TnpB Polypeptide
MILAKKVRLNPTEEQERQLWKSVGTARWVYNWTLSKQEESYKKEGKFISDGELRKELTQLKKTEEYSWLQDVSNNVAKQAVKDACDAYKKFFKKLANKPRFKSRKRSKPSFYNDNNKLKVKKMLVLIEKVGWVKTSEQLPINTKYVNPRVSFDGKYWYLSVGIQQKHVHNDLTDNIIGIDVGVKELAVCSNGMVFKNINKTKTVKKIEKRLRRLQRKVSRKYEMNKEGNRFVKTCNIIKTEKKIRLLHRRLMNIRTNHIHQTTNAIVKTKPSTVVMEKLNIKGMMKNKHLSKAIQNQKLYEFKRQMKYKCEFNGIKFIEADKWYPSSKTCSKCGQIKKDLKLSERIFRCDCGLEIDRDLNASINLAKLAN

SEQ ID NO: 11809 - protein, 281 aa, unknown
  TnpB Polypeptide
  misc_feature (271)..(274): Xaa can be any naturally occurring amino acid
MLKAYKFRLYPNKEQQEYFAKCFGCTRFIYNQMLADKIEYYKKTGEMLNNTPAQYKKEYPWLKEVDSLALANAQMNLNKAYRNFFRDKSVGFPKFKSKKKNRYSYTTNNQNGTIYIEDKYIKLPKLKSMIKIIQHRQFDGEIKSCTVSKTPTNKYYISILVDEDIKQLLKSNNKVGIDLGITDFAITSDGEVFENPKWLRKSEKRLTKLQRDLSRKKKSSNNRNKARLKVAKLHEKIANQRKDFLHKLSSKIINENQVIVLEDLKVCNMLXXXXGLNSGYN

SEQ ID NO: 11810 - protein, 203 aa, unknown
  TnpB Polypeptide
  misc_feature (154)..(187): Xaa can be any naturally occurring amino acid
MLIAHRIALDPNNVQATYFARAAGTARFAYNWALAEWKRQYEAWKLDNRQTKPTQAALRRQLNAIKREQFPWMLEVTKNAPQMAIIQLGQAFQNFFAGRAKYPQPRKKGVHDRFTLTNDQFSIDGCRIRIPNLGWVRMRESLRFTGKIMSATVXXXXXXXXXXXXXXXXXXXXXXXXXXXXXXXXXXVTLSIIGKDKIVSYII

SEQ ID NO: 11811 - protein, 328 aa, unknown
  TnpB Polypeptide
  misc_feature (279)..(312): Xaa can be any naturally occurring amino acid
MLRATKVRIYPTPEQAEFLTAQFGAVRFAYNKALHIKTHAYRLHGINLSPKKDLKPLLAVAKKSRKYHWLKLYDSIALQQAVINLHTAFDRFFDPKVKAHYPKFKRRHGKQSSYHCVGIKVLDGAIKLPKMQPIKAKLHREISGTVKSITVTLSATGKYYASILVDDGLEAPQPIHSVEKVVGIDLGIAHFAIESRGKKKTNPRFLKRAARNLRRKQRQLSRKKKGSANRAKARLIVAKAHEKVTNARSDFQHKYSRTLVDENQAVIVETLKSANMMKXXXXXXXXXXXXXXXXXXXXXXXXXXXXXXXXXXPIHIINSIIYLFNANY

SEQ ID NO: 11812 - protein, 366 aa, unknown
  TnpB Polypeptide
EMQQAVLNKALYHQLRSRYGLKAQMAQSVIRTTTARYRTVKTQLKQHPYRYNSGKQDKYGNDIWKTAPRTLEWLWHPINFKRPQLDLQRNRDWSIKADHVMSINTVNGRIKAPFVCQGFDQYLDGTWQFGMAKILYTGNKWYMHISATKKLPDYAKEQSEHVVGIDRGLRFIATVYDEQGKTKFFSGKEVIRKRRKFKRLRQQLQSKGTKSAKRRLKKIGRRENRWMADVNHQLSKTLVERYGANTLFVLENLVNVRSATEKVAKSRRYEQVSWAFFQLGQFLTYKAHLTSSEVVQVSAEYTSQRCPKCGRIWKNNRHHDTHLYVCDKCGYCSNDDRIGAMNIQLLGTRYVSGNKHPAFNKLTTGE

SEQ ID NO: 11813 - protein, 425 aa, unknown
  TnpB Polypeptide
  misc_feature (391)..(424): Xaa can be any naturally occurring amino acid
LESDGKEYIYRIVEKLGIACNSQAFGSDILRSSYIRELLVYLNRVYQISKGENFELDVTYNDKVTKIIHYINQNLDEDLSLERLSSKFYLSKYHLLREFKKNTGYTIHKYITQKRLILAKELLKDCKQVSEVCDKCGFGDYSNFIRAFKKEFGEVKLPFPERLNNRQVKEIRVFPKHGCKFFEIEFVYVQEEENLNLNPDNALAIDLGLDNLATCVTNTGASFIVDGKKLKSINQWYNKENARLQSIKDKQGIKGITNLQYANTVNRNNRVNYYMNKTARIIVNYCIKNDIGSIIVGYNLDWKRDINIGKSNNQKFTQIPHGNLRLKIQSLCERYGINYIEQEESYTSKADFFANDILPVFNADNPQEYSFSGKRISRGQYKTCQGTVINXXXXXXXXXXXXXXXXXXXXXXXXXXXXXXXXXXG

SEQ ID NO: 11814 - protein, 279 aa, unknown
  TnpB Polypeptide
VSIWTLEGRIKLRYSKPAYFPAVTTVKQTDLVYRDGAFWLYATVETPDTEPAEPTEYLGVDLGVVNIATTSDGEAFSSAATEKVRQRYGRLRGALQKTGTRSAKRKLRKIAGREHRFKTDTNHVISKQIVCAAEGTKRGIALEDLNGILLRTTVRHDQRERHHKWAFRQLRSFIEYKAQRAGVTVQVIDGAYTSQQCSVCGFVHPDNRLTQTAFRCLACGHTENADLNASLETSLPGPPSTGLLRSAPPTPGERWNRKPTKSMVPPTASCPRLKSGVVD

SEQ ID NO: 11815 - protein, 368 aa, unknown
  TnpB Polypeptide
MLKAYKYRLYPNKKQEELIQKTFGCCRFVYNNTLAYRKELYEIQKKSMSKIDCNNYVNQVLKKEYLWLKEVDKFALTNSVHNMDNAYQKFFKEKAGFPKFKSKKNNKKSYTTNFTNNNIDVDFDNSTIKLPKIKWVKCKLHRKFEGKIKSATISQVSSGKYFVSVLVETDHIPYETTGDIVGIDLGITDLLVTSDGKKFDNVKATKTYENKLAKEQRKLSKKQLGSSNWHKQRIKVARIHEKIRNVRIDNLHKISHKLINENQVIVSEDLSVSNMVKNHNLAKAISDCGWYELTRQLTYKAEWNKRKYIKIDKFYASSQTCSECGYVNGAVKDLSIREWKCPSCKTSHDRDVNAAKNILNEGIKLLVP

SEQ ID NO: 11816 - protein, 289 aa, unknown
  TnpB Polypeptide
AVEDGYLRLSNGWKKPPLKIKLPARLNGLEIKQVQLVWHRNGYWLHIAVVKPALEKVQGDAVAAVDPGEVHALTLTDGQEALVISGRHLRSLHRLRNKTLRKFQKAISRTQKDSNRRKKLLAAKYRFLNWIEAQISHTEHAITKMTADWCLERGVKKVCIGNPQGVREQDCGRYHNQRMGQWSFGRLRDLLEYKLKRYGITLEKIEERGTSGTCPLCGKYTKQTGRIYRCGNKECGFGGIHRDVIGATGILDIAVNNRFTSGRKLPETVSYVRPAVLTPVPGRKAKKAA

SEQ ID NO: 11817 - protein, 380 aa, unknown
  TnpB Polypeptide
MYKNYMYRLYPSRSQKKRLEAILETCRRFYNDLLAERRDAWTNERRSVSKTEQLRRVKELKASNPYAKDIHSHVLQVVVADLDKAFQAFFRRVKRGESPGYPRFKGKNRFSSFGLKEYGNGFKIDGRRLRLYGVGRVAVRWHRPLPSTPKTVRIIHKADGWYAMFTCEVEPQALPPTGKEIGVDVGVASLVTTSDGEKIANPKWYRAGQKKLRRLQRSLSRKQPSGKNREKARQAVARHHLHVSRQRQDALNKIVYKLIQEYDFIAVEDLNIQGMVKNRRLSKSIMDAGWGYFKERLFSKAAEAGRIVVAVNPANTSQTCSSCGQLFPEKISLSVRTVRCSCGLELDRDVNAAINILRLGRSRWASTPAAAGVAQEAAGL

SEQ ID NO: 11818 - protein, 393 aa, unknown
  TnpB Polypeptide
METILTSHKMRFYPNKEQIQIIETTFGATRKMFNSLHAQFLERSKMSDQEKVNHAYKNYTALKNTWNNDNDWLKNVAGQALANVSLDYNKAWANYKRNKKHFRIPTFKSKHKAKKTYSLCKNNTKDDIYVSKDNVKLLKVPKLGFIKLSQQIRYEDYNIKKVTISKSSTNKYYISILMEVSKESLHYEGLKTKYADEVGLDLGLIDYVVDSNGKKIANPKHLKKYEAKLAKEQKKLSRKYEQAKKDGRLLSESNNYQKQKLKVAKIHEKIRNIRHDFLHKLTNAITNESQVIVAESLNVKGMVKNEKLAKHISDASWDTFIQYLEYKSERKGRTFIQIDKFFPSSKMCSNCGVVHELTNDLSVRKWQCSSCNSVHDRDINAAINILREGLSLL

SEQ ID NO: 11819 - protein, 360 aa, unknown
  TnpB Polypeptide
MKLTLKVKLLPTQEQAGLLLQTMKKANAVCNAISDIAWENKVFNQFKIHNLCYHGFKSTFNLSAQMLVRCISKVADAYKLDKKRKRSFRPIGAITYDSRILSYKDFTVSIWAIGGRLKIPFVCHNPKYIPYIKGEADLVYNKGKFYLFQTVDISDGEIKDVEEFIGVDFGLTDIVVTSDGIKHTADTLNQYREQRQKVRSSIQSKGTKGAKKLLKRLKGRERTHATIINHTIAKSIVLSAKRQGKGVAIEDLTNIRFTSKRRNKKFRTKLGRWSFAQLRSFIAYKSALNGVELVVVEPAYTSQTCSCCHHIGTRKNKSFKCQNCGADMDADINAAINIASLGASINKPEKPGMYCSLHTA

SEQ ID NO: 11820 - protein, 386 aa, unknown
  TnpB Polypeptide
MTKMNKSYKFRLYPNKGQTEKIIKTFGCNRFIFNIMLSDKKKYYEETGKMLNNTPAQYKEEYPWLKQAESTALQSANRNLADAFQRFFKGQNKFPHFKSRKYAQSYNSKCVNHNIKVVDDHHIKLPKLGGVYFRSGRLPQGKIKNVTVRLTAANQYYITVLAECENQTLPKTGKYVGGDLGLKSLLNLSNGYKEPIHHFENRYRKKLRHWEKLRSRRYLLAKQAIAWDYHNKVLVPRQLDDFKNYQKARVMVAKYRQKIAYQRLDQLQKFTTKLVRQYDLIVLEKLNIKGMLKNHKLARAIANASWSKLVSILQYKCDWYGKKLIQVNPSYTSQICINCGKNNHRLGLDKSEWLAVREWNCPNCGSHLDRDINAAKVILSKGLAIQ

SEQ ID NO: 11821 - protein, 352 aa, unknown
  TnpB Polypeptide
LHRSISTTAWIWNHCISLQKRYYSLYGGYINLNKLQKHIAKLRNKNPQWKELNSQSVQEICERVDEAYRRFFKGLAKRPPKFKKARNFNSFVLKQSGWKIEDNILTIQKRRYKFSKSRDYENIKRITVKRNKLGEIFFVLCCDLKPIKYERVGNSTIGMDFGLKTYLTLSNGQEIQSPQFFKQHLNDIKKANKNFSTKKKGSKNKKKALKVLQRVHNDISNRRSDFHWKLAHELCKHNSFIAIEDLNIEAMKRLWGGKVSDLSFSSFVEKLKQVAVKYNTVVHEIDRWFPSSKTCTCGVINKELKLSDREWACTSCGEVHQRDILAANNILRQGIVEYRTKYKTSVLEAVLD

SEQ ID NO: 11822 - protein, 420 aa, Firmicutes sp.
MIQSIKIMLIPNNKQKTKMLDTSDAARYAYNWTVALQIKTFNETGKYLTDSECRKLFTQHKRQEEWLYNTSNDATKQAIKDCCNAFWRFTEKKKQPNYVPYSNKKILRSTKKKFKLTRYDMNGHPKFKKRSKAQPKFYVDTEKIIFTETHVKLEKIAENKKQNKAKANWIKLAETNKIPLNASYLNPRCTFDGINWWISVSIEVNIKIYPTSNSGIGIDLGIKNLAIDSNNNITPNINNKHEIRRLKRKWRRLQRSISRKYEMNKEDESYIKTSNIIKSEHELLKISQRLTGIRYNHLHQATNTIVKTKPSYIVTEDLNVQGMMKNKHLAKAVQEQCFFEFSRQLEYKSNWNGIEYIKAPRFFPSSKICSNCGNLKKNLKLSERTYKCEECGLVIDRDYNAAINLKHYGSVYRTGRNKIA

SEQ ID NO: 11823 - protein, 385 aa, Streptomyces sp.
VRIVVQVKLLPTPEEASALERTLHAANEAANWLSAEAYGQGEQSRKALQSFAYSDLKERGLSAQPALHVLRKVADAYTALRANIRAGNLGTPGSKRRRKAESQPLVFRLDAAQPYDDRCLSWQLDEQTISIWTVSGRMRGVRYVCSERSRRMLAGYRKGESDLVHRNGAWFLIATCEVSEAAQIDPVDFLGVDLGIVNIATTSDGKIHAGRRLNRYRRRQLALRAKLQKKGTKSAKRVLKRQRRKESRKATEANHIISKRIVTVAERTGRGIALEDLKGIRERARLRKPQRVALHSWAFAQLGQFVEYKARRAGIPVLFVDPAYTSRRCAECGHADKANRVSQARFVCRSCGVVAHADRNASRNIRARARELWRRGAESHAPAPA

SEQ ID NO: 11824 - protein, 548 aa, Streptomyces sp.
VTETKKQLRVIAPAFVAPGPSGVAIRDRLKRLAPEDEKVLRLVGAYLGTLASRDLRARCVDALEHSTDTWAARKRDLTALSSSRWAGSITKRTHDQWALARRGQLAHVGSLEAGIRTIAHRLSLPVGEKGTKGGPGGYRTAHEWFHKARRLHVLKDRLNQVRNDREAGVVHVVRGGKRLLNTRHHLRAAELTEAQWRERWEAERWFLQADGESGKRFGNETIRITPEGEVSIKLPAPLAEHANARHGRYVLASKVRFPHRGAEWADRVEANRAVAYRIHLDVERGRWYLTASWSCPVTKTIPIQSALAGGVIGVDTNADHLAAWRLDGHGNPIGQPRRFSYDLSGSADHRDAQVRHALSRLLNWTKTCGVKAIAVEDLDFQAEKTREKHGRKRRFRQLISGMPTGKLRTRLTSMADATGIAIIGVDPAYTSKWGAQHWQRPLTSKNRTTTRHDAASIAIGRRAQGHPIRRRTAPPRIHQSDGCGHRTVQAGPRAPGREETRRPVADRGQEPHARTGTKQGKRATSTSKTGRDARSARQWVQDSLLLTD

SEQ ID NO: 11825 - protein, 279 aa, Campylobacter sp.
MRTYFRVSPLQHKGFFLPISRLPLIPSFISCVAGNYYVSLSYEDNKSIPKSVEIKSAVGLDMGLENLLIRSDKIVYENKKFLQNKEAKLIKLQKAVSKKKKGSNNRAKAIKKLAIAHHRVVLARDDYLHKITNEITNDYDFIAIENLNVKGLIRNKYLSKSIANVSWHKLISMLTYKAELKGKTLMQIDKFFPSSQICSNCGVNTGKKALNIRAFTCPNCNTYHNRDINASINIRNYALGMLDDRSRVKIDKSRVGITQSYACGDSSCGTSKYGKVFAS

SEQ ID NO: 11826 - protein, 393 aa, Proteobacteria sp.
MELTLQLKLLPTAEQTISLRAVMMRFNEACNWLAAQAFAQQCTNKLTLQRLYYHELRTLFHLPSQMVVRCLARVAGTYRRDKTICPTFRPDAAMPYDQRIMRFDGLDHVSLTTLQGRVLVAFLIGPYHRQRFDAYAPRQCHLVVREDGQWFLLVVVQVPDGTPIPPTDFLGVDLGVVHLATTSDGTTHSGGAMEACRTRYQTYRRRLQRAAHVAQMDGKRPKNIRRALKRTARREARFRKDTNHCISKKLVAAATGNGHGIALEDLTYIRTRTRFRKPQRATMSGWAFAQLRFFVEYKAALAGIPVVLIDPRNTSRACSACGHIAKANRPSQARFSCQQCGYTTHADFNAAQNIRSRARVNAPLVAGASGAMPLGMGWQYASDKLRHFSASSH

SEQ ID NO: 11827 - protein, 504 aa, unknown
  TnpB Polypeptide
VSVCIIIIPIFLFHSRRILLYIQIYVWYDCIKGNQYFQDLRKEYSRMSYRVIQCQIAQDNLIYNYCDSNARKAKLLYNAALFRIRQIFTGWDKDSRTDNEKEVFAEVGLLEQAYPSIKVKRVISYCHLEKLMRVTHNPDFFAGLPSQSAQAVVRHAVTDFSNWLKSLKAYNNDPSKFLGKPQMPHYQKSDVITFGITNQDAVLYPAGHGVDLKLPYIKERLHLSNIENDSVLKETKIKPYYGRYVLSLTLECKDPVVNNADMPNICAIDFGVSNFAAVVCNDGSSMLYKGGAVLADCQWFHKQRAEAVGIITKGHEHMHASSKYLSSLSRHHADFIKDQCHKISRAIVNYCIEHRAGTLVLGENKNWKQNSDMDSQSNQNFVSMPIGLLRQMIIYKAAGAGIKIIMQEESYTSQADITAMDYIPTYGIDDGKAIFSGRRAKRFYHCSNGMTINADCNGAANIMRKAIPDAWNGITDFSFLASPEVSGFHELNPLCISVKGIAAA

SEQ ID NO: 11828 - protein, 458 aa, Calothrix sp.
MALRRATFRLYPTKQVNEKLCYHRKLHKDLYNAAVSNRITSYKKFGKSVTYFEQQNCLPDFKEVWTEYKQINSQALQATLKRVDYAFQRFLKGLGAYPKFKSIRHYSGWTYPSFTGWKVHSTGDNGYLELAKIGQIQIRGKARLWGHPKALDIVNRNGKWYASIILDVDDTLLKNSRPSEGGTVAIDLGCNDAIAWTNGTDGGLIPAPRFFRKAEQRNKQLGKAKRRKRSPNFKNKTKASYELGRDGNRHRPVSASRRWKKVQSLVSNLNRKVANQRQNFVHQETTRIISSNSTVVTEKLEVKNMSAKAKKGKRKKQKSGLNKSILDVGMGMIKDALKAKLSDIGGLFVEVPTKKVKPSQTCPKCGHQEKKDLGQRTHACNNCGYTQQRDIASAEVMLLWHLNNLQALGTSVSDVDDCSSTSSTGKRKQAGSMKQLGQVKRQKSTPTGLDVDTTPSTK

SEQ ID NO: 11829 - protein, 267 aa, unknown
  TnpB Polypeptide
MYFVRNNPKDCLCERHRIKIPSLGWVRIKEKGYIPTTKDGYVIKSGHVSIKADRYYVSVLIEIPDRRTANNSSKGIGIDLGLKDFAIVSNGKTYKNINKSAKLRKLEKKLIREQRSLSRKYENLKKGESTQKRNIQKQRLKIQKLHHRIDNIRTDYINKTIAEIVKTKPSYITIEDLNVSGMMKNRHLSKAVASQKFYEFKTKLLAKCKENGIELRIVDRWFPSSKTCHCCKSIKKDLKLSDRLFRCDCGYIEDRDFNAALNLRDAI

SEQ ID NO: 11830 - protein, 422 aa, unknown
  TnpB Polypeptide
MIVKKGIEIKLYPNKAQKVFFAKTFGCCRFVYNQCLKLKSYLYEETYMSFDPKLKSFKEEWEWLTEVDSQALANAYMDMKQAYKNFFEGRTEYPKYKSKHDKQSYRNAMCYKELDKLIVGHTIVLPKVGPVKCRYGKTFEHENIKKIYNVTVKKSKKGDYYCSICCDVEVEELASTGKSAGVDVGIKSTVVLSDGTEIKNPHFGKKSERRIKILQKRHSKKAKGGKNREKARIKLAAAHEKLCNRRNNFLHQVSRMIVNNYDVICLETLNIKGMQKNHNLAAALQEQALGTLIRMITYKAAWYGRTVVKIGRFFPSSKMCNHCGGIYRELKLSERVWVCPHCGAVILRDPNAACNILEEGIRILNNEGTPRTGETAVLLPLRLADDPPVDDRPLDLKSSGRLKQETSLAPVVHETHRSLAGG

SEQ ID NO: 11831 - protein, 430 aa, unknown
  TnpB Polypeptide
MTAVIQAYRFALDPTPRQRRALASHTGAARYAYNWGLELVKTRVDQRRTDPTVIVPWSLPALRREWNRSKQHVAPWWAENSKEAYASGLDGLARALKNWADSRNGRRKGRPMGFPGFKKKGRARDACRFTTGQIKVLGDRKHIQLPRIGVLKTHESTRKLARRLEQGTARIMSATITRTADRWHVSFTVEVQRHFPTKNGSTTVVGVDVGIRHLAVLSTGAVIANPNAYQHSLRKLRRLNRELHRRTQGSKRRRQTRRRLARVHMRVANVRCDALHKLTTDLATNHGTVVVEHLNLAGMTRNRRLARALTDAGMSELRRQLVYKTTWYGSKLVVADPFYPSSKTCSACGWVRAKLSLAERTFHCEVCGLVLDRDLNAARNLAKLVHRVAWSGRETPNACRGDVRPGLTGQTPKKQEPCAAAASKMGTAGP

SEQ ID NO: 11832 - protein, 222 aa, Moorea sp.
MVIKPITNSIPKVRGTVTVSKNKSGQYFAAILFEDGKDKPSSNAEGKAIGIDLGINHFAITSDGSKFENPKWLSKHERNLKIKQQRLSRRKQGSSNKNKGRKTVAKVHNKIANLGWGQFCTMLKYKAELEGKIYQEVDRFFPGSKTCNVCLNQVDSLPLEIRYWDCYSCGTNNIDRDVNAAKNIRNEGMRILTCGMRDKAYRQTVRRSSRVRLKSTIGLVSG

SEQ ID NO: 11833 - protein, 405 aa, Planktothrix sp.
MRQKTMLLYEFKLKGKAKQYRLIDEAIRTGLFIRNKCIRYWLDNSKVGKYELSAYCKILASEFSFAKKLNSMARQASADRAWAAISRFHDNCKKKIAGKKEFPKFKKRCHSVEYKTTGWKLSENRKYLILTDGFEIGQIKLIGTYDLHGYQLSDIKRIRLVRRADGYYAQFCIAYNREIKTEPTKRMIGLDVGLTHFYTDSEGNHVDNPRYLHRSEKALKRLQRRVSRKFRTGQKPSKNYIKAKQKLAKKHLKLSRQRKDWACKLAQCVIQSNDLIAYEDLQVRNMARNHKLGQSISDVTWYQFRVWLEYFGRVYGKITVAVPPEYTSVNCSNCGNEVKKTLSTRTHKCSCGLVLCRDTNAAINILMEALSTVGHTGTRAKDALNAWGELSLYLDSVMSLDKDSR

SEQ ID NO: 11834 - protein, 384 aa, unknown
  TnpB Polypeptide
MKVVATAKVKLAEVSPVLDDTMKVYAQAVQFCVDIAWRQKIKSKAQLQQRCYYEVKERFGLQAQLVINAITQAVEMVKSAHSKPEVSKELSIRFNFPRCASIAHDWTFLSLSTIEGRVKFQITLPEVFEHYLEWKLVESTLIKDYKGRFFFCFTFSKEVAIQPTRSNHCTILGVDLGVNSLAVTSDGDFFGSVKQQRVRWERLVAELQSKGTRAATRKLQRASGTWKRFMTWVNHNVSKRIVEKLSEGDVLVMEDLTYIRQTASYNRWVHKWAFRELQQFLEYKATLKSVRVAYVRPHYTSKECNRCHCRNTSRHRGFFECHTCGHTLNSDLNGARNIARRYRRITGLGCGKQAHNLACDEVKTLSRVGRGLRPSTAKNLTVLA

SEQ ID NO: 11835 - protein, 487 aa, unknown
  TnpB Polypeptide
MSQKVRIDGVRHDGASVFLGIDRCGNPCWTRNPEQIMVWLCDGWRSRFNQRREQRPRFSPVKDNVTGEVIDWAEEPLGGPNVSPLMSDSQARTSCLWMTGIPSAILASTNRIENAEWFAGLKRKKTSGGRVPGFKSRRRGLGFVCWYTPSKGCHNAVFHKTGRKSGVVVITGMNPSRWCKPGDKARWRIIIHVRTSRPIRPYTSIHVDWTHRSLVFVNTPSPLPRSGDGAIGLDRGCVHTLTSSDGTFMDMPKPSKAELKRLKYLQRRMARQDRVNEARGGRTAKFASKRRQRTLTEFNALQGRIVRRRNDWIEKTTTRLAQENVLVAMEDLDIQAMTRKPKPKPDPAKPGQYLHNGAKAKAGLDRSILNNCWGRISKRLQDKMGANGGKLVIVPAAYTSQTCHKCGHVAKRNRESQAVFKCVECGYMANADTNAAINILDRALSETGGGTASDVEDPQERSGEASTPSTQAGSSFGVRAVKGIPRL

SEQ ID NO: 11836 - protein, 452 aa, unknown
  TnpB Polypeptide
MSQKVRIDGVKHAGASVFLGVDHCGNPCWTRNPERIMVWLCDGWRTRFNQRREQRQHNVPIKDENGEIVDWIKEPLGGPDVSELLSDREARLQCSWMAAVPSSILATSNRLEGTEWSAGLKRKKTAGGRVPGFKSRHRGLGFVSWYHPGGDSYNAVFQRTGRKSGVVVITGMNPKRWVKPGEKSHWRIIIHVRVSQPIRPYTSIHVDWTHRTLVFVNMPLPLPRTGNSEVGIDRGCVHTLASSDGTFMDMPKPSKVESKRLKYLQRKMTRQDRVNEARGGRTAKFASKRRQRTLDEFNVLQGRIVRRRNDWIEKTTTRLARENGFVAMEDLDVQAMTRRPKPKPDPAKPGQYLHNGARAKAGLNRSILSNNWSRLMKRLDDKMDANGGNLVIVPAAYTSQTCHRCGHIAKENRDSQAAFKCVECGYEANADVNAAMNILDRALVRKTGGGIA

SEQ ID NO: 11837 - protein, 345 aa, unknown
  TnpB Polypeptide
VRLYHNDLSAALTALKREEGTSWLREVSSVPLQQSLRHLDKAFTNFFEKRADYPTYKKKHKKQSATYAATAFVWTGKTLTLAKQKEPLAIAWSRPLPKGAIPSSVNVSRDKAGRYFVSILVEEEIPTLPLIDKSIGIDLGLKSFIITSDAETIANPKYYARDEKKLARLQRKHAKKQKGSKNKDKARKKVARLHARIADTRRDFQHQISTRLIRENQTICLETLAVKNMLKNHCLAKAIADVGWSEFVRQLEYKAKWYGRTIVKIDRWYPSSKTCHVCGWVKQDLTLEDRVYVCEDCGNVTDRDYNAACNILAAGLVASACGGSVRPVRVKARRAASNEAGRFRP

SEQ ID NO: 11838 - protein, 438 aa, Mycobacterium sp.
MARLKVPEGWCVQAFRFTLNPTQTQAASLARHFGARRKAFNWTVTALKADIKAWRADGTESAKPSLRVLRKRWNTVKDQVCVNAQTGQVWWPECSKEAYADGIAGAVDAYWNWQSCRAGKRAGKTVGVPRFKKKGRDADRVCFTTGAMRVEPDRRHLTLPVIGTIRTYENTRRVERLIAKGRARVLAITVRRNGTRLDASVRVLVQRPQQRRVALPDSRVGVDVGVRRLATVADAEGTVLEQVPNPRPLDAALRGLRRVSRARLRCTKGSRRYCERTTELSRLHRRVNDVRTHHLHVLTTRLAKTHGRIVVEGLDAAGMLRQKGLPGARARRRALSDAALATPRRHLSYKTGWYGSSLVVADRWFPSSKTCHACRHVQDIGWDEIWQCDGCSITHQRDDNAAINLARYEEPPSVVGPVGAAVKRGADRKTGPGPAGWP

SEQ ID NO: 11839 - protein, 370 aa, unknown
  TnpB Polypeptide
VKAIKTYRYKLYRSKRNRHLDKAIDTAASIWNYCIAFHRRYYKLYGKHLSANKLKKHITKVKRTLHPEWQALGSQAIQDAVERVDRSYKAFFQHHKQKRRGRKSPPGFKKRRRYSSFTLKQAGYHFHNDRNTVTIMGRDYKYCKSRPMEGIIKTVTVKRNALGEFFLYVVCEIERNEVLPRAGKAAGYDFGLKHFLTADDGSTVDSPEWYKASLKELRQAHRTVSRCQKGSNNRKRALLHLNRVYQRIVNSRRDWFFKLANQIVSEYAVICIEDLNLEGMKRLWGRKVSDYAYAEFVGILEYVAASSGSTVVKIDRWAPSSKECHICGGRNDSLSLRDREWICPQCGAQLDRDINAAINIKNLGLAMLNA

SEQ ID NO: 11840 - protein, 397 aa, unknown
  TnpB Polypeptide
MIRRVSHTLNNSTNFKKSKLDDFFVEYSRLVNAFINLYWSAELPKSKANSEAYSQIDSWLMGKARKCAVNQAVKIVKSTQKKDKQKTYKQYKKVFTRAKKRDKKWNLVAQRWSEWSKDKQFRHRIKMPIFKGNTIDLNSDLVRIQDNKKSTEFDLWVRLGSIFGDRFSLILPTKHHKRSRYFESNGFKQKKSITLRKDYRGRYFADLYWEKKTEEVKPMSTALAVDIGINKLLSCSDGNKLGVELKGLLSKLNRKKQGSQRWKRTCIEIKDYIGYVTNKLPWDKIDVLVLENLLNITKDTKGRVNKTLRKMLGYWNIDLLYRRIADKAEKNRVLLAFVDPAYTSQMCFSCKEVRKKSRIGEIYNCICCRYSADADINASNNIFQKYLDGEFTVSRGT

SEQ ID NO: 11841 - protein, 378 aa, unknown
  TnpB Polypeptide
MRKSYKFKLQNQSNTIKIGNMIDDMWAIHLHIMLLDRRYYRIYGKNMSISRLNRHVRELKKRTKPHWKDLPSQAVQDVVLRYGKSRNAFFDNIKDRKAGKTTRKVGFPKIKTRHKYTSLTFTQAGYTLDNNRIKINCIDTWFSIHKHREIQGIIKTITIKRDRCGDYWICFSCDNVDDSEPKSMTGESAGFDYGNKTFLTSDTRHKIESPEFLKQSLKVLRSLSKALSRKVKGSGNWYRACRALARQHRKVARQRYDWQWKLSTELCTEFDILIFETLNLEGMKRLWGRKVSDHAFYQFLQLLEQKCAKHGKKFQKISQWTPTTKPCSDCGYHNKALTLSDRQWTCPRCGSHHDRDVNAAINIKRAGLAALSGADVRR

SEQ ID NO: 11842 - protein, 357 aa, unknown
  TnpB Polypeptide
MIVRTLRLKLNKTQETILNQWLNNLTGVYNWGLKKIELNAKNKIYFSKYNFTNLLAYHGNKIDIPSHIIQGTLTQVHNAWTRCFKKISKKPKLKGQRNKFNSIPFPDPFKFPVENRISIPGLGKIRFHKQDIPLAKIKNGRILKKASGWYLCLWLDTEYKFPVKDTDKVVGIDPGFSTLLTLSDGTKIENPRELRKGATRLAQAQRGKRKKLAARLHEKQSNQRNDRNHKISRKLVENYATICYSNDNFKSLARTRFGKSVSEAGLGQLIRMLTYKSRLGGRKLILVNSARTTMTCGNCWSLTGPTGFRGLKVRSWECSACGAVLDRDLNSAQVVLKIGLGTSLCTGIHKKSLKPTT

SEQ ID NO: 11843 - protein, 279 aa, unknown
  TnpB Polypeptide
MYFVKTDAKVIIPCERHRIKIPTLGWVRLKEKGYIPTNPNTHTIKSGAVSYKAGRYYVSVLVDEQEQQKPVLNEFGIGIDLGLKDFAICSNGKTYKNINKSSQIRKLEKKLRREQRSLSRKYESYKKLNKNLKGEATRQNIQKQKLKVQKLYQRLDNIRIDYVNKVISELVKTKPMWITIEDLNVSGMMKNRHLSKTIAQQKFFEFRTKLLAKCNEYGIELRVVDRFYPSSKICHCCGSVKSDLKLSDRTYHCNECGYTEDRDYNASLNLRDCQTYSIA

SEQ ID NO: 11844 - protein, 444 aa, Lactobacillus sp.
MPKKDDLPYMMGLKLRLYPNWKQEKILWKNLNASRFIYNQLLANSWTDSRIIKNKLDKRYPIPEAYWRYDKNGKVIKKSQKRPTGLARITAQRYPWLGDDDLDSDMFTNTEVNYKAAWNMFRKVHTAGKPKFKRKSRPVQSYSTSNHYSSATVKKHGGAPSLYNGSIKFLDHNHIQLPKLGPIKVKLHRSLPTNRLVRIATVTIKHYATGQWTVSLLLKSDEPFHQALPNTNQAVGIDLNTENFLTTSDQKQVANPHYYRALKKHLAKHQRILSRRARRAKKEHRPLWASKNYQQEKLVVAKIHQRIRNRRLNFLHETSTALIKSHDLVVAENLKSKNMLKNHALAMSISDVGWRTFLGMLEYKAPLYGRTFVEVNPAYTTQTCYDCGFVMGSKGTKRLTLHDREWTCPNCHVHHIRDHNAALNILAKGQRLLTRPDQNLEAIY

SEQ ID NO: 11845 - protein, 406 aa, Moorea sp.
MILAYQYRLRLTKKQVIEMERWLEMLRFQYNYLLADRFRWYEENRCSINACPLVCHLPELRNNPDYFSQKRTLPQLKKDRPWYADIHAHVLQDCVKRVDLAFKRYLKGDSKGKKSGRPRFKGKGRYRSLTFPSIGKDPIKGNLLKLPKFGWVKMIYHRPIPEGFKIKTATITKKAEGYYVTLSIQDDTIPEIIPVNEVSNPIGIDMGLKSFLIKSDGSEVDIPQYYRKAQKRLKKIQKAVSRSKKGSSNRRKAVTKLGKAHKKVADTRKDFHFKTAKDLLDSHDLVAHEKLNIKGLARTRMAKSVLDAGWGQFLSILATKAENAGLLTIGVNSRNTSQNCSNCGKKVPKKLKDRTHFCPHCGYVADRDINAAKNVLNLAVGHPVRSKACRATEPLGGVGKKPALSR

SEQ ID NO: 11846 - protein, 336 aa, Moorea sp.
LYKTIPVRATFSEEEQAFWVFQCEQANSLFNCAIYYAKQKHYEWLKEQEAYTIFWRGDELRCGWKTYKCSTKYPELDKALKLSPHYKGMAAQSAQQTLKTVGEAIASYNQLVGLYYKSQVNRPRFPRYRKKGGLAAVTFPRQALTYKEGLFYPSVSKESQPELLTKITLDLPDFIDPDWVKEVTVRPYYGQFWIDWVIDDGKEPVENNPTLDYSQAIGIDHGGDNWLTCVSTLGKSFIIDGKKLKSMNQGYCRLVANYKSGKPDFYWDSHLDRIQRKRNNQMRDAINKAARFIINRCLNDGIGNLVIGWNEGQKSHSNMGKSGNQKFVAIPTKRLI

SEQ ID NO: 11847 - protein, 420 aa, Streptosporangium sp.
  misc_feature (250)..(250): Xaa can be any naturally occurring amino acid
  misc_feature (315)..(315): Xaa can be any naturally occurring amino acid
MVKRQRGHKARPELTCAQSALLHGQASAAITVWNCLHAYWTHFSGRRPTLAQADQAIRQARVDFPFLAVLPAQAAQAVLKTYRQAWENFFNPDHPAKRPTFKSKKNRPRLAVDVPQVRNMRLVRLSAKWGAVTLPMVGRVRFRWTRDLPGVGKNSPAGKVTGGRLIKEADGWHLVLRTETLLAPACAHQGPQVGIDRGVNVALALSNGTMREHGSWLTHGEREHLRRLEKKSARRRASRPKKTRPSGREXRTYDQIARLRAKAKRRAVDWQHQTTTELADTFAVIKVEKLSILNMTKSAKGTIEAPGKNVAQKAXLNRSISGEAWGRTVTMLEYKSADRGGQVIKVPAPGTSQTCHRCGHRDPASRNGTVFACVNPACGWVGHADTNAAININNADGPAVSGRGDLGATRSVKRQPPRAA

SEQ ID NO: 11848 - protein, 402 aa, Escherichia sp.
MKRLQAFKFQLRPGGQQEREMRRFAGACRFVFNRALARQNENHEAGNKYIPYGKMASWLVEWKNATETQWLKDSPSQPLQQSLKDLERAYKNFFQKRAAFPRFKKRGQNDAFRYPQGVKLDQENSRIFLPKLGWMRYRNSRQVTGVVKNVTVSQSCGKWYISIQTESEVSTPVHPSASMVGLDAGVAKLATLSDGTAFEPVNSFQKNQKKLARLQRQLSRKVKFSNNWQKQKRKIQRLHSCIANIGRDYLHKVTTTVSKNHAMIVIEDLKVSNMSKSASGTVSLPGRNVRAKSGLNRSILDQGWYEMRRQLEYKQLWRGGQVLAVPPAYTSQRCACCGHTAKENRLSQSQFRCPVCGYTANADVNGARNILAAGHAVLACGGMVQSGRPLKQEPTEMIQATA

SEQ ID NO: 11849 - protein, 400 aa, unknown
  TnpB Polypeptide
MERLQAHTFQLRPKAGQENLMRRFAGCCRFLWNKAFALEKETCENEGKRLGFSLFCKFLRDWKKENDTSFLVEAHSQILQQVLKDLDRAYKNFFAKRADFPRFKRKGVHDAFRSPQGFKLDEGNSRIFLPKIGRVRYRNSRRTEGMPKQVTVSFAAGKWYVSIQTEREVPEPVHPSQVAVGMDMGVARFVTLSDGSSIRPLHSFRKHEKKLAALQRKLAKRTKFSANWQKLKARIQRLHRKIANVRNDFLHKATTAISKNHAVVVIEDLTVRNMSRSASGTLETPGKNVRAKAGLNKSILDQGWFEFRRQLAYKLAWPGGNLLVIPPQYTSQTCSRCGCVDKQNRQTQAKFKCMICGFECNADHNAALNILAAGHVVSACGAGRAQAPALKQEPVYGAAR

SEQ ID NO: 11850 - protein, 197 aa, Salmonella sp.
MCRHNHSPEKIEATTILTQGGRTVQLRQNKHRLTALKKVPEFAWLNDVSCVPIQQSLRHQQAAFSNFFAGRAAYPAFKSKCHKQAAELTASAFKYRDGSLYMAKSKTPLDVRWPRPLPFTPSTVGIDVSLKDLFVTDTGFKSGNPRHTAKYAARLTLKQKSQRLKEPRQSQLKGGPTPRENCRLPNGCLTQGHPQTD

SEQ ID NO: 11851 - protein, 341 aa, unknown
  TnpB Polypeptide
MANKAYKFRIYPDDVQKVLFARTFGCVRMVYNHWLARKIRQYEENKTTVTYTVCAKEMAEMKKTEAYAFLREVDSVALQQSLRHLDTAFQNFFKQPKTGFPKFKSKKQNKKSYSTICINGNIAILNGYLKLPKAGQVRLKQHRAVPKEYKLKSVTVSQTPGGKYYASILFEYEDQVQEKELQKFLGLDFSMHELYRDSNGNEPAYPKYYRNAEEKLAREQRRLSKMQKGSNNRSKQRLKAAKLHEKVSNQRKDFLHKQSRQIANAYDCICIEDLDMKAMSRSLKFGKSVSDNGWGMFTTFLKKITQFMLLRKTRILFLLRSMLNAVTVILNGILPVRFLCL

SEQ ID NO: 11852 - protein, 314 aa, unknown
  TnpB Polypeptide
MQKTVKASVIELTKTKKRLLDFDYFNYQWWMIFGLDNSLLSYQKQHKYFNQETINYKEYPLPLQARFIKDWLRTKNTKLTKDWIKIPNSKRKGQGIWLPLKFHQPLPEKYQLKDSYLIRKNDKYYLHFVIEIEEPKTYVPENILGLDLGIRNPVTMVDLKTRKTFFLGSELKQIRGKYYYLRKKLGKGKNFNQIGKIINREKNKSNFYLHKLSKKIVEMAYKLKSAIVLGELKYLHKNKGRKINRKISNLSNYKLCNYITYKAKEKGVPVIFVNEAYTSRTCTVCGGMGNRKGNWFECKNCNYKDTPIEMQHLI

SEQ ID NO: 11853 - protein, 459 aa, Nitrospirae sp.
LPLRPTAEQAEYFNRACGTARKVWNWALDEWNRQHKAGLKPNAMALKKRFNTIKYNDPEWLDKNGQPWIKTIHRDAHAQPFEYLGRAWSQFFDAVKAGARMAPDDKQLRRSLRRQGVKLAYQPTFKRKHDGHDSFYIANDKFKVNGKAIRLPKVGNVAMTEALRFDGKILGATISRTADRWFVAIQVEVSDAQFYRRRTVYEINGIDLGVKSAATLSSGKAFDAPKPLKAALRRLKIRGRRISHKIESAKVTAGFSLSAPTPKGTRLPVSNNRKKSTMASARLHARITNIRADFTHKLTTQLCRENQAVVIEDLNVQGMLANGKLARAISDVGFGMFRSQVEYKAKRYGTRLIIADCWYPSSRLCSVCNWKNESLTLKDREWTCPQCGSHHDRDLNAAINLKRLATATALPVASPSSNGGATAGMVPVVVGKVTPVRYERGHRDTSGQEKNRAHVCAQF

SEQ ID NO: 11854 - protein, 461 aa, unknown
  TnpB Polypeptide
MSEIPKIRSLAAYMPTSPIWNSLFWIGFLFMKTVKLTICNEVDVLDDMRIFSSITRVAFNRFQDGMEEKEVRAYCNDRFDHNSWFIQCAIKEGAALYKLNGSKHILFGGKNNLLQYMHGIIDKSTFKYRRMFPIGIQGQKQSKGNRLFSFDLDNQRLIYKPNKKRHVEIKFLPMRKKITEELSIVQELAQQNKITVSVKLSDKYVWLTYDESLIKDERYTKLQSKRVLGIDMNPNYIGLSIIKFDTNDRFKVLHKQVFDLRQLTVSSSKSSTDSKSKYLTNKLKHETIAIAYEISKLVNVWKCKTVAIEDLSIKPSDKKKGKTFNKLCNNKWERTLFVNKLKMLANLHKFNLVEVNPAYSSQVGNIAYGDENTPDMVAASIEIARRAYKKFDKGWFYPRFNIQFRDEQWKQTLGSVENWKELFRKIKESKLKYRFQLLDYIQNAVFSKNYIQKRYSIYSFA

SEQ ID NO: 11855 - protein, 387 aa, Pelagibacterales sp.
MLQKAFKYRIYPNQEQEKKIAQHLGCVRYIYNKALETKVKHYEQTGKSLSCFELTTGLLKEEKTKYDWLKDPYSQCLQMSLRNLDNAFTRFFKQKKGFPKFKARHDSRQSCQFPQHVKIDFDNNKVYLPKIGHVKTKFSRQFEGKVKTTTLSRASTGKYYVSILVEVNEEPKSKKPVKTESSVGVDLGIKSYIVTSDGQEIKYPKFLRRSIERLKVLQSRASKHPKGGLRRRKAMRKVALLHEKIRNQRHDWLHKLSTKLISENQTVCLEDLNVAGMLKNHCLAQAISDCSWGTFVLFLEYKAEWHGVNILKIGRFEPSSKTCSSCGWMKKDLTLSDREWKCEECHVNHDRDINAALNIKKFALLRQNSGSGRPSELQSANTSTLVE

SEQ ID NO: 11856 - protein, 547 aa, unknown
  TnpB Polypeptide
MKVKSQYSRVFHCDKLSDSKRRELTDLAILIRDIRNEISKAINSDMFRCCKLGKYGVQKEFLSLINGRVPSHFASKLMDDVSVAYGKKFAQINYRFGFKQVDYLETKYYENNSKKHKKGDFDRIVSHKKDSPLARTLTYLAKRGDDKIMTWLPELFEKEDKEKKRKYYKEILACIYKFGLDRLMRIALSRRERIINKYSEVPISFKSLTFSGKSRLTSPILSFNKHYGSSVKAFVNISWLKCAKELSIPVKYAKSFHGPMNQYFKWNNTFYTIGFNEEGAIRVILSCEGDRELPENKTNFVGIDVNTKHNLLQCSNGSSIDFDRRTMMKLSKELMTVDELKKIDKDYVAGKRRIKRINHLRREIRSKNNHATSNLCKELKSQGYDHAVFENLDNGFGKCYAKTPDGINQNRLMRELHLSSLKNEFNHIARKYDIATSYVHSEYTSQTCSQCGCVDRENRESQEIFKCVECGYECNADVNASVNIRDRVGLTVLRTSLLNETINGSGVYEPKELERSEVKEILLSRRKRPVSMERLDKEPVIESGFRF

SEQ ID NO: 11857 - protein, 457 aa, unknown
  TnpB Polypeptide
MKIQNLSNTMGNKLENDSSNYGCQQVLLHPTPETRAVLEYVCAESNKLANCGIYLCRQLYFKTGRIPSNFRLHKLLQRNPHYRAMHSHAAQQTLTAVAESFQSFLESLKDWREGKIQDKPSLPGYKKNSLKLVSYPSADVKLKDGQLRFPLGKQVKAWFGIEAFYLPMPSNLKFEDIREFRILPRNKEFYLELVYRVKPVQSDVDFSKALGIDHGVDNWLACVSNVGTSFIIDGKHLKSLNQWYNKHVSTIKENKPQGFWCNLLSHITEKRNRQMRDAVNKAARLIINHCLEHKIGTVVFGWNRGQKDGSEMGRRNNQQFVPIPTGQLKERIKQLCKQYGLRFVETEESYTSQASFVDGDSLPTFGEKPEGWRASGRRVARGLYCTAKKWLVNADCNGAANILRKVAATLGLDLRGVSRGGLCTPLRVFLWTRLKNPCPLGQGASKPCMTHACCLAG

SEQ ID NO: 11858 - protein, 406 aa, unknown
  TnpB Polypeptide
MLIICIDVIRAYKYRLTPTKEQKVLLEKHFGCTRFIWNWALNKKMETYQTTKKNVSRFELQAELPKMKKSDQPWLAEVGSLSIQSKLEDLDKSYTSFFRHKNKYPNFKSKKNRQCFRVPQNTKVDFENGKVIIPKFLGGIKCIYDRQFDGKVSSSFVSKTTTDKYFISILVEAGKELPTKPNTDEKSTIGIDLGLKHFATLSNGTKIENPKYLKWNLRKLKIQQKRLTKKTKGSNNRNKQRIKLAKIHEKIANCRKDFHHKLSHKLTHDNQVKTICMETLSTKDMMKNKDVDERDEYRFLEKMRHQQIADVGWNSFTNILKYKCDWYGKNFIQIGRYEPSSKLCSCGYINHSLTLKDREWTCPMCKVTHDRDILAANNIKFIGLEQPESKASGLEKSGTKEETHLL

SEQ ID NO: 11859 - protein, 367 aa, unknown
  TnpB Polypeptide
MTFQKGVKFRIYPNREQRNLIDRTLGCSRLIYNKGLAMREDAFKSGEKCGYKQTSAMLTALKQDANYAFLKEVDSIALQQALRNLDAGYTNFFEHRAAHPKFKSKKSAKQSYRTLNIDNGIRISNKRIHLPKIGWVKVHQSMEIGAIHNATVARTATGKYFVVLNVEYDPQPMPNNGCVVGIDVGLKEFYSDSNGTVVNNPKYLEKKAKKLAREQRRLARKQKGSHNREKQRIRVAAAHEKIANQRNDFLQKQSTMLVRENQTICIEDLNVKGMLHNHKLARAISSVSWSSFFSMLEYKAYWYGCTVIRVPTFYPSSQTCSCCGYKNVAVKNLSIRQWECPSCHTVHNRDKNAAVNILHKGLEQKSA

SEQ ID NO: 11860 - protein, 432 aa, Lyngbya sp.
MEFKAILKEPQKVAINEAIRTAKFVRNKVLRFWMDNRGICKKELYRYNTQLRDEFKFVKELNSHACQASVENVERAIKRFFDNCKKKVTGKKGYPKFKKHSRSVEYKQSGWKLSPDKKSINFTDKKGIGKVKLKGTWDLWRFDQKLIKRVRIVQRSDGYYVQFCVKLDNSEQLEATGFTVGLDVGLKEFYTDSDGYSEPNPRFYRKGEKRLKFYQRRVSRKNKGSTNRKKAINKLGRTHLKISRQREEHAKRLVRSYRKIVEPYYKRFNPFMQSRTPIKAPLSKVSSPARCVIRSNDLVAYEDLRIKNLVKNHCLAKSINDAGWYQFREWLEYFGQKFGRITVAVNPAYTSQNCSNCGEVVKKSLSTRTHVCECGCQLDRDHNAARNILTRALSTVGHTGTLINAWGDLSSTLPGSDLVEQDGSVNQESPGF

SEQ ID NO: 11861 - protein, 391 aa, Lyngbya sp.
MEMETTVLTIVCKIQPTPQQADKIEATLKGFADACNYTNAVVKSSITSKNTIQAQVYKYIRETYNLSANLAVRVCGRVAANRKTAKHKNKPVSNFSPTSADYDARIFSYREKDQTVSLTLVGGRERFTLQIGNYQIGKLKGKQPTSAQLCKHRDGQYYVHIQVKEKAPLPQKREKVIGVDLGRTEIAVTSENLSFSGKQVTETRDKFARVRRQIQQKASKGTRSSRRRCRQLQKRLSGKERRFQTWVNHNVSKAIVESAKSQGAVIALEDLTGIRERTNLQPRSKTEKRRSNSWAFYQLREFIRYKALEAGVEVIFVNPRYTSQTCHKCLHIHPVKGKSYRSRKRYKCSACGWIGDADFNGSMMIKMLGQSVTLPGGSYLSCSLTDIVQGY

SEQ ID NO: 11862 - protein, 411 aa, Halobacteriales sp.
VTELTKTLELKLVEPNAHKRGKLQETRKAYQKALQDAFNARCTTQTEANDVVVNYDLSGYAKNALKKYVPQLITTYNASELYDDHPVRFTNEGLRLDHKPENAIEWYVKIPHHEDYHLWMPAQPNPEQRGWLEALNAGDATMGESRLFERDGTWYLHVTATRNVEDSSGESAEERTPIGVDIGEASLVTVCHRDEHGSPTAPKLWDNEGKTVRRLRKSYFTATRRLQIRGSERIAESFGDDLWNQIDDVFHRVTREVVEYAESVENPVLVLEDLTYIRESMNYGDFMNRRLHGWEFAKLHAQIRYKAVEKGIPVETVNPRNTSKECHACGEVGHRPRQATFKCTNNACWMGEYQADVNGAINIADRYLSGESHSRKHTGGNDSAEDGGRLTAPQDSQADATQQETLGTYAS

SEQ ID NO: 11863 - protein, 309 aa, unknown
  TnpB Polypeptide
MKKLKLRIKDKHIKELNRLSGSVNFVWNYVNALCFEHLKRTGKFFSAYDLNQYTKGSGEDLGLHSQTLQAINETHAKSRKQFKKAKLNWRTNRPDAKRKSLGWIPFKKSAIKHLSTRQRGKKALKSTIQLSLSKGQELVIDVFDSYNLSLYQINTLEIVQDSRNRWYACITFKDFPKQVSGKGSVGIDLGLKEAATTSMGDKLTIKQTQKWAKKLAVAQRANNKKRVKAIHSKIKNTRLDLIHKFTTQLVKDNALIVVGDVKSRSFTNKKTNLAKSTYDAGWFELKRQLEYKCKYAGCQLEIVNESYTT

SEQ ID NO: 11864 - protein, 394 aa, Lactobacillus sp.
MATILKGFKLKLYPTTDQQILFRRTFGCTRFVWNQLLAMQKKRYKNNPEKWFISQFGMDKLLPLLKQEHPWLKEIDATALQMATAQLADAYIRFFKGQNGFPHFRKLAYAQSYTSKYVNRNIQIVDDHHLKLPKVGLVVFKAGRLTIGQIKRVTVRQKAAGHYEATVLCQCETTDLPQTGKRVGGDLGLKSLLNLSDGHKEPNLRYDKKLAKQKHYWEKKRARRLLGAKAQIARDKHEHPDNVRRLTDFKNYQNARVMVAKYAAKIAYQRQDQLHKYTTWLVKHYDHIVLEKMNVKGMLKNHKLARAISNASWGRLVTILAYKCLWYGKKLTLVPPAYTSQECSVCHERNNRLGLSQGQWLSVRQWDCPSCGTHLDRDINAAINILNKGLQATV

SEQ ID NO: 11865 - protein, 353 aa, Escherichia sp.
MMMLILKAYKFRLEPTPEQSQRLRQLCGCARFVWNLGLAETKRILDSGEKLPSAFELNRMITVWKKMPEYIFLQDAYTDNLQQKLKDLHTAWKRCFDKKLAAKAPVWKRKNEGRDSIRFVNFEKYCCLENRRVKLPSGLGWVKFRQSQRVNGKIKNATISQLAGQWYISFQVEIETAEPNHTSTTIVGLDAGVAKLATLSDGTVFEPVNSFQKNQKKLARLQRQLSRKVKFSNNWQKQKRKIQCLHSRIANIRRDYLHKVTTTVSKNHAMIVIEDLKVSNMSKSAAGTVSQPGRNVRAKSGLNRSILDQGWYEMRGFEGQQHVKVSSGYGQPAGAQCPGKIRFKPFDTGSGLV

SEQ ID NO: 11866 - protein, 456 aa, unknown
  TnpB Polypeptide
MKRKIVKAERCFLKVSSQKAWGILRSWSLGCTKAYNFALTETLRVLEANRNGEKLGYPSYYMLNRFLTGFKADNPEMYGVPSHALQHAVKDLATAVSNYFIAKSEGDPDAKMPTHKPEHANHCVFLPACRFKIECDEGRWNLVLRHEGRPFRVRFFPNDDFNPDDVTSVRLTRPKVKVGKPVRCDAPLRAKKKWFVSLTHTYEKELDQEALPDLTVGIDRNAGLGNTIVVSNEDGEVQKRYVLPDSIDRLQDQIEKLQKKKDAIVEANGKNYKTRRVRALNMRIAKKHSKIANIRDDFINHVSKELSLMGRRLVLEDLDIKGMTKSAKGTEDKPGKNVKSKSELNRKILASGWGKLGDQVISKGWQEGADVYECPPEFTSQLCATPSCAKKGVMGIRCGKKFYCPECDVVRDADLNGSMNIARIGVDPRYRIKGQTRPTRRDKKKMEEAALQKEDS

SEQ ID NO: 11867 - protein, 491 aa, unknown
  TnpB Polypeptide
MMSVGRGKLAREMSRHTTFKFCLDPTLEQGVLLARHVGAARFAFNECLRMVKTALDQRKADPNLDVPWTGFDLINTFNAWKKSEDAGRVFAVDGDGVAEMVGIGLRWRREVCQQVFEEAAVDCSRALSAWSDSRSKKRKGRRVGFPQFKEKTVAHATFRLREKRPEGRPATIRIGDNARPRSVTLPGIGLVAVHDDTRRLRRMLAKRRAKILFATVRYHASRWWVSLNVAAADLHPAHQHPPRDRTDHSGWVGIDRGLTEFLVAASIDGQEVARITNAPKPLATGINRQRQLAKAVARKERGSRNRRDAAAKLGRHHHHVANVRRHFLHQVSNQLVKTHDRLVIEDLQVSGMLRNRRLARAISDAGWAELARLLAYKQHWRRGKLATADRWYPSSKLCPSCGGIKHDMTLADRVFTCECGYTADRDLNAACNLARWGQSHHDPLKDPRTPKHGGRATKVRRRDGADQHPARAGETSPIEAGTDVHTAPPAA

SEQ ID NO: 11868 - protein, 416 aa, unknown
  TnpB Polypeptide
MFGCQQNLINPNKDLKAILEFLCSESSKLTNCGIYYARQMYFKTGKIPSKADLHKVLGTENRNLHYKAFYSDTAQQILTTVAESFKSYIGLLKGIKEGTVTQRPRLPNYRQGGLALVTYTWRSVKLKDGLLRFPLGTQLKAWFGLDAFYLPWPTNLDHKAIREYRILPRNGCFYLELIYKTETVKADVDPSKALMIDHGMNNWLTCVSNSGTSFIIDGLHLKSINQGSNKRVAFLMEGKANGYWSKRLERLTENRNRMMRDAVNKAARQVINHCLVNNLGTVIFGWNPGMKNAINLGSKTNQNFVQIPTGRLKNRIAQLCEKYGIKFVETEESYTSKASFVDLDLLPKFCEKPEGWQASGKRVQRGLYRTLEGLLINADCNGAANIGRKVAATLGISLKEVSRGALITPLRVPLWS

SEQ ID NO: 11869 - protein, 433 aa, Selenomonas sp.
MPKKAEDSLMRVERHLIRPSSPWFSMIGEFCHLAKNLYNHGNYLVRNRFIKNGQWMRYDELDKALKTDVDYPDYRAMPTAQAAQQVLRLLDKNWKSFFAAIKDWKEHKEKYLGRPKLPKYKEKNGKFILVLTNQNCRLKGAEVIFPRSFRGFKAAPEFMKDKESQREFDTFQQVRFIPDGTNIVMEIVYTIKAAPQKEDNGRYAGIDIGVDNLLTMATNTGMAPLIVNGRVPKSINQFYNKKLACLKSVCQQMTGQYSSNRIRHFTAKRNRKIADYMHKASKLLVEKCAELEINTIVIGQNKEWKQESKLSRRVNQHFVQLPFARLIQMIEYKARERGIAVILTEESYTSGTSFLDKEAPVKENYDKTRRIHRGLFRANNGRLINADVNGAFQIMRKVFPNVSADGIEGVVLRPVVVVAAYPILGLSRAVNEQ

SEQ ID NO: 11870 - protein, 934 aa, Planomonospora sp.
MGRSLGRAGARRAAHPGPRRRRRGGAAPARRRRRRRFRAVARGPRRAQRDPSLRRDHRGRGAEGPPGGRRRRGDRRRSRRRRGAPPDGRHPWVGGPAGAAGLHASGHDRGGGRAGGGGGRAAAGPAVAGAPVPPQGPDRPAGRGDAAVADRAGLARGGDDRAGGGLHRHRPRAYGEQLAGPCPRPCPGEGAEAAEEPRPGRVGPPGRADRPGREGPPAPLNRRSRRRPARPPERFSACRRRTWETSRAGVRRPARAGLTGPRRCAAGAAGPGPAGHAAARTRTTGRACPESSPRRSPPVVHETGGGEACSGRRRVRGPPPVVAEVLDGQAVDQHGHVADETPVAAPPHRLTAHHHRRPRPGGSHLVQQGRHRLTELLGAAVGRVGAEGLDPPPGVGRGLRRGHAAPTTEPRLPPVRDAVGRQPPSQGVPGDMRVATAAGKAPDVDEQAGSRVVEHLQDPRPVRRPVPEGQEGRVRRCHQMSFRGYSGLQTGEETEPLRSRSAIADPPSRRMGVHRPEPAHKIASKPVRCLVSMTSSVKRAFKFRFYPTPEQADLLNRTFGCVRKVYNLALQARTEAWYQRQERVNYNTTSAMLTAWKKSEDLAFLNEVSSVPLQQCLRHLQGAFSAFWEKRARYPRFKSKRKSRASAEFTPSAFRFESGRLTLAKMTAPLDIVWSRPLPEGRSPSTVTVSRDSASRWFVSLLCEDTIEPAPATTAAVGIDAGLTHLLTLSAGEKVANPRHERADRKRLARAQRKLARKDKGSANRARARLKVARIHARIGDRRRDFLHKLTTRLVRESQTVVIEDLTVRNLVKNRSLARAISDAAWHDLRSMLTYKAQWYGRDLVVIDRWYPSSKVCSACGAIADKLPLNVREWTCRCGTVHDRDVNAARNILAAGLAVSACGAGVRPQRGNLRSGRQAVKQETRRATAGIPVL

SEQ ID NO: 11871 - protein, 325 aa, Bacillus sp.
MTMLLSQKYEIFPTKEQKETLDRWLQYCRQTYNSALLDKQRKYKENNELYTRSDMQKQQTIDKKKYPFLKEVPSQPLQEVFLRLKKAYDGFFRGDANYPKLKKYKDHNSLTFPQFGFKPNGKHRLAMSFVENGTLYNKGLGEIEIHLHRPIEGTIKQLKKAQGNLSKKNKGSVNYRKQVKRVRNFHEKVANQRKDFLHKLSYHLTQMYSVICIKNLDIRNMVRNRNVSKSISDAGWGIFCKMLMYKCEKFGGLLVKVDPAYTSQDCSSCGNRVKKSLSIRTHICTKCGTVLDRDHNASLNILQKGLEQLLARTIETVGQGCVQTV

SEQ ID NO: 11872 - protein, 391 aa, unknown
  TnpB Polypeptide
MEDSKMYKGYTIRIYPTKNQEELLRKHIGCCRFIWNQMIEVQKTRYQNDEKYLNHFGMIKLIPLIKKENEWLNEVSNISLQRICDDVNTAYQRFFKKISNYPKFKTKKKSKLSYPVRCDRFYFENGYVKVEKVGKVKYKADYKNLNLEELSKFSNVRISNENDKWILTFSIEYENQVFTEKNGNLGIDLGVGRLAVVSHNGKKLEYKNINKSKKIKQLKRKLKHVQRVISRKYEVGNKLNDKKYQKTNSILKYEKLARRIYSKISNIRKDQRHKVTRELVNLNPAVVIMEDLNVKGMMKNKHLAKAISEMGFYDFIRTMKYKCEESNIKFIQANRFFPSSKTCSHCGCIHKNLKLSDRIFECPSCGFTIDRDFNAAMNLECYFDSHIEELR

SEQ ID NO: 11873 - protein, 369 aa, Escherichia sp.
VKRLQAFKFQLRPGGQQECEMRRFAGACRFVFNRALARQNENHEAGNKYIPYGKMASWLVEWKNATETQWLKDSPSQPLQQSLKDLERAYKNFFRKRAAFPRFKKRGQNDAFRYPQGVKLDQENSRIFLPKLGWMRYRNSRQVTGVVKNVTVSQSCGKWYISIQTESEVSTPAHPSASMVGLDAGVAKLATLSDGTVFEPVNSFQKNQKTLARLQRQLSRRVKFSKNHAMIVIEDLKVSNMSKSAAGTVSQPGRNVRAKSGLNRSILDQGWYEMRRQLEYKQLWRGGQVLAVPPAYTSQRCACCGHTAKENRLSQSKFRCQVCGYTANADVNGARNILAAGHAVLACGEMVQSGRPLKQEPTEMIQATA

SEQ ID NO: 11874 - protein, 253 aa, Staphylococcus sp.
MNTNTISVNKLIDFVHNKIHNVDTEKLELSKSTIYKLKKDPLHLWKMKFENINKLNKFVESLDSGNYISKYERWESEAKAKYVEVVGIDLGTRNTLTASDIDAKRVFLLPNKKIYNAIMNIRQIKDKSKLINYYKNDFHLTVEVNVKRLVSGLLSYYKPPVTFVVGEMTEGNLANKIFYELFLSSLQSSTEETNFRVETISEEYTSITCPICEHVNRKNRTSKNSFNCQSCGFSHYIDDVVACMNIVKKYQEK

SEQ ID NO: 11875 - protein, 409 aa, Kitasatospora sp.
VKRSFRFRFYPTDAQAAELSRTFGCVRKVYNLALEARTEAWQQRQERVSYNATSAMLTAWKKTEELAYLREVSSVPLQQTLRHLQGAFTNFFAKHASYPRFKSRKKSRASAEYTSSAFRLRDGRLTLAKMAEPLEIVWSRPLPEGSTPTTVTVSQDSAGRWFVSLLCDDQPVPMPETAEAVGIDAGISSLLSLSRPIEGLTDRQGKIRNPRHERMDHERLAKAQRGLARKAKGSKNREKARLKVGRAHARIADRRRDLLHKVTTALVRENQTLVIEDLAVRNLLRNRTLARAIADASWSELRSMLEYKARWYGRELVVIDRWFPSSKLCSNCGTLQGRMPLNVRAWTCGCGATHDRDVNAAINILAAGLAVAACGDGVRPQRSTPGGQSSMKQEVVPPQRTRAAAQPRG

SEQ ID NO: 11876 - protein, 554 aa, unknown
  TnpB Polypeptide
MITLQCLLEFKNEKDKEVLIDLMRRFSSAMRYAYKRLLESEKRKDLKKHLSKTFNINTRYSDDAILLAQSMISSYKEIGQKPKKIIFGSRKLFEQLSRNHLTGKIKEKLKVKWKESRQGNLYSRGDKSKQGNLNLRLQWINDKLYLRINIGDRQYVYAKVIRSVKREKDKWIELMFILEKGYQKSDWFPYSVRLKLKSGKVYAFISVEEKLPPITIKKDSGVIGIDINAYPFHLALAFTNKDGNLEKYQSISLNKLLEVNSEKRQYLEWQIAHQIIEIAKKENKAIAIENLDKLPKGKRGDGFSKLRSRLQKWSYKRLLSKIEILAKRNGIEIRKLNPAYTSLIGKLKYAPQFNIDKDIAAAFVIARRGLGYKEKLPKNYKELLSDKDFLLFSEASIEDNIAKLKKEIKEEKNQYKRNKLKSKLSKLRKELKALQKRLSFIIESEKSKSASQQPVNRRKEQVRGSAYAGYKNWQVLFTAFTFSCLESYRDFSPLKRVMISRDWARMVNRLVPMLGIGTMILPKYRLLGLEVSEMAEYKYPNSSCAEQYSFVQFG

SEQ ID NO: 11877 - protein, 400 aa, unknown
  TnpB Polypeptide
LEVQKNYTFFAPVKGGPGMAGKERGNAAQYTTIKVRLCPTPAQSELFEKTFGCCRYLWNQMLSDERRFYLETGVHFIPTPAKYKNGSPFLKEVDNQALIQEHNRLSQAFRMFFKDPGTFHYPRFKRKKDDRDSFTACNHVFQSGPTIYTTRDGIRMTKAGIVKAKFSRRPQAWWKLKRVTISKTRTGKYYCSILYECGDRPPEAVVPVAETTVGLKYSVRHFWVTDGGETADPPRWLKQSGEKLAELQRKLSRMEPGSKNYQEAVRKYRLLHEHIANQRRDFLHKQSRRIANDWDAVCMRKDALQALNGVAGENLGYRMFRELLHYKLERQGKPLILLDRYTPTTRTCSACGYLREHVSYRENLWTCPKCGAVHDREVNAARNIKGQGLTQYLQQQRASA

SEQ ID NO: 11878 - protein, 361 aa, Clostridiaceae sp.
VLKAYKFRIYPNEEQRLYLGKTFGCTRFIYNKMLSDRIKAYEGNKELDIKNIKYPTPAQYKKEFQWLKEVDSLALANAQLNLDKAYRNFFRDNSVGFPKFKKKTNTNSYTTNNQNGTVFLEKGYIKIPKLKSMIKMKQHREFKGLIKSCTISKTPSDRYYISILVDTENFVLPNVDKKIGIDVGLKEFAVCSDGYREPNPKHLRKSEKRLAKLQKDLSRKQKGSKNRDKARLKVAKLHQKIADQRADFMHKLSIKLIRENQSIVIEDLKVKNLQKNHKLAKAISEASWSEFRRMLEYKANWYGRKLILAPSNYASSQLCSECGYKNEEVKNLALREWICPNCGTHHDRDINASNNLLKLAI

SEQ ID NO: 11879 - protein, 410 aa, unknown
  TnpB Polypeptide
MKGDERMLVNRIESQNIKSDSLIWNVVDEYCFRSKNVYNYANYIIRQEFIHNDKWIRGNDLDKICQSEDCYKELGSQAAQKIIQLLDKNWKSFFASIKDWKKHPNKYFGRPRLPKYKKKDGRQVFILKNIQCSLNNGLFRISFKPFKGYTVPTHIPPTAKLMQCRFIPHSNYYTMEIVYQIEVPDTITESDHIASIDLGVDNFATITNNIGLQPIAIKGGVIKSINQYYNKKKAKMQSELMILNKKHLSKNIIKLANKRNNKVKDWMHKASKCVIDYCVMYGFDTLVCGYNAGWKQNSEMNHKTNQKFVSVPFDMFVNQLTYKCQNNGIRFITTDESYTSGTSFLDYEEPVKINYNKNRRIHRGLFKSNTGVLINADVNGSYQIMKKVFPNAFADGVEGVGLHPVSMRIA

SEQ ID NO: 11880 - protein, 400 aa, unknown
  TnpB Polypeptide
MWLVKTVRVKAFEPTRVKKQFMALLLENSRLMNEYLSLMQAHQTTSKQHLHLLSYERLTQALKLPAAVVQTARDKAVQIYRSHLAMKKDGPDCKLPCFRMTTPVRLDRRCFNIIETKNKLTYVAAMSVKGGRVHVPLLGQRYQYRQLRKIVAGELKLGSVELVKRGEDFYFHLAIKKETPDIDPDYSYTPVGVDLGLINLSTSVILKGGRPCNILFQRGGNALEMRKRFATFRASLSRAGKFRRIRETTGKERRCMRDINHKISKSILAQANQTEKPIIVMERLTYIRERIHRGKKLNAMLHSWAFAQLQEFIAYKAAWAGIPVMYINPKYTSQQCNKCGFTSKANRLGRSFKCGDCGYELNADLNAAINIAKAYKNFAPGYRSGALGARDSALTLQARA

SEQ ID NO: 11881 - protein, 407 aa, unknown
  TnpB Polypeptide
MRRSYRFRLYPTTNQARDLTVMLDSHRHLYNQCLETRSLAWKDYRLGINSIPLSSWFKTERNHNHWFAALNFSSAQATMRRLDKAFIAFFDRCKKRARRKGYPRFKGQDRFNSIEYPLHGDGIKLKDKTPKLYIQNIGLIRIKQHRKIQGTIKTVRVLREADQWYAVFSCDLGDVVVPKNTKPAVGIDMGLKSFLTTSDGEHVANPRFFKEAMPELRRAGRSLARKSKGSKHRHEAKRRLQRIHVRVRNQRGDFTHKLSKTIADRYGLVAVESLKIRNMLQNHRLARSISDAAWRQWLEQVRYKCEQTGAEFVEVDPRNTSQLCSQCGEMVPKGLDERWHRCTHCGLVLDRDENAARNILLRARCSPHLVRAAARLARTEPANANEVLQFECNHVQAATPSFEKPPA

SEQ ID NO: 11882 - protein, 354 aa, unknown
  TnpB Polypeptide
MPTTHTKTLKVRVKDKHAKQLSKMAASVNFVWNYCNDLSSRAIRERSLFLSNYDMQKYTTGASKELGLHSQTVQCISKEYTTRRKQFKKAKLNWRKSFGIGRSLGWIPLNTGTAQWKNGQVFHHGKYYGVKDSYGLSQYKFRSGCFTEDSRGRWYFCVVVSVETTQSTAAGSVGIDLGCKTTATTSDGDKLNGRHYRSLEQKLGKAQRARNKKRLRAIHAKIRNQRADGQHKFTTRLVNENAAIFVGNVSSKGLIKTKMAKSVLDAGWSQLKTMLEYKCQQAGVVFDEVNEMYTSQACSCCGCISHNSPKGRAGLGIREWTCAECGAKHDRDINAAKNILAVGHGRLAVGIPSL

SEQ ID NO: 11883 - protein, 313 aa, unknown
  TnpB Polypeptide
MSKRTYKFRLYPTASQAKLLDWQLARCRELYNASLQERRDAYKMRGKSVSYVDQANQLPEIKDCRPEYRDIYSQVLQDVLRRADKAFQNFFRRVKHGEKASYPRFQGRGRYDSITYPQSGWSLQNDRLSLSKIGTLKIRLHREILGKVKTVSVVREGEHWFVCFSVEVEAEPLPQSDRAVGVDMGLNYFATLSNGEHFTNPRYLRKSLAKLASKQQALARCKQGSHRRNKARQAVATVHRKVANQRADFAHKLSRQLVNRYGTIVFEDLKPANMVKMHSLALSISDVGWSQFQQFCVYKAESAGRCVLFVNLC

SEQ ID NO: 11884 - protein, 426 aa, unknown
  TnpB Polypeptide
MIRSSKHSTKFSNTRKLDNLSIFITEYRRVAGIIVDDVWNNGYTWIYSGIHEFNIHKNKLELPKYLEYKKFSIETFLSARALSALCTQLTGTLKASVEKQRKRIYMLNKLKASSTPKKQRKLLGKKLRQNIPQKPNIKNLNPELASTCAEFIEKEGCFNGFLKLSSITKSKTKILVPIKFSKHSNSFKDNSFQMMPSFLITNSSVDIRWKNESIESKTKGITVGGDQGYKDILTLSNNTKTPKEDIHFHTLESIIGRLSRKKKGSKGFKKSQEHRTNFVNWSINRLNLDNIQQINLEKIWNIGYKSCTSRKLSHWTNSNIVNKIESRCESEGVLLKLQSSTYRSQRCSACGVVLKSNRKGKEYICKHCGNVIDADFNASLNHEIELPEIPYTLRILKLNKKGFFYLENGLFALDGTELIVPASIQN

SEQ ID NO: 11885 - protein, 425 aa, unknown
  TnpB Polypeptide
VLNLTYEFKLKPTSEQIVIFADWLEQCRRVYNYALTERKDWFKSRSCQINACSVRSEYIISAETKRPTYASQCKSLTAYRKTSIDLQRVQSQVLQQTLRRLEKAFVSMWEQNHGFPRFKKAGTMRSFVFPQLGINSIKNGNVKLPVIGWVKFWQSRPVADGGIVKQARVVKRASGWYIMLTLQWDVKIPDAMPHGEAIGIDVGLTNFVATSNGLLVKRPRFFIDAERQLKLLQQRVSRKPIGSNNWKKAQKKVALLHEYVSNCRKDWHRKISHQLCSNAGMVFVEDLNLVGLSRGMLGKHCLDAGFGQFFTILEQTCFKRGVYFQKVDAKKTSQICPNCGVETGKKELSERTHACSNCGYTTDRDVAAAQVVLIRGLAAVGPTVKMLVEGKLTGIPVKQESPCLEAGECQSQSKVIISTIDLLQK

SEQ ID NO: 11886 - protein, 378 aa, unknown
  TnpB Polypeptide
MRKTFCFKLYTSKKNKFLHNKIDIGSQIYNYCISLHKRYYRLYKKHLNKYQLQKHLTKAKKRYPDFKNFQSQALQDITDRIDRAYLLFFKNLKNKVKTSPPNFKKKKRYKSFTLKQAGYKLIAKNKILIDQKIYNFFASQEIDGVIKTLTIKRDPIGDLYIFFSVDVIEELENKTMSCKTAGFDFGLKTFLTSSEDEEDIKSPLFFKKTLKKIKKLNQSFSRKKRGSSNRKKALMNLFRVHKKIFNQRKDFHFKLAKDLSEKYVHLFFENLDIKALQKLYGRKISDLSFSNFLKILEYYQEKKGSKIIYIDRFYPSSKTCYHCNNINADLTLKDRTWICPHCKKTIMRDKNAARNIKRQGIVLWNRENKTRNSRAIPA

SEQ ID NO: 11887 - protein, 458 aa, unknown
  TnpB Polypeptide
MSQKPEKATEEDKRVRKHKKKTNQTLTLAVTQIRLIEANPGKLDALDQLAMVFQALCQQYVTMFCAAEASPDKYANPTFATELSERWHRVAIQQAAGIAKSWRTNRQNAYDAYLEDLADYAEAKAKAEASGVPLDSKRKEPEWREWNLPELRFPTIQANVNVVVVEKSEDSTFDYWLRISTLKKGNPLRIPVKLASYHKKAIEGRTLNTSTTLYKRKGVWWLTLSFDQDVPVKTESSAPKVGVDVGIANFLTTSTGKQYGSFHGKLAHRHKRDREKRRRKAKLRACLKSKAVEKLPSTSSATGQRLGRHIKQAINRAVNLLIEDHPDARIIYEDLSVASMRFKARSMNAYLSASQLAHIPEQIAWATAKRGMAAQAVNAAYSSQECSRCHSVDRANRPNQQTFCCVVCGHRDHADRNASLNLASRFGDEELAVCKRKEQIKALLLRRHEQWKQQLGWL

SEQ ID NO: 11888 - protein, 417 aa, unknown
  TnpB Polypeptide
MRRTNTFDVAPTSDRDAELLHRVSDASPSLWNELNYARQEAYFDGENVWEVDQTEFRKRYSGVLGTPTAQQVIRKNDEAWKGFFDSDEPDKGLPGYWGNQDDGRDLQTYVRNDSYTLQWGERSRLEIPVGKELKEEYGLGYYERLRLEARGDPRWQGEQGRLELHADELADTYRAFQPVTVAPDSSPLCSEALASHEAALDVGANNLVACTTSTGDQYLYSGTDSYEQFRETTGRIADLQARLPDGRYSSDQIRRLYRKRTRRRDHARDALARDLFERLYSEGVSTVYVGDLTDVLDTHWSAEVNAKTHNFWSHRKFIDRLACTAEEYGIEVVGRSEQDTTRECPRCGEKADTERHGDYFRCPCGYEGHADLDASRKFLEKESGRDLAVGCMAAPVRLKWDGHSWSATPHAHESSNE

SEQ ID NO: 11889 - protein, 398 aa, unknown
  TnpB Polypeptide
MLWEMRKAYQFRIYPNKNQEVKLNRTLSICRHLYNDSLAERKRQSELNNLCKTFEVTPWGKPEWISYVDQANALPDNKTIFQKEVHSQVLQNTLKRVERSFKNFFKGFGYPRFQGRDRYNSFTYPQSGINLEEEKLNISKIGVVKIVQHREIEGKIKTCTIKKDVDQWYAIFSVKIDRPIIPVEIKRPIGIDVGLRSLLTLSNGEQIEPPKFLRCSEKRLTREQIKLSRKKKRSNNRKNQATIVARTHRTIRNQRKDFANKTSRILVDTYDKIVFEDLQIKNMVHNHRLAKSINDAGWYQLIRFTKSKAEYAGKIVELVNARNTSQNCSKCGNFVSKNISVRKHSCPFCGLVLDRDHNAAINILKRSNTAGTAEFKACPSSLSTDTMTQEASKREVVH

SEQ ID NO: 11890 - protein, 376 aa, unknown
  TnpB Polypeptide
MIRTIKVKLNISPDELKSTFEAYTDAFNYVCKIGWQDNDFNGVSLHHKTYQFTRSSLPSQLSVSARMKATEALKSVRKKQEASCPQSRLCSVRYDARSYNVWFDRNVVSILTVDGRRKLPINIPEYFKQYLDWRRASADLFLRRNGVFLHIVFEKAALEVPLTDKVVGIDRGINNLAVTSNNQFFGGEQIKHVSLRYEKLRSQLQSCGSKSAKRHLRKVSKKENRFRADVNHTISKRIVQSFEPGTMIVLEDLKSIRQNSRLRKEQRKQLHKWNFFQFQQYLIYKAEAKGIRVEYVDSRYTSQKCSVCGYTSRSNRPSQSVFKCKHCSFSLNADLNASRNVRQNYLDAISYPDRVSVNKPIAAASASCKPIGFSRG

SEQ ID NO: 11891 - protein, 504 aa, unknown
  TnpB Polypeptide
MKATFQTRPAIDSSTLSPLDSYASLFGRVIRSLFAQLSAGKTPSSLKASFLKKYGITARQFNACSVELKGKISSIQERNKQRTQELSSTLRFLKKRIPKIRDKEKRHQKKRRLFILQTRLNKLENSAETVSLCFGSKKLFRAQFALAENGFSSHDEWKQAWQQERNSEIFVLGSRDETGGNQSCVAMQNEDGSLTLRLRLPNALSSFGKYLYLPNIRFAYGHQEILRALQQKKAICYRLKKDRKGWRLFATIEREESHLVTNHANGAIGLDLNAGHMALVETDRFGNPLCKKTIPLITCGKDRNQTLALIGDLSAQIVSYAVKTQKPLVMERLDFQKKKCTLRECSSKYARMLSSFAYSTASTMISAKAGREGVDVVRVNPAFTSVVGRIKYAKRYGLSTHHGAALCIARRSYGFSEKPPRSLGEIPDGKGGHVALPLPERNRGKHVWSFWSGLNKKLRVALAERFRARKTRSKDPPKADSCDKTFSKVAGANPARESLAALLG

SEQ ID NO: 11892 - protein, 416 aa, Nostoc sp.
MLVFEAKLVGTNEQYGKLDEAIRTARFVRNSCVRYWMDNKGIGKYELSAYCAVLAAKEADFPFAAKLNSMARQASAERAWSAIARFFDNCKKGKPGKKGFPKFKKEQTHGSVEYKTCGWRLDDDRRYITFSDGFKAGTFKLWGTRDLHFYQLKQFKRVRVVRRADGYYAQFCIDQERVERREPTGKTIGIDVGLNHFYTDSNGETVANPRHLRKSEKSLRRLQRRMSKTKKGSQNRVKFRNKLARLHLKVSRQRKDFAVKTARCVVRSSDLVAYEDLMVRNMVKNHRLAKSISDASWSLFREWVEYFGKVFGVVTVAVPPHYTSQNCSNCGQVVKKTLSTRTHICPHCGHTQDRDQNAARNILEKGLSTAGHVGTNASGETDQYLSEATHKSKSTRGKRKPKERSLESPAISGTPD

SEQ ID NO: 11893 - protein, 401 aa, Okeania sp.
MIITHCYKIKPNKEQTAKIDNWLELLRRHWNYALGQRLDWLNRTRCQIDRCSIISSPIGEISVRPDYHFQSAELKQTKKLFPDYKEIYFEVQQNNLKRLDKAWQCWLVPDKTGKRFGRPRFKKCGRLRSLCFSRVNHPKAAVKFDGKQILISRFGAIPVIVHRPIPDGFTVKTANITKKADGYYVSFSLEDKSVPSLIPTDNIKTTIGIDVGLKEFLTTNTGETVSVPNFYRKAQSNLAKKLSKAARKEIGSNNWKKAQNKIARLHQNIARQREDFHYKIAHKLVKEYDLIAVENLNIKGLARNSKLSKSIYDVAWGAFIEKLNAVAVKRGVHVVKVNPHNTSQNCSNCGHKVPKALSVRTHSCPKCGTVLDRDENAARNILNKALCEVGIILPACGGVRH

SEQ ID NO: 11894 - protein, 422 aa, unknown
  TnpB Polypeptide
VRNKAFKFRIYPDEKQESLILRTFGCVRFVWNLMLEDAKKSYKKTKKFDYPTPASYKEEHEFLREIDSMALCNTQMNLRMAFSRFFKDRKTKKKRKSRFPWFKSKKSARRSYTTNRINNSVRIEQGKLRLPKLGLLKTVFHRKVEGRIKGATVSQDPSGKFFVSILTEQLDLPKPEIDRSKVVGLDFSFHSLFVTSTGARPKHYVENFKRVEVKLTREKRWLSRKEFGSHSYEKQKIKVAKVEEKNRNFRKDFFYKVVKQILDRYDVVVIEDIDLVGMAKRGRRRKFGASIYRLGFGLFREILKSKAEERGKLVVVADKWFPSSQLCSVCGYRNKKTKDLSIREWKCPRCKTLHDRDVNAAQNLVNYYVHKYHSTGALPGIHAEGDLTSTSSLSARGKLGRRIRKSCGTERSHKPPAKARGR

SEQ ID NO: 11895 - protein, 410 aa, Streptomyces sp.
VSAVVTVHVKRAFKYRCYPNGEQAAELSRTFGCVRLVWNRALAARVEAWERRREQVGYGATSAMLTGWKRTEELAFLNEVSWVPLQQALRHLQAAFTNFFTRRAGHPRFKARKRSRNAAEYTRSAFRYREGRLTLAKMAEPLDIRWSRPLPEGAVPSTVTVSRDAAGRWFVSVLCEDPTVRHLPVLDRAVGVDLGVSDLVVLSTGEKVRNPGHERRERTRLVRAQRELSRKAAGSANREKARRKVARVHARIADRRRDFLHKLTTRLVRENQTVVVEGLSVRDLLGNRRLSRSIADAGWAELRTMLAYKCVWYGRELVTVDRWFPSSKLCSSCGARRTCLPLHVRTWECACGAVHDRDVNAARNILAAGLAVAACGDGVGPQRSTPGGQSSVKQEVVPPPRSRATARPRG

SEQ ID NO: 11896 - protein, 428 aa, unknown
  TnpB Polypeptide
MLLSKKTSIKVSREYANLIGHMCYAASKLWNVCNYERQHYKETGIEQHPDWYYQKKAHKEDLWYKQLPSQTAQEVCKLLDKAWKSFYALKRSGGIETPRPPRFKQESIPITYMQMGIVHERDTGRVRLSLPKALKKYMEETYQIHENFLYLENKIFRGMDQIKQLRIYPPEKGNCKIIVVYEVPDQEELPQNGHELSIDLGLHNLMTCYDSGNGKTFILGRKYLALERYFHKEIARVQAQWYGQQSGKGVKYLATSKHIRKLYKRKHDSVTDYLHKVTRYLAEYCREQGITCVVAGDIRNIRREKDLGHRTNQKFHSLPYNRIYIMLEYISYTRKKHRTDQELTEQAYSDGKTDGPEQRMLRKDEAMTVYQTLHYLDEPYKEVFTLKVLGELNYKEIAQIFGKQETWARVTYHRARVKIQDILERRST

SEQ ID NO: 11897 - protein, 361 aa, unknown
  TnpB Polypeptide
MTQSLSVSCKLEVPEKLRPDMMRTFDGFADACNSVLAVAKSEDCWNTTKLHHLTYYIVRDATGLKANHVCQAIRRVIDNSKATRKIKKFRPTSVSLDARTFVFHENEWKVGVTLISGRANFNLLIGNYQRALLKGQKPTSAVLVRKQDSSYHINIAIEIDTPPTGKTPKVIGVDLGRRDIATTSTAQAWNGEPLQAIRDRFSRTRAKVQSKRSRSSRRLLRRLSGRERRFQEWVNHNISRSLVDAAKREKAALAFEDLTGIRQSLNGKPRSKTGGGASPAPLSDVEQTIGRFFNCVCLSITRLRLLVFLSCLFHLLTRARLAAAVTTLVKERLSLSSVLTADWRWMPISTPPKILRLLGLL

SEQ ID NO: 11898 - protein, 395 aa, Actinopolymorpha sp.
MRFRLVPTPAQERMLLGHCAHARFVWNLACEQHQHWRPGRSSAPGYVEQSRQLTEARKAFGWLAAGSQTVQQQALRDFAQATANFFAGTHRRPTWRKAGRHEGFRIVGKRGKQWDVRRVSRKTGEMWVPKVGWVRFRWSRQVPDGVKSFRVARDRAGRWHVAFAVVPQPVPAPGTGAVVGVDRGVATSAALSSGERLSVPGLRETEARRLLRLQRRLSRASRGSKRRADVKAAIARIRARETDRRKDWVEKTSTELARRFDVIRVEDLRIRHMVRSAHGTMQVPGTNVRAKAGLNRSIYAAGWGRLVTRLEQKAPGRVEKINPAYTSQTCNACGHCDAKNRQSQAVFVCRACGHAAHADVNAARNIAAGRAVTAREGPPPGEPVNREPQPVLLST

SEQ ID NO: 11899 - protein, 368 aa, unknown
  TnpB Polypeptide
MKRNKAFKFRLYPTHKQEVFFNKTFGCCRFVYNKMLAERKESYESNGKSTSRTPSELKKEFPFLKETDHKALASEWVNLNKAYGNFFRDKRVGFPKFKSKKNDRKSYKTFLSKTKAFDVSRKFIKLPKIGFVRCKVHREIPSDWRIKSATISQTSTGKFYISILCEYDVDVKSVVPDINNAIGIDYKSNGFGVTSEGEILSNHRYFRENQSKLSREQRRLSRKKKNSKNFKKQKMRVTIVHEHIANCRREQAHQLSHLLAEKYDVICLEDINLQNIAQSLNLGKSTNDNGFGMFRDFLKYKMEERGKYLIYIDKWDATSTVCSECGTYHKDIVNSLSVREWTCPDCGTHHDRDINAAKNILKLGLERL

SEQ ID NO: 11900 - protein, 435 aa, unknown
  TnpB Polypeptide
MSTRKSKTAQRREQVASLIPQRTVALTLTLDDDQFNLLAQVAERYNRLWGALVSWCNRNHTVNRTRIQKENYRRLREQFPMLPSQFVCIAMRDAAGAVRSWNSNHPKRRWNLKATRKALVINYDLRTMSIRGNMLTLSTVRGERRIRTLMPETPVWFAARYPARQLNAAKLLIDPRTRTARIALIYRVENETPAADGDVLGVDLGQHSLYTDSRGGETKSNKIWGAKRKYAHNRKTLQEKGTRSAHRRLKAMNGREERFIRDVNHCASKRLANSPNVQAIAFEDLTYIRRQATKRTKTGKRRRNMLNQWSFSQLQEFTAYKAAANGIRIIMVDPSYTSQRCNRCGYVDARNRNRARFDCKRCAWSDNADHNAALNIRDRAIASLEHNHTSTDRPVDRVQSTTRMDGTPTMTSTSDDDGRVVGTTFTSKPLGSPQR

SEQ ID NO: 11901 - protein, 363 aa, unknown
  TnpB Polypeptide
MHYAYRFRLKPTAQQRELLDYHRDTCRQLYNHALNEFTEIPESAGTLNQRVRQVRDQLTDLKERWDELNDLYSTVAQAAVMRIEDSIKALSELKEKGYDVGSLNWKAPNDFRSFTYVQSGFEFDKKNGQTVLSLSKLADIPIECHRDIPDDETVKEVTLKKEPTGEWYASFAVDDKDEPEKPSLEAIDADKMVGIDVGILKYAHGTDGTTVGSLDLSEERDRLEQEQRNLSRKEHGSNNWEKQRRRVAECHLDIKRKRRDLLHKLSNDYAREYDLVAVEDLDVKGILESPGNSRNMASSAWTAFTDLLEYKCKREGTHFVEVDPDGTTKECAQCGAETEKPLWVREHSCPACGFEADRDANAA

SEQ ID NO: 11902 - protein, 410 aa, Microcoleus sp.
VLHRAIQVRLYPTQKQQIQLAPALGCARWCSNYGLNKSIEFYKKTGKKLGCSELNTLLPDLKKSYRSAWLGECYSQVLQATTLKLTTAYKIIFHKLVGFPKFKMQPKKQSVQYRQNVKILEDSVTVGRNSGIAKPKISRLIEGKNKSVIIRKNYSKKSLASIILNEIECENQTTKEGRIYGIDLGVKHFAIVTEGEKKSKYDKAKHFGQHEKNLKRQPQKLRRQQTINNSWYKYRKVVAKLYEQFRNSRQYFLHKLSYKWVSDRLAVIVENFHFWNRSRNQNVAKARSDEVWESFTNFLAYKLERKGGNLVEIDRGVSSSKLCSNCFHQMTEMQLDMREGTCPHCATDRDREREKKAGIKIKAEGIKILKAEGSAVSALGCEVIPKQGRKSKLRHSPMSTEAPTIFGTTI

SEQ ID NO: 11903 - protein, 482 aa, Streptomyces sp.
VKSFRPQPGFVVQAYRFALDPNAEQERALRSHCGAARAAYNWAVSWVTASWWQRNAEASYGIPEDQLTEWRPWSLPTLRKAFNEAKHTDPRFAGWWGENSKEAYSTGLANAATAFDNYATSKNGKRKGRKMGAPRRKSKRKARLSCRFTTGTIRVGTDGRHVTLPRLGTIRVHERAHSLREGVAAGTARILSATVRHERGRWFVSFQAEVKRDLVRVARPDVAVGIDLGVKHLAVMADSAGEIRYEPNPKHLDGSLKLLRLHSRRVSRRQGPDRRTGCKPSKRWEKANAERNKVHHRVANLRADALHKLTTRIRAEYGTVVIEDLNVACMLKNRRLARKVADAGFGEIRRQPTYKGQRNAARTVVASRWYPSSKTCSNCGAVKAKLPLHVRVFDCDECPLVMDRDENSAHNLAALAAAGTIGTGVAGDLNAVKASKPRGADCKTRATRPSRKAGPGRAGGAIPTPRGKEARDRTQTEALTLW

SEQ ID NO: 11904 - protein, 419 aa, Bacillus sp.
MSVGDSQVFPHYAIIGTNVPFGGGVKFMLVNRAYKFRIYPNKRQMELINKTIGCSRFVFNFFLAKQKDKDAYWHICEEMVQNGQLPTNNWKGQYFNKNNTIKSLPDLKRQYDFLKDVDSIALQKSVENLADSYDRYYNKQNKQPRFKSKKNPVQSYTTKHTNGNIAVIDNYIKLPKLGLVRFANSREVQGRVRHATIRRNASGKYFVSLGTETEVAELPKSHSAIGVDVGLTDFAILSDGTIYQNPKFYRKLEEKVAKAQRMMSRRTIGSSNWYKAKRKVARIHEKIVNARKDYLDKVSTEIVKNHDMIGMEDLSVSNMLKNHNLAKAISEVSWSTFKTMIEYKAKWYGKQVVTVAKNFPSSQLCSGCGYRKKDVKNLGLREWECPKCHTHHQRDINAGKNLKNEAIRLLTAGTAGVAY

SEQ ID NO: 11905 - protein, 368 aa, Bacillus sp.
MANKAYKFRLYPTQEQKELLAKTFGCVRFVYNKMLAERKETYEQFKEDKETWKKQKFPTPAKYKKEFVWLKEVDSLALANAQLHLQKAYQNFFSGRAEFPQFKTLKAKQSYTTNVVNGNIMHLDGYIKLPKLKRVKIKQHRDIPSHHIIKSCTISQTTTGKYYVSILTEYEHQPIEKEVQAVVGLDFSMNGLFVDSEEGKTANYPRFYRQSMEKLGKEQRIFSRRQKGSNRWNKQRLKVSKIHEKVANQRRDFLHKSSHALAQRYDCVIIEDLNMKGISQALKLGKSVADNAWGIFTAFLQYKLEEQGKKLVKIDKWFPSSKTCSCCGQVKAELPLSERTFQCECGFMADRDWNASINIKQEGMRQLV

SEQ ID NO: 11906 - protein, 428 aa, Natronococcus sp.
MANQATRTYIATIRNHCQVYDSLDSLGFAASKLWNVARWTVDRIWKETGYIPDHSELSAYLKNHERYADLNAQSSQRVIQELAEAFRGWYSKRQNGDEMANPPGYRKRGDEHPRSTITFKEDGFKHDSEHNRVRLSKGRNLKDHWSDFILCEYDTDPDATVENVQQVRAVWNDQRGEWELHLVCRVEFEGIDSPGDRTAGIDIGISNTAAVSYGDEAVLYPGGALKEDEYYFAKERAKCDDTTSNEARRLDHKWSSRRTHFLHTLSKTIVEESERRGVGTIAVGDLTGIRENGSGETKDWGSKGNQSLHRWAFDRFVTMLEYKAEEHGIIVETVNERNTSKTCACCEHKDSNQRVERGLYICDECGTVANADVNGAENIRRKLEDTQVPPSPDDEDRSTGWMAQPAVHLFDRESGRFTPREQVVNCKP

SEQ ID NO: 11907 - protein, 1322 aa, Methanoculleus sp.
MIISYNYRAYPDATREARLHEALDTCRWLYNKLLEECNTARENGSPLTMQETQARIVTLKEENPFLKGVYSKVLQMVNYTLWSNIRALSPTKKKGRKIGKLRFKSAARYRTLNYNQSGFKIDREHSTVTFSKIGTIPFTMHRPYVGVVKGVLITRSGDKWYVIIQAEQDVSEPKREGRSVGIDVGLDSFAVDSNGAVIENPRFSEHSRDRIKKLQQSVARKQRFSKNWKKAKGKLEKAYDHITNQKKDFLHKLSRRYVDTYATICVEDLNIKYLKENGKSRGLRRSIHSASWGRFYSYLAYKAASAGTNFIQIDPRNTTQMCSHCGSIVKKDLSVRVHDCPYCGFVADRDYNAAVNIHRVGMEQPCEPVEMRPLHHISVMQVLSMKQEAPPPSARGSIGGCMFRVLVVDHDPAFLELTLAWLARSEDMQVATTTSPVQALDMLARTRYDAVVAGYEMPEMDGITLLKEIRHQGMKLPFIIISGRGREEVVIEALNGGADFYLRKGGDPSAQFAELRNMILQAVARSRAEAVYQSVFEHTGTATIIIEGDMTVSLANTEFLRLTGYRREEVEGKLPWTAFVAAEDVERLTTHHRNRRLVPGLAPRTYGFRLVDREGTPREMYMTVGLIPRTDRSVASMINISDRRRFEEELRAAHEEMAAAFEQAKASEESLAAQYRELEDYQATLRGIIDFLPDPTFVLDREGRVVVWNRAIEAVTGIQKERIIGSRAGAISELTAGLFSPLLAETVLAQEGGESVSREVCISPANGGEETYLWGKASPLYDAQGRVSGAIESLRDVTGLKRMEAQIRRRVDLERMVSSISTRFVALDLTDLDDALDETIRTLGLFLDVDRSYIFRFSSDHTLADNTHEWCAEGVDPQIAVMQAIQTDSLPWGLAQIQVGRTICLPALDDLPAEAAAEREFLEQYGVVSVILVPVVTAGEVVGLMGFETIVRERSWSEDDIALLTVVGNLVGDLLGRVRGLKRLRESEERFRTLVERSHDCYIRRNTVTSVIEYISPSWERLIGYPREECMDDPGLIERLIHPDDREVFCAMLQEPEADRLYTFRALRRDRRYAWLEVCTIPVYGDDGEVVAVEYAVHDINAWKQAELALIEANRKLGLMNSIVRHDILNQVTVVLGYIALLRDLPLDPEVDRALEKQQAAAEIIQSLIEFTRDYQDLGVRAPRWLQIEPLVRSAARALRPRGIRIVTDLKGVSVYADPLLSSVFYNLLENAMRHGKTVTEIQVTAVPEGSGALIIWEDNGVGVPSEIKDRIFERGFGSHTGLGLFLVREILSITGITIRETGTPGEGARFEILVPEDCVRF

SEQ ID NO: 11908 - protein, 340 aa, unknown
  TnpB Polypeptide
MEAKLLNGTAEQYQALDSAIRTAQFVRNKCLRYWMDNKGVNKAVLYAHCKDLAKEFAVAKKLNSSARQASAERAWASISRFYTNCKQKAIKKGYPKFKKHCRSVEYKLSGWKLSGDGMSISFTDGFNAGSFALYCNGETRHHILNSKINRVRVIRRADGYYAQFYLVVERKEQGAYTGNVIGIDLGLKAFYTDQNGNPVECPKFLRRSERRLKQHQRRLSRKFKKGAKPQSKNYHKQRKRLGKVHLKVQRQRKDWAIKQARCVVASHDVVAYEDLQVKNLVKNHHLAKSIHSAGWSQFTAWLDYYGKVWDKAVVSVPPQYTTQDCSNCGHRVVKTYPLEP

SEQ ID NO: 11909 - protein, 324 aa, unknown
  TnpB Polypeptide
MKEPYSQCLQVVALNLSRAFINFFEGRASFPNFKTKHRKQSITYPQNVSIVDNGIKFPKMGVVYAKIHREIKGSIKSVTVSQNCQGHYYASILTEDGEETPEKSADGKAIGIDLGINHFAITSDGSKFDNPKWIEKHERNLRAKQKRLARREKGSNNRNKTRKQVARVHKKISDCRLDFQHKLSRRIINENQVVCVENLAVKNMVKNHNLAKAISQVGWGQFTTMLKYKAEWEGKVYQEINRFFPSSKICNVCLNQVRSLTLDVRSWQCEKCDTRHDRDVNAAKNIRDEGLRILSSGAGEIAYCPDVRRDGRGRKTSTISQFDG

SEQ ID NO: 11910 - protein, 192 aa, Hydrococcus sp.
LARKQKGSNTRAKAKRLVAKIHSKIRRVREDFLHKLSRKIVNENQVIAVENLNVLGMVRNHNLAKAISDCGWGQFSTMLKYKAEWEGKTYIEVDRFFASSKICSVCLNKVDSLDLDIRAWTCVRCQAHHDRDINAAMNIRNEALRILRVRNSPSHGEGKTHSRQSLGTSDTSQWRECKTTWQDFGFVGCCSL

SEQ ID NO: 11911 - protein, 282 aa, Clostridiales sp.
LQFRAYPNKEQQNLINRTLGCSRMIYNKGLSMRNIAYAAGDKIGYNQTSSMLTELKKQEDYAFLKEVDSIALQQSLRDLDRGFKNFFAKRAAHPRFKSKHDHHQSYRTMNQSNNIRITGRYIKLPKLGYIKIRQSMEIGHINHVTIERTPTGKYFVILNVDFDPELRPNAGGKIGIDVGIKAFYSDSNGNTVSNPKYLEKSARKLIREQRKACADHKKAESDHAKELAHCKSELQLAHEKAILELEQKYQATIQKLKEEKQAEIDKYQQKYFDLLEKTSSKK

SEQ ID NO: 11912 - protein, 382 aa, unknown
  TnpB Polypeptide
MTVVQKSIRTRLYPTEEQTVLINKTIGCTRFVYNQTLAGCKQLYEQTQHFPSKKERSANLVPLKEVHKFLKDVDSTALQQSVRDLDFALDNFFKNRSHFGFPVFKSKHNLKQAYRTPGGRRNTKVLDNKHIKLPKLGRVKTKRFNMPEAYKIFNITVERTNTGKYYASICIETEVQPLPKTGKQVGFDLGLIDLLIGSDGTRHERPKYAYAFKDKLVKEQRKLSKMRTKLERVNANLDECKNYQKQKHKVAKLYEHISNCAKDFNHKLSRKLVEEYDFLAFENLNIEGMRKNHRLAYSISDVRWSQLLNFIQYKCQWYGKEFRQIDRFYASSKICSECGAYHKDIVNSLSVREWICPDCGTHHDRDVNAAKNILIKALSVGV

SEQ ID NO: 11913 - protein, 436 aa, unknown
  TnpB Polypeptide
MALGLQYIYRKYFSGKGGNCIYLTVKQQTKHLSKEDYITIKELCHTAKDLANEAIYNVRQYYFAEGEFLKYEKNYALLKNSPNYKTLNSNMAQQILKEVDCSFKSFFGLLKLAKQGKYAFTDCKLPYYLPKDGYATLIIGFVRLNGNKLILPFSNSFKKTHKPVEITIPPILVDKHIKEIRIIPKANARFFEIQYTYETECVQRNLNQNNALAIDLGINNLATCVTNTGESFIIDGRKLKSINQWFNKENARLQSIKDKQGFGKRTTNRQKAIARDRNNKVNDYMSKAARITINYCIANDIGTLVVGYNETFQRGSNLGKQTNQNFVNIPYGKLRDKLQYLCELNGITFVKQEESYTSKASFWDKDDIPVYNADNPQEYEFSGNRIHRGMYKTKDGITFNADVNGALNILRKSSVVSLETLYGRGDVDTPIRIRVA

SEQ ID NO: 11914 - protein, 428 aa, unknown
  TnpB Polypeptide
MEKKHNMSEEKNLKIKDTLCATKERRSHMDCRAISVKAQENRLSKAKLEKLYRCFLEGKWLYNAVVATDSLSLEGTSTVQVKVNNTFEEREIKNLSAQMKQSVVDSAKTNVCNLSKAKRKGLKVGKLRFKKECNEINLKQFGKTYKIKSRNKLSIEKIGVLVVNGLGQINLGEVEFANAKLIQKPSGFYIHLTVYSKKQSQQETSKEALGLDMGIKDQLTFSNGVKVNFYLEESEQLKGLMRKLSRQTKGSNQYKQTLARIKRIYEHLNNKKNDVVNKLNSVLKQNYIICFQDELLNQWKQKKSKRRFSFGRKIQRGILGRVKEKLKKNQSNVMLESSVPTTQTCPECGCLTKHSLDKRIYHCNHCGFECLDRDVHSASMMVLLSGYGTYRSLNTDAVSTEKMVGFLNNLSNLGVVVTTTDSMEADCL

SEQ ID NO: 11915 - protein, 560 aa, Thermus sp.
LLPSSTRPGTPGNRRGLPGGPRCPSAPPRRFIWGRGPKEAFRDLEKALKNWRAGRARLPRFKRKKLSPDNTARLTGTIRVLPRHVQLPRIGKVRSKEPTEKLLRLLEEGKARILSATVSREADRYYVSLTCEVARPDPKPKEVKGEHDVVGVDLGLSAFAVLSDGTRMEAPKPLAKKLRLLKRRSKGLSRKQKGSNNGKKAALRLARLHRKVKNLRLDFLHKLTTWLARTKPVIVEDQAGHRGRRSERQGPLPGAAFPVRGRRGVGGFPADAGVQGGVVRGDPHRGAKKLPYKVAPSGLTHPPLLPVRAPPRENAPLPTGLPVRGLWPGDGPGPERGPEPEGLRAGPPDGPYRQFGGESRLAETNGSGYPEAMLQYPELPLESPLIDAELPDPRGGRYRLSQFQEPLLAVVFLCNHCPYVKGSIGELVALAKKYRGKVAFVGINPNDYEQYPEDRPEAMVAFAEAHGIFFPYLLDETQEVAKAYRALRTPEVFLFDERRRLRYHGRVNDSPKDPAKVQSHDLEAALEALLQGKEPPLKEAPAIGCTIKWRPGHEPEVRVG

SEQ ID NO: 11916 - protein, 319 aa, Thaumarchaeota sp.
MKGRLFIPLRRDRYFDVQLNHHALKKLADKKVRSLTITPDSLVFCYSDDIKSIPVARVYGVDRNEKNITFGDKEMVTHVDVKKVVKIRQTTREVIGSFRRNDVRIRRRLARKYWSRANHRTNHILHAATNFIVETAARNGAALAIEDLTGIRKMYRRGNGQGADYRFRLNAWPHWRAKKMLDYKAAWNGVTVIQLTKSETYGSSSTCSACGEKLRAPLRGDVAYARMLWCPGCKAWMDRDAYAALSLSARGRSRFARSLSSRLETGEEESRSQQPTSSSTPIAKEKGLADEAVTGNGTMKTLILRVDASKLTRWREPKS

SEQ ID NO: 11917 - protein, 410 aa, unknown
  TnpB Polypeptide
MFIGCCVKNVIVKLTKTVVLKLTTDTDSMLEETIDKFTEGMDYASTIVYANKKPMGAMKLQKLTYEHLRSEIGLKSQMSCNVARQTAGAYKTLQAQIRNGGTKWQLLEFAPTKVKFSYGRDFSINHDEIGITTLEGRQKYVIMNYQYAKQFFDGSWKYQASELVKHKDGNYYFHLVCEKEIKEPDITQATNFMGIDVGINHLAVTFTTEGQCKFFTGGEIKNIRNVYSKQRKRLQEKDTRSATRVLKHQSGREKRFMKDMNHVVSRKIIESAINDGVSVIGLEDLVGIRKRTKVRKKQRYLYSSWAFRELQTFVEYKAHEAGIAVIYVDPRYTSQTCPTCSHISRNNRRGRSFRCEMCGYELNADLVGAMNIEARTRAFRHDLEVQGLAVDSPDETLLDEFQAPSIRRGN

SEQ ID NO: 11918 - protein, 429 aa, Ferrovum sp.
MRAYRFQLRCRPSGERVLGRYAGMARQVWNRALSEQRARHARGEKYASYVDMAKWLTAWRNAPETSWLAECPIHTQQQVLKRLDETYKRFFEKRGGFPKFKKFGDEPGLRFPDPKQFELDQVNSRIRLPKLGWLRLRQSQPVAGELRNITVRREGTKWFASIQTRTTDVVQALDVPPTLGIDVGLTLFAARSDAGKIDPLEALKKQRRKLKHAQRAVSRKVKGSSNRKKAIVRLGNIHRRIARQRSDWLHKLTTQLANRHAVIAVEDLNIKNMTASAKGTAEAPGKNVAAKAGLNRGILDAAWGEFARQLTYKLEWRGGRVILVNPAYTSQECRLCHHVSAENRRVQEIFQCVACGHTENADVHAAKNILAAGYAVWERQRTASVLSTDACPRQGNHLRVGGVVRRPERASAGVAASVKQEPTEATVLV

SEQ ID NO: 11919 - protein, 442 aa, unknown
  TnpB Polypeptide
MWIRWLDIHHSIGVIKSFHYHRLCIVNLVTTRTITASLTNDREGVVSELDSLGRSGSKIWNVARWTISRIWDHTGEIPGEGPLKSYMTTQDCWKDLNAQSSQAIVEELAGAFQSWFEQDDPEANPPGYRKHGNQRPRSTITFKEDGFKLDTKHQQVSLSKGKNLKDGWADFILCEFDTGPDEDLTDVEDVQQVRAVWNGQQWELHFVCKIRIDPADQSGEKTAGVDLGICNTAAVSVGEETLLYPGNALKEDAHYFRQQEYETEGETGPSSRATWARQKKSRRQAHFLHALSKDIVEQCATRDVETIAVGHPKHIRDDQDWGRHGNKRLHDWAFDTLIQQIEYKAEECGIDVERVDEAGLQTSKTCCECGARADSNRVERGLYVCENCELVANSDLNAAENMRATVTPNPTQDRSNGCLAQPSVRLFEKSTGRVAPQEQVRP

SEQ ID NO: 11920 - protein, 369 aa, unknown
  TnpB Polypeptide
MQRTLYIQLVVSPEQGRAIGVTMALYTACFNAATRFGWDNHTVNGVELHKGTYATLRAQYPELPSQLVCSSRVKATESLKSVRARLAKGKKASCPLSRLQSVRYDARSYTISLTEGWATLATVAGRQRVTFDAGFTRLQTWKPTSAELVYRRNQFWLHVVVESPAPVYTATGEVVGVDLGIVRPAVTSEAKFFGERRWRNVEQRYFRLRRALQAKATRSASRKLRKLSGKQARFRRDCDHVLSRRLVESVDPGAVLVFENLTGIRDRADFGRHGNRRLHGWSFAQLFAFTAYKAEEGGKTTATVDPRGTSQKCSRCGHVARGNRVSQSEFRCQKCGFRINADLNAGRNVKGKYLTREAIGVPSGPRQPA

SEQ ID NO: 11921 - protein, 397 aa, unknown
  TnpB Polypeptide
LPTAYRSVTIDWLPRSQAEWATFTAARREAGRLWSDLVERHLRIRRRQLKWPSEKRWRKWAKGKYPNLHSQSVQLIISEFCEALASAATLRRNGHPEANYPHKPREFHGVPHTNQGAVVRDANLRLSNGSAGYLYIPLPRTIVLPGRLMEARLTYGAVILVCQCEAQITPTGPILGIDLGVNTLLAATDGQTAVLVSGREAKATVQWRAKRLASLRSKQSNCHRGSRQYGRLQRRKHKLLKKSENRVKDLTHKATRTIADAFPGAKCYVGEPFNDAAQKLGRRQAQQVSEACNSRIITQLDYKTAGAITVGEAYSSQTCPVCGTRNKCRRTYRCCDCGFTAHRDVVGSANIRCIGMRGELVPGCDVPNVWTYKYPGVIAPGSSGGRPACSSRKREAA

SEQ ID NO: 11922 - protein, 388 aa, unknown
  TnpB Polypeptide
MEYFMVMKTTLKLKLLTSPDQHQALLTTLEVFNAACNYLAEVAFDNHTANKLKLQKLAYHETRERFMLPAQLAVRAIAKVCEAYKRDKSTRPTFRPHGAAIYDQRVLSFKGLDTVSILSLSGRLKIPIVVHGYAHDRITAYGMRGQADLLYQRGTFYLCVVVELPEPPPGETKDWLGVDLGMVNIATDSDGENFSGAEVNGLRARHNALRSKLQGKGTKSARRRLRQQSGRENRFARDVNHRISKKLVAKAKGTERGISVEDLTGIRERVTVRKAQRRALHSWGFYQLASFVEYKAALAGVPFVKVDPRNTSRTCPWCGHVAKANRPTRDQFLCVSCGLAGPADHFAAVEIGRRAAVNQPNAAAVISLAASPKDCNRVVDKTSQKPSG

SEQ ID NO: 11923 - protein, 408 aa, unknown
  TnpB Polypeptide
VGSGRNYGLTNIHHRPIIGRPNPDPKTSAILSTMRPKEAIILPPQAVGVRTLHLPLVLSNEQFSTLTPVFDLYNQAWGKVVSWCNQNKSVNRSRLQKELYYQLRETYPDLPSQYVSILLREGAAAVKSWNSNNPKYKWALKAVRRRKTISLDARLFSVRGSLLTVSTRVKTPRLRLLLPEIPAWFTERYPQGKLNAATLGVTRSGKPYINLIYRIPQPTQTTVGETLGVDRGLYKIAVTSKGGEYTSNRVRAVRRKYQHTRATLQQKGTRSAKRRLKAMSGREKRFMSDVNHCVSKQLVHTPNIERIVLEDLTGIRNSRRNKTTRQWLGQWAFRQLEHYITYKAHQLGIEVALVDPAYTSQRCSACGYTAKNNRRKGSFVCHQCGFTANADVNAAINVRDKFFSLPGR

SEQ ID NO: 11924 - protein, 385 aa, unknown
  TnpB Polypeptide
MLLVERHYSKGNEEIVRLCKLSKELYNRCTFLMRQAWFTKQRLPDINILTDEVKDLDCFKQFGNTKIAKQTVRKVLTDWSNYCKSLKAYGKDKSKFVRCPKAPNYKKKLAQVIFYNETLKGGQGKKQLENLTANNGCFSIPFKEGYKQVVVTPKHFGFMIEVQYDKKVEKVSKKKFDKDKVCTIDIGLNILAAITLDQTRPILINGRIVKSINQWYNKRPCKSRLKKRYFRIENYFHHVSKFIVDHCVENKCGKIIIGKNDGWKNKINIGKKNNQAFCMVPTYLLLEKIKYKAAIAGVEVVFTEESYTSKASFYDRDELPKYGDPKPEFSGKRKHRGLYVTSDGFALNADVNGSMNIGRKVIPEFLGIRDRSVAATPIVVNPLKV

SEQ ID NO: 11925 - protein, 476 aa, unknown
  TnpB Polypeptide
LSDVAVGCRFCDVAIFPRGENPAVYGGSESDNPKRFANDAMDGYSTLFRTIKSICLHRLYMAIQVTRTYIGSIQNQRQVQSGLDSLGDSASKIWNVARWTADRIWDETGKIPDVSVLKAYMKNQACWKDLNAQSSQKVIEELSDAFQSWFDLRQKDDTANPPGYRKHGDERPRSTVTFKEDGFKHDPDNNRVRLSKGSNLKGYWSDFLLCEYQTRPDVDLSEVNSVQNVRAVWNGDEWELHFVCKVKLKTNDSTGNEVAGIDLGITNIATVAFPDEYVLYPGNSIKQDKHYFKRSEYDTEGKNGPSNKSTWARRKLADRETHFFHVLSDTIITECVERGVGTLAVSWPEDVRDSDWGKAGNKKLHTWAFDRIYQYLEYKGEERGVEVLKENEWDTSKTCSRCGDDTTSNRVERGLYVCSSCELVANADCNGAENMRQKITPSPHGEDRSNGCVAQPSVHLFDRESGTVRPREQVVS

SEQ ID NO: 11926 - protein, 483 aa, unknown
  TnpB Polypeptide
MRKNYNQLMRTKRYRKLLFLYGNSKDKAKRKTYAKQLNEMQKAYNITWEYCRTSMIPIGKKYGVDAVFALTKAEDIWRGIEKCLYGNGNILHFSKYGELPCIRAKQINRGIPISVTDNKLHFKLGRMVFGIQINDRFHQDEVDAVLSYLADSEILDDRAVSILIKDGCCIDTYRPCYATLVPRMIRGKYRVYLHLTIEGKAKPKYDRFGSPRHKYGKGMIGADIGTQTVAYTSDTEVGLKNLSERGNSIQTSERKERLLHRAMDRSRRAINPQNYNDDGTVKKGRKTWKYSNHYKKLKEKHSKLCRINAINRQLAINEDANHLRSLGDVFITEPKNAGKLMRRTKETTVNSKGKYNRKKRFGRSIKNRCPSGFQTAVEQKFKVSGGIYIEVSNDYRASQYDHTVDDYIKKKLSDRMYKLQDGTEVQRDWYSSFLLYCYDYRTKDIDKNKCISEFDKCYNKEKALIEWIKVNEIKILNSGIKTA

SEQ ID NO: 11927 - protein, 291 aa, unknown
  TnpB Polypeptide
MSCTERKKEGKDEAYLKLYDGHDWKWFCVRLNHTDMEYLRRNWSGKKASAPTLEKRHHKYFLRFSYTEEVTLTKTPVKEQIICSVDLGINTDAVCTIMRADGTVLGRKFINHPSEKDRMYRTLGRIRRFQREHSSAQSRGRWAYTKRLNIELGRKIAGAIVKNAEENHADVIVFEYLEMQGKISGKKKQKLHLWRKRDIQKRCEHQAHRKGMRVSRVCAWNTSRLAYDGSGSVSRDLKNHSLCVFQTGKRYNCDLSASYNIGARYFIRELFKIPSGNGKVFAGGKSPFGKA

SEQ ID NO: 11928 - protein, 652 aa, unknown
  TnpB Polypeptide
MKKKKFKVSTEDDTFIPFEERQRDSTITLPLSKNKIKVPNSDQFMVELHNVVSEANEIAYYCNALALYHVTKTIEQYGKLSHPLDKDFFFTCLCLVNNGSKPTIDKAKEYGLIQSYCELFDCQEEKLTVLFDYKNHGAIPLYTAINMETVLNNYNEIAIFDHMVPYIKAKYYLNHTGHAKFIINRFTSKDPLNFDVELKNFPYDEETLRNIITIEAAIWQNHKDGKRNEYRYKMLRKIEARCNDVQSYKRFTLLPIRTNGIKFIDLDIFTIKQIWSRIKPCRVAKKNTEIEKDLLDEWQWYYDENVSMCDWFTYPKRGNGFEPGKLIRTNSYEIHYLFEKGKIRNHAGRALATSKDNVLQETDWDPEYTFINKSKNDISNYCNFAAADTGHHNMFTATSPDGTFHKNGSLNMEIRNYTKKKYNNDSLRNIVNKRSRRLGKNKKIQQMMNQLASNSMKTSNSFELAVNIHGHLKYYRPIYNHFKNHQFQKLKVRARMMEKKTIDDMIHWITWNGKKPLGIGDGSKTTGFKGTSPGGPMCKIRRHANKKGYEINLVKEAYTSKRSSCCAGHDCRAMKDENGDSVHGVRICQKCGKTWGRDVNSSFQIFHIFYKSQVLGGARPEQYQNNYVREQCTEWWLDTLGRSGPDSHSWVV

SEQ ID NO: 11929 - protein, 433 aa, unknown
  TnpB Polypeptide
LQLSPSSQPESKVGGGTALKTMKVRIYPTWGQRQWFIKTMHNCRALRNEAVALEREGKLKPSDLSKGRVGSKLISTSQRKAEFDTGSEKWKAINSTPGHIRKQTLMQLKSNYDTAFTLLKKKHINHFKMKYTERKVKKGRMTLNIDATQVKLKAKNDSELSGFLPQTIIKERFKENGEYVFKDVNFGSIRYKLQGSKRRQLREKRAFPNVKGRFSILYEEPGRWFFCVAYEKPIQTTKAKFNDVSLDPGLRNFQNFYSADAQTVGTIDMPDMKNNLMSLINKIKYAQTMKDKARSKHDSTRWLNRFYFLWNKFKNKKNDLHWKTIRFLVDNFETIYIGDMGSKFIQQSKVLGKKNKQKGTFLSHYQFRQRLLESAATRTIVVVPESYTTKHCTSCGCINGVGSSKVYHCSSCKITLGRDDNGARNIHLKGKCM

SEQ ID NO: 11930 - protein, 439 aa, unknown
  TnpB Polypeptide
MPLNLFFLVPLLSNPSHNEGERIMQLTEQHIITCDDPRFAAIDAAAFASKNLYNATLYEMRQAFIFQGIYLSYGEMDKRMQPHEAYKALPAKVSQQVLKQVADAWKAFREAKASYEEDPSKFTGRPRLPKYKHKTEGRNILVYTIQALQGGQSKKGIRGRIRPSGLPIEVKTRQQQIDQVHIVPRNGYYVVEVIYSKDPVQAHVDPSFCIAIDLGVTNLAAITSNREGFVPRLVNGRTLKARNQWYNKRMKELKLCLPEAERDRVTKQMQRITNKRNRQVDHYLHTASKAIIDLMVKEGAGTLIIGKNPLWKQEVDNGRRNNQNFVNIPHARLINILTYKAELVGIQVEIQEESYTSKASFLDLDLIPVYQPGDETEYTFSGKRMGRRNRLYRAKGGRKICADVNGSYNILRKRRPDAFSEAKGVAAYVVQPLRLAITV

SEQ ID NO: 11931 - protein, 402 aa, Escherichia sp.
VKRLQAFKFQLRPGDQQECEMRRFAGACRFVFNRALALQNENHEAGNKYIPYGKMASWLVEWKNATETQWLKDSPSQPLQQSLKDLERAYKNFFRKRAAFPRFKKRGQNDAFRYPQGVKLDQENSRIFLPKLGWMRYRNSRQVTGVVKNVTVSQSCGKWYISIQTESEVSTPVHPSASMVGLDAGVAKLATLSDGTVFEPVNSFQKNQKTLARLQRQLSRRVKFSNNWQKQKRKIQRLHSRIANIRRDYLHKVTTTVSKNHAMIVIEDLKVSNMSKSAAGTVSQPGRNVRAKSGLNRSILDQGWYEMRRQLEYKQLWRGGQVLAVPPAYTSQRCACCGHTAKENRLSQSKFRCQVCGYTANADVNGARNILAAGHAVLACGEMVQSGRPLKQEPTEMIQATA

SEQ ID NO: 11932 - protein, 393 aa, Oceanobacillus sp.
MEVGRVWSDIVQYGNDYYRIFKLWIPKSDLEKMTKQVYELHCHTVQAIVAKYNVNRMATLRRRKSGDIRAKYSWKGKRFYTIPYKRAGMVVSKQKIILKHYRYEMDVKDLLLTCNKKVKKLNDYIEIPNLAQEDISNISYGEIVYKNGYYWFHYVVEVSEKKINMVFKPAGCDLGEIHSLAIGTEDKALIISGRAIRAIKQYRAKALAELSKKMSRCKKGTKKWEVYSQACQRIKTKSRHQIDYLIHKSTKEAIDFLIKEKVSDLVIGDPTGIEKGTKRDPRKRKNRTRRQQLSIWSYGELKEKLEYKCKLNGIKNHFVSESYTSQDCPFCGGRHFSNGRRFICSVQKTEIHREVNGAQNICRKKFRLAVRPVDVLFKQPVWYRRKVSPNKKA

SEQ ID NO: 11933 - protein, 377 aa, unknown
  TnpB Polypeptide
MRTLRLKVRREANEWLNAAAVEVNEVFNYCNETSVKAATRTDTKRKWLSGFDLCRLTAGASPYFDKIGADTIQSVCVDYAQKRQTAKRLKLRWRVSHGSRRSLGWIPFKAASLKRKGVCLRFSGKCFRVFERERLEGVKWQAGCFAQDALGDWWLCLPVKMAAEESVAPYEAVGIDLGLKDIAVTSEGERLVAGRWTHRLARKLASAQRRGHRRQAKRIHRKASRCRADALHKFSRSIVDRYQNIIVGDVSSLKLVKTRMAKSVLDSGWGKLKVLLEYKSQQAARSFEIVSERNTSVTCSTCGSPTGPRGVNGLIVRSWVCGDCGESHDRDVNAARNILFGSRCRTSICGNEQSSWLIPPSRVYRVREAGIETAWAA

SEQ ID NO: 11934 - protein, 415 aa, unknown
  TnpB Polypeptide
MLRTYKYRIYPTDEQKVLFAKTFGCCRFVYNWALNLKITAYEERKESLSNVYLTNLMKSQLKAEYEWLSEVNSQSLQSALRNLDTAYTNFFRNTKAVGFPKFKSRRNRQSFHCPQHCRVDFEKDTITIPKAPGIPAVLHRRFKGEIRTVTISMTPSGKYFASILVDTNLQELSPKVIRINTTVGIDLGIKSLAVCSDGRTFDNPKILDRSLKRLAVLQKRLSRKQKGSSNRNKARLKVSRLQEYISNCRKDNLHKITYTLTHDSQVRTICMEDLNVKGIQRNHHLARATADASFGMFLTLLEYKCKWYGVNLIKIDRFAPSSKTCGRCGYIYKGLKLSERSWTCPDCGTIHDRDYNAACNIKEFGLRALPAERGKVKPVDCPLVDDRPRVLKSNGRKKQEKRGGAGISEAAKSLV

SEQ ID NO: 11935 - protein, 377 aa, unknown
  TnpB Polypeptide
MPEQKTKINKTIGTCRYMYNFYIAHNKELYDKGEKFLPYKKFSVWFNNEFIPNNPEYLWIKEVSSKSIKRSLENANNAFSKFFNHKSNFPRFKKKGKSNVKMYFVKNDDKSIIQCERHRIKIPTLGWVRIKEKGYIPTTKSGLVIKSGFVSKKADRYYISVLIDIPENVVNNNSDKGIGIDLGIKDLAVVSDGTKYKNINKSYKVKRLEKQLKRQQRSLSRKYENLKKLKKGEATQKANIRKQMLKVQRLYHRIDNIRTDYINKTILKIVKTKPSYITIEDLNVKGMMKNRHLSKAVEGQKFYEFRVKLKKKCSENSIELRVVNRFYPSSKLCNCCGFIKKDLKLSDRIYRCNCGYVEDRDVNTALNLRDAKTYKLA

SEQ ID NO: 11936 - protein, 463 aa, Cupriavidus sp.
MTTVTRTLYATSSHVAALRGTCKAMAFVRADLWRRYGALGTVGKSAVDIRKEVTAAGWYANLAVDGTIRAETTKDVVNDILTYKAAACVKVRQAIAKRTADEAERKRLYTLLKRDKWLEDKYLHRIMRKYFRHGVSSCDNQFIVRSDKHESRVRDGRLVKTLHIARQYGHPIELTTNSNGKSVNLKGCNLRVIVKGDAIEIHYATEKAKGRLCGTGEIGVDKGYTEAFTDSDGGHHGQSFGPVLSAYSEQVAKTGKARNRLHALEKAYRESGRIAKADRIRKCNLGRVKLQARRDRAKQRLRTIAYQSAHTIVDKAAVVGSEDLTSPIKGRSQWRSYNRRMSAWAKGVLAQAIDEVCAQRGATHVVVNAAYTSQMDSFTGLLEGKRVGDKFYRVNGDVLQADTNAARNVRDRIRDRDITRYMPHLQVKQILFARSSGATERQVASVGRRKSRQRSADKSNAQL

SEQ ID NO: 11937 - protein, 220 aa, unknown
  TnpB Polypeptide
MENRRKRYLRGKARKIKPRIRKRFARRKTTLMKIDYQARTIRITLRQGEYPSISWKSTWFEHRVRGWAVGKAIIFDDRVVSPFNGFKEICVRRVIGWDSDELSLDGYEPCIGFIHVDLKSLQSIKILYGRKKAIAQSRSKRELYEKYVRRYVVETQEGHFFECPRCGLKMNRHRVASINIRRRYLEGKRRAGMRGYPHSNEPEEAMKVELWVGVSEHAIK

SEQ ID NO: 11938 - protein, 576 aa, Moorea sp.
MSPQKRQPNITASRSQLLDDGTKTEGSTVLEPKAIREGSALKEKTRKVSPLSVMHGSLPIPNEMTSTDKLNFYGQNTQTLKLFQKLDHDSILGGANLSKYWSEYTCLISQHLSLPIQTEQSDLGFHYLNGCAKKVRSNSWFSMNASCPQNKSLSKISCPSSTVSLLGFTDSENLKSKSRKRYKTKSRNQTMKLTPNSVNKIRVFPCKELHKIWKTWLNAYRWIYNWSIATIKNGYVGSAYDLQKLARNSDRPEWVKTLPGHQLQEAVADAIDASKQAKANGGFAKFKSCRETSQVIKFKAGNFKKGSWYLTKVKGLSFRSPQGFPDQCIYGTQLVWIKGKWYGIFPEYIEPTPTTVDKVIALDPGIRTFLTGFDGFSYLEIGTGDIGRIQRLCQQLDRLMSRIDLSSAKRQRRSRSVRQSAAMRKASHRLRQKIQDLIKDCHNKSASFLVNNYKLIFIPTFETSQMVVKSARRLNKKTARNMLTWSHYKFRQHLIQMADRNDVRVVLVNESYTSKTCPECGQIHEKLGGNKKFQCPKCGFSLPRDWNGARNIMIRALSATTTRFSSGAIQVIPADE

SEQ ID NO: 11939 - protein, 374 aa, unknown
  TnpB Polypeptide
MLKSFKYRLRPTKKQENILLAHIEQCRILYNQLLCARIQAWKNENKSLSEYDQNNTIPMLKEQHPEFKHVYSQVLQQVSKRVDLAFKGFFRRLKEKAKTGEKAGFPRYKGEHRYDSITYPQFSIGCRLDVKGLRLGNIGCIRVVQHRPLGGIPKSCTITRTATGKWFASIPCDIGERDKKPNTNSAIGIDVGLTSFAVTSDGDKIASQRFFRKEEKSLAKAQRKWDKVKKRPNTDTVREKRRKVIGRVHERIRNKRHNFAHQESRKIVNRHNFIAVEKLDVKEMQKNRRLAKSIADVAWSLFRHCLEYKAEEAGIGFKAVDPKHTSQDCSACGHREKKALSDRVHHCKVCGYKTDRDHNAAINILTLGLQRQAD

SEQ ID NO: 11940 - protein, 238 aa, Thermococcus sp.
MKRTVTLKLQPSKEQEKTLLELAQATAVIWNKINYERLKQFKEFGKIDFGTTEKEAYYTFKGWVGGSTVQQLARKNAEAWRSFFSLLKKKKSGELPEWFKPRSPKFVKEENGRKLFVIPLRNDQYKIENNTIELRRLGKFGRLKIQFKGRIHLKGKQGRMEIIYDSVKRKWHAHVSYTVEEKLTNGEWVKVPREPQSNLTAGIDLGVNNLIAIYIENGEAFLVNGRPLKSIAFYWQKE

SEQ ID NO: 11941 - protein, 249 aa, Thermococcus sp.
MPSETIKLTAKFKLKTEPEGLEDLFTLYSDIVNFLLDYAFENNITSFYRLKKETYKGLRREYPDLPSHYIHTACQMATSIYKSYRKRKRRGKANGKPIFKKQVIMLDDHLFKLDLEEGIIKLSTPSGRLKLEFYRAKYHEKFREWKIGQAWLVKNQMGIFLHVVFSKEVEVREPKVIVGVDLNENNVTLSLPNGEFVQIITHEREIRTGYFLKRRKIQKKIKTGKKGRASGKKYEKGEEQAERFVSQVG

SEQ ID NO: 11942 - protein, 390 aa, Thermococcus sp.
VDFNRTEKIVYEEFKKEIGSATVQQICRKNAESWRSFFSLLRNKRNGELPEWLKPKPPNYLKDDGKRKPLIVLRNDQYKIEGNRLILKGLGKFKRLEVQFKGKIHLKGKQGRLEITYDTVKRKWYAHISITVEEKLIGGEWIEVPRKPLGDLSAGIDLGVNNLMAVYVENGESFLVNGRPLKSIAFYWRKRIADYQSKLNRSGAKRSRKLKRMHGKAKLQAKHYINTAVRQTVEKLYHLGVSRIVVGYPKGIARNSEKGKRQNFLLSHVWRFNTVIQRLKEVAEEYGIVVQVVNEAFTSKTCPVCGKPHEGARFVRGLFKCPATGLDFNADLIGAFNILKKAVEKITPNLGGLYAQRRGNGGKTLPEGSKTRFNLGLNETPQTSLPMARG

SEQ ID NO: 11943 - protein, 365 aa, Thermococcus sp.
LARKNAEAWRSFFSLLKKKKSGELPEWFKPQPPKFVKEGNERKLFIIPLRNDQYKIEGNTIELRRLGKFGRLKIQFKGRIHLKGKQGRMEIIYDSVKRKWHAHVSYTVEEKLTNGEWVKVPREPQSNLTAGIDLGVNNLIAIYIENGEAFLVNGRPLKSIAFYWQKRIAEYQSKLNKSGYKASRKLKRMHQKTKLQARHYINTAVRQTVERLYEIGVSKIVIGYPKDIARNSDKGKKQNFILSHVWRFNTVIQRLKEVAEEYSIEVVLVDEAFTSQTCPLCGQRHSNGRIFRGLFKCRREGVVMNADLVGAFNILRKAVETITPSLSALAGGRGNGGKTLPEGLKSPPLMGFSEAPQTSLSMARG

SEQ ID NO: 11944 - protein, 399 aa, unknown
  TnpB Polypeptide
MIKAYEYRIYLTPQQEELFNQTLGLCRLYWNIVVFNKNQNHDMEIEGYKPTFQKYKPEALEWVKNVDSTPLAQMWSDIRKAYHNFLMSYKGERKGKFSNLPKFKSKKNPKDSFRYSCLCTYPRINKNGLFISRKIGYLDIRAGCRFCEGKWKNITFRRTATGKWFVKICVEKKDEPKIHNGKAIGIDWNCDDNDFISMSDGTKIKCPRFLRKREKQLAHYQRELARKFVKGKEIQSNNYYKTKMKVAKLHEKVSWQRKDWLHKVSRDLANKYEYVIVENINLQNMAENLNHGKAVGDQGFGMLRNMLAYKTTLIKVSAKNTSKTCFDCGYVNPKVVLGVKKWVCPVCGVNHDRDINAAKNILYKGVTSLGIVGREPSEIRNASGEPRCSVKEESELTSN

SEQ ID NO: 11945 - protein, 430 aa, unknown
  TnpB Polypeptide
  misc_feature (19)..(25): Xaa can be any naturally occurring amino acid
MTSLISWVLNSLSLTILSXXXXXXXLKNDKKEETKILLENYRALLQKALDWLWDRTRIERKEVKKGKKAFTKVKLPKKKEVYKALRDDLEKINNLASHYVDKAINDAYSILGSWKRRAEKRQASLRKPTLRKVYVRVKSTLRKVNGEEVRITVRPYEYITFSWSHCWFSRRVGGLELGEPIIKEDRVHLPFRYKLPWSTPLDFLSIDSNIYTLDAYDGEKFVTFSIKELYSLKFGMELKRGRIQSFASKHGRKGKVLLRKYSHRERNRVFDYVHKLVNKLLGMYPLTMFAVEKLNKQSMFQDADDKLSKRISRTVWRTIHRVLKYKAPLYGSFVKEVDPYLTSKSCPRCGWVSRKVGRTFRCERCGFTLDRQLNASLNIYLRMCGFPHILGIPRLWVGVIPLKGRRGNGFPRDSGEAQGLRIGYNFMKIQ

SEQ ID NO: 11946 - protein, 566 aa, unknown
  TnpB Polypeptide
MAKDSKEGGELMRTFQMMIDPTKNKKDAAFCQYFKTNTADSKCMYNTANFYIRNTMTGIKKSPEERTHSEIEVLHYVFTGIQRHNNKCMAKIVIYNLKEIGGMIAAAKMHDILSKIIAFPTKQEWFLSYYTLDTIFKINKNPVYVRMNSQVNQNAIRKAVKAWKGYFKTVKDYGKHPEKYTAKPNIPGYKRHTEYTAWFTNQAAKLNEENGKCYIRFVNNPNKLEIGKASLYSDLKYVKTEVKAMYGKYCVLITFDDKIKEVKAPKIPKRILGLDPGVNNFLGVANNFGGAPFVMNGRAIKSANQRFNKKRAKLMSNLTKGSDSKTSVKYSRQLNTLSQKRESFLRDYFYKCAWYICRYAEAADVNVIVMGHNDGQKQEINLGNVVNQNFVSIPYTKFIDALKTVAAKCGIAVVVREESYTSQASLLDMDDIPTYKKGDDKKYTFSGKRIHRGLYRSKNGTLLNADINGAANILRKEYPGAFDGIKDFTYLYVTTISIDYKDLYKNAKTCVGRPKSYKYHKSGRYTAVRHMKRSHKKCEYNKLWGKGKSVWTPDKNKQDMQQEKTA

SEQ ID NO: 11947 - protein, 370 aa, unknown
  TnpB Polypeptide
MRKTYKYKLQHQSNTIKLGNLLDDMHRIHVHIMRLQKRYCRLFGKNISAYRMNAHIAKLKKRTKPHWKELPSQVIQDVVLRMGKAYDAFFRNIAARKAGKTTKKVGRPHIKPHHKYNSMTFTQAGYKLEGNRIKINCIDTWYSFHKHREIKGEIKTITIKRDMCGDYWICFSCENVHDSEPKAMTGKRAGFDFGLKTFLTSSDGDKIECPQFLKRSLNRLRSLNKSLSRKVLKSGNWYRAKRAVSRHYRKVARQRYDWHWKLATHLCRSYDTLIMETLNIDGMKRLWGRKVSDLAFYQFLQILQQKCVKHNKQFGQIELWTGTTKPCSECGERNEEITLADRRWRCSHCGIAHDRDINAAINIKQAGLAA

SEQ ID NO: 11948 - protein, 377 aa, unknown
  TnpB Polypeptide
MQLARELYNILLEKCKEHYRETGRTFRQFDMNNYIKGLKKERPEFSEVHSQVLQNISKRIADAYRAFFRRVNEKRVGKKVEVGFPRVKKFVSSLTYPQAGFKFKSQRRIYLSGIGSVPIVLHRLPKGQIKTCVIKQYRSGKWYIGFSSDIPQEEFKPNNKPPIGVDVGLRDFVTLSNGEKIESPKFLRKSEEKLKFLQRRVSRKKKGSKNRRKACLKLSRQYEKIDNQRYDFLHKLSRQHVDSYSKIAVEKLQIQNMQKNHHLAKSIADASFGKYIQMLHYKAWSAGCEVIEVNPKNTTQECSNCHKIVEKELSDRMHNCPSCGLSINRDLNSAINILNRATDGLPGSNACRDLSSTVSEMKRQDISEKQELNEVGT

SEQ ID NO: 11949 - protein, 419 aa, Calothrix sp.
MLRVVKVRLYPDVQQQQSLAQAFGSCRWLWNYCLNLMNQTYKETGKGLSGYAVKKIIPQLKKEYEWLTSTYSQCLQQVCLNLGVAFNNFFERRAKYPRFKSKHGKQSIQYPQNVKVADNCLSLPKIGEVSAIIHRSIEGKVKTVTISKNCSNQYFAAILVDDGKDKQLSSTEGKAVGIDLGLTHFAITSDGSKFDNPRILNKHEKNLKLKQQQLSRKQKAVQCGLGGFPHEQLHQEGSQNRIKSRIKVARVHRKITNCREDFLHKLSRRIVNENQVIVVENLNVKGMMQNHCLAKSIQSVGWGMFCTMLKYKAEMSGKIYQEVDRFFPSSKTCHVCLNQVGSLPLDVRFWTCKNCHTKHDRDVNAAINLRDEGLRILTSGTGDKACRPDVSRSKGGRKKSTTTLSVGQEAYTVPSGQCR

SEQ ID NO: 11950 - protein, 514 aa, unknown
  TnpB Polypeptide
MLQTYQTKIKNATESSAIECLNIIASYFTELERKLFLDSFIRGKSRAACKNGYLKKYEITARQYNAIYIQLEGKVNSIIELNKLHVVELKDKIKSLEKYILSNNEKLVTLREKLIKLEKKAPFSEKFRKTAKQRKNIKFIIHQKKRKLAIYKNKLKRLEQDIKNGTVRICFGSKVLFKKQFELEANGYQSHAEWKVDWKSARSSQFFCIGSKDETAGNQTCTYTSNSSLRLKVPDKYKKDYGNYIIFNDIKFPYGQDTIDHARQSYIGITSGGKPVKHVNAAISYRFTKKEHGWYINATVEKEISNIVTHLRLGCLGVDLNAGFVSLCDSDRFGNPLGEESIPCPMYDRSTDQITASMGDVVNVIVNRALQAGKPIAIEKLDFSKKKSALGEESYQYARMLSGFAYSKFKEMLKARASKLGVEVIEVNPAYTSIIGQVKFMKRYGLSSHGSAACVIARRGLGLKLEKPKYDSILGNFKKTINHKALKSRWSTISYLSKKNYSFKARVELLKLEA

SEQ ID NO: 11951 - protein, 487 aa, unknown
  TnpB Polypeptide
LDGRGVGGHARPRPPVRPLRPGHFPGTARPPAQRRDQPDAARRVPPPALAPADVVVQVVLRRLGRARVGGHDPPVHRRADHPADQGGAVKRAYKFRAYPTGQQESRAVRLLRDHCDLYNAALAERREAWRMCQVSISYGDQSAQLRGIRADDPHGHGRHSFTAQQQTLRRLNATFKAFYERAKDAKQARARGEQKPSPGYPRFKPYQRFNQILFVVGDGAKWQPATNGGRWAYATFQALGRVKVNQHRAVKGRVKTVQLKREYRRWYVIVVAEETAEPLSVTGRTVGVDVGVARFLTTSDGEVVGNPRFLDSAQQRIADLERRKARAKLGSGNRGRLRRKLAREWRRVRNRRRDFHHKTARALVNAYDALALEDLHTANMTRSANGTAEAPGRNVRAKAGLNRSILDAGWGQFANILTAKAASAGRRVMLVNPAYTSIDCHACGARCTRPRQDTVICPACGEHDADLNGARNIHARAGLGSGRALVA

SEQ ID NO: 11952 - protein, 810 aa, Mycobacterium sp.
  misc_feature (455)..(772): Xaa can be any naturally occurring amino acid
MARLKVPEGWCVQAFRFTLNPTQTQAASLARHFGARRKAFNWTVTALKADIKAWRADGTESAKPSLRVLRKRWNTVKDQVCVNAQTGQVWWPECSKEAYADGIAGAVDAYWNWQSCRAGKRAGKTVGVPRFKKKGRDADRVCFTTGAMRVEPDRRHLTLPVIGTIRTYENTRRVERLIAKGRARVLAITVRRNGTRLDASVRVLVQRPQQRRVALPDSRVGVDVGVRRLATVADAEGTVLEQVPNPRPLDAALRGLRRVSRARSRCTKGSRRYCERTTELSRLHRRVNDVRTHHLHVLTTRLAKTHGRIVVEGLDAAGMLRQKGLPGARARRRALSDAALATPRRHLSYKTGWYGSSLVVADRWFPSSKTCHACRHVQDIGWDEKWQCDGCSITHQRDDNAAINLARYEEPPSVVGPVGAAVKRGADRKTGPGPAGGREARKATGHPAGEQPRDXXXXXXXXXXXXXXXXXXXXXXXXXXXXXXXXXXXXXXXXXXXXXXXXXXXXXXXXXXXXXXXXXXXXXXXXXXXXXXXXXXXXXXXXXXXXXXXXXXXXXXXXXXXXXXXXXXXXXXXXXXXXXXXXXXXXXXXXXXXXXXXXXXXXXXXXXXXXXXXXXXXXXXXXXXXXXXXXXXXXXXXXXXXXXXXXXXXXXXXXXXXXXXXXXXXXXXXXXXXXXXXXXXXXXXXXXXXXXXXXXXXXXXXXXXXXXXXXXXXXXXXXXXXXXXXXXXXXXXXXXXXXXXXXXXXXXXXXXXXXXXXXXXXXXXXXXXXXXXRHRRPHPWPRPGRPAVRAAPTARTTPAPAEPIQDRLHR

SEQ ID NO: 11953 - protein, 389 aa, unknown
  TnpB Polypeptide
MKVHPYFLERGGGKMIKSFTIKLYPNRQQESLFYKHINCQRYIYNWGLNLNNELYKKDKKKYSSKELGKMLTQYKKQEPWLNEVSNTTLKEAIRNLDKAYTNFYKKRANLPRFKSKKKSKLSFYTRYDRIKFYDNRVNLEKIGKVKYKSTYDIDFSKEISFKNSHISYNGRCWVLTFVLDVENKFESLTNEVIGIDLGIKYLAICSDGVVYKNINKTHVVKKLEKRLKRLQKQVSRKYEMNKKGGRYIKTNNIKKLEKDIKHIHQRLKNIRLNYLHQTTADIVKTKPYRVVMEDLSITDMMKNKSIAKEVSNLGLYEFIRQMKYKCEWNGIEFIQVDRYYPSSKKCSHCGAIKKDLKLSDRQYKCDECGLDIDRDFNASLNLMNYGLSL

SEQ ID NO: 11954 - protein, 538 aa, unknown
  TnpB Polypeptide
LDIKLKNEEFIKLKNSIARKSVIKILLYSLGAIILFSVLIDGVYNDELADSLASVNRDIYYWCIANKIILLGITYLVIFAIISFLVIRNTSNNMVEIIKAMDQIIKEPEKEVKLSNDLILLESKLNNIRVDLVSNQNKAKEALQKKNDLIMYMAHDLKTPLTSIIGYLTLLTDEKEIPENLQKKYMDIALKKSLRLEELTNQFFDITRYNLQSMPITKQNIDLVFLLEQLVEESYPMLQEKKLECILNKPKAIQFMGDGDKLARAFGNLLKNAINYSYLNTTIKIDIKERMIKVPKLGLVKIRGYRNLDELTDRIINITIEKEKTNKYYVSVITQKEEEIPQKITPTSIVGIDLGIKDLVVTSDGEKYHNPKEINKREKRLKRMQRKLCRQVKGSNNYNKTKEKIARIHSKIKNSRKHNIITIANKIVKEHDIIVSEKLNVKKMSSNHKLAKNILDVSFNKICELLKWKAKLLGKYYYQVDTYYPSSKICSHCDNKTEITNDLKVRMWECENCGNTNDRDINASINIMFEGIKIHFAS

SEQ ID NO: 11955 - protein, 305 aa, Megasphaera sp.
MYELSAKNDRLNLNKAYSHFWNDSQHFGKPRFKSKKNSRASYSTNNQKGSVRIEDHKVKLPKVGWVKLCQHRPLPENSIIKTVTISKTPSGKYYISMLVEYENQVLPVIPKTFLGLDFAMHGLYVASDEEDAKYPDFLRKAEKRLAKAQRKLSKKQKGSHNREKQRLRVAILHEKVANQRRDFLHKKARYLADRYDAIGIEDISVKAMAKRKKGGKFSFGKSVADNGWNMFTNMLEYKLAWQGKQLIKIDKWYPSSQLCHICGYQNHETKELSVREWNCPKCGSHHNRDKNAAINIREEARRISA

SEQ ID NO: 11956 - protein, 367 aa, unknown
  TnpB Polypeptide
VLKAYKYRIYPNSEQRIQIAKTFGCCRFVYNQTLAYRKEIYEKEKKSVSKMDCNNYCNRELKKDYEWLKEVDKFALTNAIYNMDTAYQKFFKEHAGFPKFKSKHDNHKSYTTNYTNGNITVNHEKGKIKLPKLKEVKARLHRNYSGQIKSATVSQMPSGKYYVSILVETEHKELVHTTGSIGIDLGIKDLCITSDGKIYENQKIIRKYEKQLVKLQRQLSHKEKRSKNYYKTKKKIALCHEKIRNTRKDYLHKVSHEMISENQVIVSENLQIKNMVKNHCLAKAISDVSWYELTRQLEYKSKWNGRKYIKIDTFYASSQICSACGYQNSDTKDLSVRTWICPKCGAEHDRDINAAKNILAEGLRQIA

SEQ ID NO: 11957 - protein, 413 aa, unknown
  TnpB Polypeptide
LVFVRTAYKCRAYPTPEQASVLNRTFGCVRVVWNRTLVWRHARYYGGEQAKTNFAQANAYLTAMKTTGELAWLNEVSSVPLQQAIRHQQVAYANFFAGRARYPRYKSRTGRQSAEFTRSGFRYRDGALFLAKMDTPLAFVWSWPGIDPASIDPSTVTVSRDPCGRWYVSFAVDAADPEQLPAAGGAVGVDLGIKDFAVTSGGEKIANPRSLARRERNLARYQRRLSRCQRGSANRAKAKAKVARAHRKVRAARTDFLHKASTRLVRAHDVIVIEDLALKTMVRNRKLAKAISDCGWGTFRAMAEYKAARYGRRVITADRWYPSSKTCSACGHLLADLSLKTRTWQCPSCGTRHDRDINAAKNILAAGLAVAGDNPGHACGADVRPQGNPLRRSAVKQEPRPVRAGIPVLQGGE

SEQ ID NO: 11958 - protein, 382 aa, unknown
  TnpB Polypeptide
MRKAFLYRMYPSKIQAERLQNLLDIARTFYNAGLEERRDAWQKNHISLNYYDQANQIKEIRDTNPEYALLNYSATQDMLRRLDKSFKAFFRRLKKGEEKPGFPRFRSRHRFDSITFPTYGDGIKLKGNRLYVLNVGEVKIKMHRSLEGEIKTVTVKRQCGKWYAVFSNTVDAEPLPVSDRQVGIDMGLTAFAVTSDNETIGNPRYLREAEAALRKAHRKVSRRKKGGRNRRKAVKLLAKQYEKTKNQRKDFAHKLARNIVNTYGWIAVEDLQIANMVQNHHLSKSISDAGWGQFLAVLECKAEEAGRQFVRVNPNGTTQRCSNCGTIVPKTLAVRIHHCPVCGLVVPRDYNSALDILRLGRSLWDKTWSNGSCVSQEAVCFS

SEQ ID NO: 11959 - protein, 413 aa, unknown
  TnpB Polypeptide
VWDTVLRRTARVKLAVPDERRDDLKRTMRAFNDAAQMFADRGWERNDDGYVITARSRLQSLVYDDVRESLGLHSDLCVGAANLASASLRSAAERMKAGDRAGKPMFTANSATYNTNAVSYFHQGDPPYCTLAAYNGRVRAEYVLPPSSEDCPQREHLLGDEWDAKGATLHYDTDDDAYYLHVAVERDEPETQLEPGEAENGTVLGVDLGIANIAVTSTGRFFAGGLLNHRRDEYEKVRGSLQQTGTESAHRTLDDMGGRERRWNRDLLHCLSKAIVQEALTHDCTVIAFEDLTGIRDRLPGAKAFHGWAFKQLYEYVTYKAEAHGIITEQINPEYTSQRCSKCGMTLRENRTSQDRFCCQKCGYEVHADYNAAKNIGMRQLRSRPKSPVGGATNHLALKSGTLNGTGSYAADA

SEQ ID NO: 11960 - protein, 225 aa, unknown
  TnpB Polypeptide
VINLATVWFEGLRQPVAYSGKAVLSDWWYWTGKIAREQSRLARVNRARTSKKLRKLYRIRQKRFRHAVNAMVKAIVEYACRLGISKIILGRLGGIRSRRRNNSKANAMINNFWSFSYIIRRFREKAEEYGMEVDEKSEYRTSSRCPRCHSEDIITRGRLLKCLSCGLEANRDAAGVLNIGYLHGGSVNGVVAHPLLLRWNGMTWEPKRAVNSRPMNTLEARISRL

SEQ ID NO: 11961 - protein, 398 aa, Cyanobacteria sp.
VEQVLTIVCKLQPTQEQASQIDALLKAFADACNYTNQEVAPKITSKTTIQSLTYQSVREKFGLSANQAVRVAARVGANRKTAKQKGKPVKDFAPTSADYDARIFSFREKDWTVSLTLLSGRERIKFAASSYQRGKLTGKVPTSAQLCKHKDGQYYIHIQIKDERPEPIQADKVIGVDFGRRAIAVTSVGDKWDGKQIKDVRDRYARVRASLQEKASKGTRSTRRRARQILKRLSGRERRYQTWLNHNISKLIVLSALQNNAIIAIEDLTGIRERTNELPRNKTERRRSNSWAFFQLRLFLSYKSVKYGVEVVAISPAYTSQTCAECLHIHPVKGKSYRSGKSLKCGHCGNHCDADENGSKMISIVGAAFVNPLGGSVLSCNLADHIRATESPQLLAVG

SEQ ID NO: 11962 - protein, 385 aa, unknown
  TnpB Polypeptide
VQTIRTIRCKIVISDSDLPVVFDLFSRYAKACTQIAQVGKNELINNSFNLQKKVYKEIRSTFNLSANLAITAIRRVCGNLKTSNFKGRFKYKPSSVVLDVRTFTLKLSKGIVSFSTHTGKRVTAALDIGIYQHEALWGADICQMATLVRAKDGYYANIVVESYVQGVAPGGVLGVDLGIRNIAALSSGKKYEGASIREYRETRWKVRASLQSKGTKGAKCALKRLSGLGARRMTSKNHWLAKQIVSEAVRNGCDRIAMEDLKGIRERTRVQNRHLNRMVSLWAFAQLQEFVCYKATGRGVKVVFVDAAYSSQTCGKCLKQGIRNRETFVCTACGVTADADLNAALVIAARGAGAGVEPADRNAARIVDFFANETLHRSQSKSSRP

SEQ ID NO: 11963 - protein, 192 aa, Sneathiellales sp.
KKFSNNWKKAKAKVQKIHAHIGNARRDYLHKATTTVSQNHAMVCIEDLQVRNMSKSASGTTETPGRNVKAKSGLNKAILDQGWYEFRRQLDYKLAWNGGQLVAVPPQNTSRKCPCCGHVAKENRRTQARFRCVACGFEENADVVGAINILRAGHARCACEVSDAVMSPAAGTHRSNSLRRDAGMSAVGISGL

SEQ ID NO: 11964 - protein, 248 aa, unknown
  TnpB Polypeptide
MGTDQGKGYLPTTKDGYVIKSGTVSMRAGRYYVSVLVEVPDPPKEENRNEGIGIDLGIKSFAVLSDGTVYQNINKSAKIKKLEKQLRREQRSLSRKYENLKKGVSTQRANIQKQKLKVQRLYQRIDNIRTDYIKKTIAGIVKTKPSFVTIEDLNVKGMMKNRHLSKATASQKFYEFRTRLQGKCAEKGIELRIADRWYPSSRRCHNCGQIRKDLKLSNRVYQCSCGYCEDRDLNAALNLRDVKTYQSA

SEQ ID NO: 11965 - protein, 442 aa, unknown
  TnpB Polypeptide
MKPRKFTVVAQLHEEQNRDLIEYINSCFAIYSKAKRETFHVIKRDDNFNKSTFNTYLQNKYDVLKRTANSIISDAQGTLNALIELKKYEKSQLERKILSLETTIEKLEMKVANNKTLLQLNNKTISLLKHRNLKRKLVSKKNQLNNKKQKLNNLNYQIEHGIYKLCFGTKDLLKRNYNQFIERRDSQISFVGTKTETAGNQILQLSYNHKNNQFDIQLRKDIGGFKEQRGSYVRGKVYFDHHKQDLISILANRNSPLSYKIMKKNGRYYLYCTFEIQRDKSSFVTRSSNGVIGLDFNKGFVTVTETNQYGHMVGTDLIRYRFKQGSRTQTDLETVATLVKNRVLSTGKDVVIENLNFKDTKSKTISRKGRKYNAMLHSLAHRKFTNIMENICYRNGVWLRKVNPAWTSWIAKQKYCPNMKLNIHTGASFVIARRGQGYTDKV

SEQ ID NO: 11966 - protein, 400 aa, Goodfellowiella sp.
MRRSFKFLLRPTGKQAVALREMLADHCSLYNGALQERRDAWRHVSKTTVRYGGQSAQLKDIRAFDPDQQGRWSFSSQQATLRRLDRAFAAFFRRVKTGDKPGYPRFRGVSWFDTVEFPTDGDGCRWNSTPGDSVTRVRFQGVGHVRVHRHRPVLGTVKTISVKREGNRWYVILSCAEVPAVPLPAVGQTAGIDMGVVHFLTASDGTHVPNPRYERAAAAGLADAQQALSRCRRGSNRRRKVRGKVAALHGRIRRQRLDHAHKTALAVVRAYDVIACEDLRIANMVRAPKPKPDPEQSGVFLPNGAAAKAGLNRSIHDAGWGVFLGVLADKAESAGRRLIPVDPRDTSRTCTRCGHVCGDNRVTQAEFVCVACGHTANADVNAALNIAHRAGLVLREAPAA

SEQ ID NO: 11967 - protein, 418 aa, Bacillus sp.
MSVGGSQRIVHYCIIGTNVLIWMEVNVMMVNKAYKFRLYPNKKQTELIHKTIGSSRFVFNFFLGKQKEKDAYWYIVQEMVQNGQLSTNNWKGKCLNKYVTVKALPKLKKHYSFLKEVDSIALQKSVEQLADSYDRYYKKQNKQPRFKSKKNPIQSYTTKYTNGNIAVINNSIKLPKLGLVRFAKSREVEGRILSATIRRNPSGKYFVSLATESEVTELPKTNSAIGLDIGLKDFAILSDGMIYSNPKFFRSLEEKLAKAQKVMSRRTIGGANWYKAKRKVACIHEKIANKRKDYLDKISTEIVKNHDIIGMEALSVSNLLKNHHLAKAISEVSWSQFKTMMKYKAKWYGKKVVTVAKNFPSSQLCSCCGYQNKDVKNLGLRKWECPKCQTYHDRDINASINIKNEAVRLLTAGTAGIA

SEQ ID NO: 11968 - protein, 430 aa, Escherichia sp.
  misc_feature (135)..(138): Xaa can be any naturally occurring amino acid
VKRLQAFKFQLRPGGQQECEMRRFAGACRFVFNRALARQNENHEAGNKYIPYGKMASWLVEWKNATETQWLKDSPSQPLQQSLKDLERAYKNFFRKRAAFPRFKKRGQNDAFRYPQGVKLDQENSRIFLPKLGWXXXXNRAAFPRFKKRGQNDVFRYPQGVKLDQENSRIFLPKLGWMRYRNSRQVTGVVKNVTVSQSCGKWYISIQTESEVSTPVHPSASMVGLDAGVAKLATLSDGTVFEPVNSFQKNQKKLARLQRQLSRKVKFSNNWQKQKRKIQRLHSCIANIRRDYLHKVTTTVSKNHAMIVIEDLKVSNMSKSAAGTVSQPGRNVRAKSGLNRSILDQGWYEMRRQLEYKQLWRGGQVLAVPPAYTSQRCACCGHTAKENRLSQSKFRCQVCGYTANADVNGARNILAAGHAVLACGGCQQTG

SEQ ID NO: 11969 - protein, 351 aa, Pseudomonas sp.
MKQTKTLKVRVRDKHVPLLRQMARSVNFVWNYLNELSARSIRERGGFLSAYDFHPYTKGAAKELGLHSQTLQCIAAEYVTRRKQFKKVRLNWRKSAGVRRSLGWIPVNTGAASWKNGQVYHNGHYFKVWDSYGLAGHKFRSGSFSEDARGRWYFNVVVDVEELVSMGQGAVGIDLGLKDLATCSDGRTLENGRFYRDLEAKLAIAQRSRNKARTRAIHAKIANRRKDALHKFSRRLVNSYGTIIVGDVSSSKLAKTRMAKSVLDAGWSMLKTMLEYKCDHAGIVFKEVREAYTTRACSACGALTGPRGVNGLRIREWTCCECGVAHDRDINAARNILALGHERPSVGIPVL

SEQ ID NO: 11970 - protein, 381 aa, Pseudomonas sp.
MTKRAYQYRFYPTLEQAELLAKTFGCVRLVYNTLLRWRTDAFHKEQQKIGYSAASAYLTALKKQPELAFLNEVSCVPLQQSLRHQQTAFKNFFEGRTKYPAFKKKRNHQSAEFTASAFKYQDGKLYLAKSSEPLNIRWSRALPSAPSTVTVSRDAAGRYFVSCLCEFEPQALPVTPKMVGIDMGLKDLFVPSEGEPVANARHTAKYASRLALAQRRLSRKKLGSANRARARQKVARIYARIADCRLDGLHKLSRRLINENQVVCVETLVVKNMIRNPRLSKAIADAGWGELVRQLQYKGAWAGRQVVAIDRWFPSSKRCSGCGFVMDLMPLSVRSWVCLQCKAEHDRDVNAALNIKAAGLAVLALGANVSGTGQVPVSCSQ

SEQ ID NO: 11971 - protein, 215 aa, Cyanobacteria sp.
MQLRSTPPAPMETENVVGVDFGRREIAKTSDHQGWDGYNLQQKRDKYSCTRQSLQKKASQGTRSTRRRCRQILKRLSGREKRFQNWVNHNISSVIIEQAKQTRSLIAMENLTGIRESTNQQPRNKQEKRRSNNWAFHQLRLFVEYKAIKEGVEVVAIPAAYTSKTCHKCKHLGVRSNKNFKCSNPECGWKGDADFNGAQVIKLWGCTVNQPRGSW

SEQ ID NO: 11972 - protein, 481 aa, Caldanaerobacter sp.
MVVIQAELVFLSQEDKQIVLDLMRRWSSCMRFAYKRLLEGYDRNTLKRNLQEMFDLNSRYVDDAIMKARSILESASELGRSPKKVIFGGKKLFKKLQKRHINGKAYEKLKIRWQEKRKGNLYSRGDKSKKGNLNTRMEINENGTFLRINVGERKYVYARIQAGWKKNKNKEEILQGISKSNIPYSVELKLKNGSIYAYFTIEEEYPEIMIKKDKGVIGIDTNAYPDNISWAETDEKGNLISYGSIPMPELASGNKNKREYFRWQYAHEIVKIAKEKGKAIVIEELEIKDKGKRGDFSGRKSRRIRHNFSYKSLLKKIKVLAKREGIEVIEVNPAYTSIIGMLKYAPQYMITKDVAAAYVIARKGLGLQEKIPDNYIKFLNKLTTKELEELEDHVEKTVKNKHLKKKHLKEIRKAIKMIQSLESEPGRVLEPLDGTSFSAHDFWQVLKVAVVTPLSPERVLRDVSALKGVLHSGQVGRPVRA

SEQ ID NO: 11973 - protein, 467 aa, unknown
  TnpB Polypeptide
MATVMQAYRFALDPTPRQQGRLASHTGATRFAFNWGLALVKTRLDQRQTDPAVQVPWTLFELQREWNQAKHQAAPWWAENSKEAYKSGLDGLARALANWSDSRSGRRKGRPTRFPRWKKARTHQTCRFSTGAIRVLSDHKHVQLPRIGVLKTHESTRKLTRRIDRGTARILSATISRRADRWYVSFTVEVERHIPSSGKAGTVGVDAGVRHLAVLSTGEVIANPRSLEASLMRLRRLNRELARRKLGSTRRNLSRRRLAHAHARVASARHDALHKLTTSLATQYGMVVVEHLNLSALLRNHRIARAIQDTGMGMLRRQLTYKTTWYGSRLVVAEPFYPSSKRCSACGWVKAKLTLAERTFHCAVCGLVLDRDLNAARNLAQLAQHVAQSGWETTNARGADVRPGPVGQAAMKREASSPTWHQAGTVLSQGKTADGASSRSCPGNGSPPDLSLLAYSRRGVTRASTWI

SEQ ID NO: 11974 - protein, 184 aa, unknown
  TnpB Polypeptide
MSAPHLYVDSNGELADFEKPYKKLQEKLAREQRKLSHRQKDSKNYEKQRQVVARLHAKIKHQRKDRLHKLSEQLAREYDLISIEDLDMSALKQTLNLGKSYSDNGWGMFVTMLLYKGKRNGCYIIKIDKWFPSSKTCSECGYVHKELQLSDRTYVCPVCGNLIDWDEQAAINIDLEGLRILLSA

SEQ ID NO: 11975 - protein, 375 aa, Acidimicrobiaceae sp.
  misc_feature (349)..(349): Xaa can be any naturally occurring amino acid
VASRPTIPIFSHTGEVLSRAVTFQFALDPNAQQRILFAKCAGARRFTVNHHLARVKANLDARSAEREVLSESGETCEPSTLSLSWSGFSFINEFNAWKNGQSVDSPVNEDGSRGLAWHHELPGDIFECASVDAARALENFSASRWGERSGAVVGFPRFQAKGKVTPSFRLRNRATPGKAPSSQPIRFTDPSHLRLPKFGPVKLLGPTRKVRRMINAGRFHVYSATLKQRAGRWTISLTGVAAELHQAERSRTNRHAAPVGVDRGIISLCVAADANGVPFESFEGVTTLKQALGKLKAANQALVRTTPGSKGRQRARARLANTHREVVNTRRHLVHQASGALVDRCQILXLGRRDGRSLPPAPLQGPMARGRGSSG

SEQ ID NO: 11976 - protein, 414 aa, unknown
  TnpB Polypeptide
MKGKDNPMKKSYEYRAYPTTKQRKIFTVWLALLRALYNQALAWRIEAYQASGLTVKWTTQANALPDFKQESKVYAGLHSDVLQDAIRRLDKAYKAFFRRVKTGAEPGFPRFKGEGRYRSMTFSHLAKRPIRNVHRKYARVVVPKVGHLKIRYHRSLPNGKIKTLTISKKASGWYTTIVVEVPAPVEIPVNTTLGVDVGLNSFVVDSDGERIPNPCHYRKSEKKLGKHQRVLSRRKKGSKRRAKQREIVARTHERIANQRKDFQFKAAHRILERCDEVAIEDLKIKNMLKNHYLAKSISDAGWGSFRLKLQSKAASAGKQFTKVKPQHTSQKCSGCNEVVPKKLSVRIHDCPHCGLVIDRDHNAAINIKKAAVALRGGAVVTNTPETPAQTGTEARNPINPRERVISLIPLGWDN

SEQ ID NO: 11977 - protein, 483 aa, unknown
  TnpB Polypeptide
MDLVEKICAGIGFIRHDLWQRFGAIKYRLRTLNELRGTVTRGQFYKDIAIDGTIKNESVKDIINDILANREAAKKAVITKIYQRISDVDERKRLCKLLSENRWTEDNRLHRWMRRACPHGVGHCSNQFVVRSDKFTRTIEDGALVLYVRLAKPRGVKDAPSTTFLRLVTNSTGEGVDLNSLDHSNLRIIMGEDGRIGIHYCTIKPEGRPCGKGELGADFGYARGATDDQGRIYGPELGDVLTKYSDELDKIYRGRNRLWARAKYWDSVGRHDKAERIRKNNLGKKKITHLKERYQQKIKDIVYKAVHGIIDNCEHCITENLKGSFDREKRKNFGKKFNRRMCSWVRGVLDEAVEQVCKQRHACHTRVNPAYTSQIDSTDGLLHGCREGRKFYRENGEVIDADTNGARNIRQRLYDTEIKLDTPPQEVKRILEKRLLRNLSSDVTERQKASVEHLSKSKDIPSSSQEQGRDGDRPEKVFRRSAE

SEQ ID NO: 11978 - protein, 426 aa, unknown
  TnpB Polypeptide
MKEQILSYELTLPQRIYPHLDRLFSIFKSQVNSYIPKLWNEKSFKLLSQKGSAVGILKKEFPTPEGVPSRVFRNVLELTGQIIRSQIERKEVFEKLLKGEEVKGYSKNFVLNIQRQIENLRKKGKEVNCYFNFPHPKFDGQIVITSADNNLEKGQFRRLKFSGNFLEFSIKVPTQKGWDWIKVKKLIPERLRRVLTKAKEVKAVLIKKVLLKSGYHIYRLVIPLSFEVKEPEKVEKVLALDLSPSEKRLGTTVLVEGEKVSKPLFFKTQTLRKIERLYFEVSALERKIDNIYNGIKKTSCKREKERLWGRLRHLFVEQKLKQRKIKQLRKQILEIFTNFVIAHAKVYDCQAIVIEDLSFKEVPDWKDKKALRRFSQWFYSRFASRLEEKAKIYGLKVVKVNPAHTSRICHKCGKEGEAEGLVFKCS

SEQ ID NO: 11979 - protein, 798 aa, Burkholderia sp.
MILVYRYRVKSLNGLLNKQSRAVNYVWNFCNDTQKHALKWNKKWPTGFDLNVLTTSSKALGIHSGTINATCEQYAKSRSRNRRPYLRYRGMKSLGWVQLKGRDLKREGEAFRFAGNTFRVFNSRPLPECKIKDGTNFAQDARGNWFLNIVIEMPDVQVRPVRSGVGIDLGLKDFATLSTGEKLPNDRFGRCAAEKLTKAQRARKHKRHIAKLHAKISNARADFQHKLALDLVRRFDYIAVGNVSAAKLARTRMAKSVYDASWSSFRNKLRYKAIAHGAMFEEVDESGSTQSCSSCGSKDSTTRPKGIAELRIREWACSDCGVEHDRDTNAALNILRCGRASPGVGILPLKEMRASKEEHSEVKRTSHAPVQRHGRNRDGRDDHLGHMRRRELRAAQPLRAEPRGNRGPHRRTHDGRRRPAGRETAERAERGEHGRVVMPRRRRPDMAPIGRAMLLVQQRIEIHLRLRADARSPACGTHRMHDARGVGLDDRPRMLAQREHQVGVLAPRAREALIEAADAFERRAPHEAVGGREFRVREPRRVAFVVGRARPQRHVDPAGRGRRRRLGQQRGRTVAQPARIGNRVVVGECDQRAARAAPADVARTGRPLRVGRGHVADHRHVGHARAARIDDGARTAGRIVVHDDDLVGGRIEHLHAQRVEAAFEQIGPPVGRHDDRHDRRQVRVAHVHLGFSSRNGPITSASSGDVQKHSIASRGEHTIGSPRVLNDVLTSTGTPVSASNSVNSACSSGCWLSSTVCTRAVPSMWRTAGILSARSGTTSYTNSMNGARSGVPRPPLNQ

SEQ ID NO: 11980 - protein, 329 aa, unknown
  TnpB Polypeptide
VVRQSPHHEDYHLWIPARANPDQRGWLEAVYADDAEMGESRLFERDGAWYLHVTATRDVEVRSEVSADERTPPDESGEPCLAGLDRTPIGVDIGEASLVTVCHRDDSGSPVRPELWADEGKTVRRLRKTYFTATRRLQQRGSERLVESYGDALWDQIDDVFHRVTREVVEYAESVEHPVLVLEDLTYIRENMDYGAYMNRRLHGWGFAKLHAQIRYKAAEKGIPVETVNPRNTSKACHACGEVGSRPRQATFNCSNDGCWVGEYQADVNGAINIADRYRSGESHRRSDRRSRQKAGDDDSATDGASLTGPQDSQADAETWQTMLGTYAS

SEQ ID NO: 11981 - protein, 324 aa, unknown
  TnpB Polypeptide
MNYNYRYRLEPTERQRETLDYHRDTCRQLYNHALYRFTQIPEDEGTVKQRVRKIRDELPNLKDWWDALTDVYSKVLQPTVMRIAKNINALGKLKSQGYNVGELRWRSPRGFRSFTYNQSGFELDKKSGQTVLSLSKLADIPIELHRPLPDDATVKEVTLKQEKTGEWFAIFGIEMDTDPPAKPPLEDIGTDEMVGIDVGILKYVHDTDGTAVESLDLSEERDRLEREQRTLSRKEYESNNWETQRRRVAECHLQIKRKRRDFLHKLSNYYTREYDLVAVEDLDVRGMLESPRNSRNTASAAWNTFTDMLETKCEREGTHSSVFS

SEQ ID NO: 11982 - protein, 379 aa, Microbispora sp.
MCGMARIVKRAYKYRFYPTPGQAGEFARTFGCVRLVYNKALEERTRAYTLQGRRVSYEESSSMLTAWKRTEELAFLGEVSSVPLQQALRHLQAAFANFFAKRAEYPTFKSRKKTRASAEYTRSAFRWREGRLWLAKMDGPLDIVWSRPLPEGAQPSTVTVSRDAAGRWFVSILVEETIRPLDPAEHMVGVDAGITSLLALTRPIDGLTDEDGKVANPRLERVDRERLARAQRALSRKVKGSNNRAKARLRVARVYARISDRRRDFLHKLTTRLVRETQTVVIEDLTVRNMLRNGSLARAISDASWRELRSMLEYKTVWYGRELLVVDRWFPSSKLCSACGVLAESMPLNVRTWRCACGTVHDRDVNAAKNILAAGLAER

SEQ ID NO: 11983 - protein, 568 aa, unknown
  TnpB Polypeptide
MIKQDKPSDRIQTRKETKSRRSSMVIKVLSFNIQKNKLSKDKKFYLKTLFLEAKYYYNYLIYLSQQSVTDNYGNTVYPYNLFEFNTKSNQILVYENSSNSYLPYELKFLSSQVKQELLKKIQSSIKSLSKAKTKGRKIGHLKFKSFVNLPLKQFNNSFYLSDNGKKLSLQGNKKSSFHLVRNKNLTQLSKELNLNFNGQISLKKLIDLNIIEIANAELASSYKKDTYFFNLTVYFNPQYLKKANLFQGTKLSQEDTSLISQLNLGLDAGIASEQTINIGETFSSISINSRNPVNKAQSNKLKKLKHYQRKLNRHIAKSKKHKKLNKDNNKNIIRNNDKGFYTGKFKELKQQINSIQDNLNNHKTDSIAKITSIYDLFAQITFQDEMVKSWHKNKKMKFSSPIQKGILGKVYAKLKNNYDSENNQTINNGKTHYKYRKLSQSLRTTKTCVCGNVNKDITLKDRVYVCSQCGYVNDRDTHSSYIINHTLNHIEYQQEEVLGCGMQPKDWGLNKDLMLNSNLGQTITSAKTEQVFNILSSKLKSNNLSIKLNNYITLIDKPNQEASDFRPR

SEQ ID NO: 11984 - protein, 408 aa, unknown
  TnpB Polypeptide
MVEREVVKALKLNLLPPSKNKERLLSELFSSVAACCNEILSIAKSKSPKNFAILHNTSYPIIRQKYSLHSQILIDCIHQVWENLKTCKKFNQVPIRFNIPRSGKFSKTKRGNPVVVFASFNGNGRIALPIKQDGAYNRFIEHINNGWKCTQFRLHKQNGHYVVIANLRKKFEVKQNYQAVVGVDVNSGSFALTALRADGKILKQLYLGRDIWHKQWKFMKRRSKLRSYADKGSKRARRALKRIKCDERNFVTTRIWQISHEIVEIAIRYDAVIAIEKLKNLRKRNGKGRKPKRANRKIHRIPFAKFRITIQSVAWQNGIDVVEVPAVRTSQKCPRCGYTSRKNWVFFDNKRKLFRCCRCGFECNPDRTASLNIATLALERGIGFSKAICTPAPVFQSWRGSQPPCPAR

SEQ ID NO: 11985 - protein, 436 aa, Streptomyces sp.
VVIVVLRRIGRRRERGDGRELHQHPVGTSREEGQGGAGLIRAHTFLLRPTVRQEQALAEMLRDHCSLYNGALQERRDAYRHASKTSIRYGDQSAQLKEIRAFDPERQGRWSFSSQQATLRRLDKAFQAFFKRVKAGLTPGYPRFKGVGHFDTVTFPKDGDGCRWDSTPHDAQTRVRLQGVGHVRVHQHRPVKGRVKTISIKREGRRWYVVLACDQVAAEPLPATGRIIGIDMGVTRFLTTSNGEHVENPRFLQAMAAELAAAQQHLATFPKRTRRRTKKHRAAARKVATIHAKIRRQRLDHHHKRANELIRGHDVIAHEKLNTAGMTKSPAPKPDPARDGAFIPNGAAAKAGLNRSILDAGWGLFLGILAQKAESAARRVIPVDARNTSRTCPACGHVAKENRVTQADFTCTACGFTANADHVGAKNVINRAGLVL

SEQ ID NO: 11986 - protein, 273 aa, unknown
  TnpB Polypeptide
MYFVKNSKTDCLSERHRIKIPTLGWIRLKEKGYIPTSKDGFIVRSGTVSYKAGRYYISVLIDMPEQNTQINNNPGIGIDLGLKDFVTCSNGSIYQNINRTNNIKKIEKKLKREQRKLSRKIINLKKGASTQKNFVKQKLKVQKLYQRLTNIRTDYLNKTINNIVKTKPFFIVIEDLNVSGMMKNKHLSKAVAQQKFFEFKTKLINKCKENNIELRVVDRWYPSSKLCHDCGHIKKDLKLSDRIYICSECGYTEDRDINASLNLRDAKTYTIIQ

SEQ ID NO: 11987 - protein, 467 aa, Mycobacterium sp.
  misc_feature (384)..(463): Xaa can be any naturally occurring amino acid
VRPAVRQARCAEPGQARIGGRRRRVGGCLMAKFEIPEGWMVQAFRFTLDPTAEQARALARHFGARRKAYNWTVATLKADIDAWQATGIQTAKPSLRVLRKRWNTVKNDVCVNIETGVVWWPECSKEAYADGIDGAVDAYWNWQNSRSGKRDGKRMGFPRFKKKGRDPDRVTFTTGAMRVEPDRRHLTLPVIGTVRTHENTRRVERLIAKGRSRVLAITVRRNGTRIDASVRVLVQRPQQPKVTDPGSRVGVDVGVRRLATVATADGAVLERVPNPRPLDAALNELRHVCRARSRCTKGSRRYRERTTEISRLHRRVNDVRTHHLHCLTTHLAKTHGRIVVEGLDAAGMLRQQGLSGARARRRGLSDAALGTPRRHLSYKTGWYXXXXXXXXXXXXXXXXXXXXXXXXXXXXXXXXXXXXXXXXXXXXXXXXXXXXXXXXXXXXXXXXXXXXXXXXXXXXXXXXGGWP

SEQ ID NO: 11988 - protein, 465 aa, unknown
  TnpB Polypeptide
MRKKKKNFITMKIRFSATEPELGYISCVRKDYNKVLRFTYNRLIDNPSYSTKELTSFQSKLNNIDNCKYHLKGSAIYNAKEIYNMNKNNSQQKTIFGGRKNFIERCKLNISNEEFNKKRTLPIYSVGESGQHGNRLFKIVDTNTIIFKPDRRHHITLNLENVGTNRKKTLCKLIELQKAKCISLTYQLDLEYVYITYDNNLFKYHEYPVKTNRTMQIDVNPNYVGWSVTDWKQDYDFHLVASGMFSLEPLNKYQNSLNVASDSKEAKYITNKRRHEVIEIAKELFKLCKHYHCEVFAMEDLSMKSTNLHKGKKLNKLINNQWNRNLLFQQIRKHILSSSTELVEVQPQYSSIIGNLVNRKLELPDPVLASIEIGRRGHEFSCQYIFKRRQHDKTIVFPKLESVKKSIILSLEELGIDLTEINDWKDVWSVVKKSKVKYRFPLLDEMSSGHFSKNYKRRYQIIYEF

SEQ ID NO: 11989 - protein, 222 aa, unknown
  TnpB Polypeptide
LDRNRIASIDLGVNNFVTMVNNIGESFIVINGKGIKSYNQYWNKKVSNLRSIAKTVNGSDWTKQMQNLTNKRYFKMEYFMHCSSRWIVNYCVEHNIGTLVIGKNDGWKQKSDMPKIINQSFTQIPYENFIQKLEYKCVETDIVLVKTEEAYTSGTSFLDDELPIKENYNKSRRVYRGLFKSNNGEYINADVNGAFQIMRKVFSNVKADEIVGAYSHPVIINL

SEQ ID NO: 11990 - protein, 406 aa, Cyanobacteria sp.
MRTAYQYRLRPTPVQEAFMDNWLELLRRQYNYRLGERFNWWEQNRCDINACPLICYLPGLKPNPDFYSQKRDLVNSKLLFPEYGEIHSQVLQDCIERVKRTFDRWFKGDSKGKRSGKPRFKGQGRYRSFTFPQMKQDCIDDKFIKLPKIGGVKLILHRPIPNGFKIKTATITKKADGWYVTLSLEDPSVPEISPELPTLDNTIGIDMGLKSFLVTDEGEETPIPQHYRKAQKKLGRLQRSLSRKKKGSKRRKKAVKRVAKAHQKVANQRKDFHYKTAKKLFNQGKNIGHEALNIQGIAKSRMAKSTHDAGWGQFLQILSVKAANAGLMTIAVNPNGTTQNCSGCGQKVPKEVQDRWHSCLHCGLELDRDHNAAINIKYRAVGHPVLKAQDTPDGIPGVTEKPTLYA

SEQ ID NO: 11991 - protein, 227 aa, unknown
  TnpB Polypeptide
LIIVTDHNPSNSYRKTHDGASIGLDFGLKTYLTKSDGNKIDSPLFFKQYQNKIRKLNKRLSNTKKGSNNRRRRLFELQQTYRKIKDLRSDFQWGLAHQLCKQYDYIFIEDLNIEGMKRLWGKKVSDLSHSSFIDKLMYVASKYGVTIHKIDKWYPSSKTCECGCINKGLSLRDRTWVCPSCGAINDRDVLAARNILRKGISELESKSNSSDINIGVSYVCIQESHLL

SEQ ID NO: 11992 - protein, 370 aa, unknown
  TnpB Polypeptide
MEYSYKFRLYPNGEQINLIERTFGCCRYVFNHYLAQRETAFRTTGKSPTRFMQDKELTLLKQQEETAWLREVDKCALQNALKQLDVAFQNFFRRVKNGEKPGYPKFKSKKQNKQSYQTNSNIKIFDNAVQLPKLGKVKCRTSKTVEGRVLSATVSRSASGKYYVSLCCRLDHEMPKLSSTGAVVGLDVGIKSFAVSSDGVEYANPKYLRQSEKKLAKLQKQLSRKTKGSANWNKARIQVARLHEHITNQRKDMQHKLSTEIVRQNDVICIEDLTPSNMVKNRKLAKSIADASWSEFHRQLTYKADWYGRMLVTVDRFYASSQTCSHCGERWPGTKDLAVRHWVCPNCGMALDRDTNAAVNILHEGLRQIA

SEQ ID NO: 11993 - protein, 178 aa, unknown
  TnpB Polypeptide
MYQQAGKKSHFIFRRLKHANELLAVNTAREIIKTAVLYDVDCIVFEHLDLKGRGSHERMKERLHLWCANNIQDRVELQAHRNGMRISKICAWGTSRLAFDGSGWVQRGVKAGLDSYSVCKFRTGKIYNCDLNASYNIGARYFLREYKKLPGCPELPKTPKRTLADLKNLMTVYPALAA

SEQ ID NO: 11994 - protein, 265 aa, unknown
  TnpB Polypeptide
LNIAYRFRIYPTEEQKILLGKTFGCCRFLYNQMLNDKIREYEKTKKMLKNTPAMYKKEYPFLKEIDSLALANVQLHLEKAYKNFFRDSKIGFPRFKSKHHSKNSYTTNVVNGNILVESKRIRLPKLKWIAMKKHREPAEGLRLKSVTVSMESSGKYFASLLYEGYSCENQAAGPDYSTAKILGIDYAMQGMAVFSEKVETEEAGFFRKNEKSSADNSRKSCTGKVIWRWENRQLGKKLIRNPARSLPPATRSGAARRRPSRKKSR

SEQ ID NO: 11995 - protein, 348 aa, Lactobacillus sp.
LKRPATGISNIHGWLNNNDLDSLMKANAIQNYRSAWKMFHKVHQSGTPIFHRKRTEQKYQTSCLYPGKVKSPSVTNGSVRLLDYQHIQIPKLGRLRFRGIPAKILAKKNEIRIGTVTISMDATGRYYVSLQLASKQPFVVQTVRKTQMTIGIDLNTDNFLTDSNGNVIANPHYYRTVKGKLAKAQRKLSRRALRAKKEHRQLRDAKNYQKQRMIVADIQHKVANRRNNFLHLISTTLIKNHDLVVAEELRSKNLLRNHALAMSISDVGWRTFLGMLTYKADLYGKNFITVNPRNTTQTCHNCGFIMGSHDTHKLTLADREWTCPACHQSHIRDHNAAQNILARGIISR

SEQ ID NO: 11996 - protein, 373 aa, unknown
  TnpB Polypeptide
VEYSYKFRLYPNREQENLILRTLGCCRFVFNHYLAYRKELYEQTGETANYYACANDLTVLKQQEETVWLKEVDATALQSSIRDLDTAYQNFFRRVKKGEKPGYPHFKSKHDRKQSYKSKCVGTNIKVLEKAIQLPKLGAVKCRISKHVEGRILSTTVSRSASGKYYVSLCCRLEEDLPKMPSTGAVIGLDVGIKSFAVSDNGTVYENHKYLRKSEKKLARLQRQLSRKTKGSANREKARVKVARLHEHVANQRKDMLHKLSTEFIRQNDVLCIEDLAPKNMVKNHKLAKSIVDVSWGEFRRQLTYKAEWYGKQVIVVDRFYPSSQTCSVCGEQWDGTKDLKVRKWQCPQCGTTLDRDTNAAINILNEGLRLLA

SEQ ID NO: 11997 - protein, 359 aa, unknown
  TnpB Polypeptide
MIAYRYKLYTTKKTRSLDRMMAEAAFVWNHALALQRRYYSLYHGYVSCARMQKHFARCITRHRLHSQSVQEIIQRLDLAYSRFFTHKSGRPPKFKRSRDFTSIVFKGGGGCCLSGNTVRINKTGKRYKFSLSREYTGKIKLVTFKRDACGDYYVIITTDACAGNYGKTHDGASVGIDAGLKVSLVMSDGSVVRYPRFLMEATRSLKEKGRKLSGTKKGSRHHEHRRMDLAREYRSVVNRRDDYQWKLAHELCRKYDRIFIEDLVLTGMTRMWGRKMSDMAHGKFLLKLDTVASKYGVSVHRIDRYYPSSRTCTCGHINQNLTLKDRKWTCPVCGQVHDRDLLAANNILRKGISELESAK

SEQ ID NO: 11998 - protein, 310 aa, unknown
  TnpB Polypeptide
MDKRTICCRLVSTLSAIEALSETSRFFSDACNHILKIAVEEKTHNAIKLHQICYAEVRELFGLSANLAIRAIRRVASCMTRLQGKRKRPRLFKPKSIDYDARIFSFWEKQETVSLTTTKGRIRIPMMLGDHQRKALAGQNPTSATVINKGGIWYIHIVVEIETKPCDGLGVMGIDLGITNIATTSTGSKIEGKSRQQFKAKRASVRASLQSKGTQGAKKVLRKISGKENRRIRHENHALSKQLVEEAKRHNCGTIRMEQLKAIRSRTKTWNKHRKYVLKKLWHRSIRAPLSPHWPGICRAQSELSLGAHA

SEQ ID NO: 11999 - protein, 400 aa, unknown
  TnpB Polypeptide
  misc_feature (308)..(327): Xaa can be any naturally occurring amino acid
MKKAMTKEIRSVEYVVLPVSRTKAKKMFRIAGACRYVWNHFRERNLAGYQAFRNGKAESPQTSYFSLGVEFTKLRHEVEWMRELPANPIKHTLKYFADALKEAMAGKKSFPKPKSKKKTAPSFTIPSSAGVRIRKVNKKYCSLLIPRVGWVKLVRGGGNPYVEGVAKQVVLRHDGHRWRAFVFYEVEAQRGLDDGEFLGVDMNVRQVATSDGHFYSLPDLEKKEKRRKWYQRKMARQVKGSNRRKRTKKKVGKVSRKIANTRKNWIHQTTKEIAGKCGTIVVEDLKIKNMTASAKGTVENPGRNVKQXXXXXXXXXXXXXXXXXXXXYTSQRCSECGHTDKENRKTQERFLCVSCGFVSNADTNAAINIRRLGMARLHGEGTGISTVPANREIDARIPYV

SEQ ID NO: 12000 - protein, 422 aa, unknown
  TnpB Polypeptide
MLTGRRFRVEFTGEQAEYAERIGAACRAVWNTGLEQRREYRRRGSWMNYQPQAKELAEAKTEHLWLKDVPGHCLQQTLMDLDKACREHGTFRVHWRSGRRWAPSFRFPEGNKMTLEKLNRRHGRVKLPKLGWVKFRQTRSLDGETIRSATLTKDGPHWYVSLLVNDGIDAPTVHAAPDAAVGVDRGVVVAVATSDGELLDRPFVSAGEQRRAAVLQRKLSRSLKGSANRGKTRAALAVLRARERHRRQDFCQKTAHQLAHANAVVVLEKLPAKNMTRRAKPVPDPNNPGRYLPNGAAAKSGLNRAILSKGWHQFELALTSVSRYCGAQMVKVPAAYTSQRCSVCGHVDPKSRESQAVFRCTHCSHHEHADVNAAKNVLPAGLAVTACRESVAPAGATETSKQEPAGNREELLLQPRHSASAA

SEQ ID NO: 12001 - protein, 287 aa, unknown
  TnpB Polypeptide
MLVFEYKAYGSQQQFDAVDEAICTVQFVRNKCLRLWMDRDGNSQYELNKYCTILAEEYPFANELNSMARQASAERAWSAIARFYDNCKKQIPGPKGYPHFQNDCRSVEYKTSGWKLAKSRKSITFTDKKGIGKLKLKGTRDLHFYQPTQIKRVRLVKRVDGYYVQFCIQVDRVEFVEPSGIAIGLDVGLNDFYTDSNGKTVDNPRFLRKGEQRLKKAQRRVSKRVKKSSNRRKARAILSKRHLKISRQRKDHAVKLARCDPQVKRPSSLRRLENQKYGEESQSGKVD

SEQ ID NO: 12002 - protein, 373 aa, unknown
  TnpB Polypeptide
LSKQEKQIVMTYKYKMYRNKSLRHLDRLIDYHCEVYNYCIALHRRYYKMYHKHLSANKLKVHLTKVRKRPNKEHWRELGSQSIQDVAERIERSYKAFFDAKKEQRCGRHSIPHFCKRKNYSSFTLKQTGYKFHDGNHITILGKDYKYVAHRPYEGTIKTVSIKRDNCGDFWLCIVCAKPASEIIPRKGNAIGYDFGLKTFLTGSDGSRIESPRFLEKNATALRSAQQALSRKRKGSANWRRAKMDVARKYQYVRNRRKDWFYKLAADIASQYSDVCIEDLNIKAMQQLWGRKISDYAFTEFVSILQNQLSKTGGQLHKVDRFYPSSKTCSHCGHIVEEMPLDVRRWECPICHAMLDRDGNAAVNILVEGMKSA

SEQ ID NO: 12003 - protein, 277 aa, unknown
  TnpB Polypeptide
MDNSLLAVRDINHNYIVIERGKKMRTVSSYGVELRKQNIPIRQTLDIYRSAVSCLIEIYAQIWDELAVITEPKNRFNTAEHLVHTTKKNQARFDFDLRFPKMPSYLRRAAIQHALGSVSSYKTRMELWKKTDQKGGRPKLVCDNHAMPVFYRDVMYREDTEEKDGACLKLYDGHDWKWFRVSLSHTDMEYLRKNWAGKKAAAPVLEKRHRKYFLRFSYTEEVPLTKTPVKEQIICSVDLGLNTDAVCTIMRADGTVLGRSLLIFPVKKTGCTVCWDE

SEQ ID NO: 12004 - protein, 493 aa, Mycobacterium sp.
  misc_feature (383)..(400): Xaa can be any naturally occurring amino acid
VRPAVRQARCAEPGQARIGGRRRRVGGCLMAKFEIPEGWMVQAFRFTLDPTAEQARALARHFGARRKAYNWTVATLKADIDAWQATGIQTAKPSLRVLRKRWNTVKNDVCVNIETGVVWWPECSKEAYADGIDGAVDAYWNWQNSRSGKRDGKRMGFPRFKKKGRDPDRVTFTTGAMRVEPDRRHLTLPVIGTVRTHENTRRVERLIAKGRSRVLAITVRRNGTRIDASVRVLVQRPQQPKVTDPGSRVGVDVGVRRLATVATADGAVLERVPNPRPLDAALNELRHVCRARSRCTKGSRRYRERTTEISRLHRRVNDVRTHHLHCLTTHLAKTHGRIVVEGLDAAGMLRQQGLSGARARRRGLSDAALGTPRRHLSYKTGWXXXXXXXXXXXXXXXXXXNPATSAGMSKRSDGPSTGNAIRARHRISVMTAQRSTSHATRTPVASSAQWGPPSSVEPTVRPGLAGLVAVKRGREAAAWLPNNPETGCKSRDH

SEQ ID NO: 12005 - protein, 402 aa, Escherichia sp.
VKRLQAFKFQLRPGDQQECEMRRFAGACRFVFNRALALQNENHEAGNKYIPYGKMASWLVEWKNATETQWLKDSPSQPLQQSLKGLERAYKNFFQKRAAFPRFKKRGQNDAFRYPQGVKLDQENSRIFLPKLGWMRYRNSRQVTGVVKNVTVSQSCGKWYISIQTESEVSTPVHPSASMVGLDAGVAKLATLSDGTVFEPVNSFQKNQKTLARLQRQLSRKVKFSNNWQKQKRKIQRLHSRIANIRRDYLHKVTTTVSKNHAMIVIEDLKVSNMSKSAAGTVSQPGRNVRAKSGLNRSILDQGWYEMRRQLEYKQLWRGGQVLAVPPAYTSQRCVCCGHTAKENRLSQSQFRCQVCGYTANADVNGARNILAAGHAVLACGEMVQSGRPLKQEPTEMIQATA

SEQ ID NO: 12006 - protein, 418 aa, unknown
  TnpB Polypeptide
MRRKKKITENTIPTITRTHKIRIYPNKHNQEVFQKYYDYQRSVWNRAIDERNAQYKIYKDMKATGLYTQKELNKNYFPNTNNLRKMEKFDWEADFYCLIREIQFDNLCQAWDNYFNPNMPNHKKPKYKKKKDVETHKTLSLRNVRTKGKWLLLPKSRYSKPEYRFTKIKMAQELRFNGRITEDFSVSVKNNKWYVSIIVETPLEEKSAIAKQSTGIDVNVGSIDYLKSNSSNKEYDKFYLLPKSLLKQYDKIKYYSRVISKKRNKNPYYIHSKSYKETITKLNNAYTKAYNIQEANLNNIVKYFFTNYNRIVIEDLDVNSMKMNKRLCKSLHRNAFGRFKQKMVNKAGEYNVEFILANRYFPSTQTCSECGHVKTGDEKLFLWGDKYGNDHNTYVCYNCGTIQDRTENAILNLNHYGK

SEQ ID NO: 12007 - protein, 393 aa, unknown
  TnpB Polypeptide
MISSEYQTIKGAKMLQVVKVRLYPNAEQKQLLSKHFGSCRFIYNRMLGMKIKDYENGIKTSAYDLKKLLPFMKKSEEFSWLKEIDSTALQNSILNMDKAYQNFFRRVKNGEKSGFPQFKSRHNPRQSYQNSTASIKDGKLYLPKIGLVKTKFHREVVGVVKTVTVSLEANQYFASINYEDGSEQSYGTNNGKSIGIDVGVKVFAYTSENKAIQHINLKLEIANVIKAQKVLSRRKKGSANRAKAKAKLAKKHLKLKNKRNDFLHKITKTLSENQTVAVENLKIKNMSKQAKGSIENPNMRSSAKRGLNRSILQQSWGKFFELLEYKLERNGGKLVRVDPKFTSQKCSCCGHIEKENRETQSRFICKSCGNTLNADYNASINIFNAVGTTVKAS

SEQ ID NO: 12008 - protein, 409 aa, unknown
  TnpB Polypeptide
VAEDYLRRTAITRPVLSDEQQQLLDATISEWQTACNISSRIGWQSNETRRTSLQSLAYDKIRDETSLGSQHAILATHQAAAALSGIDEIEALEEDYKVSRPEFTAETVKFDTRSMTLFDDETVSLSTVEDRIHCNLALPDEEDGYQYQYLESDAWELTESTLSKRNGEYYLHLGFRKPKPVKQVDQQTDDEDRTVLGVDLGIVNIATTSTAYFASGRELRHRHREFERVRGSLQQTGTQSAHRTIQQLSGRESRYVRDVLHQVANNIIDEACSHDCEYIAFENLRHIQKRAPPVKEFHEWAHRQLVDLVEYKADAEGICVEFVDPEYTSQRCPDCGHTSSSNRHSQTVFECESCGTTGNADYIAAKNVGWKFVRRGPQSSRRTGDRQLALKSGTMTPTQGFTPTDHHGR

SEQ ID NO: 12009 - protein, 284 aa, Catellatospora sp.
MLSWQHDARTVSIWTVDGRRKAVAYTGSPDRIKALATLPVGESDLVHRDGMWFLYASVEVTEPPTYEPEGFVGVDMGIVNIAYDSDGNRHTGARLNGYRRRQLRLRARLQRKGTKSARRLLARRRKKEARHAANVNHRIAKTIVTEAARTGRGIAVENLTGIRDRVRLRKPQRVTLSSWSFHQFGAFLTYKARRAGVPLVQVDPRYTSQTCNRCGHRDKRNRPDQETFTCRSCGVVAHADHNAALNIAQRGVERWGAVNRPHAASPRSQRGRETRKPGPLWPGS

SEQ ID NO: 12010 - protein, 675 aa, Mycobacteroides sp.
MGSMAAASTDNPAVSSGDAAAGVPRRRGKSKTTNFTYEGPVSVIRLELDAADLRSRIRLEAQWEAVFRLRRALQRDAVARCRAYWAAHHERARDPKAVRARLGLSRKGIEAAAKRHIEASGWMRAHLTKAVGLHVADEVWESVDRHLFADASGRRHGSPKIGSWWDFTRIPGRARSHTKTTPTWETYRLVGTLDGHLNTFGHPQLPAAMTTAAGAATAPAGTSILAQPSRMPTPPRPVSKSWWDHHGALAVVFTGLPAGDLVMPVRLPAGAGQWPHLQHFLGSPALWHKIDLVRVADRRAPGGWRYYAHLLIHGRGYQSPSTRARRAQIPAGRRAGVDANVSNLAVASFSASEPSGHEPSTLVAAQIVCTPEHLQAAARAAKKIRERQRALDRSRRNTNAGQYGPSVRQHKRADRRAAEGLAPRQVVNPGGARAARADGVPLRAYRRDELSARYRQLRHDHVASARASSQAKHARATTVAAEIVAAHGNTITIEDCRISNWSRLWGKRIALFSPSTLVAALDAECAATGGRLSRASTRTTAMSQHCLCGARVPKTLGQRVHDCPECGLRAARDTVSAVLAACVTFTDPDDPSTAVVDYRLAHALRAWLAPQQERGGSVNRHQPPPPSGDGSARTGSHPVASAEHAAPGPPPNRPGNPGRHGNSRKQPAPKLIGAA

SEQ ID NO: 12011 - protein, 418 aa, Mycobacteroides sp.
VKQVVQVRLQVDAVQLDVLVRTLTACNDTANLVSRVAHGEKVFRGRDLRAITYAQARQHAGLGAQVAQSCIRKVCDSYTTLKANLRAGRYGKPGSARRQKIEAAPIRFRQLAAQPFDDRCLSWCHDTDTDNGGTVSIWTIDGRLKNLRFIGAAHQIALLREYRCGETDLMIRRQRRGGGPLRAYLIATVDIPDPLLRAGGHLDTAAGWIGVDLGIENIAVTSDRPLAGELMSTYGAGAPDGPAGRGSVKDRRTRNRELRHKLQDKNTKSAKRLLRKHSRREARFAADVNHQISKRIVTEAERTGRGIAVEELTGIRERVRLRKPQRATHSSWAFAQLGAFLTYKAARAGVPMITVDPAYTSQRCTACGHTDKRNRTSQARFVCRDCGFTAEHADILGADNIAHRAPTTWAQSTVPSAA

SEQ ID NO: 12012 - protein, 669 aa, Mycobacteroides sp.
MALAPTDTAAAISGDAVVCAPRRRGKSKTANFAYEGPVAVIRLELDVSDDRVRHRLQRQWEAVFRLRRALQRDAVARCRAYWAAHHERSEGQKAVRERLGLSRKGIEAAAKSHIEASGWMRDHLTKAVGLHVADEVWETIDRHLFADKSGRRHGAPRVGSWWDFARIPGRARSHTKNQPVWETWRLVGSLDGHLGPYRRRELSAGVRTAHDAAACPPGTSILVQPGRMPIPARPASRSWWHHDGALAVVFTGLPAGDLVLPARLPSGAGQWPHLTHFLADPGIWHKIDLVRVADRRAPGGWRYYAHLLVHQGGYQSDSTRQRRAQVLIGRRAGVDANVSNLTIASFPEGTPSALDAEQVWCTDAQRRAADQAARQARGRQRALERSRRNTNAAQYGPSVRQDRRAQRRAAKALPAKVIANPGGPRHARADGVPLRAYRRDELSGRYHMVRTDHAAAARAASQAKQARATRIAAGIVAAHGNTITVEDCRISTWARLWGKRIALFSPGMLITALAAECHASGGTLTRASTWSTAMSQHCLCGQRVPKRLAQRVHDCPHCGLVADRDIVSAAMAACVELTNPDDPRTARVDYRLAHALRVGLASQQEWEGSVNRHQRPSSPDDGSARTGSHQRVASAEQAAPGTPPNRPDPKPGRRGTSRKQPAPKLIGAA

SEQ ID NO: 12013 - protein, 305 aa, Bacillales sp.
LFFPRKRFRANKRPRFKSKRHPVQSYKTNIQGKNQLPEVSIGCNQLKLPKLKWVRFAHSKQVTGRILNATIRRNASSKYFVSLLVEQEINELPKTGSSVGVDVGLKNFAILSDGTVYQNDRYFRKLEKKLAREQRKLSRRQRIALNKKVTLSEARNYQKQKRKVARTHEKVANKRTDFLHEVSTEIVQKHDVIGIETLQVKNMQRNRKLSKAISDVSWPAFFRMLEYKADWYGKTVVKVGKTFASSQLCSSCGHQHKDVKHLGFREWTCPSYGIHHDRDVNAGLNLKQEAERILASSTVGTTGLA

SEQ ID NO: 12014 - protein, 366 aa, unknown
  TnpB Polypeptide
VLLNKAYKFRIYPNEEQEIMLSKTFGCVRAIYNMMLSDKIRHYNEFHTTLKNTPAQYKSEFEWLKEVDSLALCNAQLSLQRAYQNFFRDKSVGFPKFKSKKSGKNSYTTNNQGNSIRIEDKKVRLPKIGLVCIKQHRQIPHDYKIKSCTISKTPSNKYYVSILTEYEWEQPNPILDKSKALGLDYSSPHFYVDSQGNEAGYPRFYRQGEERLAREQRKLSRMKPGSSNYNKQKVKVARMHEYISNRRKDWMHKKSKLLAEEWDYVCVEDINLRGMAGALKLGKSTNDNGFGMFREFLAYKMADRGKVFSKIGKWFPSSKTCNECGYINKELTLSDREWTCECGAHHNRDINAAINIRDIGLQLATA

SEQ ID NO: 12015 - protein, 372 aa, unknown
  TnpB Polypeptide
MEKAYKFRIYPNKAQEELIQKTFGCTRYVYNYYLAMRREKYESEKVTFNYYACSSDLTSHKKVKEWLREVDATALQSSLNDLDIAYQNFFRRIKVGDKPGYPRFKSKRDNRKSFKSKAVGSNIRLFDKYVRLPKLGNVKCRVSKQIEGRIISATVSQNPSGKYFVSVLCTDVEIQPMDRTGAMVGVDLGLKELAITSDNQHFANPKHFTKSQKKLTKLQRELSRKSKDSNNREKARIKVARLHEHIANQRLDNAHKMTTSLVRDYDLIAIETLVPKNMVKNRRLAKAISDAAWGEIVRQMEYKCNWYSKELVKVDRFYPSSQTCNSCGYKNSGTKNLAVREWGCPKCGANHDRDVNAAKNILDEGLRILSVA

SEQ ID NO: 12016 - protein, 386 aa, Glycomyces sp.
VKQVVVVKLVPDAGSRAALAETLSTCNTEANRIAGVAFAHRGAVTGRVEREYALRGRVYAEAKGTGIGSQLAQLAVKKVRDAYTVVEAQVRSGMLRGARAAKALGKPVVFRSGAAQPFDDRCLSWNLDARTVSVRTVVGRVRGIGFACSKRDLAMLRAHRKGESDLFERGGELYLAATVEVPVAEEREPVDFIGVDRGIVNLATTSDGVNFQGQDLERYRRRMARARAELQAKATKAAKKKLAQRSRRESRHAAHVNHKIAKEIVSAAERTGRGIALEDLEGIRERVRLTRSQRGRISHWPFYQLAQHIGYKARRAGVPVIAVDARHTSQMCPLCHHTERANRRSRDEFCCRGCGLAGPADVIAAVNVRRRGRMAWAVCQGSGRPA

SEQ ID NO: 12017 - protein, 528 aa, Aphanothece sp.
MPTKEKSKALKMKLDNDCTMSNPTLMVQLELPLFAIAESVQQSNETTLTDKLTSCTHSIQKQKSSKILEVGLTSNEKGLKPYWTDYCKEISSHLLLPIETDYVDSDSSLYNTWLSETVDKSWFSTKLYTVPNLSLPPIYSQYFTSSLVECTDLENTLRKSKKIRIYLTTEQKKTIKHWFGVSRFVFNKTVKYLQEPETKANWKAIKTGIINDLPEWAKEVPYQIKSIAIKDACTAVKNAKQKYIKTKEIQRVKFRSRKDKQQSCYIPKSAISDKGIYHTILGAIRYTEILPVKLGDSRLVARNGEYYLTVPYEVQRYESDNQGRIVALDPGVRSFLTLFSPNSFGWIGNRDIGKIQRLCYQLDNLISRSTKVNAKTRKRYRKACDRLRTRIRNLIDELHHKIARFLVDNYDVILLPTFEVSEMVLKNSRKIRTKSVRQMLSWSHYRFSEFLKHKAFETGKLVIDCCEAYTSKTVSWTGELIHNLGGRKVIKSKIDGQKMDRDLNGARGIFLRALVDTPSIKDSLIVHC

SEQ ID NO: 12018 - protein, 261 aa, Aphanothece sp.
LAERKEWINSRKCQVNACSLRSEYIIPAAQPFRDYYKQKKELTQAKQQYPEIKRVQSQVLQEVMGRLDKAFNFFWKRSFGFPRFKKYGQFRSINFPQFRENPVTGYQLRLPKIGSVVINLHRPIPDGFVVKQVQIVKKASGWYAVICIQSDVNIPYKKPQGKSLGLDLGLSKFIATSQGELIARPKFFVELQSKLKWLQKRLSKKQKGSKNRLKAIQKVARLHEHIYNTRKNFHYQVAHHLCDQAQIIFAEDLNLKAMSYL

SEQ ID NO: 12019 - protein, 174 aa, unknown
  TnpB Polypeptide
LEGTPKTCTIRRSATGKWFATIICVVEAQPLPASDKVVGIDVGVEQFAVLSNGEMVANPRFFRQDEKALAQAQRKLSKAAKGSPECQKARKVVARVRERIRHRRHGFVHQHARRIVNRYGLITIEAFHVKATAHNRYLVKSISDATWSQFRHVLSYKAAEAGRILVAVNPAYTS

SEQ ID NO: 12020 - protein, 381 aa, unknown
  TnpB Polypeptide
MVARNKYKRHTQAMRKTFKYRLLPTAAQRTALRRALDACRWVYNQTLEARQAAWEERGESLSRYDTIRMIPAWKAEQPLLHDAFSQSLQEACTRVDLAFQAFFRRVKAGEKPGYPRFKGRGWYDSVTYPQYGNGVRLAGDRLILSKVGAVHIKQHRPVEGTLKTVTLRRDRVGNWSVCLACAVDPCPLPPSPEVAGVDLGLTTFAVLSTGECIPRQRWMKRDAQDIARLQRQKEQFAKGSPERRKVLRALNHAYPRATHRRTDCAHQASRKLVNRFGLLVFEALDIPAMQSNGNRVINRGSADVAWGQFVQFTTYKAASAGRAVLRVNPRGTTQECSGCGAVVPKDLSVRVHECPDCGLKLDRDLNASLNILARGLASLRL

SEQ ID NO: 12021 - protein, 406 aa, unknown
  TnpB Polypeptide
MLIHQAYRYELRPTRGQLTSLRKHAGMARFAYNWGLQERIRIFKEDEGRDRFPSSIDQHKAWNIWKRSNAPWWTEVSSRAPQGALKNLDQAFKNFWAGRKSGRKVGFPKFKKRGVHDSFKLWGTLKILSKRKVQLPRIGKMRTKESTEKFNGRILSATVSREVDRWYVSFCVEAERPDPKPVSGPIVGVDVGLNHFATLSDGTQIDAPKPLKSNLHRLQRRSRQHSRKQKGSSNRRKSTIHLARLHRRIKNQRKDFLHKVSTRLARTKQAIVVEDLNVRGMSKNRRLSRAIMDAGWSEFRRMLGYKSVWYGSRLVIADRFYPSSKTCSTCGIKKDSLTLSDRVFKCESCGIEIDRDLNAAMNLAKLDTGSSPGINACGDGSSGGRLSERETTVVEAGIGCRHVSAS

SEQ ID NO: 12022 - protein, 372 aa, Ruegeria sp.
MIVNKAYKFRIYPTKEQEILIAKTIGCSRFVFNHFLGKWKSEYQETGKGLTYNACSSQLTQLKKELVWLKEVDSIAIQTSLKHLADSYTRFFKKQNNTPRFKSKNNKVQAYTTKHTNGNIAIVDHKIKLPKLGMVTFAKSREVKGRILNVTIKRRPSGKYFVSILTETETEELPKTGESVGVDVGLKDFAILSDGTIHKNPKFFSTLEHKLAKAQRILARRQKGSSKWHKQRMKVARLHEKIENARHDYLHKISTDIVKNHDMIGIEDLQVSNMLKNHNLAKAISEVSWSRFRTMLEYKAKWYGKQVITVAKNFPSSQLCSSCGHRNKDVKNLALRTWECSQCHTHHDRDINASKNIRDEALRLTVGTAGIA

SEQ ID NO: 12023 - protein, 422 aa, Ruegeria sp.
MIVNKAYKFRIYPTKEQEILIAKTIGCSRFVFNHFLGKWKSKYQETGKSLTYNSCSSQLTQLKKELAWLKEVDSIAIQSPLKNLADAYARFFKKQNEAPRFKSKNNKVQSYTTKHTNGNVAIFDNKIKLPKLGMVKFAKSREVKGRILNVTMKRKPSGKYFVSILTETETEELPKTGASVGVDVGIKDFAILSDGTIHKNPEFFRTLENKLANAQRILARRQKGSSNWHKQRIKVARLHEKIENARNDYLHKISTDIVKNHDVIGIENLQVSNMLKNHNLAKAISEVSWARFRTMLEYKAKWYGKQVITVAKNFPSSQRCSSCGHRNHDVKNLALRDWECPECHTQHDRDINEELDRSMNELAYSFTEANHQRIKMGEEYLSIVELLNTVVQHEGIHQGQYFVALKQAKISPPKQWRRDWGM

SEQ ID NO: 12024 - protein, 388 aa, Ruegeria sp.
MVKASIENQRDEVRGFAMAKLNKAYKFRLYPTDEQALFIRQTFGCVRFVYNKMLAERKETYENLKDDKEALKKTKHPTPAKYKKEFVWLKDIDALALANAQLNLNKAYKAFFENKAKFPKFKSKRHKQSYTTNVVNGNIQLFDGHIKLPKLKTVKMKQHREIPSGHIIKSCTISMTPSGKYYISILTEYEKEIKNKEIEDVIGLDFAMNGLFVDSETGKKANYPRFYRQMLEKLASEQRKLSRKKKDSSNWNKQRVKVSKIQEKVANQRKNFLHHQSKALAVSFDAIIIEDLDMKGMSQALKFGKSVADNGWGMFTSFLHYKLKEQGKQLIKINKWFPSTKTCSSCGSMREMSLSERTYQCDCGLNLDRDHNAALNIKKEGLRLLAIP

SEQ ID NO: 12025 - protein, 391 aa, Microcystis sp.
MDNQGTTRNDLQKLCAVLADNKETPYVNKLNSQARQSAADRAWQSISRFYHNCHAKIPGKKGFPRFKKHSRSVEYKLTGYKLSDDRRKIRFTDGFKAGEFDLWCSQKTLVYYSEQQIRRVRVIRRADGYYCQFLIDVERQEYHKPTGQITGIDLGLKEFYTDAQGNTVENPRYLRKSEKRLKKAQRRLSKRFRKGKKQSKNYHKQRIKVARLHLKVSRQRKDKAIKDALALVQSNDLVVYEALKVRNLVKNHKLSKSISDASWYQFTEWFEFFAKIYRIVCVAVPPHFTSQDCSVCGTRVQKTLSTRTHQCPNCQTVLDRDHNAAINILKKGLQYLGNHLNGTVGQTETDPNALGESGLWIFSGDIENLSCLVEQGISNSDVERIPRHSVA

SEQ ID NO: 12026 - protein, 300 aa, Gallibacterium sp.
MQLRKAFKFEIMPNGSQIRRIKQFCGCSRFVFNRALAWQNEQYEQDNSFKFSYTKIANLLPQWKKEFAWLKECHSQVLQQSLKDLENAFKNFFQKRSDFPKFKKKGVKEGFRFPQGCKLEQQNNRLYLPKIGWVRYRNSREVVGEIKNVTVSQKCGRFFVSIQTEFEYEIPTHKGGEIGIDMGIARFATLSNGEYFEPVNAFKTYKGKLAKLQKRLKNKVNQSWFEFRRQLSYKTQWLGGFLVAVPPQNSSRTCPSCSHIAKENRQTQVHFGCVECGYTENADVVGAMNVLARGREIALA

SEQ ID NO: 12027 - protein, 409 aa, unknown
  TnpB Polypeptide
MIVTKGIEIKLYPNKAQKVFFAKTFGCCRFVYNQCLKIKSYLYEETKMSFQPKLKSFKEEWPWLKEADSQGLANAYMDMQSAYQSFFEGHSKYPKYKGKMDKQSYRNAMCHKDLKKLIVGNTIVLPKVGAVKCRFGKTFEHENIKKIYNVTIKKSKKGDYYCSICCDVDILEMEHTGECVGIDLGLKSTIVMSNGEVIANPHFEKKSERKIKHLQRKLAKAKKDGSRYEKIRIQLAAAHEKLGNRRNNFLHQVSHRIVRDYDVICMETLNIKGMQKNHCLAGALTNQALGTLTRMIEYKAQWHNRTVVKVGRFYPSSQLCNHCGYRYRELRLSERSWICPCCGTAVDRDVNAAKNILDEGLRILDNKGTPRTGEAVVLRPLCLAENPTVDDRPLDLKSSGAMMRETILP

SEQ ID NO: 12028 - protein, 386 aa, unknown
  TnpB Polypeptide
MLIQRGYKYRILPTKEQEKLMLQCGGNTRFLWNYVLKINQDYYKETGKFRFYHELAVSLPKLKEEYPFLKESFSQSLQMVLRQFDKALKDSFKKEKGFPSFKKKMLLNDSFACPQKWRLGKGFVFIPKIGEVKWTKHRTMKGKPKSITILQDGDKWYCSVLCEYTIPDKAKECDNVVGCDVGLKEFATLSDGTIISNPKHTKKYENKLAKEQRKLSKKQKGSKNRFKQRLKVRKTQNKIRDARKDFLHKTSNSIAKNYDGIFVEDLNIKGMMKNHCLAKSIGDVSWSEFNRQLEYKCKWSFKYYIKIGRFEPTSKTCSKCGCIQEMPLSKRVFDCPDCGISIDRDLNASLNIRNIGINTLGHSGINACGDGSLEPSLKQEKECLEN

SEQ ID NO: 12029 - protein, 440 aa, unknown
  TnpB Polypeptide
MQKTLKVKLIPLTKSDLRRLHELKESYTTLLKDTLKIVIENDIRTRKQAHKMCYEVLRRNYPNLHNKFVQEAYKKALAMYKSYLKLKKRYEKGLLKFEPSLPKIDENNVVDLHVDTFKLVRINGTLLLTISKSKGEYIRFVVLEYAYFKKHLEDGWNIQNSKIIIDNTIYIHLTVSKLITPKHHENKLVVDVNENTVDCLLVTHEVAVFFKIRHDIRKIRMNYRRIRKSIHKKVKDERTRNELLAKYGERERKRVEDRIKKISSLLTELCLRFNADLVVENLKYLKNSKKKCKQLNYRLQTLPYRKLLSNLEYKATEKEISVIKVNPNNTSVTCPICGCKNKRNRLTVFSFKCINCGFEFDAQFVACLNLLSRADDSCLAIRHGRLIIRKAGYVVPVDVAPNEVPIREALREKPVPSFRNILNIKHGQPRKNDIYHSLQD

SEQ ID NO: 12030 - protein, 354 aa, unknown
  TnpB Polypeptide
LRGANVQQVTRKNASAWKSFFKLSKKKKEGELPKWLKPKPPHKKKYNLFLLIRHDRYKIKGNEIFLMDFNLRLKFNGKLKWVGKQGTLEIFYDNARRKWYARIPVSVKINNKPKGKIKAGIDLGIVNLATVAVQDGSWMIFKGGSVLSEFKKITKSISIEEKRLSRHGLKTSRKLEMLYNKRSLLLKNAREGLAREIVESLYDKGVGEIYIGYPKGIAQNKGNERNTNFWSYSAIIKRIMNVAQEYKIKVKLVDEENTSKTCSLCGEIHEDGRIERGLFKCPHTGKVINADLNGAINILHIPESDEDRGKWLKAQPVVYRWTSGAGWVTTSYEAMKMKAVNHEPMIRLEGTIAF

SEQ ID NO: 12031 - protein, 448 aa, Bacillus sp.
  misc_feature (292)..(448): Xaa can be any naturally occurring amino acid
MEVNQMIINKAYKFRIYPNQAQAILINKTIGCSRFVFNHFLSLWDHAYKETGKGLTYGTCSAKLPAMKKEFVWLKEVDSIAMQSSVRNLADAYTRFFKKQNSAPRFKSKKNNVQSYTTKQTNENIAVVGNKIKLPKLGLVRFAKSREVEGLIVNATVRRNPSGRYFVSLLVETEVQELPKTHSYIGIDVGLKDFAILSDGTHYENPKFFRSLEEKLAKAQRVLSRRMKGSSRWNNQRVKVARIHEYISNARKDYLDKISTEIIKNHDVIGIEDLQVSNMLKNHKLAKAISEXXXXXXXXXXXXXXXXXXXXXXXXXXXXXXXXXXXXXXXXXXXXXXXXXXXXXXXXXXXXXXXXXXXXXXXXXXXXXXXXXXXXXXXXXXXXXXXXXXXXXXXXXXXXXXXXXXXXXXXXXXXXXXXXXXXXXXXXXXXXXXXXXXXXXXXXXXXXX

SEQ ID NO: 12032 - protein, 288 aa, Bacillus sp.
  misc_feature (78)..(139): Xaa can be any naturally occurring amino acid
LFSLCIQSFPILSLWDHAYKETGQGLTYGICSAKLPAMKKEFVWLTEVDSIAIQSSVRNLADAYTRFFKKQNSAPRFXXXXXXXXXXXXXXXXXXXXXXXXXXXXXXXXXXXXXXXXXXXXXXXXXXXXXXXXXXXXXXRIVNATVRRNPSGRYFVSLLVKTEVQELPKTHSYIGIDVGLKDFAILSDGTHYENPKFFRSLEDKLAKAQRVLSRRMKGSSRWNKQRVKVARIHEYISNTRKDYLDKISTEIIKNHDVIGIEDLQLSNMLKNHKLAKAISEVSWSQFGA

SEQ ID NO: 12033 - protein, 392 aa, unknown
  TnpB Polypeptide
MIRVLKSYKTEIDPTEKQKHKINRTIGVCRFIYNFYLAENKEIYKAEKSFMSGMDFSKWLNNEFLPENPEYLWIREVSSKAVKQSIMNGEKAFRKFFRKQSGFPRFKKKNRSDVKAYFPRNNRTDWTIERHRLKIPTLGFVRLKEKGYIPMDSMVKSGTVSMKAGRYYVSVLIEAEEKPYDVPEGNGIGIDLGIKDFAVVSTMENPFANINKTKSVRDLEKRLKREQRRLSRKYESLKVRNKEMKGEATRQNIHKQTIKVQKLHQRLSCIRENHINQVISQVIRQKPRFITIEDLNVKGMMKNRHLAKAVQGQNFYSFRLKLADKCRKKGIELRIADRWYPSSRLCSGCGSIRKDLQLSDRTYRCDACGFVIDRDRNASINLLNAKVYNVAP

SEQ ID NO: 12034 - protein, 320 aa, Succinivibrio sp.
MTDTNLAKLAFKFKLEPNGEQRRFFSRTAGCTRFVYNHLLFKCREDFREYLEEIDSRQSNGEALNRDEAKKLSFRPLCYKCITGLNYLLPDLRKEYPFLQECPAQTLQQKAQDLMSAYHRFFEGKGGLQKLKKKALHNSFRFPQGFELDEDRKKIWLPKLGWVKYRKSRNIFGKPKNVTVSLNHGDWYISVQTEFELKPLIQELNFNTAVGIDMGVVRFATLSDENYIPSLKDRLNPVYEKIEKLQRRLSRKKKDSKRYIKLRIKLSKLHKKLTDVRYDYLQKESTRLVKNHDIICVEDLKVKNMTKSAKGTIEEPGSQA

SEQ ID NO: 12035 - protein, 463 aa, unknown
  TnpB Polypeptide
VSWSNVGAVDLSAIRINVVYSYYLSARKAPGFSPGMDSAVDVVGRTESDVVLPQCTVYNNSMQRLQAFKFELMPNGEQQRQMRRFAGACRFVFNKALALQQDRYKAGEKKLGYAHLCKTLTDWKAQAQTLWLNETPSQSLQQSLKNLERAYKNFFEKRADFPRFKKKGVSDRFRYPQGFKLDQTNNRIFLPKLGWLRYRNSREVLGAVKNVTGSQSCGKWFVSMQTEREVEQPTPNGGAVGIDMGITRFATLSDGTYLEPVNSFKKHHQRLARHQRAMSRKIKCSKNWVKAKARVQRIHTRIANVRKDFLHKASTKISQSHAMIAIEDLQIRNMSKSARGNSEQHGKKVKQKSGLHRSILDQGWGEFRRQLDCRPQWRGAILVAVPPQYSSQECPVCHFVSQDNRKTQARFACVECGFEENADLVGAVNILARGHRVLACGEPVQLGRSVKQEPTEATLAIAA

SEQ ID NO: 12036 - protein, 487 aa, unknown
  TnpB Polypeptide
MKKVVFLLMMITVLLSSCGEYNKILKSTDYELKYSYAKKYFNAKQYSKSATLLDELVPIFKGTANAEESLYLLAQSYYGQKDYQTASQYFNTNTYLSYNSNYYECKGNENFKILLSDCSQQILRLVDRDFQSFFRLLILKKSNKYSEKVRLPHYKKKDAVMVCPIQGRSCRIQKDGKVAIGLTKEFREKYNISERRILFTIPKNIRHIQQFQEIRIIPIHNGKEFSVEFIYNETNVKPQVQGNSYMSIDLGVSNFAACTIFSNGDAQQFLIDGRRLTNINHYYNKKVSELKSEYSKNQSITDDTTPRMMRLMNGRNNRLTDYFNRVCHFLINKCLAYGVSTLVIGYNKGQKQDINLGKANNQKIVAIPYHKFRRKLESICSEYGITYISQEESYTSKASALDGDIIPVYGENTDNIVFSGKRTHRGLYRSSDGLYLNADVNGSINILRKYFKERNENWIYQDSVRALVNVPCQRVSPFAQAPSFRWV

SEQ ID NO: 12037 - protein, 366 aa, Lachnospiraceae sp.
MANKAIKYRLYPTSEQCVLFAKTFGCCRKVYNLMLADKIAYYQSTGKKLTNTPAMYKKEYPYLKEADSLALANEQLHLQSAYNNFFRDKRIGFPKFKSAKRSRKSYTTNNQNGTISLTENSIRLPKIGFVKAVLHRRPETNWVLKSATISQDSDGKYYASVLFEYDETVTPMNNPKKVLGIDYKSDGLYKDSDGNSDTGHKYYRMSQKKLARAQRKLKHKTIGSNNYKKQQLKVSKIHKHIANQRLDHLHKRSTEIANQYDVVCVESLNMRLLSNKGFGNGKATMDNGYGMFLNMLEYKLRDRGKYFIKVDKWYPSSQICSRCGKRKKITLSERIYKCECGLTIDRDLNAAINIREEGLRILKLAI

SEQ ID NO: 12038 - protein, 440 aa, Bacillus sp.
  misc_feature (187)..(187): Xaa can be any naturally occurring amino acid
MVKTMARKKAVKVLRKQKKRENIQRFTQKQNIGRACLTAKEFRLLQRMSHSSKALRNVGLYTIKQCYLNDNKMATVKEVDIAMQADTNYSGIQSNSVQAIRRALFTEVKSFFKALEQWKKKPETFTGRPKFPHYSRSTDKRIIEIYQVPKVDENGYWMIPMNVAFRKKFGSIRIRMPKNLRNKKISXYTYEMHVSQMKKHSTTTSDALSCDLGVDRLVSCATNTGDTFLIDGKKLKSINQYFNKTIRNLQQKNMENGISKRVVTNKIAALWHKREKQISGYISQTVGLLFKKVKAFGIDTVVVGYNTGWKQKSDMGKKNNQKFVQIPFHKLIAAIENKCIKEGIRFLKQEESYTSKASFLDKDPIPVWSKDDRTHYCFSGKRITRGLYQSKAGTCIHADINGALNTLEKSRVVELDESLKVKTPILLEVQKRKAVASRIA

SEQ ID NO: 12039 - protein, 934 aa, Streptomyces sp.
MARYRLCPTSDQVEVLRRHCGHARFVWNPAVEQHSWWTPRRGPAPGCVAQARQLTEARAVNPWLAAGSQTVQQQALRDFAQAVANFFAGTHRRPTWRKAGCHGGLRIVAVKPGDVRRQSRRRGEVRVPKVGCVRFRWSRAVPAGVKSCRVTCDRAVRWHVAFAAVPDAVPVPGNGAVVGVDRGVAVSAALSTGELLHAPRLRESEARRLLWWQRRLARCQRGSNRRRKVRSAIARLKARDADRRRDRDRDRDRVEKTTTRLAAGFDVIGIENLDVRAMTAPAKGTVAAPGSRVRQKAGLNRGILRSARGAFAARLEDKVRGRVVRVDAAYTSQSCSACGVVDRGPRESQAVFRCRACGHTDNADVNAARNVKTAAGCAVAAREGPCISGPVHREPQADLLLSAWSWGFGLESSSFARGRTSNEARPLVALHEGVDGLGRPVGLAVHALAGEHGGLDGVGDRLVDDRRVAGLGPAAGEDVLLELLHRPGVVAAALRAALQGGGARGDVGLHARTPLDGAVDGLVRHPAEGPAAELGGGVGVGALGAGAERPAAEGGGVLATGRYGQLEDPVLVVGGARLERLDLPDADLPHAGEVGGEGGDAVVGGGERTGRDAGFDGVLPEREGLAGALGVEGDVARLVDDLAAALPHPAVPGEVLVVAGVGVEDEAGGAGLAADLVAGVEELVPGGRDVGLGEAGLLPDGDVVEDRQRLDLHGQGVDLAVDGAAGEARAVVLDHAVVEVRGEVGEDAAVVVAGEVAGAEQEDVGSRAGGEGGDHLRTLVADAGDEVRLDLDVVGVVPVLDEPVEPLRLGDRRGVGRLRVVEVPELQRAAAGARGPAATAEQRGRGGRRGGGGRARGAAEEAAAGGGAGGAAGRGGAPGGYGAVAVVEHVVPLSVGWVLESRARGLVRAQSGASTSRSSSPGVAGRAALDGASR

SEQ ID NO: 12040 - protein, 403 aa, Streptomyces sp.
MARYRLCPTSDQVEVLRRHCGHARFVWNPAVEQHSWWTPRRGPAPGCVAQARQLTEARAVNPWLAAGSQTVQQQALRDFAQAVANFFAGTHRRPTWRKAGCHGGLRIVAVKPGDVRRQSRRRGEVRVPKVGCVRFRWSRAVPAGVKSCRVTCDRAVRWHVAFAAVPDAVPVPGNGAVVGVDRGVAVSAALSTGELLHAPRLRESEARRLLWWQRRLARCQRGSNRRRKVRSAIARLKARDADRRRDRDRDRDRVEKTTTRLAAGFDVIGIENLDVRAMTAPAKGTVAAPGSRVRQKAGLNRGILRSARGAFAARLEDKVRGRVVRVDAAYTSQSCSACGVVDRGPRESQAVFRCRACGHTDNADVNAARNVKTAAGCAVAAREGPCISGPVHREPQADLLLSA

SEQ ID NO: 12041 - protein, 431 aa, Hyella sp.
MFLMILNYVYRIYPDSNQIDLLNEWLETCRVSYNYALRELKDWIASRKCPIDRCSLESEYIMVADYPFPSYHQQQNNLPLAKKQFPRLKSVPSQVLQTNIRRLHDAWDFFQKRGYGFPRFKKYGQMKSLLFPQFKTNPLTGWQIQLPKLGKVQINLHRPIPDGFVAKQVRVVKKAVGWFAVVAIESDMKIPSPVPHGRVIGIDVGLTSYIATSDSYTEQRPKFFKTAYSRLKVLQKRLSRTMKRGKNYEKARIKVAKQHNHIGFKRCDYQFKLAHKLCDMADTIFVEDCDFRIMAKGMLGKHTIDASFGQFRTILEYVGRKRDVFVGRVDHRGTSQICSNCRSEVRKELSDRYHVCHECGYGVDASVDRDIVSAQEICNRGIETYRGTPEKQEIASQVVLSGNFVLDKWHRGGKSIGDNRSPRHSKNEAIA

SEQ ID NO: 12042 - protein, 335 aa, Hyella sp.
MSYKETSHQLTLLKQNPEFSWLKDVTAVPLQQALRHLNTAFLNFFAGRAKYPRFKKKRNQQSATYASNAFKWDGEKLTLAKMKSPLKIRWHRYFAGIPTTVTVSKDSAHRYFVSFSVEEEIEQFPKIGEQVAIDLGIKDVIVSSKGFASGNPKYYQKYQKKLAKLQKRLAKKQKGSQNREKARLKVAKLQAKIADCRKDFLNKLTIRLIRENQAVITESLAVKNMIKNRKLSKVIADAAWEELIRQLDYKASWYGRVLVQVDRFFPSSKRCHACGHVLDKLPLEIREWNCVCGSHNLRDYNAAKNLLAVGRTVLAYGDTSVGDTAIAVSSQVSSK

SEQ ID NO: 12043 - protein, 419 aa, unknown
  TnpB Polypeptide
MAKATTTIKQVLHYQDAHAAWFAANQVLFNQVVAFYFEVIQAHERVLDLSDKEALRALEKLTHTTKKNPTPVMPLAALVEDAPAMFRRAAIHAALGSARSFSSHLSKWKKRKAKAQARGKPFTERPPVPPRTWNKSATLYAGQWKERTSSSIVLKVWTGRCWSWIKVRITGRALPTDVEIGSPSLIRRGNHWWLHTPLEKHFRSPPTIEHQVTTNTATTICAVDLNLNEHLAVCTIQTVEGTILATTFIGGGRRISGFRKKQLGWIARNRRKTGIIAQGEQDNVHLWGKITHVDEQIAHLVSARIVQFAKEHGAKILVFEHLGSLKPARGTYSRRGNSKRAYWMKGRIFTYAKYKAYNEGMLTSRVSPRNTSRECARCHRLVARYAAGQPAEGYTSGAPLVFCQACGMRGHADRNAARP

SEQ ID NO: 12044 - protein, 159 aa, Synechococcus sp.
AGLSRTHKTSWNRALARFLVAKCHAKVADKRLDFPHKLSTRLIRENQAVGIEDLNVAGLLKNHKLAGSIADAGWRMFRILLESKAKMYGRVVEVFNRWHPSSQICSKCGHQSGKKTLSIRHWQYPNCEAVHDRDINAARNYSRSRRRACGDSKRLSEPE

SEQ ID NO: 12045 - protein, 404 aa, unknown
  TnpB Polypeptide
MKLNQQVRLYPNKTMKHVLDSLCDYRRYCWNEALACWNDQYEEYLIRIPESILDKLRSKTEPLTAEEKELVNQYPSPSHYSVQNELVSQKEDWQYALSSRVLQQAVRDLAHAWNFSFKHQGTVGQPTFKTRKALKQGFKTDRARIRNGQLLLDKPRGYQGQWKGIRFKGLSVPDGNLILCSVTRMGGRYTATFTLEVEPIPLRHIGQKTAVDANVDHFDTTEGRTSLKPEVLDPLYVRVRHYQRILARKRCRNPRAIHSKGYQATRTKLQRTYERIANIQKDLLHKFTTDVYRRFDTVVIEDLDVKKMQMSKRAKNLHRSLFGQFRQMMEYKSQKFGKTLIIADRFYPSTQRCSSCGFIKTGDDKVTLSGNLKHGTRHNEYICYHCGYEDDRDHNSVLNLLALA

SEQ ID NO: 12046 - protein, 296 aa, unknown
  TnpB Polypeptide
MCEPLRFKDAKVLSVTISRGADDWYVSISCELTSLTHLKPAKNQGRVGVDLGILKMAVLSDGHVFEAPMPLKHALARLKILQEIMSRAKRGSRNRQKLRVRIARLHRRIANIRSHAIHKLTAFLASNYSEVVIEDLNVKGMMANHHLARAIGDVGFYEFRRQLEYKMALRGGLLVVAPRFYPSSKRCRFCGGKNEDLTLSDRSWVCPHCGETIEDRDLNAALNLFHYSKDWDSEASASADAEGSSGSTSDKALPDTAPHDGVPASVADQALRGGDEEGALASPPAMPEEALTPSPD

SEQ ID NO: 12047 - protein, 414 aa, unknown
  TnpB Polypeptide
MSTAEVNSTAVRAIRYRVLPGTPAKAKAMNRLAGACRYVWNGALRANRDAHRMSMEFGGRVPFPTFFTLGKSFIALRNSEGHEWLRELPCGIVRYTLKRQADAWQAFFKGQRARPKIHGRRHDGGFTIPEKVRIRDGRVAIPKIGGVRLRRRGGNPHPDGSPRQAVFKREGRKWYCTVFYAVDVAGRTDDGTVVGMDRNVGQVATSEGKIIRLPSMDRLEARSRRYQRRMARQAKGSNRRGRTKAKLARTSRRIADVRANWAHRVSRNLADRCHAVVIEDLRTKAMSASAKGTADSPGRNVRQKASLNRGIQASAWGGLERNLAYKAGRLLRVHPAHTSQTCNECGAVDSASRMSQSEFRCQACGHSANADVNAARNIRRQGLAQLDGEGRRRRRTKGSLASPMTRQIGMALAA

SEQ ID NO: 12048 - protein, 278 aa, Rhodococcus sp.
MTERHGILSQMASKVVKRAYKYRFYPTGEQREQLARTFGCVRYVYNRALDERSRAWSQERRNITHAETDKMLTGWKRDPETEWLTEPSKGPLQAALRNLQGAFDKFWRKQAGYPTFKKKGRSKDSATYFSNCFTYRDGRIKLAKQAQPLDIRWSRPLPEGAVPSQVTVSRDARGRYHISILVEGTITEHDPTEVMVGLDAGITSLYTLSTGEKIHNPQHEKNDRAKLAKRNAHWRTNRRDRTTGPRRAKRSPRSTPASLTGAGTICTSSPLDWCAKTK

SEQ ID NO: 12049 - protein, 386 aa, Streptomyces sp.
VKLVVQVKLTPDAVQAPAVERTLHAANEAATWVSAVSHQHFCLRGSVRELRKLCYGELKARGFGAQAAQHIIKRVADAYTTLRANIRAGNLGPEGAKRRRRAESKPIAFRPHAAHTYDDRCLSWNYDAQAVSIWTLDGRVKNVRFACSADTLKQLAAHRQGESDLVLREGKWFLIATIDIPEPEVVEPKGFIGVDRGINNLATTSDGDNHTGRRLGRYRRWQARKKAELQARKTRSAKQLLKKRARREARHATHINHKISKTVVAVAQRTERGLALEELRGIRERVTVPRDQRARQSSWPFRQLGAFIAYKAKRAGVPFIEVDPAYTSQRCPRCGHTERANRRTRDHFHCRRCGLAGPADHVAGANIAKRGATAWVFANMPDPAPA

SEQ ID NO: 12050 - protein, 401 aa, Planktothrix sp.
MLVFEAKLEGASQQYERLDEAINTARFVRNSCLRYWMDNKNIGKYDLSAYCAVLGKEFAFAGKLNSQARQASAERAWSAISRFYDNCKKKKPGNMGFPRFKKHQTHGCVEYKTTGWKLSEDRRTITFSDGFEAGSFKLWGTRDLHFYQLKQIKRVRVVRRADGYYVQFCIDQERVEKREPTGKTIGLDVGLTHFYSDSNGQTIENPRHLRKSEKALKRLNRRLSRTRKGSNNRAKSRNRLSRKHLKVSRQRKDFAVKLARCVVQSNDLVAYEDLQVRNMVKNHKLSKSISDAAWSNFRNWLEYFGKVFGVVTVAVPPHYTSQNCSNCGEVVKKSLSQRTHRCPHCGHMQDRDWNAAINILELGLRTVGHTATLNASGDIDLCLGEETPPGKSSRGKRKPKQ

SEQ ID NO: 12051 - protein, 409 aa, unknown
  TnpB Polypeptide
MRRFAGSCRFVFNQALALQKARHEQGEKKLGYARLCQRLTAWRHGADTAWLAEAPVHPLQQTLQDLERAYANFFARRADFPRFKKKGQHDRFRYPDPKQLKLDQGNSRLFLPKLGWLRYRNSREVLGAVKNATVCLSGGTWYVSIQTEREVEQPIPNGGAVGIDMGIARFATLSDGSFIGPLHSFKRHEAALRRASQAMSRKTKFSHNWKKAKARVQRIHARIGNARRDHLHKTSAAISQNHAMVCIEDLQVRNMSKSAAGTTEQPGKNVRAKAGLNKSILDQGWFEFRRQLDYKLAWAGGWRIAVPPRNTSRTCPCCGHVSADNRQTQAQFRCIECGFEENADVVGAINILSRGMQKWRDEGQDTADASAGCASTARIACEVSDAVRPPAAGTHRSDSGAAPCRARAP

SEQ ID NO: 12052 - protein, 245 aa, Prochlorothrix sp.
GFSLKGNKLELAKLGRFKVKWSRLLPSEPSSVTIIRNTAGQYHASFVVEIGPINIEPLRPSIGVDLGIKTFAFLSTGDRVESPGYNRLDRKTRRFQRKLARQVKGSKRREKTRLRLAKLKLKTANIRKDFLHKTTTQLIHENQVVVLEDLAVKNMLGNRKLARAISQQGWGTARTMCEAKANRVNDRGVRIISRWEPTSQICSDCGFRWGKVALSVRSIRLRELRHRTLIEMVMPPKISKSLGWG

SEQ ID NO: 12053 - protein, 214 aa, Bacillus sp.
  misc_feature (3)..(3): Xaa can be any naturally occurring amino acid
  misc_feature (96)..(96): Xaa can be any naturally occurring amino acid
NVXPTGKYYVSILTEYEKEIVQKEVETVVGLDFAMDQLYVSSEDERANYPKFYREMLDRLAKAQRVLSRRTKGSGRWHKQRIRVAKLHEKVANQRXNFLHHKSKELATHFDVVAIEDLNMKGISQALHFGKSVADNAWGMFTSFLAYKLHEQGKQLVKIDKWFPSTKTCSSCGNVKNMSLSERVYSCICGVNLDRDYNAAINIKNEAIRLLALA

SEQ ID NO: 12054 - protein, 375 aa, Coleofasciculaceae sp.
MKTLKFKLYNHKRNRHLKRQINAAGVIYNHCIALHRRYYRMFKKHLSCTKLQSHIAKLRKRNPFWQTVGSQSVQDICQRIEKAYQLFFKHHKKGVRPPGFKKVRKYKSFTLKQAGYKFLGENRVKIGDRVYRFWKSQELEGVIKTVTVKRTPLGELFLMVVVDDDPSPPEIKVETGKIAGFDFGLKVFLTCSDGSKIESPQFFKQLLGALKKASQQLSRKTKGSANRERARLHLVRQFEAISHRRRDWFWKLAHHLTDRFDVLCFETLNLKGMQRLWGRKICDLAFGEFLQILEWVVKKKRKQLVFIDPWFPSSKTCSCCGHVLESLDLSVRAWRCPSCQSVNDRDENAATNIKMVGASTIGLGDVRQALPAISA

SEQ ID NO: 12055 - protein, 651 aa, Nonomuraea sp.
MLPMRITLAGCSTRLVIERSSPSSSPLLKSGPTTTMWGVLLSSAFIGFTLPKIRSSRLCQADVDWRRKDLHGVRKIAGGNLIVCSNVEVGVKLRYNYRLYPDAEQRGRLARTFGCARVVWNDALAARKAARRAGLPFVGDAEIQRLILTAAKKTPERSWLAEVSAVVLQQSVRDLNAAYRNFFGSLSGEREGVPVGPPAFKSRHDRRQAARFVGHAFKVTRDGGLSLAKIGVVEVRWSRELPTSPSSVTVIKDAAGRYFASFVVEVGGEAQASPELEPAIGIDLGLTHYAVLSTGRKISNPRWLRRREKRIARLQRSLARKQKGSKNRERARAELARQHAKVRDARHDFLHQITTSIVRENQTVCIEDLAVRGLARGRLAKSVHDAGWGVFRSLLTYKAKKWGRRLVVVGRSYPSSQLCPCCGWRIGKSSLEMREWDCPSCGEHHDRDIAAAINVLLEGQRMIGMTVAAGWPDTAKRLWRARKTGSGAPDLGCARKLRRRCVVGGSSKPSTATRRILGDHAGEDANSRILPTCSPESSRRCASAACAIGSVVCTTGRTAPADSRGQTFSTTPRQTAPFSSAGRERRVVPWTAARLLSRVSRSSSALMPPWRPMTTRRPPVLRARTLPARYLAPMMSRITSARTFSEKSSSR

SEQ ID NO: 12056 - protein, 409 aa, Planktothrix sp.
MQHQAFKVRLYPTVEQQKILSQHFGCARWWWNYALNLCIETYKTTGKGLSQSALNTFLPKLKKQEETQWLSECYSQVLQATTLNLVTAYKNFFEGRAKYPRFKAKKNRQSIQYPQSVKVVDGCLKFPGRVGTVKAKLHRPIEGAIKTVTLGMTPSGRYYASVLMEMDGNSPTPSTDGKVAGIDLGLKDFAIVNDGVKTSKYANPKHLAKHERNLKRKQQKLARKEKGSKSRDKARRLVARVHERVSNVRTDYLHKLSRKLVDDNQVIVVESLNTKGMVRNHKLAKAISDVGWGMFVNFLSYKLDREGKVLVEIDRWFPSSKLCSTCHYQISEMSLDVRTWICPSCGTHHDRDGNAAINIRAEGIRMLSVLGTRTAADGGDVSPKRGRKSKLTQSPMKSEAHAVPKVSVG

SEQ ID NO: 12057 - protein, 393 aa, Lysinibacillus sp.
VKGGENMTTITAKIQLYVNESQAESLRLTSKTYQKACNWLSEKVVVSKNLNQLQLNNLYYKELRQRFGLKSQMAQSVMKTVIASYKSAQSNGHEWSLVHYKSAQANGHEWSLVHYKHPSYDVVWNRDYSLNERLFSVNTLDGRIKLPFEVKGMQKYFNDDWKFGTAKLVYKFNKWFLHIPMTKGIPLLKEQDVNNVVGIDVGINFLATSYDSKGKTTFFNGRPIKHKRGQMKTTRKALQKRQTASARKRIRAIGQRENRYVRDVNHQVTKALVKRYPKGTLFVVEDLTGVRQATEKVHVKNRYVSVSWAFYQFRQLLEYKAQLYGHKVIVVSPKYTSQTCPKCGHVDKRNRNKKTHTFTCVNCSYQSNDDRIGAMNLYRKGIEYISDTVTVKV

SEQ ID NO: 12058 - protein, 380 aa, Lysinibacillus sp.
MERLKAYKFRLYPNEEQELFFAKSFGCVRKVYNLMLNDRIIGYEETKNDSSKKRIFPTPAKYKKEFPYLKEVDSLALANAQRNLDKAYKNFFRDKSIGFPRFKSKKNPVQSYTTNNQNGTVALLNNKFIKVPKLKSLIRIKLHRQPKGMIKSATISRHSSGKYYISLLCKEEIIELPKVNSAIGIDLGITDFAILSNGQKIDNNKFTSKMAKKLKREQRKLSRRALLAKQKSINLYDARNYQKQKRKVARLHEKVVNQRTDFLNKLSTAIIKNHDIICIEDLNTKGMLRNPKLAKSISDVSWSSFVTKLQYKADWYGREIIKIDKWFPSSQICSECGHKDGKKSLKIREWACPICHTCHDRDINASINILTEGLRIKSLS

SEQ ID NO: 12059 - protein, 355 aa, unknown
  TnpB Polypeptide
LKRCKHQIDKETFKLNRLSCLTSIGEKKSGTKSVHGNRKFKLTEDLKQVTLKLKNKKVKLNLIGNYSKNLLYKLSQVYKHQISDDTPLTYKIDTNYIYITFNESVVLSSNLNLTYVTNRVLSLDLNPNYIGWSITDWKSSSEFNVIKSGVYSFKNLTDKIQDLKGKGFSSESSVRKHLNNKLEYETYQVVKSLIKKAIYYKVYLIGIEDLSIKSKNLNKGSYLNGLINNKWLRNKFSTCLEKYCNIYGFKLQKVKPEYSSFIGNFLFRSLNLPDMVLSSIEIGRRTYEFYNQYITKQNKIQKNIIQPNLKDFNSLYIKSLEEFNIQVTEFKDLRDLYYIFKNSKLTYRVPIQNDV

SEQ ID NO: 12060 - protein, 379 aa, Peptococcaceae sp.
MKLVKSVKCKLQVNTEQATILLETLQRFADACNDILRVSRENHTTNKVKLQHLCYREIKEKYGLQANLVIRAIARVAEAAKKKRKQSKPRKFKPTSMSLDQRTFSFNEKRWEVSISTVAGRLKLPLAIGNFQRGLLAGQKPTSATLCYNRRKKEFYINIVVNREVPFPPKDGSIVGVDRGIYNLAATSNGLKFSGRQAMHIRRHYARLRQALQTKGTKGAKRLLKRLSGKERRWMADLNHRIAKAIVSSCKPGDVIVMEDLRYIRERIRVTKEQRLLQHSWAFGQLGAFIEYKAAERGIAVVYVDPKHTSQRCPRCGFTSSSNRRGHLFRCSSCDFAGHADIVAATNIRQVYLEALADGPPSVGPEAAPSRKPPALALG

SEQ ID NO: 12061 - protein, 258 aa, unknown
  TnpB Polypeptide
VFKWWIRIPVHPRSIWVPIQLPENQEHLLKLELRESKMIRDGDNWYVNLTVQKEARLKRRYATILPIDMGVRKLATTIENGKPHFYGKNVRRTRGAYFRLRRAAGKARIIKKWKHKERETVRHEVHHITRQIVEKARQMNAIIAVGDLKGIREQDKGRSFNRRLSGQPFYLFKQFLTYKAAWEGIRVLTVPEAYTSQTCSRCGMRGHRVGGRFTCQNCGLVCDADANGAWNIAKRAHGLLHETGAVLTPPRTLAKCEP

SEQ ID NO: 12062 - protein, 406 aa, unknown
  TnpB Polypeptide
VFTLTYEFKLKPTQAQVAIFQDWLEQCRRVYNYALAERKDWFKSRSCPTNSCCVHSEYIIPADTKRPTYASQCKGLTEARAKIPALNAVQVHVLQQTLKRLEQAFVSMWEQGHGFPRFKKAGTMRSFVFPQMGVKPIQNSAVKLPKIGWVKFRQSREIPDGATLKQVRIVQRASGWYVMLALQWDVEVPDVMPHGEAIGIDVGISHFAAISNGKLFANPRPFKKLEGKLRLLQQRVSRKVLGSSNRKKAQLKVSHLQERIANTRKNYYWLLAHNLCDWAGMIFVEDLNLKGLARGFLGKHCLDAGWGQFFQVLEQCCRKRGVFFLKVESSKTSQICPNCLVETGKKKLSQRVHSCQHCGYTTDRDVAAAQVVLVRGLAAVGHTVKMLSVSEAGPPKAGRVKRLRSP

SEQ ID NO: 12063 - protein, 486 aa, unknown
  TnpB Polypeptide
MLKAYKYRIYPNNEQKIQIAKTFGCCRFVYNQTLAYRKEVYEKEKKSVSKTDCNNYCNRQLKKEYEWLKEVDKFALTNAIYNMDAAYQKFFKEHAGYPKFKSKHDNHKSYTTNFTNGNITVDFGCNRVKLPKLKGVKAKLHRNFIGQIKSATISQVPSGKYYVSILVETEHVELPHINQNTGIDLGIKELCITSAGKKYENPKIIRKYEKKLVKLQRQLAHKEKRSQNYCKTKKKIALCHEKITNTRKDYLHKMSHEIISENQVIVSEDLQIKNMVKNHRLAKSISDVSWYELTRQLEYKAKWNGRKYVKIDTFYASSQLCSVCGYQNTETKNLSVREWVVHVENMWGETKEGVKRYCIQPEELLDLLKAIGSDNLGICWDTEHGAIENLDQDKAIAKVGPYLRATHISDQTDRGNVHVLPYTGNTDWDMILKALAKADYKGAFTYEIQHYLLAMPEKLVPDAILLSYKVGEEMADQLEHYKKILA

SEQ ID NO: 12064 - protein, 254 aa, Okeania sp.
MRIAYQYKLRPTKEQAEKINKTLDMLRCQYNYMLAERFDWWEQNRCPINSCPLICHLPALKDQATRFSQQKSLTQLKVDRPWYKEIHSQVLQEVSKRVELAFDRWLKGDINGKGLGKPRLKGKGQYKTFTYPQFKQHHFVNNKVKLSKIGDVKVIVHRPIPDGFTIKTVSVTRKSNGFFVTFSLEDKSVPEIKPDIKRGEMVGIDVGLIDFFVTSDNESIAAPKYLRKSVSEALRQQRKTQVSTKESVQKKERF

SEQ ID NO: 12065 - protein, 421 aa, Okeania sp.
MKLVERHVITKSHYLWSACDQKAFLSKNLFNLANYHDRQYFFENKQKLSFNQLYHLVSKSYDYQALPTKVSKQIIRRLDSAWSSYFAALKAWQKQPHKFLVRPKITKYKNKTKGRNILVYSHESIDKKKLKKGRCHLSMSELKIPRSQKSIIEMRIVQKSSCYMIEILSEKSEKTTDNQQVAGIDLGVNNLMAVTTNQTGVAHLLINGRPLKAINTLDNKKLSLIQSQLKTKNHQNSSNRLNALTHKRNCRVENYLHTASKRVIDWCEVHQIGTLIIGQNEKWKQSINLGKKNNQQFVNIPDYRLIEMLRYKAHLKGIKVIITEEFYRSQSSSLEQDELPKYGESKPIFKGKRIARGLYKTGEKKLLNADVNGAFNIIRKVIPDVFDQGIKGLPFNPVVLDPLRMTILSDFLVSLVERFGV

SEQ ID NO: 12066 - protein, 399 aa, Clostridium sp.
MKKLKRSYKIEINPTQEQKTKIHQTINVSRFVYNFYIAHNKEVYEKERKFISGMDFSKWLNNEYIPNNQDKKWIKEVSSKANKQAIMNGDKAFRDFFKKAKGFPRFKKKKNQDVKAYFPKNNKTDWTLERHRVKIPTLGWIRLKEFGYIPVNSIVKSGTVSQKADRYYLSILVEERDIKTSNSNIGMKISNTNNEGLGIDLGIKEFTICSNGNKFKNINKISTVKKVEKKLKREQRKLSRKYESLKIRNKNIKEGRATRQNIQKQVAKVQKLHQRLRNIRTDYINKIVSSIIKQKPSYITIEDLAVSNLMKNKHLSKAIASQKFFEFKTKLISICKENNIELRIVNRFYPSSKTCSNCGEIKKDLKLLDRTYKCDCGLTIDRDLNASINLKNAKEYKIA

SEQ ID NO: 12067 - protein, 280 aa, unknown
  TnpB Polypeptide
VEPRLLLFAHDGNVQPSRHGRENQSESPMEGNPGRIPYGTFRYRPTDIETRQMVPAYSHHPTGSRPNPKPQNIVGVDLGIRMLATSYDGETTVFQHGGEVKSKRGKYKRLRQQLQKRGTRSARRRLKTIGDRENRWMTDVNHQASKALVNHYDRDTMFVLEDLTGIRNATEQVRVKDRYVQVSWSFHQFRQMVEYKAKRNGQKVVFVDPAYTSQTCPKCGKIRKANRDKKRHLYVCRNCGYRSNDDRIAAMNLRHKGYDLLNSQYAASMTDGVRVQSTTL

SEQ ID NO: 12068 - protein, 439 aa, Helicobacter sp.
MQITKGFKYRIYPNKEQQALINHQCFIYNQAYNICLNLWLKEVESNKDLPKEQKKYLRAVDYDRLVKEALKNRELPFKSVVTQQARINFLRSIKRALSKEMVAERKRALDSATTPKQKAKALKLGIPNFKNSKLAKTSFNWNNQGFQILESNNAKFKTFKLMSMPLKMKYHRSLPQGYKVNQITISTSNDKYYASFSITYKQEIKQVDLAHLDSAKCIGIDLNINDIALSDGELIKTLSKKVNAKKYNDKFKRLMRKNSRRVRIKLESKNKNQKLSNNFRKTQKQLNQIYERSSNIKKDSYHKITTRLIKEFDLVAVEALKNKNMTKRAKLKNVKQKSGLNRSILNTSFYQFSQMLAYKALHNGKFFVKVNPQYTSKTCSVCGKINENLSLSDRVFECDCGNIIHRDINASINILERGLKSFGLGISLLDTKQKAFRVS

SEQ ID NO: 12069 - protein, 421 aa, unknown
  TnpB Polypeptide
VVLECYANRYARGALREIEGAYREMLVEMVEYAVKYKASQETLHSVFYEKFRERYPWLPTRVIKGAYRDAVRRAKSFRERKKKGKVHKDKPEVKRVTITYSDSQDWRLEDGFVKIRARSGWVELHYRNHKQLHRYFCSGWRLASELRFKILGKKVIAYLTFTREFDVNYDPKNVIAVDVNENNVTVAVFKNGSLTDVYRVETGLGRIVVAYSERRKRITQGKSTKTREVKRKLRRLRERERKQDVLRKTAKLIESLAIENRAVIVVGNINEKAKERMEEDANSKLRHRIHQWSVRKLVKLLDEKSVHVIKVSERGTSSRDPFTGRRIRRFKPLMIRTAVKGIKRVKVLKIVLRITKVSGRVLERDVVGAVNIGLKYLNSDGSLVALGSTGAHEVWVKLMSPHRGSTPLTEVQVFTNIIKYR

SEQ ID NO: 12070 - protein, 343 aa, unknown
  TnpB Polypeptide
VNRAYKFRLYPNKEQKELLDKTFGCCRFVYNKMLEERKTIYQELKENKEELYNYKYKTEKEFKEESPFLKEVDAKALQSEWRHLNSAYENFFKNIKERRQKKTIRYVGYPKFKSKKNRQSYTTYNINNNCKIDFKKKILKLPKIRTWIKYKDDRVFNEKIRHITVSKSRSGKYFASILIEIDNTISPKQILEENKIIGFDMSASKFLITKEFELSSPRFYRKKESKLKRYHREVSKKKKGSKNRNRTRIELAKEYKKIANRKRDWIHKITHLLSKHFECVVLENLNIEGMKRFNSSVSKSITLDFSWYQFVSILRYKMESKGKHLILIGRYFLSSVLNVGLKT

SEQ ID NO: 12071 - protein, 419 aa, Rhodobacteraceae sp.
MTAHRTIVYRLLPETRANARLLMGQAGACRYVWNALLAESRERYVEWQEAQQAGNTEISKPSVSFFSLGKRFTVLRREIDWLDQYSFKITRYALKYQADAWKAAFGNGRGFPRFHSRHGRDPSFTVPDRVMIRDGKLYLPCIGWLPIRRRGGNPHPDGVPVRAVVKRQAGKWYVSVCYRVELPELVDNGEVVGIDRNVGNIAYATGKGDAGLIASPDLSRDDSLVRKASRKLSRQKRGSRRRQRHVLYLRKLHRRRANRWSDWQHKASRGIATMASTVVVEDLNIRGMSKSARGTVDNPGRHVKAKSGLNREILNMGWHGLVQRMSYKCREVIMVNPAHTSQTCSECGEIDGRSRRGRGFKCVACGHADHADLNAARNILASGIGAAAHGGILDGLPVLSAIEAMPLKCEMDTKVALST

SEQ ID NO: 12072 - protein, 236 aa, Clostridiales sp.
VKMKQHRQIPANYKLKSVTVSQTPSGKYYASVLFEYENQVQEKEPQTFLGLDFSMHELYKGSNGSEPSYPRYYRQAEKRLKREQRRLSHMKKGSKNRDKQRIKVAKLHEEVANQRKDFLHKQSRQITNAYDCVCIEDLDMKAMAQALNFGKSVLDNGWGKFVSFLKYKLEEEGKRLVRVDKFFASSQTCSCCGYKNSDTKNLSVREWDCPECGTHHDRDVNAAINIRNEGMRLVSA

SEQ ID NO: 12073 - protein, 397 aa, unknown
  TnpB Polypeptide
MIKAYKFRIYPTKAQRIQIGKTLGCNRKIYNYFLDLKETAFLKHDMRLNCTYFSLLLPLLKKEWPYLKEVDSISLQCTVAFLKESYDRFFKIQKEGPKYTEKKEKYLARTGKQPTVYDLNGHPQFKRKHCGYQSYTTKFSNNNIAISYNTIKLPKLGEVRYRDNRHSIEGRILRATVSREPSGKYYVSICCTDVPEQRVVHLVWKSVGIDLGIKEFAILSNGEKIANPKFLKAQLKKLKRLQRSLSRKTMKSKRWLKNKHQIAVLHERIRHSRLDFQHKLSTWLVQNFDIISLETLKVKNMVKNHKLAQAIQDAAWSQFVMLLQYKAAWNYKWLVKIDTFFPSSQTCSKCGYINKETKDLSVREWVCPNCGSVHDRDINAAKNILKEGFRILKESHK

SEQ ID NO: 12074 - protein, 231 aa, Nocardiopsis sp.
VLSGKAAFAHRGEEWADRVEDNRAVAYRIHLDVERGRWYVSASWQIPATPAVPLRAALGQGVVGVDTNADHLAAWQLDTHGNPIGDPRRFDYELSGTASHRDAQVRHALSQLLRWAQACGVKAIAVEDLDFTDAKSREKHGRRKRFRQLISGMPTGKLRARLVSMADATGIAIIAVDAAYTSRWGAQHWQKPTTSKKRKTSRPRCGQHRDRAARSGVCDPASDGTAPHPPE

SEQ ID NO: 12075 - protein, 417 aa, Actinoplanes sp.
MPELYSWSPLCKVSNVRTAYRCRAYPTPDQVAVFNRTFGCVRLVWNKTLVERHAAFLQRGERTSYKQTDAALTAWKKTEDLAFLSEVSSVPLQQTLRHQHTAYANFFAKRARYPRFKSRTGKQSAHYTRSGFRIKDGLLHVAKTDGSLTVAWSWPDVDLTVLDPTMVVISREADGRWYVTFAVDVDQPDPLPATGHEIGIDLGLTDFAVTSDADRIANPRHLARKARNLARYQRRMARKQRGSANRRKARTKVAVAHRKVRNARRDFLHKTSTALIAQADTIVLEDLAVANMARNRSLAKAISDVGWAEFRDMLEYKAARAGRHLIVIDRWCPSSKTCSHCGHLLPRLDLGTRHWTCPACRTRHDRDINAAKNILAAGRAVAGDTSGDACGADVRQQGSSLLRSAVKQEPRAARRPA

SEQ ID NO: 12076 - protein, 452 aa, Serratia sp.
VKAYPNVPGLPGLHSPNEHVLRHRSRSWRPTGRQATFFLSSDCLRETWAFRPGRKGGSFQANFFLSFHYNSCNFVHMKRAYKYRFYPTQDQIEFLAHTFGCVRFVYNSVLRWRTDAYRERQEKIGYIQANARLTALKKEPELTWLNDVSCVPLQQTLRHQQTAFSNFFAGRAKYPTFKSKHHKQSAEFTASAFKYRNGTLYMAKSTTPLHVRWSRELPSTPSTVTISKDASGRYFVSCLCEFESKSLPVTAKMTGIDMGLKDLFVTDSGFKTGNPRHTAKYAKRLALLQRRLSKKKKGSRNRAKARLKVAKLHAKMADCRMDSLHKLSRKLINENQVVCVESLKVKNMLRNPKLSKAISDAGWGEFVRQLQYKAKGSGRSVVAIDQFFPSSKRCSCCGFTMEKMPLDVRHWHCPECGADHDRDINAARNIKAAGLAVLAHGEPVNPESQHAA

SEQ ID NO: 12077 - protein, 367 aa, Bacillus sp.
VLYLSTKKYFKAQHTKACYTDNHDAWLEAWRKFRYSKMTLSGRKDAAHGNFVFQYNPDNHLLHMKTPKGQVRLENVVFAYGQEIIDEAIQTQRACKDKKKHGKPITWSLEDHGVYYIVKCIVDVAPNPHTNYAKSSGIIGVNLNVDHYALSNINEKGQLIKSCTIPFDLKKKTTGQAVKIIEAAAIQVVDIACKEKKPIAIEKLAITPSKVINPYGNKKANRKISMFAYRKMTQAIKSRAQKMGVAVFEVNPAFTSQIGKMKYMKRFGISIHEAASFVIARRAMGFKEKLPPVLRALLPEKMIGAHHWSQWKYVSKHLREIRTHAFYLSELFDVDRFDQTGECFVAGALTGMEQNSLSKLKSRKPIS

SEQ ID NO: 12078 - protein, 335 aa, unknown
  TnpB Polypeptide
MWIRKGFSFKLTPDGAQARKMSRFAGCTRFVYNKGIAWNEEQRNADSNFRISYKALSAQLPIWKENHPWLADTYSQCLQQAMKDLSQGFQRFFAGDAGFPKFHKKFASTDSFRFPQNFKINEGNKQILLPGIGWVKYRRSRFIEGKPKNVTVSRRADGWYVSIQTGFECVPPENQGDAVGLDMGVKRFCTLSDGTFEAPCNALKKNLKKLSFEQKRLARMTKFGKNWHKQKERIAKLHQHIANIRKDFLEKLSLKFCKNHAVIVREDLKIKNMTASAKGTAEEPGTHVKQKSGLNRAILDQGWGLFFAKLEWKTQLYPESRRMNPRYLKQSPPTV

SEQ ID NO: 12079 - protein, 200 aa, Microcystis sp.
  misc_feature (165)..(198): Xaa can be any naturally occurring amino acid
MEKAYSFRFYPTAEQEWLLRRTLGCVRLVYNKALHERTQAWYEKQERVGYAETSSMLTEWKKQEELNFLNEVSCVPLQQGLRHLQTAFTNFFAGRTKYPNFKKKHQGGSAEFTKSAFKFKDRQIYLAKCTEPLPIRWSRQIPDGCEPSTVTVRLHPSGRWHISIXXXXXXXXXXXXXXXXXXXXXXXXXXXXXXXXXXCR

SEQ ID NO: 12080 - protein, 397 aa, Lactobacillus sp.
MKSEKTTLIWVVMMLMIRTQKVRLYPNRHIKKVLDSLCDYRRYCWNEGLATWNDMYDLYTLDSNSPRPSTYSVRNELVANKADWQYELSARTLQLAITDLGNAWKNFFDKAQPDWGKPTFKSKKAARQGFKTDRAKIVAGKLRLDKPRGVKDWYDIRISKHADLSGVLKVISIYRENGKYWASLPFEVELDVKPKAGDNSAVDVNVGHLNYTAGVINTLPKRLRKLYQRIKFYQRQLAHKRVVNGNKATKGSRYIAMRAKLQRNYRKVANIQHDIMQKFTTDLVNDYDKIVIEDLSVKVMQMSHVASKGLQRSMFGYFRQTLTYKCDWYGKALIFADSQYPSTQRCSKCGHIKVGDDKITLQGNAVHQTKHSEYVCYSCGTKLNRDENAVANLLALI

SEQ ID NO: 12081 - protein, 337 aa, unknown
  TnpB Polypeptide
MGKEEARATIKGSLELGDLERAKLLYTMRLFKEAVEKAHHLIKEGMPEGEIYKRLYYTIPNSHYCQAAYRKARLYEPQCHLSLKKPLLFSHGKGAGREDGNRNIKIESERIRIKIPHANGKHEWIEGKLRTQKRYKPILEELKNYSYSAGVAMNKGGYSVYISIPIELYAKISGKKHIRSDAKHIAAFDLNSDRLNMALLRANGLLIETKNRHFPEVNSQGYGEGKAKDKRLKALSELIDYATVHGAKTFVFEKLKMNGRKNISTKTGNRKLTRFAAHELLSHAEIMVKKRGGEFVQINPAYSSQSARIINQDLGVDVHTASAVVLGLRYLHTHKYT

SEQ ID NO: 12082 - protein, 384 aa, Thermoactinospora sp.
VCSIVRLVVQVKLLPTPEQAAALEGTVRAANAAADLVSRIAFRQRCFRAYDLRRHTYQQIKADFGLAAQAAQHVIKKVCDAYRTLHASLAAGRLGKPGSARRVKAAGKPISFRPLAAQPYDDRCLSWDHDRRTVSIWTVAGRMKDLAFTGSLEQLTLLAAHRRGESDLVCRDGMWFLHATVEVPDVPTAAPEGFLGVDLGIANIATTSDGVRHSGKALAAVRHRNRELRRRLQAKNTKSAKRLLKRRRRKEARFAANLNHVIAKQLVTEAERTGRGIALEDLQGIRERVRLRMPQRVRLHSWSFHQLGAFIGYKAARAGVAVIYVDPAHTSQQCSRCGQVDKHNRPDQETFACTSCGFAEHADVNAARNIAARGEAGWAVSHAA

SEQ ID NO: 12083 - protein, 246 aa, unknown
  TnpB Polypeptide
MHRCVVRFDKRLFSSSETKRGNPVVSLRTNQERIAIPINRDGAYKRFLEHVEDGWTATSIIMKQNLRFLVVLKKESPEPSIRPNWMGVEINSSKIAVSIIGKDKVLRQTYFGKDVSTRQFRFEERRAKLQAYQDNGSSKAGLKLKRLSGKQRNYVRTRMWQIANEIVKPAKQFSADIAIERLRHLRKRKGEWRRKSRRKVNRIPYGFFRHALKHVAEREGVIVREIKPYHTSQTFHGAGTSAERTG

SEQ ID NO: 12084 - protein, 209 aa, unknown
  TnpB Polypeptide
MYDKIPVINHRTIVGIDLGIKKLLTLSEGTTYDNNKYIDKYEKRIKRKQRELSRKEKGSKNYYKCKKKLAILHSKLANARKFYTHKITKNITDEYDIITCEKLKTKEMIIKGKDNKLSSKINDATFSEIVRQLQYKTKYKGKYFYQINTYYPSSQICSRCDNQDKRYKDLTRREYKCTKCGVKLDRDLNASINIMFEGLKLHMKNYAKI

SEQ ID NO: 12085 - protein, 369 aa, unknown
  TnpB Polypeptide
LKRNGRVHKPHPEVRRVSIRFAKDSWNYKKAISTAAPVRLGLSLPGGRREIWIKPHRWFWLYWWRALRKETELASTLILKRRRNKWYAVFVFDLAPKKETPAEVVAFDVNENTVTVARLSLLATVDRVAGWNRQCINPAVYLIRTDFGRLAKRYEAIRNAKLEELKRKYPFAGRGEDGRRQNMTDTREFRKFVRRLRERRRKEARVRQVARQMTKSPAVIITEELGKNPQEEMIGVEKKVGKRELRHRIKQTPFRKLIRAVEDKARETGSVVVYISPYRNSKACSIHFTLLSDNGSWHALYCPHGHAVDRDAAAVLNMLWKTTPTGWVKAVWWDLKDVKRRLERGRGLVPKEAVRRRNPLVTWPVVHAV

SEQ ID NO: 12086 - protein, 399 aa, Goodfellowiella sp.
MVINVKHVVQVRLLPTPEQASALLATLHACNTAASWLSEQMHTNRVFGKFDVQKRFYTALRERFGLAAQPAIRVIGKTVDAYTTLRANLKAGNYGPPGSDRRRTVEDTPIAFRPHAGQPFDARCLSWRLGDAGLGGTVSIWTTAGRLKDVRIVGNPGHLALLRSRSSIGETDLLHRDGVWLLHAVIDTPETPRRAPVNGFLGVDLGIVNIATTSDGDRFSGSRLNRYRKRQQRIRKRLQAKKTTSARRLLRKRRRTEARFATDVNHQISKTIVAEAERTGRGIAVGELTGIRDRVRLRKPQRATLHSWAFAQLGQFLAYKAQRAGVVLVQVDPAYTSQRCHRCGWTDRKNRRSQASFICGRCGFVGHADHNAALNIDQRGVERWGEVMRPDAAPILAAS

SEQ ID NO: 12087 - protein, 351 aa, Escherichia sp.
  misc_feature (298)..(330): Xaa can be any naturally occurring amino acid
VKRLQAFKFQLRPGGQQECEMRRFAGACRFVFNRALALQNENHEAGNKYIPYGKMASWLVEWKNATETQWLKDAPSQPLQQSLKDLERAYKNFFQKRAAFPRFKKRGQNDAFRYPQGVKLDQENSRIFLPKLGWMRYRNSRQVTGVVKNVTVSQSCGKWYISIQTENEVSTPVHPSASMVGLDAGVAKLATLSDGTVFGPVNSFQKNQKTLARLQRQLSRKVKFSNNWQKQKCKIQRLHSRIANIRRDYLHKVTTTVSKNHAMIVIEDLKVSNMSKSAAGTVSQPGRNVRAKSGLNRXXXXXXXXXXXXXXXXXXXXXXXXXXXXXXXXXFIRCAVKPRPSGRGYKARFST

SEQ ID NO: 12088 - protein, 368 aa, unknown
  TnpB Polypeptide
VRRMNRAVKIRIYPNKEQRVQIEKTIGCSRFIYNQMLADKISYYQKEKKMLRNTPAGYKKEYPWLKEVDSLALANAQLHLESAFRKFFREPSCGFPRYKSKKRAGNSYTTNAVNGNIFLQNTHLKLPKMSAIKIKLHRQIPSDWKLKSVTVSREPSGKYFASLLFCCESQTVEKSPAEKFLGIDFAMRGMCVFSTGERAGYPMFYRKAEKKLAREQRKLSHCEKGSRNYQKQKKRVALCHEKIKNQRKDFQHKLSRGLAERYDAVCVEDLNLKGMSGGLHLGKGVQDNGYGQFLSMLGYKLEERGKNLIKVDRYFASSKICSVCGHKKKELALSDREYVCECGNRMDRDVNAAVNIREEGKRLYKECA

SEQ ID NO: 12089 - protein, 334 aa, unknown
  TnpB Polypeptide
LQEEVTRKTIALAIKTAKLDGKVLQAALRKLLQLYRKARDTPHCGKQTLKQLMRHGTGVSNIEITDANIKAFESTAKKYGIDFALKKADDRYLVFFKGRKDGYVIRSGAVSMKAGRYYVSALVDIPAPEADGNLTDGIGIDLGLKDFAVVSNGTVYRNINKTARIRKLEKQLRRAQRKLSRKYENLKKGKSTQRANICKQKLKVQKLHHRIENIRTDHINKVISEIVKTKPSHITIEDLNISGMMKDRHLSKAVASQKFYEFRTKLKTKCAENGIELRVVDRWYPSSRICHCCSCIKKDLKLSDRIYRCTCGYIEDRDLNAALNLRDAETYEVA

SEQ ID NO: 12090 - protein, 425 aa, Mycobacterium sp.
MLAIEMRRYTTFRFCLDPTNEQRQALARHAGGASRFAFNECLRMVKSALSQSKSDSDSHVPWTGFDLISAFNTWKKSEEAGRVVAVDAKGVAELVAGLHWRAEVCQQVFEEAAVDCSRALAAWSDSRQRKRKGKAMGFPRFKKKTRVASFRLRNKHSKGRPPAVRVGDNNRPRSITMPGIGQIGVHDDTRRLRRMLANGRARILFATVSHRAGRWWVSLNIEAAELHPALRHKVHDPTHAGGWIGIDRGGLAAFVVAANAEGREVARITDAPKALARGLERQRRLARSLSRKKKGSNNRRDGVAKLARHHHRVANIRRHFLHHVSNTLVKNHDRLVIEDLYVAGMLTNRRLARAICDASWAKFARQLSYKQQWRGGELVLADRWYPSSRLCLTAGSPEATSPWLIGSSRVNAGMWLIATPTPRST

SEQ ID NO: 12091 - protein, 337 aa, Lactobacillus sp.
MKPSRLSAKYKITCRSAINATLFFLDTFSIAQKKARSLGAWDVFHRKSHDGSYQLPTRYTKTEAGLMSGSNRFLDTKHVTISGLGKIRVSGSQKRLFSHADSIRVGTITVRRDATGRYYLSMQLGSDVPFVDLGQNHESAIGIDLNTDNFLTDSDANVIANPRYYRAIKGKLAKQQRKLARRALRAKKEHRALRDSKNYQKQRVLVANLQRDVANRRDAFLHLLSTTLIKNHDLVVAEELRSKNMLRNHALAMSIADVGWRRFLGMLAYKADLYAHKFVTVDPRNTTQTCSDCGFVMSGDQKLTLADREWTCPQCGTIHIRDHNAARNILAKGLALN

SEQ ID NO: 12092 - protein, 273 aa, Nitrosotalea sp.
MYKTTYQSPHELLYMMETFRQMVNDCIRIGIANNCSTMKRLSMLSYKELSNYKILSYYKLTAISQASGRLALMKKDIKKGRTSKSPYVSKPYLVSCYGFKIIGALLSIPMYHGDKFLVKLNNHTISQLENVEPRSFTITPNSISISVRKTIEQIIPQNVIGIDRNLRNITTFDGEKSIMYKTNKLLSIKENTSHVISSFKRLDVRVKKSYQQRLGNRKSRRIQQHLHKISKDIVQRAVESKSIIVMEDLKGIRKLYRKGNGQGNKYRRKLNSW

SEQ ID NO: 12093 - protein, 398 aa, Nitrosotalea sp.
MVKPSNADIFMMAIKSIKQNYVFPNDIVLLMETFKEMVNFCIKTGLQENISTLNKFSSLHYKDLFQFDIQSKYKLTAMSQAMGRLAQRKRDMKKGRFPKSPYVSKPYLVSCYGFKINGMLLSFPVSNGDKFLVKLNEYTISKLDGTEPRSFTITPSSISISVRKEIKQIIPENVIGIDRNLRNVTISTNDGTVMYKTNKLLSIKENTSHVLSSFKRFDVRLKRHFQQRLGNRRSRRIQQHLHKITKDIIQRAVASRSMIILEDLKGIRKLYHKGNGQGTKYRRKLNSWSFYELQRQIQYKAEWKGIPVGFIDPKRTSQLCPVCGERLQEDRFHRRKLLCNNCKRSMNRDVIASMNISYKGWSRFCHPRGLSDEVVKGNLDNFQPIILGVDGSKLEIQR

SEQ ID NO: 12094 - protein, 388 aa, Nitrosotalea sp.
MTIKSVKQIHTFPDEIQSMMETFKDMVNYCIRIGISENISNLNKFSSLHYKDLSQFNIQSYYKLTAMSQAMGRLAQRKKDMKKGRIVKSPYISKPYLVSCYGFKITGMLLSFPMYHGDKFLVRLDSHTMSQLENAEPRSFVITPDSVSISVRKQVEQIIPENVIGIDRNLRNITISTPNQTVMYKTSKLLSIKENMSHVISSFKRFDVRKKKHFQKRLGNRRARRIQQHLHKISKDIISRAVQSKSMIVLEDIKCIRKLYRKGNGQGTKYRRRLNSWSFYELQRQIQYKAEWEGIPVGFIDPKRTSQLCPICGERLQEDRFHRRKLLCNNCKRSIDRDVVASMNISYKGWSRFCHPRGLLVEAVNGNLENFRPVILQVDGSKLVETRK

SEQ ID NO: 12095 - protein, 270 aa, Nitrosotalea sp.
LVIRIFYEMFMPKSQLTSVEPRSFVITPNSVSISVRKEITQIIPENVIGIDRNLRNITTFDGEKSIMYKTNKLLSIKENTSHVMSSFKRFDVRVKKHFQQRLGNRRSRRIQQYLHKISKDIVSRAVDTKSMIVLEDLKGIRKLYRKGNGQGNKYRRKLNSWSFYELQRQIQYKAEWEGIPVGFIDPKRTSQLCPTCGDRLQEDRFQLRKLLCINCKRTMDRDVIASMNISYKGWSRFCHPRGLSEEAVNGNVGTPLILRVDGSKLVVGKK

SEQ ID NO: 12096 - protein, 401 aa, Nitrosotalea sp.
MVNNVKTQLCWTLLATKCIKQSYQSPPELLSMMETFRQMVNDCIRIGIANNCSTMKRLSILSYKELSNYKILSYYKLTAISQASGRLALMKKDIKKGRTPKSPYVSKPYLVSCYGFKIIGMLLSIPISNHDKFLVRLNDYTISQLENVEPRPFTITPNSISISVRKEMEQIIPENVIGIDRNLRNITAFDGKQSIMYKTNKLLSIKENTSHVIASFRRLDIRKKKSFQQRLGNRRSRRIQQHLHKISKDIVQRAVESKSIIVMEDLKGIRKLYKTGNGQGNKYRRRLNSWSFYELQRQITYKAEWEGIQVQFVDPKRTSKLCPICGDRLQEDKFQLRKLLCINCKKSIDRDVVASMNIAYKGWSRFCHPRGLLVEAVNGNLENFQPVILRVDGSKLIVGKK

SEQ ID NO: 12097 - protein, 386 aa, Nitrosotalea sp.
VKVRKTIKQSFNPNTEIHSMMETFKDMVNHCIRIGLENNASTLKNSLDAFIQPVKGIQHTVILQTYCNITGNRRLAQMKMSIKRGIKTKSPFITKPYLVSCYGFKINYMLLSIPTGNRQVILVKLNDHTISKLAEDGIKPKSFTITPESLCISVEKDVEEIKPESVIGIDRNLRNITISTQSGTVMYKTNKLLSIKENTSHVISSFKRFDVRVKRHFQQRLGNRRSRRIQQYLHKISKDIVQRAVNTKSILILEDLKGIRKLYRKGNGQGKKYRRKLNSWSFYELQRQITYKAEWEGIPVGFVDPKRTSQLCPICGKRLQEDRLQLRKLLCINCKRTMDRDVIASMNIAYKGWSRFCHPRGLSEEAVNGNLENFRPVISCKLMEAS

SEQ ID NO: 12098 - protein, 388 aa, unknown
  TnpB Polypeptide
MQLKKSAELSSLCHKGKNLYNVANYMVRQRFFRDRKWYRYYDLNRLLKQDPAYRALPIQTSQQILRLVDRNWKSFFRGLRDWQDHPEKYRCRPCIPRYKPKDGESIVLFTNQQCRIKRGCLHFPKKVLPPLKIRMTGAFQHVRILPRGDHYIVEVVYDCTPIYLDLPKNRILTIDLGLNNLVTAVNNAGLPPFVIKGGVVKSINQFYNKERARLSALKDKQGLKGQTKRLKRLTLKRNNKIRDYFHKTSRTIIGYCVDNELGTIIVGYNAGWKQKIHIGRRNNQNFVSVPFHQLIQQIQYKARLVGIEVILEEEGHTSKCSFLDQEPIRHHDTYLGRRISRGLFQASDGTLINADVNGGYNIGQKAVPNAFRADGIEGVGLHPYSMII

SEQ ID NO: 12099 - protein, 380 aa, unknown
  TnpB Polypeptide
MLNFKYRILDKETKQLDELIVTSNCIWNYAIMLQRKYYEWTGKYISCTKMCSFIAKKRKRNPYWQKLNSQSVQGIIQKLDESYQRFFKGVQKRPPKFKNRFDDTSIVFKQCGYSIENDVFVFNKVGSYKFIKHRAYPKDKVRTVRLKRYNNHFYVVITCDCDPKPLARNCNGEAGVDFGLKTFITLDSGEKVESPRFLFKNAKKLRKLSKVVSRRKKGSNRRKKAVQRLSNFHAHVAWQRDDWQWKLAHSLCKQYAIIKIEDLCLLGWVRLWGRKASDLALGGFINKLEFIASKYGTLIIKVDRWYASSHICSACGHKLDRKLGLQEREWQCPVCGVVHDRDVNAAVNIKQWDATVRGDHVRPSRKGGRVDEARTRSPVL

SEQ ID NO: 12100 - protein, 578 aa, unknown
  TnpB Polypeptide
VGRSKGIIVSVKIPIRWDIMTNKQKTRLSQITGRDTRVIKAYLGVIELHEKDLFVGIRKKRINASELDKLTLTATRGKSSRTSVPHDFKRRFQNISVNEFQECRDTAIAMWQSHLECGGAKPLGARGYSSRKIPRFAFGKCFDFLYTPDKEIKHWLSLRYSVDSVKRNRRIHERMLIPLSLSSYHLKRLKDGDLKTVRLFKDRQRKWWTVFTVTLDVDTTDSSSLQPAVMGIDLGIEKAACTVLLTKQGYKHVKYWKQRDKLRQMKHYDDVVASLQRKKEYHLFQNLDSTQVTRQLREISEKRARLSREYDNKLVKDIVEHILELTEKYNLHVVIGQVKGIRSTARKGNYRGRKFRGMVHRWSFARIRDNLQHKLATLGFDTKKFFAVSEVWTSIKCHKCENKGYRPKQSLFVCGTCGFRANADLNGAINIGRRVIKLISSLSDEKTGLGVWLLPSEKTIPKTSRSKRSKRKSSLSQRKPALVGESVAEYCDQTSLEIPVSTKDPAVVSTVEEPSVSKMTGGLGVSQRTETRYRGRNDVPVNLDKAHVTSNDSPHLRSGDSCCGKGGTQKFLSEFTYS

SEQ ID NO: 12101 - protein, 263 aa, Cyanobacteria sp.
MVAKSLTEVRSVIGCDLGITKLLHLSDGYQFPNPKFGNNKKVRRLLKTRQRRVNRKVKGSNNRRNASRKVGRLHKKIADKRQAHQWWVAKTVTNRRVDAIALEDLNVSGMLRRCRAKKDEESGRFLPNGQSRKVGLNRAISDAAWNELILKIEYLAAKQGKIAIKINPKHSSTECRNCGHVDRSNRDGEKFICSACGFFAHADISAAKNIRDRALEMVRRDSTEPVAKAAKRPKYCKEKSLRPSGKGGEPGNLGNKDIKTAMS

SEQ ID NO: 12102 - protein, 538 aa, unknown
  TnpB Polypeptide
LEGALANQTYKAFVARPSHILDLNGELLDSASIMSQLTSEVQGISSYATYTVRNDTKLTEELSRVSATAPAEAGRQAGVVMPDFLVPDKKDEDGNPLADKNGEPVKLKTGKSRKERLFRHRVVTEHRAWQERVAAASGESSKYVSQGWKRTVDASAPSYGEDVINLGAVDRQYALIENDPVADGEIVLRMIIQGVWYRLIFSFDNKRFTEGKVTLPLVKVENNQPIFIFTVVTDNPVVLFSGDYVVGVDVGINDYATVVVRNSSTGRIVHQTTLSQRVHSLWNSVRASERQVKQLNKKADKLIYQRQAHMCAIDEAQLHRKAASRKKRELAILAAQEIAYLSHAYGNAVVAVEDLGWVSNTMQNGRWNRGTFAQWLTHYVAQNGGWVVAVNAANTSQVCHICNKQVMHPEHKVSICPKHGAMDRDVNAAANIAARAVPRVEKARKTRAKNRKLQPSAPLKTPITRGSLKYPGSDRTKSVPTPKRAKRVVREVTLPLSPARVNPTSVLADCGTYGAVETSQAAINQGNATCECRLYSLN

SEQ ID NO: 12103 - protein, 335 aa, unknown
  TnpB Polypeptide
MGLKRRGWRTLPFTRCNRRSRTWSGPGPTARASRRKASPTASAIPTRSRSSSIRAIAASSCPSSAGCATATAARCWAVKNVTVSRSGGKGLVSIQTERAVSPPTPNGGAVGIDLGVARFATLSDGTFYAPLNSFKRHETALRKAQQAMGRKTQSSNNWKQAQARIQRIHSRIGNARRDYLHKTTTPISQNHAMAGIEDLQVRNRSRSAAGTTGQPGKNVRAQSDLNKAILDPGWFEFRRQLDYKLAWNGGWLVAVPPQYTSRTCPCCGPVSAENRRTQAQFLCVECGYEENADVVGAINVLRAGHARCACEVSGAVRPPAAGTRRSDSGAAQCRA

SEQ ID NO: 12104 - protein, 351 aa, Synechococcus sp.
LQVRYRYRLYPTPGQKQALARQFGCCHVVWNDVLAPSQSIYQEGRKYPGGGELQRRCITQAKRTEERSWLSEVSASVLQQSVRDLDKAFRFWWESKGKVRAPRFKKRSTAQSARICGRDFRTTDRGVHFPKVGELKLHWSRPLPSPPSSCTIVKDCPGRYFASFVVDLEDRDLSPVFGQNIGIDLGLASLAVTSDGEKIAPPKFLRAALKPLRRLQRNLKHKQRGSNRLALARLRVAKLHAKVADRRLDFLHKPSTRLIHENQAVCIEEKSTALACPQPTPFYPRPELAERGAFSKFPGKSIGLIPVAGASAWLVPGLPGHHGGGLCGPVEPHHAHRTGIPRFAGGRRPGL

SEQ ID NO: 12105 - protein, 623 aa, unknown
  TnpB Polypeptide
MDKEKEDLTETVDRTYIAYSLPLPPPPETLDSCRVLGNLAELAHRLLISALQTRELRDMPFKTKKYTLRDVLVGSMKNEDIYELVRRLCYHPELATSLDMSKLPEGIVLCRPIAKLIRVLRDRSNSLNPHLQARQWTVALEDALREMATYWTSVQVAAQNAVSDFIYRLKKEYKGVKPIDEKYHHQGKNYTKHWSYNRSLKKSFKRVPYTEEQKHYANWLVCGCYPQFFRLLDGMAPDPTCEGQLAMGIDSKIAKKSSFKTRPQDMGRVANDVRRLIHETRSTTVRLPRCGGKGNYFGCDSSSWTQKDGRDSVNLMNYAGTPKKVRKAQAEENASKSKKKPSDRHPRLHIPLKGKPKLEGTLRVYLHEDIGYLSIHYHRSIPCQDKKLRKDGITLGFDAGLSEGGYDSKGRCIAKNLGKMSAAISDRRMLKDQRRQPLIAKVKLLKASNDAEDRAKARRIEHNNLRNKKETKKRAAEREQLVNYVRRELKKKVFVKPKQPAKTLVIENLGPMGGQKFGKRMNRHVSAWNRGDIITAFEELCPLYGVELVKVNPAYTSRKCSRCGHIEKANRQGDKFKCRKCGLEEHADVNAAKNILASYLSSTSIPLSASPEDVLKTEKANQI

SEQ ID NO: 12106 - protein, 447 aa, unknown
  TnpB Polypeptide
MRRTNVVKLVVDKETHKKLKELGIITAKCWNEVNWLRMQQFKKGERVNFVETEKEVYEKYKHVLKVNAQQVARKNAETWKSFFSLIKEKKEGRLPKWFKPRPPGYWRDESGKYRLIIVIRNDRYEVDENKRTIYLKDFKLALDFKGKLKWRGKQGRLEIIYNEARRVWYAHIPVEVENVAKAKGNLRAGVDLGIVNLATVYVEDGSWYVFKGGGVLSRYEHYSKRISAVQKVLARHRQRRSRRLKLLYDKRRRFLKHALNSMVRKIMEELKDKGVGEIIVGYPKEISRNHGNKLMVNFWNYGYVIKRFKEIGEELGIRVIDVDEQNTSKTCSLCGEAHENERVKRGLFKCPCIGKVINADLNGAINILHIPESLGSRSRGQLLGRDRGNGLKTQPVVYRWTNGAGWVRTSPTSYEVMKMKVVNHKPMNRLGNPRTLGRGGGQFLCQF

SEQ ID NO: 12107 - protein, 366 aa, unknown
  TnpB Polypeptide
MYKSIKYRLYPTKEQEEMFAKTFGCCRKIWNLMLNDKIEHYKLTKEMLQTTPAQYKKEYTYLKEVDSLSLVNVQMHLQTAYKNFFRDKKIGFPKFKSEKHSRKTYTTNNQNGTISIIGNGIKLPKIGIVKAKIHRNPNTDWKIKSATISQDNDGKYYVSVLFEFTKVITKVLVSDSVIGLDYKSDGLYADSNGNVCGSPKYYRKSQKKLARLQRQLSRKEIGSNNRNKARLKVAKLQKHTANQRLDFLHKKSTEIANQYDIVCVETLNMKNMSNKGFGNGKSTLDNGYGLFLTMLEYKLADRGKYFVKVDKWYPSSQLCYSCGKQHKEMKNLLTRQFVCDCGYKNDRDTNAALNIKKEGLRLLTVA

SEQ ID NO: 12108 - protein, 449 aa, Actinomadura sp.
MARFRLYPSVEQEERMLLHCAHARYVWNLAVEQHSYWHKGRRSAPGFAEQCRQLTQARRENEWLREGSVTVQQQALKDFARAKQARFTSGFGEPTWRKKFVHEGFRVIGTGRVPAFGSDGKPLLNAKGKQVMSREVGVRKLNRRWAQVQVPGCGWVRFRLTRRELPVAKTFRVTLRHGQWHVAFAVIPEPIEPPHRGKIIGVDRGMKITAALSDGRSLNCPQLSAKERAQLRRHQRRAVMAKRGSQRKAAEYARAAQLKVREVNRRKDWCEKTSTMLAQTFDVICFEKLHITTMTTSARGTIDQPGRNVRQKAGLNRVILAQGWGLLRRRTENKAPGRVVDVPAPYTSLRCSACGWIEKNSRKSQAEFVCVTCGFNCNADVNAAINIAATRVAAGQVARPAPSRGRAGGVTPLPRSSAREPQPDRVGIPRSRAREDVKAGRIRTGLRQP

SEQ ID NO: 12109 - protein, 284 aa, unknown
  TnpB Polypeptide
  misc_feature (100)..(100): Xaa can be any naturally occurring amino acid
  misc_feature (224)..(251): Xaa can be any naturally occurring amino acid
MVPSISMLKAYKFRIYPTKSQATKMEQTLDLCRWTYNKTLEIRKNAWEKEGKSLSKYETNNMLPEWKEDKPELKEVFSQVLQNVHERVDLALKAFFRRVXPRFRGKGRYDSFTYPQKGFKVDSGKLYLSKIGNVKIKLHRPIEGTIKRLTIRRAATGKWFACFSVEIEDQLKPPWKDGSLVGVDVGLESFATLSNGEKIANPRFFREEEKELARVQRKLSKAPXXXXXXXXXXXXXXXXXXXXXXXXXXXXYLRRGLEYASNFNLVQGCKCRFDGCSSRSKKYV

SEQ ID NO: 12110 - protein, 375 aa, Actinomadura sp.
VKLVVQVKLLPTPEQAAALTDTLHHVNTAANHVSTVAFARFGLRGRELPLRTLCYGDLKAGGLGAQAAQHVIKRVVDAYTTLRGNIRNGRLGGPASKRRRKAEAKPIAFRPDAAHTYDDRCLSWQLDAGTVSIWTVAGRCRNLRFACSPDQAKMLTAHRKGESDLVHRDGKWFLLATCEVPEPPVYEPVDWVGVDRGIVNLATTSDGDNHQGRRLGRYRRWQARKRAELQAKRTRSAARLLKKRARREARHARHVNHTIAKQVVAVAARTGRGIALEDLSGIRGRVTVPRDQRARLSSWPEVDPAYTSQRCPRCGHTARDNRPTRDHFTCRRCGLAGPADVVAGVNVRDRARSAWVFVNMPQPAPAQRGAGGCDP

SEQ ID NO: 12111 - protein, 363 aa, unknown
  TnpB Polypeptide
MFAVKRALKLNKKEATLMAKNAGFRRVVFNLGLSLRTQMYGEGQFTDSKVINEIKKVLTNHVKKQPESAWMNQLSSRVYQNALIDLKKAFARYREGKAGHPKFASRRDGQSFAVDSSNGKVLLKAGNTIKIPTLGTFRLEEPLECGFVSQTFTISKEGNRWFVSFCVDAQRRPQKQPESSVGIDVGVKSFATLSKGQVFNAPKPLKQAKTKLARLQCKASRQVKGSQNQRKTYNSISRLHARIACIRKDFLHKLTTSTAKTFKLIKIEDLNVSGMLANHKLAGAIADLGFYEFKRQLEYKCQMYGASLVLVERWFPSSKICSNCGHKQEMPLSIRTYDCPGCGVSIDRDLNASLNILNWEPSA

SEQ ID NO: 12112 - protein, 392 aa, Aneurinibacillus sp.
MIRTAKVAFTASRSTIDALFALNRFSAEVWNMCLAEAKVYHQQTGQWIGKTELQKRLKRRFPMHSQSIQAVCHKYLWARDSAHQARKEGYTNVRYPYKQKKYFNTKWAADGFTIHPNGRISLSRGIWEGKRQAPLVVRVTQLPAGTVKEIELVYDRGLHLCLTYDDGKKAPNPPGSHTCAIDPGEIHTLAAVATTGDSLIVTGRKIRSIHRLRNKKLAELQRKMSKCQKYSRQWKRYNRAKQYLLSKSKRQLQDALHKTTKQFVEWVVAQQVNEVYLGDVEGVQRKKKKKRSRCHNQRMSQWQFGKVKKYLTYKLKAEGIMLHKREERYTSQTCPVCGAKKNVRGRMYRCSCGYTQHRDIHGAANLLSKVLYENQIQSLPFEIQKPTYLRIA

SEQ ID NO: 12113 - protein, 318 aa, Aneurinibacillus sp.
MIRTAKVAFTASRSTIDALFALNRFSAEVWNTCLAEAKVYHQQTGQWIGKTELQKRLKRRFPMHSQSIQAVCHKYLWARDSAHQARKEGHTNVRYPYKQNKYFNTKWAADGFTIHPNGRISLSRGIWEGKRQAPNPPGSHICAIDPGEIHTLAAVATTGDSLIVTGRKIRSIHRLRNKKLAELQRKMSKCQKYSRQWKRYNRAKQYLLSKSKRKKKRSRCHNQRMSQWQFGKVKKYLTYKLKAEGIMLHKRKERYTSQTCPVCGAKKNVRGRMYRCSCGYTQHRDIHGAANLLSKVLYENRIQSLPFEIQKPTYLRIA

SEQ ID NO: 12114 - protein, 351 aa, Aneurinibacillus sp.
MPTITLRLELHKPTQVKQEMYQRMTELNTEFANWLLHHPELNKATSKIFKDFSSQKFPSAIVNQTIREVKSQKKNQKAKTFRKLWCCFNNQNLKVEKKGDFYTVAFPTLEKIIGVPVVARPYQQAWLNRIINGTAKQGAAKLYKKKKKWYLAIPITFEVEQRKETKVMGVDLGLRYIAVASVGTKSLFFKGNQVAFIRRCFAARRRKLGKLKKLSAIKKSKDKESRWMKDQNHKISRQIVDFALTNGVGIIRMEDLTDIRNRAKSKKEAGRNLHSWAFYQLQKMIKYKAEMVGIRFELVKPDYTSQTCKCGYRDRANRNGIHFKCKKCGYTIHADLNGAINIAKAISGLVA

SEQ ID NO: 12115 - protein, 239 aa, Aneurinibacillus sp.
LQKSVENLANAFDRYYKKQGNYPRFKSKKNPVQSYTTKYTNGNISIEGNYIKLPKLGLVRFAKSREVEGRILSATIRRNPSGKYFVSIATETEVSELPKTNSAIGIDVGLKDFAILSDGTTYLNPKFFRRLEEKLAKAQRIMSRRKEGGSNWYKAKIKVARIHEKIKNARNDYLYKISTEIVKNHDIIGMEDLSVSNMLKNHNLAKAISEVSWSQFNIYDILMRQKTSDVIAKCKKWVG

SEQ ID NO: 12116 - protein, 364 aa, Aneurinibacillus sp.
MLRTYKFRIEPTKEQRERINETLMYCRWLYNALLEQRITAYKKCGVSLTFYSQKKELPALKKVCEEYKDVHSQVLQNVVERLDKAYQAFFRRLKRGEKAGVPRFKGMNRYHSFTYPQSGFSLEGKYITLSKVGTVRIKLHRQVQGIIKTCTVIAKNGRYYVCLSCEMETKTQSTGKKIGVDLGLQHLAITSDGDFYHVPKYLRKSERQLKKLQRIVSRRKKGSNRRKKAVALLAKKHEYIANQRRNNAHQISRQLVNRYDLIAFEDLKITNMVKNHHLAKSIADAGWNQLVQFTTYKAESAGKRVVLVDPRNTSQQCSSCDEIVKKTLAVRTHHCPSCGFECDRDVNAAKNILKRAVQQLQNVS

SEQ ID NO: 12117 - protein, 329 aa, Aneurinibacillus sp.
MIRTVKVAFTASRFTIDALFALHRFSAEVWNTCLTEAKVYYQQTGQWIGKTELQKRLKRRFLMHSQSIQAVCHKYLWARDSAHQARKEGHTNVRYPYKQNKYFNTKWAADGFTIHPNGRISLRRGIWEGKRQAPNPPGSHTCAIDPGEIHTLAAVATTGDSLIVTGRKIRSIHRLRNKKLAELQRKMSKCQKYSHQWKRYNRAKQYLLSKSKRKKQRSRCHNQRMSQWQFGKVKKYPTYKLKAEGIMLHKREERYTSQTCPVCGAKKNVRGAAIPNIGTFTVRRIYCPKCCMKTGFSPCRLKFRNPRIYGSPKREVVDGLFRLFWDNIF

SEQ ID NO: 12118 - protein, 367 aa, Aneurinibacillus sp.
MIRTAKVAFTASRSTIDALFALHRFSAEVWNTCLAEAKVYYQQTGQWIGKTELQKRLKRRFPMHSQSIQAVCHKYLWARDSAHQARKEGHTNVRYPYKQKKYFNTKWAADGFTIHPNGRISLRRGIWEGKRQAPNPPGSHTCAIDPGEIHTLAAVATTGDSLIVTGRKIRSIHRLRNKKLAELQRKMSKCQKYSRQWKRYNRAKQYLLSKSKRQLQDALHKTTKQFVEWVVAQQVNEVYLGDVEGVQRKKKKKRSRCHNQRMSQWQVGKVKKYPTYKLKAKGIMLHKREERYTSQTCPVCGAKKNVRGAAIPNIGTFTVRRIYCPKCCMKTGFSPCRLKFRNPRIYGSPKREVVDGLFRPTPVRVCC

SEQ ID NO: 12119 - protein, 258 aa, Aneurinibacillus sp.
VDSIAIQSSVKNLADAYSRFFKKQNDAPRFKSKKNKVQSYTTKHTNGNIAIVENKIKLPKLGLVRFAKSREVEGRILHATIRRNPSGKYFVSILVENDVQPLPKTNSEVGIDVGLKEFAVLSTGEVFENPKFLRSMEQKLKRAQRILSRRMKGSSNWNKQRMKVARIHERIANAREDYLQKISTHIVKNHDMIAIEDLQVSNMMKNHKLAKAISEVSWYQFRTMLEYKAKWYGRTVVVVGKICFLSDLFMLRIPKQRS

SEQ ID NO: 12120 - protein, 425 aa, Halobellus sp.
MEMRRTVPVKLDVGSDEAALLRETVDEFLWAANYVVDHAWRGEYKTTSKAQLQEETYDDVREQTRLHANLVQNARNKAADAVQGVLARWKQGEYASKPHFSNPTVVYDKRCATFHDDHVSLATIDGRLDVEYVLPDEDRDTPHSRYLDNDDYELTGAELHNKDGDWFLHLRTKAEMESDIPEQATIGHSTVLGVDLGVNQLAVTSTGTFWSGHKFDHWRREYEKRRASLQRCGSRHAHENIQAVGRKETGRYKTILHRIANGIIEEATENGCTIIAFEELTGIRDRLSGASWGHKWAFGRLCEYVEYKAEMHGIDVEQVDPENTSRCCSHCGFTHPDNRDGEDFACLNCGYENHADYNAAKNIGLRYLRRNQTGDGGGAPVGVRLNRGILNAKGGYEPSAGDSGQSGSPRESPTRNKANGEAVSE

SEQ ID NO: 12121 - protein, 416 aa, Nonomuraea sp.
MRHCDLLVLSVAVGRLIGMSRYRLTPTPAQEAALAEHCGHARFVWNLAVEQHAHWRPGRKGAPGFAEQCRQLTEARAAHPWLAAGSVTVQQQALRDFAQAMANFFAGRHRRPTWRKAGRHEGFRIIAVKAGDVRRLSRRVGEVKVPKVGWVRLRWSRAVPDGVKSYRVTRDASGRWYVAFAAVPEAIPAPGTGEVVGVDRGVVVSAALSTGEMLNVPGLREGEKTRMARLLRRLARARRGSRRRGKVKQAVARLRARETDRRKDWIEKSSTDLARRFDMIAVEDLDIANMSRSARGTPDAPGRNVRQKAGLNRGILANGWGRLVTRLEHKAPGRVVRVNPRYTSQTCNVCGHRAAGSRESQSRFACVACGHQAHADVNAACNVRDTAAGHAVAARGGAGLPEPANREPQRDLLLVG

SEQ ID NO: 12122 - protein, 405 aa, unknown
  TnpB Polypeptide
MSRYRLAPTAAQEAALRDHCAHSRYVWNLAAEQESWWRPGRKGAPGYLDQCRQLTQARAQYQWLRAGSQMVQQQALRDFAQAKANFYAGTHRRPTWRKAGRDEGFRIVAVKAGHVRRLSRKNGAVRIPKAGWVRFRWSRAVPEGVKSYRVTLDRAGRWHIAFAAIPAPVLAPGTGEAVGLDRGVAVSAALSTGEMLAVPRLGSAQQHRLRRLQRKLARARRGSNRRARVKRAIATLRAREADKRKDWAEKTSTDLARRFDVIRSPKGTITEPGRNVRAKAGLNRSILASGWGLLVRRLEEKAPGRVEKINPAFTSQRCSACGHIAAGNRESQALFCCMACGYTSNADVNAAKNIAAGHAVTARGGVRDAGPVNREPQLLASLPGDERLESLPSGWEDVKPSSGRR

SEQ ID NO: 12123 - protein, 405 aa, unknown; identical to SEQ ID NO: 12122
  TnpB Polypeptide

SEQ ID NO: 12124 - protein, 453 aa, unknown
  TnpB Polypeptide
MPKVRKEAKGAFQAYRFALDPTPKQEQALRSHAGASRVAYNYLLGRIKANLDQRSAEATYGIAEADRTPYLNVSHYSLRKLWNENKADVAPWWAQNSKETYSSAAQNLAASMKNFFDSRKGARAGRKSGFPRFKKKRTQPGFTFTTGAIRVEPSRHHVALPVLGTIKTHESTRKLARRIEAGTARITSATIREEGGRWFVSFTADVQRNIPKTRKPNRIIGVDLGVKTLYVGATPSGEQCLEVANPKHLQQAESKLRRAQRKMARKQGPDRRTGQEPSGRYLKEQRRVTKLHRRVANRRKDLVHKTTTHLAKNYDVVAIESLNVTGMVKNRRLAKAVSDASFGEFARQLKYKTEWYGSKLVPADQFFPSSKKCSGCPAVKAKLLLSEREYVCSNCGIIVDRDLNAAINLARYGASYPAGSVSVAGRGGKQKTRKAARRPGKAAVVEASTSRVK

SEQ ID NO: 12125 - protein, 414 aa, unknown
  TnpB Polypeptide
MTQRAYKYRFYPTGEQERAFRRTFGATRKVWNWGLGLRSEAWRDRQEHVSSYDLIKMLPALKKELPYLGEVSAVALQQVLLDQDKAFKNFFDGCKGLRPRVGYPRFKTRNSRKSFRLVGTALKCEAGRVSVVGFKSAPLDIVWSRQLPGGAKPSSATISLDAAGRWHISLLCDETVEELPAGESARAVGIDLGVKTFAVLSDGTEVGHPKLLAQKEVRLARHQRRMSRRQGARKGETKSKRFEKAKRQVAKQHAKVADARRDFLRKVSTDIVRRYDTIMIEDLAVANMVRNRRLAKSISDSGWAQFRTMLGYKAEWYGKRLVVIDRFSPTSKTCSTPGCDEQNTKLALSDRTWVCTGCGTLHDRDLNAAKNILAAGLAVAARGEDVRPQRRPSASARKGRLSSVKREPTEATAA

SEQ ID NO: 12126 - protein, 425 aa, unknown
  TnpB Polypeptide
MRRAVKVRLYPTPAQETLFARTAGAARFVYNAGLGLRIDAYKNDGLSVSTYDLITMLPLWKEEFPWLSEVSSVALQQSLRNLDTAYKNFFSACKGEGKARFPRFKTRNSRASFRLTVGGFRVRDGQLFVAKSKEPIPFRDSGYALPEDATSITISRDAAGRWFASLLVDDVVPLPETTGTKIVGIDLGVKTLAVTSDGEEFANPKHFDKRARRLAKYQRMMARRAPKPGQKASANYRKAQAKAGRVHAKIADSRRNAIHQLTSSLVKRYDIIVIEDLNVAGLIKSKRMSRSISDAAWGEFRRQLEYKAGSPVGTPEGKQVPSWYGKKLVVIDRFSPTSKTCSVCKDVKQKLMLSEREWACTGCGTLHDRDLNAAKNILAAGLAVLGSNVQEACGGNVRPGPDSSGAGGPGEAGSSSEQRSALSAA

SEQ ID NO: 12127 - protein, 410 aa, unknown
  TnpB Polypeptide
VSIVQRLYAQPAQVEVMDAHVRDARFIYNLGLEQRSMWSETKRHYAQKVNMATQMRELAEARKASDWLQAGSSVVQQGALRDLDKAFANFFAGRSGYPTWRKLSDPKQSFIVRDLTVKRLSKKWGAVLIPKVGYVKFRLTREWASVEAATSARVTRHNGVWHVAFTTPPRGKLNPNTGEMVGIDRGVANSIATSDGQFHHAPSLTPGEQRRFVALQQQLSRQAKGSKRREATKSKLSRLRTKLNNRRTDWVEQTTTALARRYDLIVLEDLRVKNMVRKPKAKPDPDREGAFLPNGARAKAGLNRAIHASQWGKVEQRLTDKTNTEKVDPKNTSRKCHECGHTSSENRESQAVFDCKKCGHQAHADINAAKNILRRYLNQPEDTASAVGTSLSGARTRKTRKGSVNHLTAA

SEQ ID NO: 12128 - protein, 391 aa, Halomonas sp.
MLKATKVRIYPTPEQAAFLNAQFGAVRFVYNKALHIIRSQYKRHGTKLRAKKDLKPLLAVAKKSRKYHWLKDYDSIALQQACINLDRAFQNFFDPKLPARYPRFKRKHGKQSSYHCTGIKVGEGEIKIPKLGPVKARLHREITGTLKSITLTRTTTTGKYYASVLVDDGAEAPAPLQTVQSVIGVDMGLTHLAIDSSGRKVANPRFLKRARANLRRKQKALSRCQKGSKGRAKARLKLAKAHERLANARADFQHKLSRQLIDDNQAVIVETLKVKNLLKNRKLAKHIADASWFSLIQKLDYKAREQGKHLVKIDQWFASSKTCAGCGHKVADMPLSVRRWDCEHCGTKDIDRDINAAINIRQQGILQLKAEGLSVSAHGGLRKPGHAPAAA

SEQ ID NO: 12129 - protein, 549 aa, unknown
  TnpB Polypeptide
MHLDPLRPSESDPHIIDSDRIEALEVDNSENSVRTIIRLIDVESLGSFEREELDKLRRAFGKERARFIQLLRMREHRRNCCGTGYRRIRDAIVKKDRMDKNAGVDVQAKHSGLQARHWKMALQSAAIVVSNYWRLAQANAKSVIFAKEWTKELNDVERFYIHMMLSRLRPEFFELLDGRNPHFERFRMEEIRDLPKLCLRIRRTVRRALGSFPSPGRPVNVWFDQDCYNVRNEKGVECVYLTSMTKGKRIRVELKGIGKVGSVIHLLFRKDGKLELHVMEPLKKKVLENVPAVPEEKYYSRAFDMGLTEVFTDDEGNHYGKKLGELLSKFAETLNRKLTARNRLQSLARNTTSKRKRRNILRFNLGSERFEALKARMKAQIRCCINHALNEIFKKAPADAYIVEELSANFLQDKKWPKRVKRLLSGWVRGIIGERLAFKAAERQVKLVKVASSYSSQACPACKFAHWENRNGDKFKCRHCGAVYQSDHVGALNLLFRVRSGTWPRKMTKEKAWELSRREYEECCRLRGVKPLEDPHKAQKKEKKTGAAK

SEQ ID NO: 12130 - protein, 399 aa, unknown
  TnpB Polypeptide
VWGDLTLPSIVASRNPVIAHGLTHPIKYVRLIRRRLNGRVRFFAQLVCEGQPYRKAQHIVREGIVGIDPGPRTFGVAGADWGAQVDLQTPLKQSRQVIRRLQRKIDRQRRANNKDNYNPDGTMKKGKLEWTISKGHQRSRVTLANIYRKATAHRTSLHGQVAHAILSRGATILIERNSYRSFQRTYGKSVGSAAPATFVNHLARLAESAGGSVVRVPTTLRLSQTCLCGAIRKKPLSERVHRCDCGITVQRDVWSAWLARFAVTTIVTKETSTGKTGKDIVTWRLDAEAAHAAWARLPGSDAGLPAASIPLPPGRFAARVGQLGKRELASGRAARCAHVAMGEAVSPVSASELVAGKARLETREATDAVPLRRLSLCSEVCVGRENRGKLVGRRESHGL

SEQ ID NO: 12131 - protein, 352 aa, Desulfurococcales sp.
MAKRTKEEKVTIKGKLVIHDEIVLSKLINLMRQFRDAVELAHYLLFKRKLKDSEVKRRLTRLLSNAWYGYSVIKKAKLYQKQPHIKLRKPLLFSVGCKGLEKGNRNIRLVDTDKVLIKVPHANGKHEWIECKVEFGRKYLELVKELVLGEYPYSATITVKLKNKEDWRKVFRKRLYLHLIIPLDLYLKYFSRKPKNNIVGHVAGFDFNVDRVNMVIIDQKGIIRDIKNEHFPEVTSHGFPRNKAKATRRESVAKLVKYAREHGVKYYVIEDLSKPKPKGTRTAKKKIYRMALREFIQQMEVLVPKVDGVLIKVNPAYSSVSARIIAEDLGLDVHTASAYIIAKRGLTNLQKP

SEQ ID NO: 12132 - protein, 411 aa, unknown
  TnpB Polypeptide
VLVAYKYRVYPKAWQGRLLKSHLARLCTLYNTLRDLKIDMWKERRVSLDENDLRQVALEKRKQDKDLQGIHSQVVQYVATRVYTAFKNYFENRARFPKRKQTKKYRSLTYPQSGFKLRGEVVRKGRRTELKGRLYLSKIGYMRIFMHRPLEGKVKNLTVKYEAGERYAIFVCEVPDRPKKPVEQIPNKGVKGGDLGLLQFLTLSEGSPLDYPKFLRKGEDKIKRLQRVLSKARKSSKNFRKLTLRIARLHHHVACQRLNHQNQTVANLYRENDVLVLEKLRLENLLKNHSLAKSLQDAAFGNFIRKARFKADLLGKWFIPVDPWGTTQLCHNCLAWVPKKLDEREHICPNCGEQLPRDENSAKLIKRLGLRYLPSLALGYAPGRGVKTPIEPEPLPSLRGMASLDEEVGSP

SEQ ID NO: 12133 - protein, 469 aa, unknown
  TnpB Polypeptide
MWGRRPCTLFCVSPSEIIHNCDREIPEGDLRQETFRTFSGNKKPALERGAVEPFLLCGNGRICIGRKHPQVHRTSEQSLLILWRRGNAAVKENIHKGQPEYANLIGHMCYAASKLWNVCNYERQHYKETGMEQYPDWYYQKKAHKEDLWYKQLPSQTAQEVCRLLDKAWKSFYALKRSGGIETPRPPRFKQESIPITYMQMGIVHERDTDRVRLSLPKALKKYMEETYQIHENFLYLENKIFRGMDQIKQLRIYPPEKGNCKIIVVYEVPDQEELPQNGHELSIDLGLHNLMTCYDSENGNTFILGRKYLGLERYFHKEIARVQAQWYGQQSGKGVKHPTTSKHIRKLYKRKHDSVTDYLHKVTRYLAEYCREQGITCVIAGDIRNIRREKDLGHRTNQKFHSLPYNRIYIMLEYKLKRYGIRFIKQEEVIPASAVHCHRKWGKDMQNRPTGKREDCTGMETEFITQMQ

SEQ ID NO: 12134 - protein, 166 aa, Cyanobacteria sp.
  misc_feature (134)..(158): Xaa can be any naturally occurring amino acid
MQLRSTPPAPMETENVVGVDFGRREIAKTSDHQGWDGYNLQQKRDKYSCTRQSLQKKASQGTRSTRRRCRQIQKRLSGREKRFQNWVNHNISSVIIEQAKQTRSLIAMENLTGIRESTNQQPRNKQEKRRSNNXXXXXXXXXXXXXXXXXXXXXXXXXEGYKKPTL

SEQ ID NO: 12135 - protein, 360 aa, unknown
  TnpB Polypeptide
MNCLRESRGIYNQMVELSRVDYEANAKIFSLYGMHARFSGKAFEHVPATTVQMLADRLHKAWKRYEAKKVLAERAASEGKKDKFKPRFKNALHWHSIQLRQFEKGKDVWLEGNKLRVPAKIGKSLKVKFHRPLEGVPKTANLALRADGHWYVLIVCETADDPLPVSVQEVGLDVGLKVFLADSDGAIVENPRHYRTSQKTLRRKQRMLSRRVKGSRRRRKAAWSVAKTHLKISRRRNDFQHKVSRSYVNKYQVIACEDLNIQGMVRNHCLAKSISEAGWNSFLNMIAYKAQSAGRVFVQVPARFTSQKCFRCGELVPKSLSVRTHICPHCGYVEDRDVNAAKNILASYKDFHGKGIAVRR

SEQ ID NO: 12136 - protein, 424 aa, unknown
  TnpB Polypeptide
MTKKEQISSSLKATREKRKSQDCKVFEIKVDKSHLSKATCEQIKRVFLESKWLYNYTLAQENVFDADDKIKEVEIKVKDVFEKRELTIIGSQIKQSVLDGLTQNIKNLSKAKKKGISVGKLNFINRYDSIDLKQFGNTYKIKGSRIKIQGISQWFRVRGLNQIEGYEIANAKFIQKSGDYYLHITCYKKKEEQAIKTKRAVGIDFGIKTQLTLSDGLVGVELNYASEFPKRLRKLYRRWSKKEKHSANWYKKLEQINREFNYWTNKKKDTRNKIINILEKNFGIICYQNDNFRGWQRIWGRRMLSTGIGGITARLKKSATSVQVDRFFASTKTCSCCHHKQNVGLEERTFVCEKCGFIAPRDFNSGTNILQNGLNKIGVEYTEYTPAEMESSALNNLLEKFKAIPRLKVSSVAETGSLVPLGMR

SEQ ID NO: 12137 - protein, 479 aa, unknown
  TnpB Polypeptide
VKKKKTVQGPACFETKNPLEENQEFRTLSVKMYPTTAQAGELRRCFAAARWSYNAVVSAVKKDGVAPNSAPLWSKIMASAPAGLKEVYAKIRKRAIKQAAEAYATNERKRAKNPQHRYKIGFRSYKRTRTEVIILEKAYPFIKAKPRKPKPPKPGAKPRKNKPRKPSSEFNPNMGPVLKIRLSPSPLWGNGKKCAGDVFFGGTLAASGPVRIADKTGVIEQLAADGYLKEDAQILWDKSVGSFHMLVRMRRTKLVDSDPDGRRKTVVSLDPGCRSFNVYYDRTGRHGELLCGAEEGINARCKRIDGLCSKHFKLAKAKHLTRQVRRRRKRRVRKTLARERKSMRNWMRNAHYDASNFLLSRYDVVLAPTFAVKDMARRNTRVFGSKTARAMYNWSHYAFRQRLKSKAFSYAGRSVIEIGEPGTSKTCGCCGSWKADLGGNHIYECLKCNITIDRDVNGARNNMLAAYGRAIGEPWDGTE

SEQ ID NO: 12138 - protein, 192 aa, Leptolyngbyaceae sp.
RREPTHKTIGLDVGLSHFLTDSEGNTVENPRHLRKAEQRLKRAQRRVSRKQKGSANRKKAFNKLGRAHLKVQRQRKDFACKLARCVVKSHDLVAYEDLKIRNLVTNRHLAKSISDAAWGEFRRWLEYFGRVFGVAAVAVAPQYTSQDCSACGKRVKKTPSQRTHICACGCVLDRDHNAALNILSKALATVGH

SEQ ID NO: 12139 - protein, 390 aa, Exiguobacterium sp.
MLTHKAYKFRIYPTKEQEILIAKTIGCSRFVFNHFLAKWNETYKATGKGLSYGSCSKELPLLKQAFDWLKEVDSTSVQTSVKHLADAFDRFFKKQNERPRFKSKCNPVQSYKTNIQGKSQLPEVSIVGAKIKIPKLKWVRFANSRQVVGRILNATIRRNASGKYFVSLLVEQESNEMPKTGSSVGVDVGLKHFAILSDGTVYENDRYFRSLEKKLAREQRKLSHRQRLALDKKVTLSEAKNYQKQKRKVARIHEKIANKRTDFLHKVSTEIVKNHDVIGIETLQVKNMQKNRKLSKSISEVSWSEFFRMLGYKAAWYGKTVVKVGKTFASSQLCSSCGHQHKDVKHLGLREWTCPSCGIHHDRDVNAGLNLKQEAERLLASSTVGTTGLA

SEQ ID NO: 12140 - protein, 300 aa, Exiguobacterium sp.
VTIDVTRSFRTLFYPNPVQSYKTNIQGKSQLPEVSIVGNTIKIPKLKWVRFANSRQVIGRILNATIRRNASGKYFVSLLVEQESNEMPKTGSSVGVDVGLKHFAILSDGTVYKNDRYFRSLEKKLAREQRKLSRRQRLALDKKVTLSEAKNYQKQKRKVARIHEKIANKRTDFLHKVSTEIVKNHDVIGIETLQVKNMQKNRKLSKSISEVSWSEFFRMLGYKAEWYGKTVVKVGKTFASSQLCSRCGHQHKDVKHLGLREWTCPSCGIHHDRDVNAGLNLKREAERLLASSTVGTTGLA

SEQ ID NO: 12141 - protein, 389 aa, unknown
  TnpB Polypeptide
LKLSVQAKVSEKTNRRKLLLLEELYSKYQVALRLFYNYAKDNRVHELRKRTLIEKELQKLYYTVKESLNLSSQLVQSARRDVVDDIMSWLKVGGEFPRLSEKPPTLVYNRSYRLFEQGKEFRYWAKICGVSYPLELGDRQLELIKKAERIGEAKLVKRDGEWYLYISVEVKEPEQIRSNGVLGVDLGLRNSAVITASRPKFIKHRRLLYKVTQYWKQIDKLKSKLPKGQRSSKRIRRLWRKIDRINNFIAHDTSAKIVKLAVQKQYAIALERLKNLPTNGCNREWSRRLSNWIRRKTIKYIEYKARLNGVAIIKVNPAYSSRVCHFCGGKGERLSSRFRCKVCGREYDADYNASVNIARRAKSLPAGLSNPARRGLRDEPTKLPTLVVE

SEQ ID NO: 12142 - protein, 216 aa, unknown
  TnpB Polypeptide
VGIDVGLDRFLTTSDGEMVPIPRYYLRSQKHLARQQKQLSRKVKGSANWRKQAARVARLQLHIARQRKAFHYQVAHWLVGQDDLLVVEELNIRGLARTRLAKAVLKAGWGRFIDILSAGAVKRGKQVLKVDPRNSSQNCCVCGERVQKTLAERGHNCPRCGTWDRDLNSAIEILKRGLRAVGQSLSGCGGAWVTSPMKQQLWEVILGSSRLQPVRA

SEQ ID NO: 12143 - protein, 310 aa, Helicobacter sp.
MLIAYKQKLYNSSKNKHIGKLLRLYGICYNHCIALHKRYYKLYKKHLSFYTLKRHITKLKRTARFAFLKTLGSQTLQELVERIDKAYKKFFKKQGRPPRFKKIHSYKSFTFSQYGYKIQDNIISFNGYAFKFVKTYDLVGKPKTLTIKRDNLGDYFLCLVCEMADNPKPAGGNSVGLDFGLRTFLTCSNGTQIASPLFFSKFLPLIKACNRSLSTKKKGSNNRLKAKLKLARLHRKVQNLRKDFFYKLANSLAKQYSRIFIEDLNLKGMVKLWGRKINDLAFSEFVASSQTAQIILICTGSLERKTQVVK

SEQ ID NO: 12144 - protein, 387 aa, unknown
  TnpB Polypeptide
LRLRLKDKHASALRAMAADVNFVWNYCNELSFKVLERERRFISGFDLQSYLNGASKEGLRVGSAVFQQVAEEFAQKRKQFRKAKLRWRVSNRRRANYSLGWIPFKARSLTYRGGQVAFQGLKLSLWDSYGLASYELGAGSISEDSRGRWYLNVTVKVKRRAKPAAVDRSSALGLDLGLKSHATDSEGEAVEAQQFYRDLEPQIAAAQRAGKKGRVRALHAKIAHRRKDFLHKLSTKQARESAAVFVGNVNASALAQTRMAKSVLDAGWSAYRTMLQYKSDDAGTWFKVVDERYSTQECHVCHALTGPKGREGLGVRHWVCSGCGTAHERDVNAARNIRDRGLKWLESEFANAAEARADDTALNESAGLRPPALAPGHGRPDVGIPVL

SEQ ID NO: 12145 - protein, 316 aa, Halorientalis sp.
VFSELHSKAAQATVARFHHTLSVLSELKESGYNVGQLKRQAPTEYRSVTYNQSGFDLDEKRGHDKYAYVRFSKIGWVKIRYSRPIPDNTTINEVTFKKETTGEWFVSVALETDDDNLPEKPDVDSLDASNSVGIDLGIRNYIHTSDGKTVDWLDLEDDYDRLRREQRRLSRKDHGSRNYERQRQKVAKVKRRIRRKVLDYQHKLTTWLVTEYDAVFVEDLDVTGMLRGDGNARNKQDAAWRQFINLLDYKADLYGTHVVQVEPAGTTKECARCGVETAKPIWVREHSCPSCGFETDRDANAAINVLQRGFAELGLG

SEQ ID NO: 12146 - protein, 675 aa, Halorientalis sp.
MLQTYIRHNTTMAAQTEEERTRTNTFRLAPDSEWKKVCLIELLDSAAALVNIVTYHRRQAYFNPDKTRDDVWNAITKTEIRNRFRPTIGRAITDKLLDKCDETWDAFFTQLDDYYDGNREDKPSPPGYWKEDDQRVLQTVVRNDAYTVEWGERSRIELALGSELKEKYGIPLNQRLRVPIRGNPQYEGHGGRLELEYDRSTESFTAHQPVTFLHDTTRVSDSSDEECVAAVDVGANNFVAVTTTNGHQRVFHARPLFDRFHHITERIADLQSQLPDDEHSSRLIEKLYDRRRRQRDHAQDALVRHLARLFEERGVGEVYVGKLDDVREEHWSATVNEKTDLFWAHGRFRQRMHDVLDGECGINVEEESEAGTSSRCPRCGEEERVGRNGDVFQCGGCGFEGHSDVVGSENFLHGVVDGDVEFDTERPMARPADSGQNGPEWGHRGVPRLEWDDHEWRRCDRSTKEEPANRSTRQGNLAFGVSRSPELPTEESHPFTGGRKSRSTGWATTSPATTGHWHSSPTASVRRWRRPTNSASTSRHGRPVTRRSRRNWTACPAPPTTSSDGPRRRWSPPSSTAESHSHVGRGVGHGQNRGRDPEQLRGVVERHVEPVVPFQFVAIGRRPHLQHRVPLDVLGDGGRRAVAVERENALGVGLVVACGDPIGRHLALCVWHYPR

SEQ ID NO: 12147 - protein, 418 aa, Halorientalis sp.
MEVRRTVPVTLDVESDDAALLEDTVDTFLWCAQYVVDHAFQGEYVTTSKTQLDDETYDDVREATNGFNGGLVQAARNKAAEACKSVVARWKNGKKASKPRITSPHIVYDHRTATFHDDYVSLATTDGRIEADYVLPDGDSDTPHAEYLFSDEYETTGAELHRKHGEWQLHIHCKKEIETDTPERATTTHGTVLGVDLGVNNLAVTSTGTFWTGDEFDHWRREYEKRRGDLQECGTRWAHENMQAVGRKEEGRFKMTLHRIANELVTEACNHECSVIAFEDLSDIRERTGASWGHKWVFNRLYEYVEYKAAEYGITVEQVGPENTSRRCSHCGFTHPANRESESFECQKCGYQNHADYNAAKNIGLRYLRRNQTGGDEGALLGVRLNSGIVNVNGEYESPAEISARTGVHAESHPFTGG

SEQ ID NO: 12148 - protein, 410 aa, Fervidicola sp.
VPLITLKAQIHADPQIEAVLKDAMFCATKVYNGLLWHLRKEYKEAGRVNISRKNLNRILKELPRAKGYYSMSVQLTRDEVREAYKSFFTLKKKGLTRHEAPGFRRKNCLSPLKYVQSGFRVDGDKVTLSLGTSREDDVKQVTFRISHRLDVEYERVRELSIAYDKVSGRCEARLVVEVKARENNGTGRVAVDLGETVLMACAFDDGTVTLYSGRLIKAVRRYWQKVRASLKQNSRRWKEIAHREKKQVEHLLHIATSHFIAECVRRGVKEIAIGDLNGIRESIDHGKRLNQRLHAWPYRKLINMLKYKGALAGIIVRDDVEEKSTSITCHACGKVMSSNRRHRGLYVCSCGWKAQADVNGALNIYERAYQVSPVEGSSGRVARPAVVSFLLGWHGVAEPKRGNKALRASA

SEQ ID NO: 12149 - protein, 293 aa, Campylobacter sp.
VPNLGLVKMREKLRFEGKINSVTISQKANKFFASFSVEINEENFHKTHKKVLNTNNCLGIDVGLKSFISLSNGLQIKAPKPLNKLNRLLVKRARQLSKKQHAKTKQEILQGIKKSNNYKKASIKLNKLHSKISNIRADFLHKLSSLIIRNFNYIGLEDLNIKGMLKNHHLAKAISDVSFYEFKRMLSYKSQYHKRKIIEAPRFYPSSKTCSSCKSIKEDLKLKDRIYHCKECGLSIDRDYNASLNLKYFAQEKIGLVQAEFTPEDLTALLKDLAINNLITSKVETGIQQKSHL

SEQ ID NO: 12150 - protein, 400 aa, unknown
  TnpB Polypeptide
MIRRVEHTLKFATAAKRRKLDSFFAEYARVVNAFIELYWNADKLPGKANAEVYGQIDSWMMGKARKCAANQAIRVLKSVAKKDRQKTYQVYKKAYKKAKERNRDACGILASRWSEWSKGKVFRHRVKMPVFNGNTIDLNSDLVRIQEASKSSEFDLWLRLGSIFGNRESLILPSKHHERSRHFEKTGWTQRKSICLRRDSLGRYYADVFWEKEIQKISQQGQAVGVDIGINKLITTSDREELGTELRSKLDKLNRRKQNSRNWNQTRNEIKDYIGFVTNRFPWTTDVVVMENILNITQQTRGRVGKNTRKLLGHWNIDLLYRRMTDKAEQHRVFLAFVEPAYSSQTCNSCRAIDKKSRNGEVFKCTTCGHADDADHNASMNILQRFLDGEFTVSRGIQRA

SEQ ID NO: 12151 - protein, 408 aa, unknown
  TnpB Polypeptide
MHIIIPGTIHQGNFPALKQLMRDWSSCIRYAYQRIHKNGLTGNDVKKSCKPLYMNKLNQRYIADAVYKAQIIKKDHVIFGGKKRWRDLLSGLISKNEWHESRNSELYSRGDRATKGNPNIRVLNTPEGYKLRIGLPGPREFIVFDLYIPEGRNKNYKELLDLYGDCYDVRINNKAGKFHVSIGLEVPERNPTYLCSNGVLGIDTNPDGLAVVEIDSDGNLLNHEYLISHRLQFARHNKRKNDTEDLAFKIVNRAVLANKGIVVEDLKFNKGKHGSRKFNRLRHNFIYSQLLIAIERRAVKDGVEIRRINPAFTSITGILKYQEQYSLNRHTAAAFIIGRRGMGIMERVKVRLELGENKKLNLAGRGFKIALTVKAYAYFRHLYRVVEVKTPAVTPPCLTPGIGNYGTS

SEQ ID NO: 12152 - protein, 591 aa, Tolypothrix sp.
MSRREKRCKSYKSQKKPLETGIKQEKYLQLELPLDIDVTTSTAYSIHSQPKKEKLSFIAESVPINSETTSTDKLTISNHYSHTEKSSKKLEVDSTTNEKVYKPFWDKFCLEMSSKLYAAIKIDSQDSESNLSTTSASKTIVNSWFSTALICLQKENSLKTSWQLSTSLAQSSTDSESINKKSKKIRIYPEANLRLVYRKWFAACRWCYNQAIAYQRDCFIKGKKQPSKYQLRDIILKSCPDWVSICPYSPREESVFDAKTAFSKTASKNKATPKFKSCREPVKSLSIGSKYWGAFYSGKGKNKQIGGFTHYATTKVVINNETFAIKDLQINAVEPLCEEMPSEFTILLDKGRWFICFAIPFEIQTNQRRNCIGLDPGVRTFLTGFDGENILEIGNGSISKVAILCQRLDKLQSQITKSKGRANKRLRWKLRKQSEAIRTRIRNLTNEVHSKASALLTKIYKHIFLPTFETSQMVVKKKRKLRSKTARNMLTWSHYRFKQVLKFHALKRDCVVHQVQEEYTSKTCSKCGHVHERLGGNKKFKCPSCNHEIPRDWNGAINIFIKSFNDLVNASTSVEAGQDIARYMVETSTCY

SEQ ID NO: 12153 - protein, 408 aa, unknown
  TnpB Polypeptide
MTYLVSKTFIGKNHACYEALDSYCFLAKNLYNATLYRHRQDYKDGKKKIGWMALAKEFAADNNPDYRALPAKVAQLILKSVDDDYSTFYGKREAGEKARPPRYKHKIEGRYKLVFNTQAIFASELKKGFIKLSTPKSITKSLKFKLPKGVNTAFIKEITVTPHDDGYMLNVAYEIPEVESKTGNRTCALDLGLTNLAAAASNTEMKPFLISGGTIKSINHYWNRKLSKLKSKLSTSSDEGEKKALKAAINKLNRKRNFKINDFLHRASSKLVHHLDANNIDNIVVGYNPGWKKGINLGRRNNQNFSYVPHKRFIDLITYKAALKGMNVTTHEESYTSKCSFLDNEFVGKHEVYKGRRVKRGLFVSSAGAEINADINAAYNILRKSVGMFNYCPIQVCSYPSTLAIDFN

SEQ ID NO: 12154 - protein, 413 aa, unknown
  TnpB Polypeptide
MYLVETTVIKPSSRLIYKTCDELCFLSKNLYNTVLYIQRQNYQEGKPYIGYYDMLKLLRAQKNPDFYALPSYPAEYVAQQVDTAYTSFFSKLKSKNEGRHNQKVNPPSYKDKVKGRNVITFYKRKLSKTTYKKEGLIHITKTNIKFKSKIPFEQIQQVKIVPKNGYYVLHVVYKTEEPKPINTENYAAIDLGLNNLATVVTNVSSPFIINGRPLKSINHRWNKRVSKAKSKLRKGVKTSKQIKNLTNKRERRVNNYLHQTASAIVKKFILLGISKVVIGHNNGWKQNINLGKRNNQNFVQIPFGRFIEILTYKCTRVGIEAITGEESYTSKCSFLDNESVKKHEVYMGKRVKRGLFMSSDGTLINADVNGAYNIMKKHLGIRFNDLDPVQVCSTPKVLKVDCGVNYKRPSDKL

SEQ ID NO: 12155 - protein, 553 aa, unknown
  TnpB Polypeptide
VTLGSFPGWTWSTSPGRGRVGTGQACRTNPSCVVTFGIGSRRRSLCSNSNTCSQVSHPPGTIPCAMRHTTFRFALAPTPAQAAMLARHAGASRFAYNQCLRMVTEALATKGKDPQVRVPWSGFDLIKAFNAWKKTEEAGRLFVVAPDGTIIKQVTGLGWRQAVSAQVFEEAAVDLGRALSAHTEAKAAVRKGRRVGFPRRKRKGRCRDSFRLRNKSGSGGASGIRVGEGHPRSVTLPTIGTVRVHDDTRRLRRLLHATTENNPNTGQPETTPRAKVLFATVSRRGTRWYVSLNIQAPDVHIQRRHPLRPADDQGGYVGVDRGLAAFAVAATADGTEVGRFTPAKPLQHGIVGLRRQSRAASRRQPRSRNRAKATRRLSRQHARIADARRSFLHAVSSQLVKTHDRLCLEDLAVANLIRNKHLARAIGDVAWAELAHQLGYKAAWFGTEVVVCDRWFPSTKTCSGCGLVKQQMGLAERVFCCGGCGLVIDRDRNAAANLAAWAEAASMAAARAPDRQVGGRVINAPGGEGAGHRLGDGGTGSVEGGTDAYAVLA

SEQ ID NO: 12156 - protein, 2277 aa, unknown
  TnpB Polypeptide
MKDKKCYNPPDRRKKKKVSSRSIAAKIASSMLATVTAATTIASPVLTYAADVNGMDTVTETTTDASQGETKTIISTDSDSTETEKDAETKFLLINLKTSGGKVVIDENEDDEQTVKLANHKSDDGKTDEMRIDVYDKDDILVSSEDAAKNSYTYAYEVKADSVTNVKADADEGYILKLYDIVEGDTEKDSGFDEKTDGITGEFEYPVFMDSNVTVKVEFEKEEVKEDGKTETKDSAETGDLTVDESTDETEKTDGNEKTADSNSTDADAKDSSDSTGDLTVNDNVYVSPNGQTQTEIGTDENSNDAETDEDKVPDNEDTADTADDSTAETADNADSVEDEADAEDSSEAGAAEEDAGDVTEEDAETDATDTDSTDTDTAEHFTDTSDAEGGLNKDDFSSARLLVMTDDENDIIDKEHMIGSYGDIYLLQYESAEQAMTAYSYYKEHVDAVEPDAKIVAASENVAGAGEATTAGETEATTGAMTKDDNAVAALNTEESSSKATVYSDDTANKVIALIDTGAAESSNVIDRVSLIDDVLNGGTHGDDMVNDIVSQDPEAKILSIRALGNDGFGTYSAVVSAVEYAINSEVDIINLSMYSPKTLASSVLETEIQKAIDSGITVVGAAGNDGKDASGYVPGAIDDAYIIGAATKDGVRIAGSNYGTTIDYYAVAGSTSEAAAKFSGYISKNGLDKAANDKTGLLFNGVANINTDIDVVDKDIATSKDNDTIYDPIIEKYVKEHADKSYVGEGEPSKLSMVNVMDVDATIASADQIHKNETIESMMSGDDFRFLFQQTGYVPVYQLGKDSDYFVAFADVMHNDKRASVVDLAVARNDVSGDEIEGIHYDKDSGLLYIPKTAFYGEDGKYYVQYLQTQILYSIEGYDVNSAWNSSVIATTEETDGDTESAFSGADIMNQRMTVQVGKNMDVNTMMVSVNGFPLDGTYYAYSPTTGMMTLGMSSAVVQSVWVQAVKDKDAPDVEPGMVAAGYSMADMQPVTNAVITANLDKLKRGYVFESSSYVIYPDAAESDPQAGLKQGNTVPAYRNNAGGSEHYVTVLLDYVSYGNLTNDQFLQNGQVYTPVKGAIYPFIIKLPSISCADVKFNEYQWETNMAMECTEATLAAGHMTPGFDSSKPTSGWYEAKVRARVVEVNKTASTPYAVFAMYTSKFAGQHGFGLYKVLLKPSTGKLQLTKVSGNASGVSGNASYKLSGAKYGIYSDSGCKKLVKTIRTGTNAKVVVSLNTGTYYIKETAPSLGYGLDKTVHKVTIGAGSTSNVTSTEPPNPGTLTVKKRLDMFSIAKRTTRIGNMETTFTVYTNKGCTKVAKNTAGHNAVISINKGKVETAVGSVKLWAGTYYVKETGRISGTASNIEYVYGPVSVKAGKSVDVSSAVPVSERTNKTRMSGDGYVRDIPFHWSGRVLRKQDANGNALAGAVFKMNYSDLGGADYKVKYTWYFVSDKDGELKYDKNHLVDYSTSASAEAKAKYKGKSSALFQDTKTGNYYLPVCTIKVQEVMAPDGYNRDSTPRTLNITAPDKNEKYNTWTNPVAKLSNTGLIVKNDETENPWKTRARAFKVDEEGKPLAGAWFGLYLTEADAKTKLNQVARLETKADGYTDIYTSGKLEEDVSSYTLYCREIASPPGYALSDTIYTKTFAKTDYDALKAKDENTSGELQTFGDKTGIVNKKTGWNYSMQVKKVDDKGKPLAGAVFSIYVSKDDAESEDNALFTLKTGADGLTPLKTLKADINTKSVTYYCKEISAPEGYTINDDIFEQTWTYDEFNTIPSSQETIGKTKYFGPETGVVDPETLWTFSYYVKKVDNNGNPLAGAVFGVYTDSSCSEASKIQELETNDEGLTDTIPYNPGYSKQSVTLYCKELKAPEGYSIDNTVHSQTWNYKDYTASANTDTGEVKPFGPATGIVNDNSAWTVMMNIKKVSRFKKPLAGAVFGVYSDENCSNASYIGDLTTGDGGMSDTMSYDVPWKNVSVRGYNSYRTVAQYPSESNTLKNATVRLAGDILYVPKMKKGIKLIIHRNLPENAHICNVTLNLDTDGHFYASIAFSYVMQMEMDLRNLAITGGTLPENLTFLGLDYSQNDFYVDSNGKKANYPHYYRKSEEKLGKLQARLAKKQKGSSNYAKLQVKIQKLHSKIKNQRNDFLQQESTRLVRKYDVIAVEDIDLRAIGGALKLGKNLHDNGFGMFRTMLAYKLEQKGSCLVKVDRWFASTKTCSHCGHVQKINLDERTYVCEECGFTIDRDWNAAINIREEGKRIFLNYFKTLIEEKQVAA

SEQ ID NO: 12157 - protein, 434 aa, Haloferax sp.
VKRTNIFAVRPLTDGDERLLHELLDASASLWNELNYERRQQFFDGKSVWDTADYRKQYVGVLGSATAQQVIRKNKSAWKSFFAAREDSEDAAPPGYWGSEDAGRELRTFIRNDQYTLELGERSRVEIPVGQDLKEKYGLGYYERLRLELVGNPKWDGEKGQLEIQYDEVSDTFRAFQPVTVSDSQRDSPLADESAALDVGANNFVACTTTTSKRFLYEGRELFADFRETTEEIARLQSKLREGRYSSQRIRRLYRKRTRRRDHAQEALCRDLIERLYDEGVSTVYVGDLTDVLSTHWHPEVNEKTHLFWAHRSFVDRLIDTAEEYGILVEERSEAFTTATCVECGEQVETERYGDVFRCSCGHESHADLDASRTFLERETGTEFETGSMARPVRLTWDDHTWSESPRSPERASPNEERTDRSTRTGKLASVGTA

SEQ ID NO: 12158 - protein, 324 aa, unknown
  TnpB Polypeptide
MSSIGSVFMIEQQQKLVLSLALCNAQLHLQTAYKNFFRDASVGFPKFKSKKKPVRSYTTNCVNGNIVLQNGRLKLPKAGWVRIRQHRKIEEGYQLKGATITQEADERYYAALLYSCEEPVNEIRKAESAIGLDFSMKELYVDSNGNHAAYPHFFSKAQKKLAREQRKLSHCEQGSNRYKKQKKKVARIHTHIAHQRKDFLHKESRKIANSYDIVCMEDLNMKEMSQDMCFGKRVHDNGWGMFTDFLAYKMECAGKKLVRIDRWYPSSKTCSCCGNIKEDLQLSDRIYECACGNRMDRDQNAAINICREGIRISGMILDTEKKIS

SEQ ID NO: 12159 - protein, 390 aa, unknown
  TnpB Polypeptide
MTTVTYNIKLNMTAESKAFWLAYLSEAAQAYDECAMYIRDHNLPLNIQIIHENVYDWMRSKFPRIPAQGIIKTYKDVLGAFRSIRKNKHKVNKCPHKQGLNMHVDKRLYSNLTKEGICLTGEVRNKRTFYAFETYPKVLEMFSKYKTCDPLLFARNDEIYLSVPFDVPELPVQNNSCIGVDLGIKRLFVTSEGKYFQDKEFLAKKRKVRYLKRKLKSCGTKSAKRHLKNLKHKERNMNKSEMYKAVSALLNSTSTSTLVLEDLKGIKQKTKKGKSGYKRKKHNNMFSQVGIAEFRRILTYKAQLVGKQVETVNPVYTSQTDSRTGKRDGERHGCRYICKDGLILDADWNAAVNIGQKSKHPVLSHCPKDGAMQPLIGRAQSTAQSWNCGA

SEQ ID NO: 12160 - protein, 379 aa, unknown
  TnpB Polypeptide
MLTELWGEIQWKVTLLKKKAQQRLLPTLPTYALKKELRTQHLPIWTYAKHWVDSALKTAFAILKSWKKNYLKGNRTRAQPTVKRSFVRVKQTLMKLEGERLRITIKPREFVYIDLSKRYFKLKGKLGEPILTPTKIHVPLREIDPEPEGSEQIGWDSNKFSLDGFSPAQGWLKIDLKPLHTLHITYDNKRRNLNRIYARNKRQGQRLYRKYRMRERHRVQNYLCHLIKRLTVLPATHGFEALEPRKMTRAHKRRWNRELQHTDWRKIVRLMKNRANVIEVPAYYTSKICARCGYLHKDLRGAQIFECPNCGLKIDRQLNACINIYLRMRGFSHTIAWFDHTVVGGFALIGAETKSSDELARSLDELMKPQVYVCVSMPM

SEQ ID NO: 12161 - protein, 455 aa, Roseomonas sp.
MALMLTHRVRAYPTKAQHARLADSLEHTRQIYNAALQERVDCYAKTGRTVGVYEQNRELTELRQDPAYARYARRMQCWALNLVDRAYKAMFTRHRKGKKLGRPRFRGRDYWNTLGLNSPIQVRMTARGLKAAGVFGGTLRLRPDRPLPPWSACKALTLSRDGERWYAHLTYEEEGPVSREGAPNRPLGLDFGLKCLAVTSDGARLDIPRFDRDAAPELRRVNRALSRAAKRSRGRRKIKAQRRRLLARIARRRAAALHRISARVVQHYDAVAIEDLNLKGLVRSGGGGAQGRGVRSSWRDRTPGKLADMLEWKCQREGRRFARVDPRGTTIDCAACGAAVPKTLKDRVHRCSNCGEVRDRDENAARNIRNRAGWGTGGVKLDDRAPATPASVRVCPGNTAAKPETPRASRRTRPDHGGAATPPSILPRAGATLDLFDGTPWARPEPRRRRADGPP

SEQ ID NO: 12162 - protein, 364 aa, unknown
  TnpB Polypeptide
LFVGLENGFILATVRSVVPIPKQLNRHCWIRQQEDDEDCSEVAHASNIRDAIGWNSYPSRRLQKRTRESPASVRQSFKFKQIQAFRVQTAQAPAPYDRRVRGDPGIMRSPRTGATILGHGRIKILGQNYRFNQSRPVTGTIKTVTVRRDALHDIHITFSCDQVLQTEQAPKTGLSAGADFGLKDFLTLSTGEKIAAPQPLKAELRHLRKAQRVLSRKQKGSKARNRARLDVARVHRKVANDWQWKTARMLLLTFDLLAFETLNLRGMQQLWGRKVGDLSFADFLRKAGWLARKLGRDLLKIDQWEPSTKTCRACGRRREMPLNMRIFVCEGCGYVEHRDVNASHNILEAGRRLRSGASSKTAHG

SEQ ID NO: 12163 - protein, 561 aa, Firmicutes sp.
MKRRRKSKKKAKVQKVKRTKLTGDELFRSAHITVPKKLVNKAKLDALYELDRLHARAVNEWIGRWYGRTELIERILTGTATTLMQTEALERPLETPLPSAYVQIAGNRMLDILREHYLAVQDKIATDAWKDGSLPVEHRMVRAAFARNAVLFHRFVNGLPDAEDVVAKWRASESERLRRVAEAYDSLSPEQRAGIAEFIAAKFRETRAAWRMPAFKGGVIQLDYRVFTLEETRGTKEFNLWARVTTAMLHRRVAVPLRLTAEKRKLLDSLFPGWLASTARKAQLVIRGRHIRLSVPVAKPKAEPEGEPEAVLVCDIGMAALLNLGNGLKLGKRFKEIAGKLYDEYLRLQAVRNKIRSLKQRAENRLSITKRPETRRRLERKVAEYDRHLSERRWAELRRRIKAAVSTEIGRAVNRLLALIGPNPERVLVVMEDLSEMTAEGARRSPRARFDLSVWARGELQDHLRRDIEWAGGRVAYVPPEYTSQTCPLCGWADKENRRGREFRCLRCGFAADADTVGALNIGERFFDAELLTLAERCWYSRDLRREKIKELLFARAENAA

SEQ ID NO: 12164 - protein, 369 aa, unknown
  TnpB Polypeptide
MLKAYKYRLYPNKEQEILIQKTFGCCRFVYNQTLAYRKELYETKKKSMSKIDCNNYVNQILKKEHKWLKEVDKFALTNSVYNMDSAYQKFFKEHAGYPKFKSKRDNKKSYKTNLTCTNIEVSFENNKIKLPKLKWVKAKVHRQFIGKIKSSTVSQNPSGKYFVSILVDTEHTPMNQNNNSVGIDLGIKDLLITSDGEKFDNIRTTKKYENNLTKEQRKLSHKVKGSKNWNKQRIKVARIHEKIHNTRIDHLHKISHHLISENQVIVSEDLSVSNMVKNHNLAKAIYDCGWHELTRQLTYKAEWNGRTYIKIGRYVPSSQTCNVCGYVNKGTKDLSVREWICPQCGTVHDRDVNAAINILNEGMRILEVA

SEQ ID NO: 12165 - protein, 434 aa, Frankia sp.
LRPVRCRVCRGRVCRQRPAAARRRSLGGRRRPGTGHHRDPDVDVRPALWPPRRREPGRSRRRGRHRGSHVKTTLQAYRFALDPNNIGRAGLRRHAGACRFAFNWGLARVKAALAQREAEESYGLAGDLLTAVPWTLPALRLAWNTVKNDIAPWWAECSKEAFSAGLAQLAAGLKNFSDSRTGKRKGRTVGFPRFKKRGKARDSFRYTTGSYGPDGDRHVKLPRIGRVKVHEPMGALTALLGDGRARLLGAAVSRTAGRWFVSFTVQVEREIPDGPSARQATGGVIGVDLGVKHLAVLSTGEKVPNPKHAVRAEKKLRKTSRAYARSQPGSSGRRKLAADLAKQHAHTANQRRDGLHKVTANLARTHHTVVIEDLHVAGMVRNHNLAKAVSDVGMGELRRQLEYKCGRWVRDPKTRTQVYVPGWHGAHLHVADRW

SEQ ID NO: 12166 - protein, 334 aa, Frankia sp.
VKTTLQAYRFALDPNNIGRAGLRRHAGACRFAFNWGLARVKAALAQREAEESYGLAGDLLTAVPWTLPALRLAWNTVKNDIAPWWAECSKEAFSAGLAQLAAGLKNFSDSRTGKRKGRTVGFPRFKKRGKARDSFRYTTGSYGPDGDRHVKLPRIGRVKVHEPMGALTALLGDGRARLLGAAVSRTAGRWFVSFTVQVEREIPDGPSARQATGGVIGVDLGVKHLAVLSTGEKVPNPKHAVRAEKKLRKTSRAYARSQPGSSGRRKLAADLAKQHAHTANQRRDGLHKVTANLARTHHTVVIEDLHVAGMVRNHNLAKAVSDVGMGELRRQLEY

SEQ ID NO: 12167 - protein, 411 aa, unknown
  TnpB Polypeptide
MPIKGVVFGLESDLPSEAKFLLEDFRLAVNNAIRAGLQARVSSRNALNKLAYKDFRKDHPGMYSQHLVSAFEVAGSALKNHRRRLRKGDSCGIPYVKRLMMKAENQAYKLDRVNGLIDLPIRAGRHVELRLVVSRYHRRYLDDTTLSLGSLTVLPDRVVIAFRKVTRKPYAPETALSLDTNERSLDGVFLDDGLSTPTKAAFDDVAVIQVRHQDRRRRLQKKKAHDRRTSRQLCRREGRREHRRIEYRMHQVANAVLDFAEEKKAAVVLEDLKGVFKARKDKALNRRLSIWPRRKLHQFIEYKAEWRGIPVVKVDPRNSSRRCPICGTIQYSRMGTRFECECGWQADKHVNAGINLLQTAFPEGMAGGLRFSPGAFQHDVMMILYDPERGARSEQNGTSCCTDDGLEATTR

SEQ ID NO: 12168 - protein, 362 aa, unknown
  TnpB Polypeptide
MIVDRTIRLRLPDEQVLYDTLKEFSRTANTISEVAWEHKEKNRFRLHHLVYKDIRQNSTLTADLTVACIGKVSGAIKRAVNKPVFKEHCSVRYSRNKSYSIKLKERTCSISTIKGRFKTSFSLPDYYLRYVEWETMGAELVCDYKNRLWLNVVVSKKADAVTTSCSPIHNRGIDLGINNLAVTSDGRFYKGVSNVLRKMWRLRSSLQSKGTKSAKRHLKILSRRQRLYMRDVNHRIAKQIVGEMSEGSSISMENLKGIRNESRGKKLNRLLSNWSFYEFRMFLTYKAEEKNIPVVLVKAKNTSKTCSVCGQMGTRKRGFFQCSCGHSINADLNGARNILARLNPTGNERMGVVNPPIVAICV

SEQ ID NO: 12169 - protein, 465 aa, unknown
  TnpB Polypeptide
MTGFSTKGGEIDQMKVLRQNRYHVKKTHPDYELLLDHMRDSKAIYNFANYLVRQRYFRKTGRNFNEKFLDEFADDPALQADIQTYLDGNKMFSSLLKNIVCAVARRFGCKIIAKVVQNVVDKLHEDWNSFFELLKRKKNGDYDKKIRPPRYKKEAFNLVEYNPQVVSKTKLKDGFIGTAKMKKGVKLRRLLPNETVQSFRVYWENERVLLEVILVREIVDMPKENGCDGQKIASVDLGVDNLMTVAFNYERRPVVISGMEIKSLNRFFNKEKGKLQSALPKDVHSSRKIRRLLARRHDEIRNLFGRIANKFISFLLREGVTKLIVGEAKGWKDEVDIGRVNNQNFVHIPFSSLVKILRYKCEDVGILLVAQDESYTSKASFLDNDFVPTYRKLKEGEEKPSYAFSGTRVKRGLYRTKDFIFINADLNGALNIMRKAGDLPPEKTSPLAYLKRYKHLFPISFERVA

SEQ ID NO: 12170 - protein, 449 aa, unknown
  TnpB Polypeptide
MIRVQTIPCALAKVEADALNRESGRIYTTILVWHYRIYRRTGHWLSEYAAKRLEDYLGGPTALHAHSRDAAQEGFYDACKVAKSQRQAGLEMRYPYRRKAYRTTTWKNTGIRSRERDRVLLLARARGLEPICVPLPLNFAAYSASVYEQVELVWDHAGRRYRWHITLDDGLQPKPAPGNAVVAVDLGEIHPAALTDGKDAVVITARRLRATHQYTAKRLAEIQAKQAGKQKGSGRWKRLQARKSRFLAQQKRRTCDIEHKVSRVVVEWAKERQACVLAVGDVRDLADGKRMAAKTQQKIGLWSHGNTRQYITYKAQAEGIGMVLIDEHHTSRTCPRCGRQYKPRGRVYCCPDKACGLVAHRDIVGSVNILSRYRYGEVAKILPPPLDATKYRHPVWIPRQGKRSRLDTPELARVGTPLREAATLEVVRSVTQCRTLDAIGSSHEEWKRR

SEQ ID NO: 12171 - protein, 448 aa, Streptomyces sp.
MTSELGLAKRQFGHRARLALSPAETRVLDDQAHAARTLWNCLHSWWTMLPKEKRNLSAADEAIRQGRKDLDYLGKLPAQAAQAVLKTYFQSWKNCWDGRADAPNYKGRFRSAMTVDIPQGRDLHIVRVHRRWGMVNIPKVGRVRFRWTKDLPVGKKADADNRITGARLVKNALGWHIAFRVQALEAEPEPHQGPEVGIDAGVNIPLALSNGDHQDHGRASRLPDGTADRDKWLTPKEKAKLLNLERQAAHQKSFRKRGEKTSRRLQHTYDQIKQLRAKATRRVLDWQHQTTTHLARTYGTVVVEQLNILGMTKAPAPKPDPDNTDEFLRNGAAAKAGLNRSIAQEAWGRTVTMLTYKTARLGGRLVKVPAPHTSQRCSACGFITPCSRETQEKFACKNPDCGFVGNADWNAARNILHLHRIGHVIVEVPAAGRRGRRAGKTVKPAAAM

SEQ ID NO: 12172 - protein, 388 aa, Streptomyces sp.
MVQQVKRAFKYRFYPTDEQAAELSRTFGCVRLVYNKALEERTRAWYGEQRRISYVQSSAALTDWKKTEELSFLTEVSSVPLQQALRHLQTAFGNFFAKRAKYPRFKSRKKARASAEYTRSAFTWRDGRLTLAKMAEPLDIRWSRPLPEGARPTTATVSQDASGRWFVSLLVEDTVTAAPATGAAVGLDAGITSLVTLSTGEKVVNPKHERRDRVRLAKAQREFSRKVKGSNNGEKARVKVARVHTRIADRRRDFLHKLTTRLVRENQTVVIEDLTVRNLLKNGRLARAISDASWTELRSMLEYKCAWYGRQLVVIDRWFPSSKLCGACGTVREKLPLNVREWTCDDCGAVHDRDTNAARNTLAAGLAAAACGDGVRPQRESSRTGRRR

SEQ ID NO: 12173 - protein, 270 aa, unknown
  TnpB Polypeptide
MSRYRLLPSPGQEVVLRDHCAYARFLWNLAVEQHRHWRPGGKSAPGYLEQCRQLTATRAEHPWLASGSQMVQQQALRDFAQAMANCFGGTHGRPSWRKAGRNEGFRVVAVKPGAVRRLSRHVGQVRVPKAGWVRFRWSRAVTPGAKSCRVTLDRAGRWHVAFAAVPGPIPAPGNGKAVGIDRGVTVSAALSTGKVKPHCTSQRCSACGHVDPESRQSQARFVCTACTFACNADVNAARNIAAGHAVTARGGDGAARPVNREPHLLLQSAL

SEQ ID NO: 12174 - protein, 445 aa, unknown
  TnpB Polypeptide
MATVVSSYCTKVIGEEKIFRETIAVYRNALSFLIKVVLAEWDNGIGEIYHKSKLRANRAVEVLVHTSKSSFAKHPEFDMLFRKYPSYLRRATIAEALGAVSTYRFAHDAWAGNGKKGKEPKLQLSRSSLPTFYKDNMYAEKPDGTVLLKLYHCNDWVWVPVTLRKQDADYIHEHWAGHNASAPKLVKRNHRYALCFSFEEKVVLKSKPVSEQTILAIDLGVNTDAACSVMRSDGTVVERKFIDFPTEKDRMYTQLHRAKRGQRENGHKGGNRYMRKAVRINEDHAKKIGAAITQYAISKHVDVIVMEHLDFSGRKSKEQRLHMWRKRDIQKIVEHQAHRAGIRISHVNPWGTSRLAFDGSGWVERDKRNASLCTFPTGKQYNCDLNASYNIGARYFIRELLKPVSVTERSLLEAKVPSVKRRTMSTFSTLISLNAVLKPELVFSH

SEQ ID NO: 12175 - protein, 402 aa, unknown
  TnpB Polypeptide
VKRLQAFKFQLRPGGQQEREMRRFAGACRFVFNRALALQNENHEAGNKYIPYGKMASWLVEWKNATETQWLKDSPSQPLQQSLKDLERAYKNFFQNRAAFPRFKKRGQNDAFRYPQGVKLDQENSRIFLPKLGWMRYRNSRQVTGVVKNVTVSQSCGKWYISIQTESEVSTPVHPSASMVGLDAGVAKLATLSDGTVFEPVNSFQKNQKKLARLQRQLSRKVKFSNNWQKQKRKIQRLHSCIANIRRDYLHKVTTTVSKNHAMIVIEDLKVSNMSKSAAGTVSQPGRNVRAKSGLNRSILDQGWYEMRRQLEYKQLWRGGQVLAVPPAYTSQRCACCGHTAKENRLSQSKFRCQVCGYTANADVNGARNILAAGHAVLACGEMVQSGRPLKQEPTEMIQATA

SEQ ID NO: 12176 - protein, 361 aa, Staphylococcus sp.
VREVRQAMTVKIKLEPNKAQLELIKSSSQAYINAINTLVDEMVKAQAPTQKTTKHIDVPLNSSVKNQVIRDAKSVFKKAKKIEYKKVPILKKPIIVWNNQNYTIHHASIKVPFIVGGKSQKIEIKALISDYERNLIESASKLGTLRITRKGTKYVAQIAIETDVKEQINTKVMGIDLGIKTPAVCCTDENKVKFVGNGRENKYIRRKHNSRRKKLGKAKKLKAIKKSQNKEQRWMNDKDHKISREIVDFAIQHNVGIIRLEKLANIRKQTSKSRKNNHSLSNWSFYRLAQYIEYKANLVGIKVEYVDPKYTSQQCPKCAERNKAKDRQYKCSNCGHTDHRDLVGAKNIIHAPVLDGHSQVA

SEQ ID NO: 12177 - protein, 362 aa, unknown
  TnpB Polypeptide
MQLTYVLELLKPTKRKENIFLNNIAEVVKNRRTISDKLKAGKFKLSSSDFKEIDLPSAVKNQNIREVKALYKLFLKSDSDKDNIEFKDNQPICYNNQNYHIDDHIISIPLYTNKCERFAFPVKQTKRFKELQQYIESGWKLGKASLFYKKGKWYFAVTIKIENKETKDLNVMGIDIGLRQLAVGSVKTPQGKEINRQFHNGNQAGFIRKKYRSLRRKLGQSKKIKAIKNINDKEQRWMTDLNHKISSQLINLAVQEQVGTIIMENLENIRNTARSLNRADRNIHSWTFYQLEQFVKYKAELAGIKVKYINPKYTSQSCSKCNKIKKSNRKANLYSCDCGNHVHADLNASRNIVNKYLEQQSA

SEQ ID NO: 12178 - protein, 384 aa, Geobacter sp.
MPIKTFAYRLYPTKSQNRLLEATVETCRRFYNDCLAERKDAYALEKRSVSKIEQLRKVKVLKDSSPFARKIHSHILQVVVADLDKAFRAFFRRIKSGEKPGYPRFKGKDRFDSSGLKEYGNGYKIHGRRLKVSGIGRIAVRWHREMPSQPSIVRIIRKADGWYACFACEVEAKQLPAAGKAIGIDVGIKSIITDSFGNTTDNPKWYRAGQRRLRVLQRSIARKKKGGANRRKAVGLLQRHHLKVSRQRQDFLNKLTNGLIAENDLVALEDLQIRNMVRNRHLSKSILDAGWNYLVQRLCAKAEEAGRVVTLVNPSNTSKTCSGCGHIFERLKLSDRWITCPECRLSLDRDHNAAINILRRGIASLSGDGQSLWAPSNLKLGLLA

SEQ ID NO: 12179 - protein, 397 aa, Geobacter sp.
LQIRKAFKYRLKTSSGDESLFSRHAGCCRFFWNKALAMQKERLADGDYCLNYESLANLLPQWKQEHPFLSEAPSQALQQVLKNQDKALKEAFDKKNPKRFPNFKKKFKSVDSFRYSQGFKFEGSRIFLPKVGWRRFINSRPVTGIAKNAIVSRRGKHWFVSIQTEFEIAVPQHPSNSIIGSDRGVKRFLTLSDGKSFEPLDGFRKMERQLAKEQRKLARKVKRSENWRKQKERITQLHIRIADARSDYLHKISSEVSKNHAVVVLEGLQVKNMTASAKGTNEAPGKNVKQKSGLNRSILDQGWGEFGRQLEYKQAWRGGWVLYVPAAYTSQTCSQCNHASLGNRKSQELFVCENCGHTANADENAAINIERAGHARLACQANGAVMPSATGTSRIAA

SEQ ID NO: 12180 - protein, 392 aa, Firmicutes sp.
MIISTKIKLNPTTEQEILFWKSAGVARWSYNYFLGESERHYQEYLEGRHELKTIKEGDVRKYINNVLKKTTHTWLREVGSNVMKQGVKDAANAYKRYFEGISKKPKFKSRHINKISFYVNYETLKRVNGGFKGEKIGLVKTYQSLPKLKKGELYSNPRISFDGKNWFLSIGYECELEEVELTDVSLGIDVGVKVLAVCSDGKVYKNINKTKEVKRLQKKLKREQRKLSRKLEANTLKKDKNNRPTYKKPLRDMKNIQKQNQTIRNLHKKLTDIRGNYLHQTTCEIVKTKPSRIVVETLNLRGMMKNRHHAKSIAEQKLYEFRRQIQYKCEKYGIELVEANRWFASSKICSCCGSMKHDLKLKDRIYICDCGFILDRDLNASINLANYQIQVA

SEQ ID NO: 12181 - protein, 390 aa, Bacillus sp.
LNVKKTFKFRIYPNHQQIELINKTFGCSRFIYNYFVGKQKNKDAYWSIVNEMVQNGQLSQNNWKGEFFNKNQSIKAVRELKKTYSFLKEVDSIALQKSVEIVHDSYTRYYKKQNRLPRFKSKKNPVQSYTTKFVNGNIQVKDKHIKLPKLGLVRFAKSREVEGRIMNATIRRNPSGKFFISILAELEIQPYKKTGTSVGIDVGLKDFATLSDGTIHKNPRFFRILEKKIINAQRILSRRQLGSSNWKKQKKKVARLHEKIANARKDMLDKISTEIVKNHDIIGIEDLSVKKMLKNKDLSKGISEVSWAQFRSMLEYKSLWYGKQVIAAAKNFPSSQLCSVCNHKYKAVKDLALREWTCPTCKSSHQRDLNASINLRNEALRLTAGTAELA

SEQ ID NO: 12182 - protein, 410 aa, unknown
  TnpB Polypeptide
MKKIYKSYKFRIYPTKIQIELLNKHFGACRFIYNYYLNQRKESYLNNKKYINYYDNQKDLTQIKKLNEYNWLNKINSQSLQYSLRNLDISYNKFFRKQSKFPRFKSKKDNHNSFTIPQNIIIENNRLYIPKFKEGIKIKQYQVINNDNILFATISKSPTNKYYVSITCEIDYEPYNKTNSNIGVDTGIKDLAILSNGKIYKNIKTLKINLKKLKYNQRQLSKKIKGSNNRNKQKYKLNKIYEKITNIRKDHLHKVTTDIIKNHDIICIEDLAVKNIMKNHCLAQSMNDVSLGTFYSMLKYKADWNDKTVVKIDRFFPSSKTCNVCNYINQDLTLKDREWKCPICNTIHDRDINAAKNILKQGINTLNILSGSGIESDIKQKQVEALPLGKSVKSEINQFDNSIQYIILNH

SEQ ID NO: 12183 - protein, 357 aa, Rhodovastum sp.
MKLTMQVKLLPTAEQAASLLKTMEQFNAACDTLAAIAFSNKCANKVELQKIAYHGIRADFGLSAQMTVRAIAKVVEVYKRDKSIQPSFRPHGAIVYDERILSWKGSDRVSVLTVDGREIMPWVAGAYQHARLDRVRGQADLIYRDGQFFLYVTIDVGDVPPGDPTEYLGVDLGRKNIAADNDGETFSGAHIANLRNRHARLRRKLQKKGTKSAKRLLKRRRAKESRFARDVNHRISKAIVRKAKDTGRGIALEDLKGIRARTTVRRSQRRAHHSWSFHQLRAFLTYKAAMEGVPLVCVDPRNTSRECPCCGMIDKRNRPDRDTFRCIQCGHAGPADTTAAVNISRRGSRHAAERRAA

SEQ ID NO: 12184 - protein, 334 aa, unknown
  TnpB Polypeptide
  misc_feature (146)..(147): Xaa can be any naturally occurring amino acid
LKKARQIAEFALKTRSNTSKDVKHFGLKSIISNQILRKYGRNKRAKKVSQVNLVVPSQGISVDRALKLITIPSLKLKLCFHFSGFEKVNQIEMDEEYAYVTTTRIDANLMDNGKYIGVDLNATGHVAVASDSETGKVWKLGKEANXXALKYREIRRQLQRKGKYKKVKQVKNRQQRLIRNLNHHISKKIVQIAKLTGNGIRVEKLSNIRQRARTAKSFHYSLNNWSFYQLQKMIEYKAKLQGIAVTYIDPRYTSKTCSRCGHIGDRDGKNFECPSCGHGDHVDVNASFNIGKPVSHCVLGIGHSCKDRDLQEGSTDTPRMATPGMMATIEPHML

SEQ ID NO: 12185 - protein, 407 aa, Deinococcus sp.
VGDGQCLPLRQALSAVAEGGSLPSVRDETFVHVPRSAHAELGESTSASLPRPWRDLLPDETFTTMLSIEARRLQRFDSPAPAGRVSPLWPLPRLPLDLAVRPLDAYHIVMDGSADPIVADLWALPDDLSVALLAQAGTHAREVESRRADLMACIQGGDLGMATELYRLAHLRPSAHEDRLAGHRPDRSRPHRVDHASLVRTTDIAGRERFQIEWTLRIPHGYLPKADIDDTLGIDLGYRRLATAASAEGRWTVERRVDVREGLPEPAAHLLAELLAHAQVRRMLLDLHRTDIEALVRRALRFRQVNLERLDWPGLIAHGDVPWCPEAMALLGAPSITDWISLLAPVSGTRVELVDPSNTSTTCHRCGGRGLRPRPYTEFVCPSCGPMDADLSGALAIRRGDVASWAN

SEQ ID NO: 12186 - protein, 392 aa, Aneurinibacillus sp.
MIRAKKVYFRASKTDIDRLFACNRESALVWNECLRLAKEYHLEHKKWISKSELQKQTKGKFHLHSQSIQAVCHKYLFARDSSHQAIKKGKTTIRYPYKKKKHYNTKWAKDGFKIYPNGKIELSMGVHNGKRKKPIVVHASNLPQENIKEIELCYDNGLYLAVSFEDGQENKPYQSSHSVGVDMGEIHTLSAFCENGQALIVTGRKIRSLHRLRNKKLAEIQRLQSKCKKGSRQWKKYQRAKQYILSKSEKQLQDALHKATRNFVKWCVKQSISDVYVGNPEGVQRNTRKKKKTNRKQAQKLSNWSFGKVKDYLKYKLAQDGIKMHEVDESYTSQTCPVCRRKQRVSSRNYVCSCGYREHRDVHGARNILSRAIYGEMLPFDIPTKLKYLRIA

SEQ ID NO: 12187 - protein, 388 aa, unknown
  TnpB Polypeptide
MTAGDEGFLTLSIGMRVSPEPVVIELLHRYKDALNYAINRIIDNNLRTLKQIHGFLYKDLVERFNLPSRIALDCYRDALTNANAWRNNPKRGKRPVVKKLSMLLHPGSGYRIKDDYVEIIGGIRLRIVGWDRRYDEYNNREARLVYKRDKLFLWISKKIPKPNKYVPIDVIGVDINEQKIVYGDEIINIEKDTAINRAYRYIRLAEELQRKYSSSRYLAWRRRRGILKKIRSYHEKARNILNDWTKKISLEIIRLAKELRYAVSREDLTNLIRSLRELPKDHRTKLIIMGYSRFERWIDWQAEKNGVPYVKVDPNGTSSECPKCDYKGLVEVGYRRFRCPRCGFEADRDVIGKLNVRKRGLRKLGIIPRGGALTPLTAPQMTDAAPNR

SEQ ID NO: 12188 - protein, 352 aa, unknown
  TnpB Polypeptide
MATTFQAFKYRIYPTDEQIEVIERTFKCCRFVWNHFLERTSKIYDRRQESMSKFDCMKVLTEMRERWPWLEDCGCSAERYAIVNLFEARKAFFRRIKAGEKPGYPKFKSARCPSQSFTTAGTIYVTDECIQIPFGSQYQKINKVKRGSGRPAVGIPREVTISRSSTGKYWASVCCMVEREELPVADGEVGISLGLKELAIDSNGVHYENPKHLSKSAKRLAREQRRLSRKQKGSANYEKNRKLVAEIHEHIANQRRDYRHKISRELVNSNQLIAVEKVAVKSLVEGNEQAKSILDAGWSELTSMIKYKAEWAGRTLVDVDTATVAPEAKHDEALAQVVLSEGQRMASEQKPA

SEQ ID NO: 12189 - protein, 599 aa, unknown
  TnpB Polypeptide
MVLYYTYVMSHSTDTTKNNHDDVETSSCKFRAYVNDQQHSLLSHYLYWVQKFRNEVVAFCEERRKTRGVWLYQHPLLVSGWKALEMNAELLPESISGNDVNAASKWLTNRLEQARFKVTSVLGWNIKAPKQQLRAHVYKVWVNLSGKERKEIPDAWLLTLPRTILDQCLQDMSKTYAKALKDRSAKKNAKKLGRTNKMAGFPQFQKHSYPYSIRFQIATQQNKAYVESWNTAYTDKRKEIYIPSLGVVKFRDKQNLPAIPPELITITRNSSGQFHLTFVNKDPTSKINAKLRNVNDHVLPREEIYDSNLKAMVMVPVTRGGDVGLKTLVTYSQKLVKQQADAAKKEVERIRFFKRQEKRLRWANKSLARKKHGSKRWLKQKIKQGRIHTQTTNQRHDYLKKEAKDLVKHTAIVCLEDIFVGFMLKNKHLSKAASDASLGAFKQYIQWQAIKFGHLVIECGRFDATSKTCHACQYYYKNLTLKERTWTCPGCKIVLDRDENAAINIRQMALLKTIKGLGDEDIILWSPQKSKVKKGLLASGNGAKMLSPYPLHKDLTAFIERGGLTSLLMRNSTGESQVGESQRLLSHEAFILPKQHTNI

SEQ ID NO: 12190 - protein, 400 aa, unknown
  TnpB Polypeptide
MIRRVQLNLNNSTEFKKQKLDTFFDEYRRVVNEFISIFWNSNDISSKVNSKTYKQVNSWLLGKAMKCAGNQAIKIVKPLLKLNNNKIYKRYQKVFSKCKKRDRNIFGILSSKWSEWSVNRNFKCFTKIPEYKHDIIQLNSDLVRLQDTKNAKSFDSWLRIGSVFGNRYSLLLPTKKHKHFNKMVEQGFILKKSFELIRLNSGYYVNVYFEKKVESSKLKTKILGIDVGINKLLSLSDGRFLGKELNQLLEKLHRRKWGSVNFKQTTAEIRHYIGYCVNNIDIENYDCIVMEDLKNITKNTKGRVNKALRKKLGNWNIRELYSRISNKCELNRVWLNFVDSAYTSQTCSGCQVIDKSSRKGEVYKCKHCNLQIDADYNASLNILNRFSNKEFAVPYVHKKK

SEQ ID NO: 12191 - protein, 422 aa, unknown
  TnpB Polypeptide
MKGEICMYLTVKQQVKHLSKEEYLTIKELCHTAKNLANEAIYNVRQYYFTEKEFLKYEKNYALLKNSPNYKSLNSNMAQQILKEVNGSFKSFFGLLKLAKQGKYTFKDCKLPHYLPKDGYTTLVIGFIRLNGNKLILPFSNSFKKLHKPVEITIPPVLPDKKVKEIRIIPKANARFFEIQYIYEAECVQRNLNKNNALALDLGINNLVTAVSSNGKSFIIDGRRLKSINQWFNKRNARLQSIKDKQRFGKKPTNQQKAIARDRNNKVNDYMSKTARIIINYCIENDIGTLVVGYNNTFQHNSNIGKANNQTFVNIPYGKLRDKLEYLCALNGIVFVKQEESYTSKSSFWDKDDIPIYNADNPKEYQFSGNRIHRGLYKTANGKTFNADVNGALNIMRKSSVVDISILYGRGEVDTPVRIRIA

SEQ ID NO: 12192 - protein, 476 aa, Betaproteobacteria sp.
MVAELQRLLKTANVSPMITVDGWFGDDTKVGEDRYFRRFARQSLAHAGQFAPIDQQYSHFKTEQTPWLSEVPSQVLRNGAVLWKQAYGRYFSKLAGRPVIQRKTGEQSVWLTSELFAFKPVVDKDTGVIISHALHIGTSKFPLGQIKFTAHRAFKPAASIHISVNAGRWHVSFNYDDGQIEPSVQDTTDYLMQFTENELAAVTVGLDRGVNLPLAGSDGQSFGFSAIQDKRLQAQERHRKRWQRRQARRAPGSKNWAKAKHKVARYQRYGTDVRRDVAHKTSFNLATDPRYMLFVFEALNVKNMTKRAKPKQDASGRWVRNGAAAKSGLNKAILASTWGKTREFLGYKARRSGKLCIEVPAFYSSQECAACGHTHPGNRPSQAVFVCQRCNHTDHADHNAAAVIAKRGVRLVLSGACVHKKSKKCGILKNKVGGVTSEPMASVPSTLGETEVSRGRSNASALWSLTQETPATTLSV

SEQ ID NO: 12193 - protein, 449 aa, unknown
  TnpB Polypeptide
MHLTHRIALCPTPEQAKYFKRACGTARRVWNWALSEWNRQHAAGMRPNAMALKRQFNAIKYRDPAWLDADGKPWLKTIHRDAHAQPFAHLAQAWDTFFKDIKAGKPAHAPKFKKKGRCRDSFYVANDKFRVEGKAIRLPKVGWIKMAETLRFEGKVLGATVSRTADRWYVAIQVEVKDCDFYRKRSGDGVIGIDLGVKAIATLSTGEVIEAPKPFKRALRRIQIRTRRLSRKLTSANVQVGWKPNQPIPKGARLPVSNNRQKSAAIVARTHARVANLRADFLHKLTTNICRENQAVVLENLNVRGMMGNRRLARAIADVGLYEFRRQIAYKAKRYGTHVVIADRWYPSSRLCSVCGWNNDALTLSDRAWTCPHCGTHHDRDINAARNLERLVTATTLPEASPSSDGGAATEGVFVAVGQVTPVRYNSITESGQEEKVRTFARDFHSRKA

SEQ ID NO: 12194 - protein, 367 aa, unknown
  TnpB Polypeptide
MKKNKAFKFRLYPNSEQASFFIKTFGCCRFIYNTILFERNESYKLTGKSSSRTPAELKKEFSFLKEVDSLALSNTCNNLIAAYKNFFRDKKVGFPKFKSKKNSKKSYTTFNQHGTIKVLNGFVRLPKIGFVKCRTHREIPVDWKIKSATMSQTPTGKFYVSILCAYESNIQQIIPNKTKSVGIDYKSNGFGITSDGEILSSHRYFRENQSKLAMEQRRLSRKKKGSKNYEKQRLKVAKVHEHIANCRKDRAHKLSYYFAENYDIVCLENLNLQNIAQGLKLGKSTNDNGFGMFRVFLSYKMQDQGKYLIYIDKWDATSTVCSTCGGYHKDIVNSLAIREWVCPDCGTHHDRDINAAKNILRLGLEKL

SEQ ID NO: 12195 - protein, 417 aa, unknown
  TnpB Polypeptide
MTRQRYLTYQYKAHIRRGDYSRLDEALQRCATLYNAALEERTQAYKMQRKTVTLYDQTKQLKLIRQDMPEWSAYHYKLGAGVLVRVDRAMKAFFKRVGRGVKPGYPRYRSKHRYQTLEVSEVTTGMLKRSQDGRRAYVRIKGLPTLTLRTKRPLPEGKPKTLMISRRATGYVVSLAFAVECPALPESDTQVGIDMGVNERMTLSTGETLARRVRDRRRESRLRRRVARATKGSASRRKKVRSLSRETYRNTIRNRNACHRASTGLVRRFGRIAVEDLQIRNMTRSAAGTVEEPGKNVAQKTGLNRSINEQTWGILHNQLAYKAEYAGRELIKVNPAYTSSTCSGCGVILMEKLETYRLFVCQACGLVMDRDRNAARNIEIRAFGCSEARGKEPALSGIAPHAQLSELSPVHAERQPA

SEQ ID NO: 12196 - protein, 284 aa, unknown
  TnpB Polypeptide
MLHIRNFFKEHAGYPKFKSKHDNHKSYTTNFTNGNIAVDFEENRVKLPKLKNVKAKLHRNFSGQIKSATISQIPSGKYYVSILVETEHVELPHVNQNTGIDLGIKELCITSAGKKYENPKIIRKYEKKLIKLQRQLAHKEKRSQNYYKTKKKIALCHEKITNTRKDYLHKVSHEIISENQVVVSENLQIKNMVKNHHLAKAISDVSWYELTRQLEYKAKWNGRKYIKIDTFYASSQICSVCGYQNPDIKDLSVRTWICPECGAEHDRDINAAKNILAEGLRRIA

SEQ ID NO: 12197 - protein, 442 aa, unknown
  TnpB Polypeptide
MQIISSYGVELRKQNIPIRQTLEIYRSAVSYLIGIYVQVWEELAEIPDAKRRFNAAEHLVHTTKKNHACFDFDIRFPKMPSYLRRSAIRHALGTVSSYKTRLDLWEKTDGKSGKPRLVYENHAMPVFYRDVMYREGAEGKDEAYLKLYDGHDWKWFCVRLEHTDMEYLRKYWSGKKASAPTLEKRHQKYFLRFSYKEEVTLTKTPVKEQIICSVDLGINTDAVCTIMRADGTVLGRKFIDHPSEKDRMYRTLGRIRRFQREHGSAQTQGRWAYTKRLNTELGKKIAGAIVRYAEENHADVIVFEYLEMQGKISGKKKQKLHLWRKRDIQKCCEHQAHRKGMRVSRICAWNTSRLAYDGSGAVTRDWENHSLCTFQTGKRYNCDLSASYNIGARYFIRELLKPLPATERSLLEAKVPPVKRRTSCVYADLRKLHSEMELLKAA

SEQ ID NO: 12198 - protein, 248 aa, unknown
  TnpB Polypeptide
LPKLGEVKIKKHRTAPEDWKLKSVTITQEASGKYYVSVLYEYESQVIEQNDTDKTIGLDYAMNGLYVNSDGSCAEMPHFLRQSEKRLRKAQQKLSKMYVKGKEKQSNRYYKQKRRVAVLHEKVRHQRADWLHKKSRDLVNRYDYIGIEDLDMKGMSQSLRFGKSVSDNGWGMFVSMLTYKAEMCGKHVIKADRMFPSSQMCHVCGCISPVTKDLSVREWDCPACGTHHDRDHNAAMNLKTEALRIVLL

SEQ ID NO: 12199 - protein, 411 aa, unknown
  TnpB Polypeptide
MDRTITVQLKPTPEQARSLKATFEQHTACFNVVAREGFMTACSNGVELHKRTYYPLRAQYPDLPAQLVCAARVKATEAVKSALTWKVKQEQAYPKKVEKAKKLGKPISAFKPVRCPHSEVACIRYDQRSYWVKWDTLTCSLATVDGRIELPFTVPAHLQQYVGHKACSADLCYRKGCYTLHIVVSIPEPSIPPTTTVVGVDLGLNRPAVTSTRQFLGKKQWKEQERRVFRLKRKLQAKGTRSAKRHLKKLSGKQFRRRRDHDHVLSKQIVQHATPGSTLVLENLKNIRDNSNLGRGKQDSKKRENKRRLHSWSFAQLYSFVEYKAQARGIQVVKIDPRHTSQTCSKCGHQARTNRRSQSVFHCRSCGYQLNADLNAAHNIREKYLASLAQDGITVLSGFAVKEPIVSDLRV

SEQ ID NO: 12200 - protein, 401 aa, Rhodococcus sp.
VKRIVAIKLAPTAQEYAALYATLVACNAVATMVAEVAQTTRDRRAFAMQRLVYIACKDRGLSAQPAVRTIKKVADAYATRDSNLAKGRHGCPDSSRYRRVVSTPIAFRPDAAQPFDDRCLSWQIELSTVSIWTTVGRLKNVRFVCAQWQREHLASRRGESDLVYRDGQFYLYATIDTPDPDPITPADSRSGWLGVDLGIVNLAVTTDDDPTHLDVRWSGGAVTARRKKNLALRRALQRVGTKSAKRKLKARRRKESRYATDINHQVSKAIVAQAQRTERGIAIENLSGIRERVRLARTQRQQLHSWSYAQLRDQICYKARLAGVPVQVVDPRNTSRTCHHCGHCAKSNRPSQAKFRCHGCGWIGHADHNAAHKIAQLGHTHYRAAQSTGLKQPPVSHPVRT

SEQ ID NO: 12201 - protein, 372 aa, unknown
  TnpB Polypeptide
MIVLRAFKTELDLNNKQRTACVRHAGAARFAYNWGMARKQEAFANGGKSPSAIDLHRELNVLKKSELSWMYAVSKCAPQEALRDLDKAFANFFRRVKQKKAGRNIKAGFPRFKSKKHGLGGFRLTGAIHVFEKAIQLPRLGLLRLKERGYLPAGGVHILSATVSEKAGRWFVSLQVEMEVADPLMEERPVAGVDLGINRMAQVSDGMYFENPRALKSALTKLKRLQRVVSRRQKGSANRQKAVKQLARAHFRVANLRKNALHQATTTLTKTKSAIVLENLNVSGMMKNHHLAQAIADVGMYEFRRQMQYKGQWYGCKVLLADRFFPSTKRCSQCGNEKAIGLAERVYCCEHCGQVMDRDLNAAINLEQLLYC

SEQ ID NO: 12202 - protein, 597 aa, unknown
  TnpB Polypeptide
MKKKYTITKYIDKKHLKIFKELCSNSKSVFNCCVYSYNIFSLYKNNIYSDMFEYYKKNNNKVDQKQIFQLYFKKYYDIYTNNKQLVKTNNSFIYNFIKNNKKYVNINTTNYNKIKSTLLTKLKNKVEYNDNNKYIVFEHIIEKILISFYYKRFFIIKRQIQNHQKLDELDIKYKDILDDVKNNKSLHNEDNNYDQIKTKINELLKEYNQKELYSQQYLFKMAVYDNHLGNIEKNILPADITLNIIDKYFESIDSYYASIKKGIKANKPKFKNKDDLNNLYYFPSSFKIINNCIRLSVGDYIGKNLSNYKNINKYKNKKYYYSKNIISKKEKGLIKVEEGYVNKKSLVDGQYIYIKLPKEGRLKCCIIKPFGDIMKILFIYEKIVRKPVYEKPTVENSISIDLGLKNLMTIYNPTGTQKIIKGGKLVSLNEFYIKKIGSCKKEDLYSLHEKRKNVIYGYINKLVSKIKELYANKKNIIIGYNEGWKNKINLGKDNNRKFCKIPFNKIINELKNRLSILNINIIKTEESYTSKCDALNLEKIGPKKKYDGIRTKRGLFISKTGKAINGDLNGAINIMRKVINLREIKGEKIYNPLKIDL

SEQ ID NO: 12203 - protein, 402 aa, unknown
  TnpB Polypeptide
MKRLQAFKFRLRPGGQQEREMRRFAGACRFVFNRALARQNENHEAGNKYIPYGKMASWLVEWKNATETQWLKDSPSQPLQQSLKDLERAYKNFFRKRAAFPRFKKRGQNDAFRYPQGVKLDQENSRIFLPKLGWMRYRNSRQVTGVVKNVTVSQSCGKWYISIQTESEVSTPVHPSASMVGLDAGVAKLATLSDGTVFEPVNSFQKNQKKLARLQRQLSRKVKFSNNWQKQKRKIQRLHSCIANIRRDYLHKVTTAVSKNHAMIVIEDLKVSNMSKSAAGTVSQPGRNVRAKSGLNRSILDQGWYEMRRQLAYKQLWRGGQVLAVPPAYTSQRCAYCGHTAKENRLSQSKFRCQVCGYTANADVNGARNILAAGHAVLACGEMVQSGRPLKQEPTEMIQATA

SEQ ID NO: 12204 - protein, 248 aa, unknown
  TnpB Polypeptide
MQVRFAPRANHYIMEIVYQIDVPECIFCLNRYIGIDLGIDNFATVSNNIGLQPFIVNGRIIKSINQYYNKKKANLQSDLMIKHNKHWSNKLERLTNKRNNKVTYFLHKVSKYIIEWAFKNKVDTIVIGRNKFWKQNSNMGKKVNQNFTSIPFEVFIEKLKYKAENIGIKVIETEESYTSGTSFLDNELPIKENYNKQRRIHRGLFQSNTGELINADLNGAYQIIRKVFSEAFADGIEGVHLHPIRVNL

SEQ ID NO: 12205 - protein, 258 aa, unknown
  TnpB Polypeptide
MKEKDVGIDVGIVHAVTLSNGKTCDLDVKTIKKIEGEIAYLKRRLSLNQSSRKKLAAKGLAEEFDKRKPSRTRRRLKELIQKKYKRIRSIRQDFHRKTAHALAQEYGCVYVEDLHLRNMTKSARGTNENPGNHVRQKRALNRALQRMGLRALRTAIEEAMNKMGGMVIAVPAQFTSQRCPNCGCTDKRNRPTQALFSCVDCGYTNNADIVGSINVMTKGRMSPSAHDKKRIARAVSAEGAGDPLSASAPSAGTTRSTS

SEQ ID NO: 12206 - protein, 392 aa, unknown
  TnpB Polypeptide
MLKTYKFRLYPNKLQEKELLNTLNLCRITYNLLLSELNKEARPNRVLLQNRLPLLNKKEAQLNKVYSKTLQYEAYRLFSNLKSLAMLKKRGKKVGKLRFKQEGSFKTFTYNQSGFRLKTLPQRHHRLALSKIGDIPIRIHRDIEGVIKQVTIKHACSKKWFALMAVEYPNKELARLSKPNVGIDLGLANLIYDSDGNIISHPKYLEKSLVRLMVAQQKLCRKKKGSSNQVKQRIKVAKIYERILNQRDDYLHKASREYVNNYGLIAIENLNITKIITKSHNARNIMDASWRKFISMLEYKAESAGVQIKRVDARGTSQICSSCGKIVPKKLCTRTHKCDCGLEINRDYNAAKNILARALGQELSDFKPAESEPLSLRHVRSEKQEICNVSCK

SEQ ID NO: 12207 - protein, 407 aa, Pseudomonas sp.
MQRLQAFKHELMPDGRQERQMRRFAGSCRFVFNKALALQKERHEQGEKKLGYAGLCKLLTEWRNSPQTAWLADAPVHPLQQSLKDLERAYTNFFAKRADFPRFKKKGQRDSFRYPDPKQIKLDQPNSRLFLPKLGWLRYRNSRKTLGTVKNITVSQSCGKWFVSIQTERETDEQPTAQGAAVGIDMGIARFATLSDGSFYAPLNSFKRHETALCKAQQAMSRKVRFSRNWKKAKARVQRIHSRIGNARRDYLHKCSTTISQNHAMVCIEDLQVRNMSRSAAGTAEAPGRNVRAKSGLNRAILDQGWFEFRRQLDYKLAWRGGWLITVPPQNTSRTCPCCDHVSAANRQTQALFRCVGCGFEGNADVVGAINVLRAGHARLACEVSAEVMAPAAGTHRSDSGAARCRA

SEQ ID NO: 12208 - protein, 346 aa, Pseudomonas sp.
MIEMKATRTLKIRVRDKHAAQLREASRAVNFVWNYVKELSSRSIREHGRFLSAFDIHKYTNGASKDLGLHSQSVQAVADEYVTRRKQFKKRQLRWRCSGGARRSLGWVPLKAGAAVWKNGQVVFNKQHFKVWDSYGLAGFKFRSGSFNEDSRGRWYFNVVVEVDRQLSPGQDAVGIDLGLKTTATCSDGDRLESGRFYRDLEKSLGTAQRAGKKARVRAIHAKIANRRKDALHKFSNALVARCGVDCGGRCELTETRENQDGQVGAGRRLGPIENHAGIQMRSRRHDFQGCQREKHHPNLFELQAIAGLEAQRYRRAWNKGMDLLWVRCHPRPRRQRRKEHSRARA

SEQ ID NO: 12209 - protein, 222 aa, Pseudomonas sp.
MGIARFATLSDGSFYAPLNSFKRHETALCKAQQAMSRKVRFSRNWKKAKACVQRIHSRIGNARRDYLHKCSTTISQNHAMVCIEDLQVRNMSRSAAGTAEAPGRNVRAKSGLNRAILDQGWFEFRRQLDYKLAWRGGWLIAVPPRDTSRTCPSCGHVSAANRQTQALFRCVGCGFEGNADVVGAINVLRAGHARLACEVSAEVMAPAAGTHRSDSGAARCRA

SEQ ID NO: 12210 - protein, 199 aa, Pseudomonas sp.
MGMHLESTVPSAPNVVFLAHGSRAACNDFQRIHSRIGNARRDYLHKCSTTISQNHAMVCIEDLQVRNMSRSAAGTAEAPGRNVRAKSGLNRAILDQGWFELRRQLDYKLAWRGGWLIAVPPHNTSRTCPCCGHVSAANRQTQALFRCVGCGFEGNADVVGAINVLRAGHARLACEVSAEVMAPAAGTHRSDSGAARCRA

SEQ ID NO: 12211 - protein, 356 aa, Pseudomonas sp.
MTEMKATRTLKIRVRDKHAAQLREASRAVNFVWNYVNELSSRSIRERGRFLSAFDIHKYTNGAGKDLGLHSQSVQAVADEYVTRRKQFKKRQLRWRCSGGARRSLGWVPLKAGAAVWKNGQVVFNRQHFKVWDSYGLAGFKFRSGSFNEDSRGRWYFNVVVEVDRQLSPGQNAVGIDLGLKTTATCSDGDRLESGRFYRDLESALGTAQRAGKKARVRAIHAKVANRRKDALHKFSNALVARCGVIVVGDVSSLKLAKTRMAKSVLDAGWGQLKTMLEYKCDHAGTVFKVVSERDTTQTCSSCKQLPDSRPRGIAGLGIREWTCCGCGATHDRDVNAAKNILALGHERPVVGIPAL

SEQ ID NO: 12212 - protein, 127 aa, Pseudomonas sp.
MPCTSSATRWSRVVASIVVGDVNSLKLAKTRMAKSVLDAGWGQLKTMLEYKCDHAGTIFKVVSERNTTQTCSSCKQLPDSRPRGIAGLGIREWTCCGCGVTHDRDVNAAKNILALGHERPVVGIPAL

SEQ ID NO: 12213 - protein, 272 aa, Pseudomonas sp.
MSHGASSSKSVSYAGAARRSLGWLPFKVGAAVWKNGQVVFNKQHFKVWDSYGLAGFKFRSGSFNEDSRGRWYFNVVVEVDRQLSPGQDAVGIDLGLKTTATCSDGDRLESGRFYRDLERALGTAQRAGKKARVRAIHAKIANRRKDCLHKFSNALVARCGVIVVGDVNSLKLAKTRMAKSVLDAGWGQLKTMLEYKCDHAGTVFKVVSERNTTQTCSSCKQLPDSRPRGIAGLGIREWTCCGGGATHDRDVNAAKNILALGHERPIVGIPAL

SEQ ID NO: 12214 - protein, 356 aa, Pseudomonas sp.
MNHTRTLKLRIKDKHAKTLLAMAREVNMVWNYCNETSHRAIRERHQWLSGFDLQKMTNGLSKCDGVQIGSPTVQQVCEDYAKARKQFKRSRLNWRVSNRSSPKYSLGWIPFKARALQYKNGQVQFAGFRFGLWDSYGLSQYALRAGSFSEDSRGRWYLNICVQIESKPCIGTAAVGIDLGLKAAATTSEGQVLVGRQYRTLEQKLGIAQRAGKKARVRALHARIRNRRKDAQHKFSTALVERCAAIFVGDVASAKLVKTQMAKSTLDAGWGQLKTMLEQKCQRAGVVFEVVAERYTTQTCSCCGSISTSSPKGRAGLRIREWTCVCCGTAHDRDVNAARNILAAGHRRLAVGIHAL

SEQ ID NO: 12215 - protein, 143 aa, Pseudomonas sp.
MVCIEDLQVRNMSRSAAGTAEAPGRNVRAKSGLNRAILDQGWFELRRQLDYKLAWRGGWLIAVPPHNTSRTCPSCGHVSAANRQTQALFRCVGCGFEGNADVVGAINVLRAGHARLACEVSAEVMAPAAGTHRSDSGAARCCA

SEQ ID NO: 12216 - protein, 424 aa, Pseudomonas sp.
MYWRRISIGAPPQLEAKQDGDQRTPLRLSQGWKSPNCLRSSLDDTLLSEATRFDNATHGLKDQTIIHAMNHTRTLKLRIKDKHAKTLLAMAREVNLVWNYCNETSHRAIRERHQWLSGFDLQKLTNGLSKCDGVQIGSPTVQQVCEDYAKVRKQFKRSRLNWRVSSRSNPKYSLGWIPFKARALQYKNAQIQFAGFRFGLWDSYGLSQYALRAGSFSEDARGRWYLNICVQVQSKLCIGTAAVGIDLGLKAAATTSEGQVLIGRQYRTLEQKLGIAQRAGKRARVRAFHARIRNRRKDAQHKFPTALVERCAAIFVGDVASARLVKTRMAKSTLDAGWGQLKTMLEQKCQRAGVVFEVVAERYTTQTCSCCGSISTSSPKGRAGLRIREWTCVCCGTAHDRDVNAARNILAAGHRRLAVGIPAL

SEQ ID NO: 12217 - protein, 318 aa, Pseudomonas sp.
MYWRRISIGAPPQLEAKQDGDQRTPLRLSQGWKSPNCLRSSLDDTLLSEATRFDNATHGLKDQTIIHAMNHTRTLKLRIKDKHAKTLLAMAREVNLVWNYCNETSHRAIRERHQWLSGFDLQKLTNGLSKCDGVQIGSPTVQQVCEDYAKVRKQFKRSRLNWRVSSRSNPKYSLGWIPFKARALQYKNAQIQFAGFRFGLWDSYGLSQYALRAGSFSEDARGRWYLNICVQVQSKLCIGTAAVGIDLGLKAAATTSEGQVLIGRQYRTWSRSWASLSVLARGHVFAPSMPGSGTGAKMRNTSSQPPWLSAAPPFSLAM

SEQ ID NO: 12218 - protein, 385 aa, unknown
  TnpB Polypeptide
MTKKVNRGYKVRIYPTEFQRDIFDQTFGCVRLIWNYSLMERKEIYELYKDYPVLYKSHKYKTQADWKREFSFLKNVDSQALATTQQELLSAYNNFYKKSHKHPIFKSKKSNKNSYTSHTTNNNIRIENNIIKLPKVGWVKLKNKRKTLMDSSIIKAATISKKSSGKYYVSLRLEIEQEVKEIDSSVTKSIGLDFSLNGFYVSSEGKKANYPMFLHVSLEKLAKYQRKLSKKVKGSNEYIKQKLKVSKLHEKITNQRNDFLHKQSRYLVNNYDIISAETLDLEAMLQNKYFSKKIIDISYHKFLSYLKYKCEDEGKTFHQVDMYYASSKICSACGTKKKTLPLSQRVYSCECGNVIDRDINAALNICIEGIKTFYTKEDRITSIAW

SEQ ID NO: 12219 - protein, 421 aa, unknown
  TnpB Polypeptide
MHQAFRYEIDPNDRQRTHLVKHAGCARFAYNWGLARRQEVFKQTGSSPNAIVLNRELNVLKAAELPWMYEVSKCAPQEALRDLDRAYERFFTEIKAAKAERRQTKVGPPRFKKKGRSRDSFRITGAIRVGQKWVQLPRLGKLRLKESTQKMRGRILGVSVSRLADRWFVSLRVEVLRPEPEFRTGATVGIDLGLLSFAVISDEEQPVQGPKALDSGLRKQRRLARCHSRREKGSRNRKKSARRLARHHRRVANIRRDFLHKLSTRLAKTKPVLVLESLNVAGMLGNRSLARKIADSGWGEFRRQLEYKARWYGCRLRMAPRFFPSSKTCSGCGAIKGEMALSERVYSCEVCGLEIDRDRNAALNLARLVAASSTETTKTPGGEAVRPAPRRRASEKQEPSRKCAVVTHAQVSGNGTPLESF

SEQ ID NO: 12220 - protein, 427 aa, Desulfotomaculum sp.
VIELARKKKSSSNVPMQTLTARIKVLNLSDQDALLLGLLGFFATKLWNVANHHRCIVWDETGKIPGFAEQCRELKGNRWYKLLPSQSAQEVLGEQDDSYRSWYSHRKNGDKKARPPGFRKKDMLSTVTFKQKAFEILPDNRAKLKLPKTYGRWEIILEYQLPPDTALGKVQQVKLVYKHKTGDWYLHITHKVPIKYRETGNIMSLDLGIVNIVAGLITDGFSFTVPGGELLAIDRYFQKEKAKCTKSTSKKCVELNVKWGRQHNHYLHVLTKWLVNLAITHNVFTIAVGELKGIRTDKNWGDVGNQKLHAWPFSKIISLLTYKAALAGIRVVKVSEKNTSTTCPVCSKRVKKARVHRGLFIHCKQAFNADLVGAYNILRRYLRETGLGSCLDWSGVVGALARPAVNLFVWRKTTPLGRGQGTFKQAS

SEQ ID NO: 12221 - protein, 242 aa, Clostridium sp.
VGWVKTSEQIPMNVKYTNPRISFDRKYWYVSVGIEKENQILELTNESIGIDVGIKDLAICSNGMTFKNINKTRLVKKLEKRLRRLQRKISKKYELNKEGRKFVKTSNIIKLEKQIRLLHRRLSNIRNNYLHQTTTKIVKTKPSRIVIETLNIKGMMKNCHLSKAIAQQGLYGFKRHLQYKCNFYGIEFIEADKWYPSSKTCSKCGHVKSKLSLSERTYICEACGAVIDRDFNASINLSRYSA

SEQ ID NO: 12222 - protein, 417 aa, unknown
  TnpB Polypeptide
VSYPVRGEEPVVIEALKVRALPEGSCDRLLEFLILYRDAVQMVVDRVWSLDTKLSKKKLHRLFYSDLMSMGFRAHHAKEVYMYAKSLVESARGNGGRKPVLRRLSARVDRYDYRLDLDSMTLTLKLHSGYEARLKLVTSRERVERFRGWSNYELVVKYDKGEFWVSIYFRRAVKPLKPRTVMAIDLNFDNVTLAIFALSGRLLKLKRFKTPHRRILTHRIWIERIQERYPRSWRFIKGVRRAIERHGKRIRSISWDYAHKLGDLVAELALKYCSLIVLEDLEKLKENGKGDREFNKRLGLWFYRRIQFCVEYEAKERNLEVVKINPRGTSSKCPGCGGKLVEDGHRVLRCRKCGFTGDRDVIATVNLYRRYVFKYSRCGVPGVAPNAPEPDEAPSGVRGNGYEVMKTTSSYMNLYES

SEQ ID NO: 12223 - protein, 378 aa, Anoxybacillus sp.
MYITTSRQGNVMRIHKSYKFRLYPNLKQEELIKKTFGCCRFVYNYFLEKWDRTYKETGKGWSYHTCSSQLTQLKKEWVWLKEVDSTALQSSLKHLADAFSRFFKKQNDPPRFKSKKNQVQSYTTKYTNGNIAVLEKHIQLPKLGLVRLAKSREVEGRILSVTVRRNPSGKYFVSILVETDVHPLPKTGSAVGIDLGLKELAILSTGERFENPKWLRNMEQKLIRAQRTLSRRVKGSSNWYKQRIKVARIHEKITNTRIDYLQKISTQIVKNHDIIALEELQVSNMMKNHSLAKAIHEVSWSQFRTMLEYKVKWYGKQVVVVSKTFASSQLCSCCGYQHQEVKHLNLREWECPSCGTHHDRDQNASINILKEGLRLLSC

SEQ ID NO: 12224 - protein, 412 aa, unknown
  TnpB Polypeptide
MTIIQQVEKHIIKKSHPYYAMFCEFTHQSKNLYNHANYLVRKEFLETGKWLRYQDLDKILRQDLDYPDYTNMPAAQSAQQTLRLLDTNWKSFFKSIKDWSKNKEKYSGKPKLPKYKPKDGKLVLIVTNQQIKEKEDLLTFPKSFQGFKLKPRCVTLTNFEKINQIRIVPNNQVFCVEIVYSVSIDDTLLSDNGRYMSIDLGLDNLATVVTNTGLQPIIVNGKGLKSINQYYNKVASHYMSVAKQMNNQHYTNRLYRLTQKRNLKIEDYLHKVSRYIVDFAIENQINTIIVGNNKNWKQSSSLGKVTNQTFVSIPHQKLIEKVCYKAKNCGIQVILTEESYTSGTSFLDNELPQKDFYNKKRRVHRGLFVSNEGIQINADVNAAYQILKKVFPNEFSDGIEGVVLHPVRVDII

SEQ ID NO: 12225 - protein, 495 aa, Eubacterium sp.
MSAGYAITTYKIQLNYKHLDWFKQTQSLFDAVLAFYYKLLEKQPEVLSLSNQNLLRHLELQTIKQRDGTQPETPLPFEKIPLYFRRAAINAAISMYRSYVGKLKAWEDKQMENRKLEMENVRTESQRDSEMNQIGQADLPQNLPPATFNLPPEPVKNPVENHALVVPQSGSNKQKGRPSPPKHLHMSMLYYKGMYKDFADGSIMLKLYTGKTWAWVKHRYTGRPFPKNAERMSPTIVIKKKKVMLHIPVKEIVEDSRTAKERVKQNEKFVAVALTGSDSLAVCTTIEADGRATAPYFIKGGKELTHRRKLLLGYSKRGIVGNKALSLMTQPIGNAALSVPQEHRPNKKYYDKITRLTNHYAHEVSRKIVDYAIKQGAKLIVLPELKESFDQAKKPYLGKTPYDFIGRRIARYVQYKAWQQGLVAMNSKPYYASTRCYHCDAPIAKHNTEYQNPSANFYGGKNFVCKKGHRGSTALNSARNLGKGFYERFYAGSAL

SEQ ID NO: 12226 - protein, 414 aa, Pseudomonas sp.
MQRLQAFKYELMPTGEQQRQMRRFAGSCRFVFNRALALQQTNREAGGKFIGYVAMAKQLTAWRNCAETAWLKDAPVHPLQHALKDLESAYKNFFEKRADFPRFKRKGQGGSFRYPDPKQIKLDQANGRIFLPKLGWLRYRNSREALGELRNVTVSLSGGKWFVSIQTRREVKVPLPQGGAIGIDMGITRFATLSDGGFYAPLNSFKRHEMALRKAQQAISRKTKFSRNWKKAKARVQRIHSRIGNARRDYLHKTSTAISQNHAMVCIEDLQVRNMSKSAAGTTKTPGKNVRAKSGLNKAILDQGWFEFRRQLDYKLAWSGGHLIAVPPQNTSRTCPCCGHVSADNRQTQQRFACVECGFEENADVVGAINVLRAGHARLACEVSGAVMPPAAGTHRSDSSRLDAGMSAVGIPRL

SEQ ID NO: 12227 - protein, 232 aa, unknown
  TnpB Polypeptide
VVPYPAQCDIETPSGDGVVALDPGVRTFLTYFSETDCGKIGQHAFGHIQRLCHWLDDLISCTTTEPNHQRRRRMRRAQARLRQKIINLVDELYWQAARWLTSTYRIILMPTFETQDMTARAGRKIRSKTARMMLSFRHYEFKRRLRWKAWQRGALVLDVNEACTSKTRSWDGGIRGNLGGAAVIRDNSGFGMDRDVNGARGIFLRALGDSPFLRGLCAQVASQTTLASSNVV

SEQ ID NO: 12228 - protein, 322 aa, unknown
  TnpB Polypeptide
LCKVCIQRQKKYKNYINSHQAQAEADAVYKGVEKVLFEDGRHLHYRRYNSFDCIKQKCAATGVRLLRWDTICFMKHYYKVRVPKNEYIQNIISSVDLKEDVVYSFLKRIEFNSGFKYYVVITLRGDAPKRIKLSKDGGHRTGVDFGTSTIATVSNNEVHLEELAPESAKYEKEIHHKQNLVDASMRKHNPENYNKNGTIKKGKHKWKTTRRCRRLKRQIRVLYRKQSAYIKTSHHTFINRVVQNTSEFILEPMNFKALQKKSKKTKRQDKAVSIKQKDGSSKMVRKYKRKKRYGHSIKNRSPGLMQADLKTKLHSMEYHTTK

SEQ ID NO: 12229 - protein, 270 aa, unknown
  TnpB Polypeptide
LYPGNVLKEDHYFTREEYQTEGETGPSKRALKARRKLSRRKDHFLHPLSKHIVERYVEEGVEKIAVGDLSDIREDENGDSRNWGQSGNKKLHGWEFDRFARLLEYKAEEHGILVDRVDEENTSKTCSCCGQIRDSNRVERGLYVCSSCETTMNADVNGAVNIRRKITQSPPTGDMSNGWLAQPGVFLFDRESGTFNTREQGDCKLYYPNAERTGGSRCTRIFDSLDSGFLRLKPEVDVNSGSRLETPTRSAYSSGVVVMIRQPMPHSPLL

SEQ ID NO: 12230 - protein, 392 aa, unknown
  TnpB Polypeptide
MFVLEAKLRGSDQQFAIIDEMIRTAQFIRNMCIRHWMDNRGVGQYDLSALCAVLAKEFEWANKLNSQARQAAAERAWASIKRFHDNCKNPSLRKKGYPKFKKSRSVEYKTTGWKLSNDKMSITFTDKFEVGTFRMVGATDLNSYQLEQVKRVRIVRRADGYYVQFCIKHERTEEIAPSQKVIGIDVGLLHFYTDSAGDTVENPRHLSQSEKALKRQQRRVSKKKKGSNNCKKAIKRLGRKHLKVSRQRKDFAVKLARCVVHSNDVVAYEDLKVRNMVKNRKLAKSISDAGWSQFFDWLQYFGACFGKIVIAVSPQYTSQECSQCGKVVKKALSERTHICPCGCVLDRDENAALNILAKGLRIASTAGHAGINASGHINLCQLSENLVDKLGG

SEQ ID NO: 12231 - protein, 389 aa, unknown
  TnpB Polypeptide
VLCYRFRVYPTATQAKDLSVTLDVCRRFYNGLLDERKAGYENGHTVTKTEQLRRVKELKAVGLPLFVHSHVLQVVAADLDKAFQNFFRRVKSGDKKIEKIEKIERTPGYPRYKGQDQFDSFGLKQYANGFKIDGRRLEISGIGRIAVRWHREIIGTIKTVRITRRAGKWYACFACELETEALPQTGEAVGLDVGISHLLATSDGEFVENPRWYRAGQKDLRRVQRSVARKKKGGRNRRKTVLQRHHERVKNRRKDFLNKVAHRLISRYDVIALEDLRIKNMVRNKHLSKSILDAGWNYLTQRLEGKAESAGRRVEFVPAAYTSKTCSRCGAIFENLKLSDRWVECECGLSLDRDHNAAINILCRTRLGHSRWASTQGTGLSVVQEAVGL

SEQ ID NO: 12232 - protein, 380 aa, Enterococcus sp.
MKLKGIKIKLKPNQKQKNQINLNLNLRRFVKNQMLAMQQARYENGGKYTSKFGMIYCLKMLKQEFPFLKQAESTSLEYACADLDQAYQRFFKGQNDRPTFESRKRPHNSYKSKCINQNIQVVDNHAIQLPKLGVVKAYGLNRIQGKIKSAVIRKESTGAYSATIQVEHEPNEWTKTGNKIGLDLGLTDLVIQSNGFKLKNKKFERSLAKKRRIWERKLARRRAQAKLKIEEARNAGIDLEMSSFKNVEKARQMVAKINRKSSNQREDYLQKYTTTLVKEFDVIVMEDLKTKNLMKNHHLARSIADSAWGKIKSMLAYKCDWYGKKLILVPPHYTSQNCSNCGENTGKKPLHIRSFTCPNCGTHHDRDINASINILNKAFA

SEQ ID NO: 12233 - protein, 423 aa, unknown
  TnpB Polypeptide
MQLTERHLIKPNHELYATLDDLTFKAKNLYNHGLYLYRQSYFEHKKNPDVPTLTWVDIDKSLRKQGDVDMRALPSKVANAVLKNLGENITSFWKLVRLKNSGKLTQKPTLPHYLHKTDGRYALSFNYQTFGAKRGTNNELFLCPKGINLPIPTKIANPKQVRIVPSRNNFIIEVIYDAEESAPKSTSKYAGIDLGVDNFATITFTTQNKPLIIKGLELKSINQGYNRLIAKAQELLPAPCKTSKSIRRLWSRRSWILRTKIHQMTAFLATLFDEMQIEKVFIGKNAGWKQKMPFGKKVKQRFAYLPYETFIEQLQYKCQLRGITVITQEESYTSKASFLDNDDIPVYGETDNPKFSGRRVKRGLYHAGNGQLINADVNGAYNIMRKGLMNNHLSLQMGSPLIHPLVVKGVGTEPNNKLVKLYM

SEQ ID NO: 12234 - protein, 421 aa, unknown
  TnpB Polypeptide
MIILSYEFKLKPAPEQIQAFDQWLEVCRRVWNHALRERKDWFNSRSCEINACSLHHEYIIPAFAPRPTYALQCKSLTAAKKVYPDLKVPHSQVLQQTLKILETAFVSMWERGFGFPRFKKLGRMRSFVFPQMDSSCLVDRYIALSKIGKVEMILHRPIPEGFDLKQARIVKRASGYYVMLSLQCDVNVPTTMPHGEPIGIDVGLNAFVATSEGELVTRPRFYVERLRELKLLQRRLKQKKKGGKNWYKLNCRIALLHEHISNIRKDWHFKIAHHLCNSSGMIFAEDLNLKGLARGMLSKHILDAGWGQFLNILSWVCWKRDVYFAKVNCNGTSQTCPRCGANTPKNLSMRVHLCPECQYQTNRDVAAAQVVKKRGILSISTEGQSGNQQNVCGGDIGLGNPLKQKSLIAMLGSPRYIALSN

SEQ ID NO: 12235 - protein, 395 aa, unknown
  TnpB Polypeptide
MKQVITYNTRIFPKNKENFQLLLDTMLEHQKVWNYMSHYTYKTKNINKKLIHDSNYYKCRKLFPKCPSQIIIRAKDSVYATYKAIKSNKQFSKMKKAAKQENLSIRLDKRIYTFLPDNQIKLTTIGKRIVCDFTPYDKLQELLSTYTLCDPLIFYKDNQFWLSMSFEIPTPIHIENSYLGVDLGIRRMVTTSEGKAITDKQFLKHKRKLRYLKRQLNSKAKTTNSHSAKTKLKKIKRKEHNSNKNLCHHLANDILETHSNTIVMEDLSSLKRNKLGKKKYLSSKSSKNKLSQMPFYILLQMLNYKALLKGKKVVTVNPSYTSQDDYRGLERGVRKGCRYYASDGKVLDADWNASINIAKRYSRKKEAKGVKHPISFNEPLDGKLNLMGRLMSTNH

SEQ ID NO: 12236 - protein, 414 aa, unknown
  TnpB Polypeptide
MKIISSYGVELRKQNIPIRQTLEIYRSAVRYLVEVYESVWEELVKIEESKKRFNAAEHLVHTTKRNPARFDFDFCFPKMPSYFRRAAVQHALGSVSSYRTRLEQWKAEGQKTGKPYLKSEQYAMPVFYHDVMYRENTEEKDAAFLKLYDGHDWKWFAVRLKHTDMEYLRKHWSGKKASAPTLEKKHDKYFLRFTYAEEVALNRTPVKEQTICSVDLGINTDAVCTIMRPDGTILGRKFINFPSDKDRMYRVLGRIRRFQREHGSRQVQGRWAYAKRLNTELGRKIAKEIVFYASENKAESLISYAKQFIGNKYVWGGTSLTNGTDCSGFTLRVFQKFGYSLPRTSAEQAGCGSSVKLSELKPGDLVFYKRGGRVHHVAIYIGGGQIVHAAGAKWGIITSNMNYSRVSHARRILK

SEQ ID NO: 12237 - protein, 453 aa, unknown
  TnpB Polypeptide
VKILSATVSEEAGRWFVSVQVEEAVPDPIAATGEPIGVDTGIKTLAQCSDGIAIANPKALRSELKRLKRLHRRLSRKAKGSKNRAKARLRLARKYARVKHARHDALHKATSRLTRARLTPEERAARQQQLAATLPAPKARVEPRKGKRSQATKTTEAPSLPEKVAEQVKKKQLKRLLRQTTGADAILRPRVVVLEDLNVEGMKRNRKLARSISDVGLGEFRRQMTYETLWQGETLHIVDRWFPSTKKCSACGNVKSVRKDLEQIAALVQRKGFGHLEMVSNGIRLAREPDFADNGSRFSIGRCAHFPARGYTAPDDAFCAIEHALSRLQVVGGAFRICFNCNRWPYRLVAFTANLRSQVRKIFTGDQAYFVRSSSFNAIGGFPDQPLMEDLEIITRLRKIGKFVLLPQYVTTSARRHEKIGLVRSVLFMWYLRTLYKFGTPPAELQRKYLDVR

SEQ ID NO: 12238 - protein, 352 aa, Paenibacillus sp.
MPQTITIQIRIYPHDQAILVEMGNTYIQTVNKLTEQAEMSGMFPKLTSKNLSVNLPSAVKNQIIRDAKSIFKKVNKLKKRPILKKPVYHINNQNYTIGENSVSFPVFMDGKVQRLVVPAHIPDQERTLLSDSKNGLLRVVQKSEKWFVQVAIERPTMQTTGDVVMGVDLGLKVPAVSVTSNGKTKFYGNGRKNKFIRRKYLSHRRKLGKLKKLSAIRKMCDKESRYMRDQNHKISREIVNMAIKQNVSIIKLEKLTNLRKTTRQSRKNAKNLHNWSFFQLQMFITYKAAIAGIKVGQVNPAFTSQTCPICGQLNKAKDRTYQCTCGYQAHRDRVGAINIMYQPVIDGNSLSA

SEQ ID NO: 12239 - protein, 436 aa, unknown
  TnpB Polypeptide
MKLTGDLKALETSIKLYREALRTLIPIIDDGWEMLSGYGFTKQKYNCIENWVHNTKTNQALFDFDKKFPKFPSYLRRSAIGTALGIVSSYRSNLANWEQNPKGQAPQLSLTHYAYPAYYKGNLFRNFDPVRQTIELKVFKNGDWVYEVYRLKTSDCTYYQNYLTGKKQNVPIIQKKGRRFYATFSYEENVSLVPEESIRKICAIDLGLGTDATCSIMDQDGTVYARKFISFSEEHDRLHTQLGRIKRNQKRGSRHNKTLWRKVAGISQDIADKTVKAIIDFGNAHGVDVFVLEHLDFKGKNIVKRAHFWRYKRIYKVLSHKAHQYGLRVARVNARYTSRLAFDGSGWSKRGREITSDTPYALMQFVSGKIYNADLNASYNIGARYFIWHLLKTVTATQRLALEAKVPQVAKRSTCTLSHLINLRSEFVALAAKTQA

SEQ ID NO: 12240 - protein, 393 aa, unknown
  TnpB Polypeptide
MRAYKTEIHPTQAQIELIHKTFGCTRYIYNQYVYENLENLASGKDFVSAFSYSKRVNNDPNTPSWLKEVPSKAVKQALIYAERAFKDYFSKRKGKPKFKKKGTNDSFYLIGALKVERHRIFVPVLKWMRLKEFGYIPKKISSVTISMKNERYYISCLCKEEKDERITLSKEPMGIDFGLKDQFITEDRIISSINRSLRIKKLEQRLRREQKRLSRKIEANMIEKVYYQRGAKKGQLKSFRWGKPLSECKNIQKQKKKVAHIHERLTRIRTDYNRKALLSLVLERKPSSITIENLSVRNLMKNRHLSAAIMKAQWYQSRLYLENLCNRLGIELRVVDRFCPSSKLCSTCGFKYKDLKLKERFWTCSNCGSEHDRDRNAAINLGRCKTYTVLTTV

SEQ ID NO: 12241 - protein, 424 aa, unknown
  TnpB Polypeptide
MYQGAFSLCGTRKLTNMKKTYQYRAYPTTQQRSTFVLWLALLRNLYNQALAWRIDAYQKNNDSVKWTTQANALPDLKAESKAYAGLHVDVLQDAMRRLDKAYKAFFRRVKNGAAPGFPRFKGEGRYRSMTFSHLSKHLVRNVRRKFAKVVVPKIGHLKIRYHRPLPDGKIKNLTIIKRASGWYVTICVEVPDPIEVPVHTTIGVDVGLNSFAVDSDGEHIPNPRHYRQSEKRLGKHQRVLSRRKKGSRRRAKQREIVARCHEQIANQRNDFQFKAAHRILERCDEVAVENLTITNMLKNHSLAKSISDAGWGNFRLKLQNKAASAGKQFTKVKPHHTSQQCSGCREIVPKQLSDRVHDCPRCGLVLNRDHNAAINIKKAAVALRGGASVANDPEIPRQGTEARNSVRPVGRTLQTSTVPSGRGN

SEQ ID NO: 12242 - protein, 446 aa, Oscillatoriales sp.
LYCLTATKTDSQGLVVTLFDGCASKTIANSWFSVEQSYLQNENSLKISLPSSTYSVADSTDSGNTNLVSKKIRVYPETKLAAVWRTWIAASRWCYNQAIATLKTQKIGKYDLRKQIMDAAPEWIKQQPYNPRQLAVFQAFEAHKAAKKSGGSAKFRTLRAPSQTIRFQTDNWKTDTFYPQATKGLNFKSAEPIVEVMQHEPSLSLINGQWFISYAIDEVKPAPSNSGLVIALDPGVRTFMTGFDGQEILEIGKYDIGRIYRLARHLDKLMSRVGHSKGRSFKRLRYCLRKAASKIRIKIKNLVSELHKKTAKYLCHKYKVIFLPTFETQQMVKKGKRRLNTKTARAMVTLSHYKFKQTLKHQAAKYGCAVVDVTEEYTSQTCSKCGRVHTKLGGNKYFTCPSCGHKLDRDLNGAFNILLKALRDTSLTGIITDFQVSDILRMIEYP

SEQ ID NO: 12243 - protein, 417 aa, unknown
  TnpB Polypeptide
MITLTYEYKLKPTKQQVEQIDHDLEACRRVWNYALKERKDWIASRKCPVNACSLHGEYIIPADEPYPSFKVQCQRLTEAKRLNADLASVNAQALQQVLRRLDQAFDRRKKLGAGFPRFKKPGQMRSFSFPQLGKSPLKNGAVKLPGLGWTAIRQSRPYPEGFVVKQARVVKRASGYYVMLIFQADVTIPEPSLVGHVIGVDVGLEYFLSTSDGLQLNRPKFFVDLQRKLKLLQRRLKRRRIGSANWKKAQLKVARLHEQIARTRKNFHFKAAHQLCDAADVIVIEDLNLTGLSRGMLGKHILDAGHGQFLNSVLPWVGFKRGKAVVKEKAAGTSQECPACGETVRKNLSTRWHDCSCGCSMPRDVASGLVLRNRFTGGGAHRLQNAPGEVLAGVSFGASSQDSVNGESPAIREALAG

SEQ ID NO: 12244 - protein, 312 aa, Okeania sp.
MRCRSGAPQQALRDLERAFKNFLTIPKRGFPVFKKKGRKDSFYLEGSIKIFQGNYIQLPRIGIVKTYEILPSVPVKNITISKKADSWYISFKYNFESYPTEKVGETIGVDIGINTLATCSDGTKFANVKAYRQAKKQLVRHQRAVSKKVIGFLRNATQTKNRRKAVKKLAKVHKKADATPRRRQSQGNAHQAVADIRADALHKLTTWLAKNHSTIVIEDLNVSGMLKNHKLASAIADCGFYEFKRQLTYKCEWYSSELVIADRFYPSSQICSNCGHQQKMPLHLRTYKCSECSFEADRDLNAAINLKNYVNQ

SEQ ID NO: 12245 - protein, 217 aa, unknown
  TnpB Polypeptide
LQKNGEYTATILFEYETQALEPVRPVHIVGLDYSSHGLYVSSDGERADYSRFYRRMEPRLMREQRRLSHMVKGSGNWVKQKRRIAKLAAKVGNQRADFLHKTANRLAARYDCVGVEDLDMKNMSQSLTLGKSTMDNGYGMFRTMLAYKLERQGKQLVTVDRFYPSSQLCSDCGYRNKDTKDLHIREWTCPDCGVWHDRDVNAATNIMHETRRLMQER

SEQ ID NO: 12246 - protein, 395 aa, unknown
  TnpB Polypeptide
MLHNISKIVYNYFLYHTFASKDSSMLKAYKYRLNPTSEQISLMERTFGSTRFIYNWALQTKIEAYQDDKKSLTAVDLCKKLTDLKKQEEYTWLNEVSSECLQQSIRNLDQAFTRFFREKKGFPKFKSKRGSRKSFKNILNVHIDFDNNRIKLPKLGWVRFYSNQVFKGKIGTVTVSKSPTNKYYVSILVDNGIKLPGKSPINPDTAVGIDVGIKTFATLSNGSVFENPKYLERSSTRLRCLQRRLTRKQKGSRRREKARLAVAKAYEHISNQRHNFLHHVVNNILGENQTVVIEDLNVEGMMKNHNLANSIASCSWSEFFRILSYKSDWKGVNLIRIGRFEPSSKMCECGYIYRDLKLSDRIWTCPSCGAVNDRDLLAARNIKKFGLEKQNLLTQ

SEQ ID NO: 12247 - protein, 364 aa, unknown
  TnpB Polypeptide
LNKAYKFRIYPNSEQQIMFAKTFGCVRFIYNHMLADKIKHYEETKQKLNNTPAQYKNEFDWLKEVDSLALANAQMNLQTAFNNFFCSPKVGFPKFKSKKSNRRSYTTNSVNGNIKISNGLLTLPKVGKIKLKQHRQIPSDYVLKSVTVSQTPSGKYYASILYEYENQVQQITPQTFLGLDFSMHELYKDSSGNEPEYPRYYRKAENRLAREQRKLSLMQKGGNNRNKQRVKIASLHEKVANQRKDFLHKQSRQIANAYDCVCIENLDMKAMSKSLHFGKSVCDNGWGMFTTFLAYKLAELGKQLVKVDGFFASSQTCSVCGYKNTETKNLSVRVWDCPNCGTHHDRDVNAAINIKNEGMRLVAA

SEQ ID NO: 12248 - protein, 386 aa, unknown
  TnpB Polypeptide
LDYENQLDVINAATASVWGECLELKKMWDYAHGYRTGAKLDMPCELWMDKHLSKSQPLHSQSIQEVRARYFKNRKGYRELRKNGHTKAKQPYKDKIFQTTTWKKSAIHFKGNTLFLSNGRHGDPLKVKLPKNFDLKYAISHIAIVELVYNNGQYSLHFVYNVGKPVKSKAKGIAGVDIGEIHPIVSYDGDRVMIFNGRYIRSLYRLRNKVIASFGTKIDRCKRGSKRHKALIRRKWKRIRQIDNQITDGLHKHTTDFVKMCKEKYIGTIVIGDLTGIRNRIDYGKRANQKLHQWAFGKVTELITYKAKALGIKVELINEAYTSQTCPKCGNRKKTNNREFKCKCGFTYHRDGVGAINIRQKYIGRLGVPIRKTILPPTGVRLEGRQ

SEQ ID NO: 12249 - protein, 407 aa, unknown
  TnpB Polypeptide
MRLVRTKRLKIQRQSIFSEINAASADVWRECCDLMDMYQWRRGYGHAHMDFYIGEDCEGWVDKNLSKSQPLHSQSIQAVRASYFKSWASYAVLKKTGGIRKPKPPNKKKKYRTTHWKKSAIRFYESGLLGKRVLLSMGAGRPRLDIKLPKNFDMSTNHLIATIELVYDYGQWELHFTYYETIEKPEAGNGVIGIDLGEVHPMVCFDGQVALIFNGRYIRSLYRLRNKVLAGFNAAISKCQRHSKRWWKLTRRKWKRIRRIDNQIKDGLHKHTRKLMDECEVRGIGTVVVGNLTGIRDHIDYGKKSNQKLHQWPFAKLINMITYKAKALGIKVKHINEAYTSQTCPKCGNRKKPNKREYKCKCGFTYHRDGVGAINIRQKYLGCLGVPVVAHMAAPQGFRLEVPVALT

SEQ ID NO: 12250 - protein, 355 aa, unknown
  TnpB Polypeptide
MVKDSEPYKEIGSNVGQGTLRMLDKAWKSFFEGMKGWSKNPSKYLGRPKLPRYRPKDGRYVLSLDSNKVKLKDGYVYFAWSPFKLFNNRFKTNAKERILQCRLVPKGSHYIMEVVYEIEIPDYSDTSERIVAIDVGVDNFITMVNNIGENPIAIKGGAIKSINQYYNKRKAEIQSELKKVNKKDWSKRLQKLSDKRYEMIKFHMHCISKYIIDWCVTHEIDTIIVGHNDNWKQANIGMQNFTYIPYELFSHMLNYKSENAGIKYIENEEVYTSGTSFLDGEEPCKNNYNKERRIYRGLFISNKRVKINADVNGAYQIMKKVFPDVKFINGIEGVGLHPTIIKYFGNVNGMKMSIN

SEQ ID NO: 12251 - protein, 203 aa, Burkholderia sp.
MILVYRYRVKSLNGLLNKQSRAVNYVWNFCNDTQKHALKWSKKWPTGFDLNVLTTGSSKELGIHSGTVNATCEQYAKSRSQHRRPLRRFDYIAVGNVSAKKLAKTRMAKSVYDASWSSFRNKLRYKAIAHGVTFEEVDESGSTQSCSSCGSKDSTTRPKGIAGLRIREWVCGGCGVLHDRDTNAALNILRCGRASPGVGILSL

SEQ ID NO: 12252 - protein, 362 aa, Lysinibacillus sp.
MLKAYKYRIYPNKEQRIFFVKTFGCVRFVYNKMLADRINSYKESQENIDKSIKYPTPAKYKVEFPFLKEVDSLALANAQLNLDKAYANFFRDKSVGFPKFKSKKDNHRSYKTNNQKGTIYIDNGYIKLPKLKTMVRIKQHRLFQGLIKSVTISQAPTGKYFASVLVEENEQLFPKIDTRVGIDVGLKDFAILSNGKKYENPKWLRKAEKRLAFLQRSLSRKKKGSKNRNKVRLQVVKLHEKIANQRNDFLHKISNEITNENQVIVIEDLKVKNMQKNHNLAKAISEVSWAKFREYLDYKAIWKGRDLIIAPKNYASSQLCSCCGYKNKEVKKLNLREWTCPECNSHHDRDHNASLNLLKLAM

SEQ ID NO: 12253 - protein, 519 aa, Thermocrinis sp.
MFISLQFKLELKKEDKEKLIKLMRKQSSAIRVAYNMLKELEKEKTKNPHAQIYQRLRQLFPDLPTRYIDSAIYKAKQYPTDKPVVFGGKRLFEKLCKNHLIGKTRERLKKQWRELRQGTLISIGSKADKGNRLTRFEDKEGRLHLRITTGNREFIYAKVLREPSNSKDKWLTFMAMLLESWQTKNYFPYTVELKLRDGEIYGSVSFEIPTPEVKYTKESGVIAIDTNASPIHLAIAEVSKTGELLSYQAISLHHLLGLSKNAKDHQEWILANKIVDLAIQKGKAIAIENLKKLKKGMRGDGKAELRKILHHWNAKKLLQKLKRVAMLKGVGVIEVNPAYTSVIGMLKYAPQLNIDKDIAGAYVIGRRALGFKEDVPENYERLLKDKAYLEFALKRYEEREKDLRELIEKESNEYKRNALRSELKSVENGKNILVNLIQSLQSESSSCEGAYGRNPKQGRGNFASSVAWQVLKVALLFPILGKVLPRDLSPLKPLLVEGVWDRVRYSKGLVPLEAGGTSR

SEQ ID NO: 12254 - protein, 411 aa, unknown
  TnpB Polypeptide
MKRAYRYKLKPTMRQQRLLLQHFGCCRFIYNWGLSRKMEAWTKEKKSIGYLQLAKELTLLKNDGEHKWLKDVANESLQQSLRNLDNAYTQFFKAKKGFPKFKSKKHSKNVCKFINNVRFDFDKWKVRIPKMGWTKICLNKAFDLSKCKIGTLTVSQDKCGEYWCVIIVEDNKPCKPKAKVCEETAVGIDLGIKDFAILSDGTKYGNNKFLEKGQIRLRKLQRRFSKAQKNSKRRERLRIKAAKQYRRISNRRSDFLHKLTTCLIRKYDTICLENLNVQGMMQNHHLANAISSVAWNEFVRQLAYKAEWNRKNVIFIGRFEPSSKTCSCCGYVKKDLTLKDRNWVCPKCGTSHDRDVNAAINIRNFGLHPQAQVAVENKIPEVTGINTDGEGNDTSHPMKRQDNKSCEPITG

SEQ ID NO: 12255 - protein, 456 aa, unknown
  TnpB Polypeptide
LVTLKVKYETGNSQRILEYIKNYNSVYNSIFNFLQKQNKKVSTKDAFVFIRSLNNIFISFSFKDSALRDARQTLEVVKNKKIIFGGKKLFLNRIKNLVSKEEFQLRKLRPLQVIGIAKTKGNCKFQILSENQILFKPCKKEHFILNLGGVGKNYQKKLKALILAQEKRELPITYKLDLEYIYISFDETKIEKINTKSKLKSRIFAIDMNPNYIGWSVVDWKNENRYFLIKSGVISTKNLNDYENNLSVPSDSLEKKYIVNKRKFEIIQIGYQLSKLANYYRCEIFGIEDLKIASSDKERGREFNKLVNSQWNRTLLVHILEKNCKLYKIHFQKVLANYSSFLGNLVYREEKLPDMCLASIEIGRRAYEFYHQYILKDKEKVKNIIFDKLENVKDRIAKSLEEFDYSDTFENLSDLYYKLKKRKCNYRFSLEDALKMHQKSFSSLKHSKSYCTFVVF

SEQ ID NO: 12256 - protein, 399 aa, unknown
  TnpB Polypeptide
MKLVVKYRINPTPEESEVLQKLGTYATKLYNTDNYIRREEWAKTGKIPNWYKQKKRLKNNHWYKLLPSQTAQGVIKSLQDAYNSWFKLRKTDEDAGPPMFRKNNRLSPLTFYQQFVIEGDVITFRMSKKFRKETGVDRISFKVNKWRGIEGIPKMCNIIFQDGKWIVHVVYEVPEKPLNNNPEIMAVDVGIVNLATTVDTNGNSTIYSGKGALSVQHYFNKEIVKVQSKTKKQHNKKWSNTLSRMCEKKKRQTNQIIHTVTKEVIKEAQRNGVGTIVVGDVKNIRKGKHWNKKASQKLHSWGFAKLISQIEYKAKLSGIQVKKVSERDTSKTCSICGMVKASNRKHRGLYVCECGNKMNADVNGGVNLLKKYLRENNISRSIGSVVEPSIWRCVNVIPS

SEQ ID NO: 12257 - protein, 254 aa, unknown
  TnpB Polypeptide
VVAEQQALLQPFCPEVAPDAKALRRLERKLDRQRRANNPANYDERGRVKKGRKRWQVSKRQRTVQARRREVYRKLAATRKRSHGQLAHRVLALGNTFQLEHLSYRAWQRTYGKSVQCCAPGMFVERLSRLAASAGGTIVPINAWRARLSQTCHCGRIKKKARSERWHTCACGASAQRDLFSAYLARFVDPDTSLLSAGQAHAAWPGWEPTLQAAYERAIQNQPARGRRLPAAFGRPPVGPSQSGSLAQGSCSRT

SEQ ID NO: 12258 - protein, 351 aa, Paenibacillus sp.
MQTLTIQIRIFPSNPSVLVDMGNEYIRTVNELTEQTEASGTFPKLTSKTVNANLPSAVKNQLIRDAKSIFQKSKKEKKRPILKKRVYYVNNQNYAIGDDSVSFPVVMDGKVQRLVVPAVIADREKTMLSNSKHGILRVVQKSAKWFVQVSIERPTEQAEGDVVMGIDLGLKVPAVVVTSSGKTKFVGNGRKNKYIRRMYNDNRRKLGKLKKLSAIRKQRDKESRYMKDQNHKISRQIVNMAIKENVSVIKLEKLADIRKTTRTSRKNAKNLHNWSFYQLQMFIAYKAAIAGIKVVEVNPSYTSQTCPSCGQRNKAKDRTYQCTCGYTAHRDRVGAINIMRQPVADGNSLSA

SEQ ID NO: 12259 - protein, 372 aa, unknown
  TnpB Polypeptide
MLLTLQLKLVPNDQQKVVLLKTMEQYNAACNYISEVAFESRTFGKVGLQKLVYYDVKGDFGLSAQMVVRAIGKVSESYKVDKKVQHKFKPHGAIQYDQRNLTFKTMDTVSILTLEKREKINFVCGNYRELDLERVKGQADLVYRDNQFYLLIVCDVPEEEPINSDKIIGIDLGIVNLATTSEGQVFSGDLCKKVRQKYQKIKSTLQSVGTWDAKKHLKKLSKRERRFKKDTNHCISKNVVQYAKGTLSFIALEDLSGIRDKVTVRKAQREEHSKWAFAELRQFIQYKAIIAGVKVFLVDPRNTSRQCSVCGYIDKKNRKSQSEFFCLECGHTENADINAAKNIAQRATVNLPIALCSSERLKCKPTTLVVGY

SEQ ID NO: 12260 - protein, 372 aa, unknown; identical to SEQ ID NO: 12259
  TnpB Polypeptide

SEQ ID NO: 12261 - protein, 375 aa, Mycobacterium sp.
LARHFGARRKAYNWTVATLKADIDAWQATGIQTAKPSLRVLRKRWNTVKNDVCVNIETGVVWWPECSKEAYADGIDGAVDAYWNWQNSRSGKRDGKRMGFPRFKKKGRDPDRVTFTTGAMRVEPDRRHLTLPVIGTVRTHENTRRVERLIAKGRSRVLAITVRRNGTRIDASVRVLVQRPQQPKVTDPGSRVGVDVGVRRLATVATADGAVLERVPNPRPLDAALNELRHVCRARSRCTKGSRRYRERTTEISRLHRRVNDVRTHHLHCLTTHLAKTHGRIVVEGLDAAGMLRQQGLSGARARRRGLSDAALGTPRRHLSYKTGWYGSQLVVADRWFPSSPLVPIVENLPRLRACPRDRMGRALAMRFVLGIASA

SEQ ID NO: 12262 - protein, 246 aa, Moorea sp.
MVVVQNLQNRHLNGKMVRSILLNAKNLYLFALCRQLPINCEPTTVTVNLDPSNRWHISIRFNDHRDLILPTTDKQVGFDLGITSLITTSNGDKISNPKHFKKLKKKLAKYQKALSRKQKGSNNCYKARLKVAKIHAKIKDARKDFTHKLTTQLVKENQLIVFEDLAVKNMVKNRKLAQVISDANWGEIIRQVKYKSQWYGRKAVSIDRWFPSSKLCSVCLNRVESLPLSIREWDCPSCNTRHVRVA

SEQ ID NO: 12263 - protein, 468 aa, Moorea sp.
VYKTVPVRANFSDEEKAFWEFQCQQANNLFNSAVYYSRQKHYDWLKQQPEAYTTYWRDDLLRQGWKAYKCSVKYSELCRELKESPNYKAMAAQSAQQTLKTVAESITGYNQLVGLYYKGQVDKPRLLRYRKKGGLSAVTFPRQALTYKKGLFYPSVSKESKPEMLTEINLEVPGFIDPDWVKEVTIRPCYGQLWIDWVIDDGRQPLKENKNLDYSQAWSFDHGVTNWLTGVSTQGKSLIIDGRKLKSMNQGYARLVAKYKSGKPDFYWDSNLDRVQRKRNNQMRDGINKAARFIVNRCLSDRIGNLIIGWNEKQKNGSNMGRRSNQNFVVIPTKRLINRLEQLCPEYGIKLTITEESYTSKASFLDDDPLPKYGEKPNGWKPSGCRVRRGLYKTSNGYLVNADCNGAANIARKVATQLGVDLTKVGSGSLTLPHRYDLFNSVSRSYRTSCEAVRVYPTASHPCRIPLF

SEQ ID NO: 12264 - protein, 448 aa, Prevotellaceae sp.
MISIAHKIELKPNNKQKTYFRKAFGCARLAYNWGLAEWKQMYEAGEKPNGREIRKRFNAIKKEQFPFTYEVTKCATEQPFAHLQRAFDKFFVDLKKGKVSYPQFKKKKDNEGSFYLQADKIILSEVNKNSKAFAKIEHNRSVKHQYIHLPNMKRGGWVKMAEHIRFNYSKINNVIISQSGGKFYASFSLEITEEEYHRTHQHVELINKDRKVGIDVGIKSALILSDGIAIDNPKPLKKNLRKIKRLSRQLSKRSHPRTKEERLKGVKKSNNYMKLSVKLAKTQGRVANIRRDFLHKVTTILTTHYGEIAIEDLNVKGMTKNHRLAQAVNDVAFGELRRQIEYKASTNGVKVTKADRYFASSKICSVCGEKKEDLTLSDRTFCCEHCGAILDRDYNASLNLLGLIVNHKIGKDYPESTPADLTALLSRFSVNGIATSKVETGKQHKSYV

SEQ ID NO: 12265 - protein, 428 aa, Pseudomonas sp.
MINGIRCRAYPTPDQQKVLAQWIGCARVIYNAKVAEMEYFHTFRRKALGVGPMPEIDQAYSQFKDVELTPFLSDVPSQLLRNASFQFMTAWQRHRKGLAFRPAHKQKGRRDSVLLTSELFRFDDRGVLNIGTFRHKVGDLKFGAHREFKTPKTLVISRKADRWYVSFCFEDPALVEARSPENILTDLSHLTPEQLTEKTWAGDRGVREMLHGSDGQVFHLSTDAIAKHKRREQRKKHLQRKLARQKKGSSRRYKTKLAISRISNQQAEVRKDFAHQVSRTLVNNPAIQVFTFEDLKIANMTRRAKPKQDEDGQFLPNGAAAKSGLNHSILQSCWGNITLFTHYKAARMNKACIKVPAQFSSQTCSQCGHTSAENRSGKRFLCTGCGFACDADFNASLVLQGRGVSYVLNQDWKAKAAPKKVAFRKKHG

SEQ ID NO: 12266 - protein, 416 aa, Pseudomonas sp.
MKRQQAYKFRLEPTFEQRILLKKFAGCVRVVWNKGLALQQSLHTEGRKKLGYAGLCKELTSWRNSQETPWLAEASVDIEQQILKDLERAYTNFFEKRADFPRFKKKGARDSFRFPQPKSIKLDQSGEKILLPKLGWLSYRKSQKVEGLVRNCTVSLKAGHWYVSIQTERTVAPVRHPAATAVGIDAGIVRFATLWDGQSEQVIEPINSFKKHEHRLAKAQRQMSRKVKFSSNWKRAKLRVQKIQNQIANVRNDFLHKTSHSISKNHALLCVEALQVSNMSRSASGTLEAPGRNVRAKSGLNKSILDQGWGEWRRQLDYKSAWQGGWLVAVPPANTSRECPVCGHTCAENRKSQSVFLCVACGHTENADTVASKNIRERGLKLFEGQDIGRIVCEVNGAVRPSAAGTRRSEQAADAA

SEQ ID NO: 12267 - protein, 504 aa, Pseudomonas sp.
MDEISLPYGVSQEASIPNLIRSFCFPMILDAKQVKLLHQVLALGHEIRETVVAERIKNRDDNRLLRQAGGSPVYVNLTEQRRSIAALMKADARFKLIHSQVAQDQCERIDKADKHWLKSLKTGDKRAKPARHRDRKFFRSVTYPQYGNGVRLSAGKVWFSKLGTFRLHDYQKVPGIKKTVSIVWKQGKFWAVFTAQQAAEKWFEPKSEWQDKPTVGGDFGLKSLLTLSDELVFDPPRRLKEAFQRLRSIQKSVSRKFEARERAWVVDQALAKASGKPLTALRDYPRSNRLREDIKRLAKAHTKVERCRGYDHAKIASILQVEYSQVALEEHGVQFMIRNSRMAKSASDRAIGNLKSRIKSTLAPERIFLVSTTDENGGGNSQTCTCGAAVPKTLRDRIHACASCGRTGDRDVVAADRVHVRTFGQVTQGRRQRSLPASHDAGKRGEHKSEAIDRWPGESPTRGFQVLDEAQTSQASWAKEHTSGGKPTEVDKTSLALASKSLSP

SEQ ID NO: 12268 - protein, 374 aa, unknown
  TnpB Polypeptide
MKRTISIKLLTSQDQGRKLENLQKTFAEACNAIVPQAVGNKCNNRFKLHHMCYYDIREKLPMLGSQMACNAIHKVSTAYKTLLSNRPKLKKEDWPAISYGSRSSIHFDKRTFTLRGNAVSLFTMEKRIRAEMKLGNFQKAYMEKGTPKEAELIKKPKGWFLNLVLEVPDAEPAKTGGVLGVDLGENNLATTSSGKLFDGGKLSHERDKFLNLRKRLQRNGSKSAKQLLQKVSGRESRHVRHVNHEVSRKIVAEAVRTGCSTIAMENLTNIRKRIKAGKRVRSRLHRWAWRELQDFVEYKAKAAGIQVVYVNPAYTSKTCSVCGNIGVRQKHRFSCPICGRLAHADLNAGLNIASLGPTAVRSTGAVNHRHVEAV

SEQ ID NO: 12269 - protein, 410 aa, unknown
  TnpB Polypeptide
MSNGRLFKRAYRFRFYPTPEQESLLRRTVGCCRKVYNLALDARSRAWTSERRNVTYVQTSAMLTAWKKTGEYSYLNEVSCVPLQQTLRHLQAAFSHFFRQTGDYPTFKRKSHGGSAEFTRSAFRWDAERRELTLAKMHDPLPIRWSRTLPRKAVPSTVTVSLDAAGRWHVSILVEERIDTLPKNTRAVGIDLGVKDFAVTSDGETIGNPRHYRRLAEKLEREQRALSRKTKGSSNHRKAALKVARTHARIADMRRDFLHKLSTRLIRENQTVVIEDIAVGNLTKRCEPKPDPDNPNRWLPNGQSAKTGLNRSIMDAGWSEFRRMLEYKAEWYGRRLIIIDRYYPSTQICSHCGAKTGPKGRGNLDVRAWTCPACDTRHDRDGNAAENILAAGLAVSVCKDGRTKTVASQE

SEQ ID NO: 12270 - protein, 409 aa, unknown
  TnpB Polypeptide
MSYRIHTYIVKPSHQWYNEIDFLSYLSKNLYNASLYYERQTYFNTNKFPQYFELNNTFTHSNQVDYRALPAKVSKQTQKAVYHAIKSFLALKKNQDLYKKANLPRYLDKIKGRYPVFYEKGALSFVKKGFIKLSQTSIEVPCKLDKTVVQQVRLIPCTGYYKIEILYKKKIKSRKQLKQPERFASIDLGVNNLATVTSNVFSPVIINGKPLKSINQYSNKQIAKAQALLPHDVYTSKHIAFLYGKRYLKIQDYLHKAGKQLVNYLVSQTIDLLIIGKNNGWKQNTNLSKVNNQKFVQIPYNRFTQILEYLCEEQGIEVVYQEESYTSKASFLDKDEIPVYGDEEIPLFSGTRIQRGLYQTAEGFLINADVNGSYNIMKKYLENNAAWNNQKWLDCVEVCSTPSVILVSY

SEQ ID NO: 12271 - protein, 411 aa, unknown
  TnpB Polypeptide
VQLVEQHIILNTDLRFDVIDQAAFLSKNLYNAANYLVRQAFIFQNTYLPYPKLDKLMKHSPDYCALPRKVSQWVLRQVDHDWCAFFASSQAYRENPAAFMGRPKLPKYKPKATGRNLLTYTIQALSRRGLKRGVVQPSGLAIEVPTQKTVQQVRIVAHKTHYTVEIIYAQLPQAAENLNPDWCAGVDIGLDNLATVTANQPGFTPVVVNGRPLKSINQYYNKRRAELQARLGVGVSSKRLERLTDRRNRRTHYELHLASRRIIQHLVQAGIGTLIIGKNDGWKQQIELGKRNNQNFVAIPHARFIEMLSYKAELAGLRVRVSDESYTSRCSFLDLEPIEKRESYLGRRVHRGLFISAQGRRIQADVNGSYNIIRKEAPCAFDAAGVEGAVVRPVRLVLTKPRIRKRGHVYK

SEQ ID NO: 12272 - protein, 312 aa, Lactobacillus sp.
  misc_feature (290)..(290): Xaa can be any naturally occurring amino acid
MDVMLKALKIEYPWLKQAESTSLQRVNRDLDDAFQRFFNHSLQNGFPRFKSKKNTNQSYTSKFVNNNIRIVDEHHIKLPKLGLVYFKAGRILNGKIRAVTVRVNSRKQYQASILVESENQTFKKTKKSVGIDLGLKSLTITSDGQKEDILKVDDGLNKQLRIWERKKSRRYENAKKAMAFDEHDKVLFPRTDLKQFPRYQQAVRTVAKLKKHIAERRRDNLHKLTTRLVKDYDTIVVENLSVKNMMKNHHLSASIANASWGTLISQLKYKCAWYGKKLIIIDPKNTSRIXLSQRKTLTKAILLNLSIIIFEL

SEQ ID NO: 12273 - protein, 414 aa, Coleofasciculus sp.
MLEERFNWWERNRHSVNACMIFVTHLPELKDQPSYYSQKRANHWSRESCKHLYDGVHSQVIQEAIKRVEDTFSRFIKGDLNGKRSGKPRFKSVRRYRTFAIPQLKPDCLAVTSNPHRRKNGSTRRDIAYISLPKVGQVKLIYHRPIPEGFTIKAALVSRRADGWYIILTLEDKAVPTLKSPKIEATEENSLGLDVGLEKFWTASDGEVEPIQQHYRKSESKLTKLANCKDSKPHKSASRRKLAKKLSRHHQKLQRKRKQFHYESATILVNRDEQVFFVEDIKPGNLSRKNKTKQDENGKYLPNGQSAKSGLNKSIADAGWGQFLSILAYKAAKAGKAIVKVKPHNTSQVCSCCDRLVQKDLSIRIHKCLCGLILDRDWNAAINIKRVGLGIFPTIKRPKRSRKAATKEAYTIPV

SEQ ID NO: 12274 - protein, 418 aa, Desulfomicrobium sp.
MSKATRNCTLRLYPTAKQVRQLESWLELHRLLYNQSLAERRDAWREEKRSVSYNEQQNALPAMKAEKTWYLPLGSHALQETVRRVDRAFKAFFRRLKSGQKPGYPRFRAKDRFDSFTYPCVAGWKLTELGGGRGVLVVSNLGHIKLRGTCRVNLLGLDRKQMTCCTIRRDRDKWYATITYSTTLSVLARPVAKDPESMTGLDAGLQSLGVLAEGARILRKRHFDEDAAKIRTASRSVSRKKKGSSNRRKAVRELSRIHERVANRRKDYLDKRAARLVSTTAFLAVEDLAVKNMMAKGGKRKRGLNRTMADAALGRFLAMLGSKAEEAGCEFVRVNPKGTTQECSRCGTTVLKDLSVRVHDCPHCGLVMDRDQNAAINILFRGLALAGREPSEVWRGVRLGPQAEQPCRSTKPRLCSNA

SEQ ID NO: 12275 - protein, 279 aa, unknown
  TnpB Polypeptide
MNNVFTITTELKLNREYNQLVVKYISDYIELFNKIQRLTFQVEYSSKTNQFYFRIRKEIDLENEKFVYGKFYFHNKKYTNLLKNLLRTKESSLTYRIKIKDNRVFLQIIYNFKHNKDLCITRNNYGVVGVDFNKGFVSVSETDKYGNLINTFNINYQYSKGNQTSNDFQYIATKLKDYCLNTGKDLVIEKLNFKKKKDGLISKKGKKYNEMLSSLAYSKFDSIITSKCVKNRIFLHKVNPAWTSWIAKQKYCPKMKLNIHSGASYVIARRGMSLTDKIK

SEQ ID NO: 12276 - protein, 381 aa, unknown
  TnpB Polypeptide
MKTAYKFRMYPNKQQEASLGLTLDTCRYLYNQALADRKNAYEQESISRTYEDQAARLVAEKKDGNFKGVFSQVLQDVLRRLDKSFKSFFRRVKNGETPGYPRFKGKGWYKSFTYPQVGFKLDGSKLTLSKIGSIRIFKHREVEGKIKTCTIKKDNLGHWYAILVSEVEDVSPIEPKTAIGVDVGLKSLVALSTGEAVEYPRYYVQAENKLAVAQRNLSRKKSGSANRLKAKAKVAKLHQKIQHHRDEFLHQVSRMIVDSADLIVFENLNISGMLKNHNLAKHIQDHAWGKLIQFAQSKAAKAGKMVELVDARYTSQKCSQCGIMVPKTLADRTHLCPNCGLEMDRDINASLNIRTLGLRGRAYQDPTPTLCKSSKQVRSMT

SEQ ID NO: 12277 - protein, 417 aa, Ktedonobacter sp.
MDRTVRIQLHPTPEQAKALEETIAQFTQAFNQVCAYGWEHQEKNGVRLHHETYRDTKVSCPGLVSDLIIQARVKATEALTSAFTWKKKHEDSYARKVEKAKEKGYQIPQFKPVKGPQSEICPPRYNIHTYTLDWKKQSARLSTVVGKMSISFTVPAFSAKYQGNGIATADLVYRNGKYWLHVVVKVPEPDISPAEEVIGVDLGLNRPAVTSERRFLGNSQWKEIDRKYFRIRRKLQSKGSKSAKRHLKKLSKRQARFHRDCDHVLSKRIVQNAHPGSTIVLENLKNIRENSKIGRGKKDKNVSTKRRLHAWTFAQFYDFIAYKAQERGIQVVKIDPRHTSQTCSKCDHQHRSNRKSQSLFLCKNCGYCLNADLNAAYNIRKKYLASLGTTLASGLPSHAAYRSDSSESGTSSSPSRG

SEQ ID NO: 12278 - protein, 527 aa, Oscillatoriales sp.
MTKYVTPREACKILQVSDKTLRNWELADKISAIRTPSNQRRYDIDSVLGTGHDRITAIYARVSTRKPKSSKTSEADSTLKEKRCLPFWDKSCQEISQQLCKTIANSWFSAETSCLQNEKWLKISLPSSTSLAVDSTASENTNLLSKKIRVYPETKLAAKWRNWIAASRWCYNQAIAILKDERIGKYDLRKKVMDSAPNWVSEQPYNPRQMAVFQAFEAHKAAKKAKGIAKFRSRFDTSGTIRFQTSNWKFGTFYPTSTLGLSFKTSEPIVEVMQHEPTLSLINRQWFICYGIDEPKLKPIDSDLVVALDPGVRTFLTGFDGNDFIEIGKNDIGRIYRLARHLDKLMSRIGTNKGGQFKRLRYCLRKSAAKIRIKIKNLVNELHKKAAKYLAAKYKLIFLPTFETQQMVKNGKRRLATKTARAMVTLSHYRFKQMLKHQAAKHGGVVVDVTEEYTSKTCSKCGHIHAKLGGSKVFKCPECGHTLDRDKNGAFNILLKALRDTSLTGELAAFSVLPYTVIPGLVRDLPG

SEQ ID NO: 12279 - protein, 490 aa, unknown
  TnpB Polypeptide
MSDSVVRNYKYRLYPDAETETWLSNILFQARCMYNDMIVTHRNTQDLRLRVLGYTWEYDREAKQRAYTPHFPTQEHWNIVIDQFKKDVMQQLWKGAGFQEARKNFYGQSLLPEHTATYMIDRIVAGHEMYRTKRNQGDKKVRRPHRTKRADEFHSVRYTLGRGATYQTLSKGWGELRFTHRGRTLCTVPVRTHDQKERPLFIENTSTMTLYRARRGKVVHDENGNFISESGGEWYAIFATRKPVDDEIVHPYRDRAIGIDMGLAYLYMGWNGDQAQPYAAVDFYDRVHRKRKRLQRRINKGKKDTDGYLLSNAFQTQYWRDTKRQIAKLEAEVARQRDYDLHVATSRITDDYGIIILEDITPQFMIANKHLARRAANAAWAKFKQMLTYKAEEKGCTIVYVNPAYTSQTCSVCGCINKENRVSQSRFVCQDCGYTDNADVNAAKNIRTKGLELISLNAEVWVGSEALGENEARLEQALSKSNSHHWISQR

SEQ ID NO: 12280 - protein, 420 aa, unknown
  TnpB Polypeptide
MLDRLTARHTYCTWLFSKLIEGRGVDVRGFGGFTKQDMAEIRENTKLNSAYVQQCRDQALWMWRSYRTQHRDWQRQLKHAKGKWRGKLLKREPRQPFHDGPTRKVPARIDVRTGIVVSSKHMKLSPYVLCLSTFSKNHRIIVPLNPAKYHLDLLGKGGIVDFQLVKHEGCYYTHVCVKYDVPDRAVRSVLGVDLGIRRAMATVLLKPDKPLHREDLSILTDNQKKRHLDLLTRRVAMLQEARKWEPLKRLRHKRIHVAEYFDRIGAIHVAEMAAAEQSMVAVGYPKSIKYEKYRGNGERRLRRMLQQRFPYNRRIQYIQEECAERGIRAETVLEAWTSKTCHRCGSTNTRRSTQSLFWCLDCSLQYNADWNSSINIGSVFLPAALSRRAAEGLAQAGEDSAYKPMSPEAETIVDTATSNR

SEQ ID NO: 12281 - protein, 376 aa, Leifsonia sp.
MVPVMLNNADFRRVHDACHHAGLIWNELVSFQRAFWEQNHADPGWKAFYAHLDTLDPAIRGMHSQTQQAIVADLEDAVATYRKNKAQRIKSRAPWRQKQYRPLSFTTQGWRVAADGRLFLSMGRTRKPILLPLPAITDPTTGDDVASSLWGEIRLCWDRQARSFSLHIAVPTKRPPKLDPSKTIAIDPGIINPMTLAVQTDTGFAVTVINGRAARAIKHRRNTAVAALTSKMSKATKDSNRWRKLDRARKRANAKAASSLRNIDHQVTRRAANMAITHDTGDIAVGMCAVSNSAPGRRRNAGSGDTSAAGSRNGPAAPRKPIWPRKPTPPCVMWTSTTHPRPVPRASHATGPPAGTTDATSAGSPATVTLWAPSTF

SEQ ID NO: 12282 - protein, 477 aa, Leifsonia sp.
MSQKVRIVGWKLHGRPYLGDDTDGAAQFGVDPDAVARWLSDAHRTRFNQSRSRRSKYVYTDGVRALDAEGEPVLVPVGGSVTDWTHAQARTECSWLAAAPAMLLHAAQRQEEKSWFAAAKRRSTNLQQGRPAGKMPQFRARKHSPAAFSLFARNGTDVVVAFQRTGKKSGMVSFGGQNPSGKVAAGFGARWKVSIRVRLSQPIRPFTSINVNLDTRELVFTSPVPPRNHIRTGAIVGLDLGVAKDVATSDDGFFTRPDVTTLVKKRKAAQKAMNRSRLQAGKDGRRFWESKRYQQRKATAAALSAKIARIGEDFRHQTTSKLVDGYDLIVIEDLMVRNMTRSAAGTITNPGTRVAQKRGLNRGLASAAPAQIRSMLEYKAAAAGVTLLAVPAHHTSQQCNPCGHIAPENRESQAVFRCTQCGHTAHADTNAAANIRDRGLKLWGQDLAPRVRKRQTVTAYAATAVPARPRKPPTTIK

SEQ ID NO: 12283 - protein, 422 aa, unknown
  TnpB Polypeptide
MKVNRTIRYRLHPGSARKNQQLHGTAGACRFVWNHMVGKLKDDYEYYGECNFYYMSTKTIPTQGLGRTFTVLRRHSYKWLQGYSAYIVKSSLQPIETTYREFFKDVEAGGKLNRKPPRFHGKWTTPPSFPINYVSAKVSGDSLYVQKVGWMKMAGNNPYPDGEFKSGRVKCECGNWYAYLTYEVQAEASLPHSIREVGIDRNVSDGNWAVLSDGTRHGGPDLEKKVARRKRYQRKLARQVKGSNRRKVTKLRLQKAFRAERFARLNWAHHVSKDIASRYDVAYIEKLNIRGMTKSAKGTKEKPGKHVKAKSGLNRQILASAWGTLEVCLNYKAEVRKVHPAYTSQTCHQCGHVDKKNRKGTEFKCTECGHADDADVNAALNILAFGNGATGRGGGDTGGASCHSRPVKRQEMGNESLADFAT

SEQ ID NO: 12284 - protein, 398 aa, unknown
  TnpB Polypeptide
LAEITVVKPSNRQLYKACDELCFLSKNLYNAVLYIQRQNYQEGKSYIKEWDMNKLLQEQKNPDYYALNTMSSNYVVKQVDENFKSFFSKLKSKKEGRHNQQVNPPSYKDKIKGRNVATFYKQRLSTKTYKKEGLIHLSKTTIKFKSKIPFEHIQEVKVVPKNGYYELHVIHKVEETKQIVSNNVAAIDLGLNNLATIVTNTSSPMIVNGKPLKSINHDWNKRKAKHQSKLPKRAKTSKQIRNITNKRNRRVNDNLHKASRALVNELKRLSISKVIIGANNGWKKNIKLGKRNNQNFVQIPYNRFIEMITYKCQLTGIEVITGEESYTSLCSFLDNESVEKHDVYKGKRVKRGLFKSLNGTLINADVNGAYNIMKKHLGITVEQLDLVQVLSTPKVLKF

SEQ ID NO: 12285 - protein, 273 aa, unknown
  TnpB Polypeptide
MKFKTSKKYLKLLKTHEFRTCTVTLAAGKWYISILIDDNTVPQPAVKINKTVGIDLGIKKYLVMSTGRTISAPNIINKLKEIDRLKSYLCKKVKGSNASKKLQLKIQRKQKYLNDLKTDFLNKLVDYLIKNHDCVILEDLNIRKMIKHKGDWKSTFNRLMTMIPMYAFRRKLQYKAMLAGKYCVAVNPAYTSRTCSSCEHVDKMNRKSQSEFECTRCGFSANADLNAAFNIHNLGLNALIAAGHAVKSAQITASELVKANLSAVSPSSFGFSA

SEQ ID NO: 12286 - protein, 378 aa, unknown
  TnpB Polypeptide
MQIHKAFKIKILPNGEQIRKMKQFCGCSRFVFNRALAYQNEQYEADKSFKFSYVKLANLLPEWKHELVWLKDCHSQVLQQSLKDLEASFKNFFSKRSNFPKFKRKGEKDSFRFPQGCKLEQQNNRIYLPKIGWVRYRNSRDVIGTIKNVTVSQKCGKWYVSIQTEWKPETPMPNGGEIGIDMGIVRFATLSNGEYFEPVNAFKTYKGKLAKLQKRFKNKTKFSKNWQKLKAKIAKLHHKISNIRKNHLHQISSKISKTHAIVYVEDLQVSTMSKSANGTAEEHGKNVKQKSGLNRAILDQSWFEFRRQLDYKLAWNGGFLIAVPPQNTSRTCPCCGYSSKENRQTQADFECVECGYAENADVVGAINILKRGQALQAA

SEQ ID NO: 12287 - protein, 409 aa, unknown
  TnpB Polypeptide
MTYKVQKIFVNPRHALFKVLDNYAFLAKNLYNSTLYRHRQDYKEGKKKIIWNLLVNEFRATNQQDFRAIPSNMAALIVKAVDEEYKSCFAKRKAVLKANLPRYKHKSEGRYKLIFNRCLISKKALERGYLKLGTPDSIKQELKFKLPKNIDYTTIKEVTVTKFNDGYMVIIAYKIEDEVKLKESNNVAAIDLGLSNLVACVGNNEMKPFLISGKPINSFNHEWNKKVAKLRSKLDTSKDEGEKKALKDKINKLNRKRNFKVDDYLHKTSRLLVNHLDSNQIDSLIVGYNQGWKQDINLGKKTNQKFCSLPFYKLLQMVTYKCVERGITVKTIEESYTSKCSFLDNEEVCKHDSYKGKRVKRGLFRASNGTEINADINGAYNILVKALGQFNYNPIKACGLPSTLRVESK

SEQ ID NO: 12288 - protein, 650 aa, Scytonema sp.
  misc_feature (407)..(635): Xaa can be any naturally occurring amino acid
VFVLEYKAKGSKAQYQAIEEAIKTTQFVRNKCLRYWMDSSKEDNINNAAISRYSTVLRADFPFVAALNSMAVQAAAERAWLAISRFYDNCKKNKPGNIGYPRFQHDNRSVEYKTSGWSLHPTKRRITFTDKKGISELKLMGKWDIQTYPVKSIKRVRIVRRADGFYVQFCVDVECKEDVQPTGQEIGLDFGLEYFYTDSNGHHEPNPRFLRKAEKQVKHAQRRIYKKQKGKNGRKKARNRYARKHLKISRQRTEHAKLKARHVMRSNDLVVYENLQVKNMVRNHHLAKSINDAGWRQFRSYLEYFAQKYGKVALAVEPHYTSQQCPQCGTMVKKSLSTRTHTCKCGCVLQRDYAAAINILRKGKEKIATSGHGGSKPSKRKVRNARGVESSTHVGETSPEGGSPSVXXXXXXXXXXXXXXXXXXXXXXXXXXXXXXXXXXXXXXXXXXXXXXXXXXXXXXXXXXXXXXXXXXXXXXXXXXXXXXXXXXXXXXXXXXXXXXXXXXXXXXXXXXXXXXXXXXXXXXXXXXXXXXXXXXXXXXXXXXXXXXXXXXXXXXXXXXXXXXXXXXXXXXXXXXXXXXXXXXXXXXXXXXXXXXXXXXXXXXXXXXXXXXXXXXXXXXXXXXXXXXXXXXXXXRSEYIEQLIRKCHGR

SEQ ID NO: 12289 - protein, 436 aa, Thermococcus sp.
MKRTVTVKLQPSKEQEKTLFELAQATTIIWNKLNYERLKQFKEFGKIDFGTTEKEAYYTFKDWIGGSTVQQLARKNAEAWRSFFSLLKKKKKGELSEWFKPQPPKFVKEENGGKLFVIPLRNDQYKIDGNTIELRRLGRFGRLKMQFKGRIHLKGKQGRLEIVYDSVKRKWYAHVSYTVEEKLTGGEWVEVPRKPKSNLTAGIDLGVNNLIAIYIENGEAFLVNGRPLKSIAFYWQKRIADYQSKINRSGAKKSRRLKMMYQKAKLQARHYINKAVRQTVEKLYQLGVSIIVVGYPKEIARNSNKGERQNFILSQVWRFNYLIKRLTEVAEEFGIEVLLVDEAFTSKLCPLCGQRHSNGRIFRGLFKCRREGVVMNADLVGAFNILRKAVRTITPSLSALAGGRGNGGKTLPEGSKTRFNLGLNETPQTSPPLVRG

SEQ ID NO: 12290 - protein, 507 aa, Mycobacterium sp.
MSQQVKITRARLHGSPVYLGEVTGPDGTTGPVWSTDPDTVLRWLCDGFRFRFNQRRSTRCRYLSCEDRNGDRVMVTDPAGEPVLVPIGRTATDITDAQARHRHSFLAALPSLVLEATLKTERTDWFSAAKRRKTNKAAGRRPGAMPGFRRKDSDQRFVCWFNGGRNAVFTRTGKRSGMVTISGANPPRFRQPGLGADGKPHKPGWKITLHVRLSQPIRSYTSVRVNWTRRQLVFVNEPLPVTGKVSTGEVVGIDRGVVHTAADDRGRFFDAPDTAGLDKEGKFHQRRMAKSRRIAAREGRRYWESRRYQAHKTAAAGLAAKQARIRDDFAHKLSTQLVREHDFIGIETLHLDRMTRKRRGTGAAAKRGLNRVLQNAALARLAKHIEYKAELAGVTLVEVPAAYTSQRCHKCGHTARENRESQAVFRCRSQSCGWTGNADTNAAVNVREEALARWVAAPTEQLAGTSATNAGGVAVSQAGSKSKTDPLTGPAPGPAASAMNREPPEAA

SEQ ID NO: 12291 - protein, 403 aa, Moorea sp.
MIVLEFKVKGNKTQYAAIDEAIRTGQFVRNKCIRYWMDNKGIGQKDLYRYNTWLRSEYPFVTDLNSHACQASVERAYSSISRFYDKCKKQVPGKKGYPKFKKFSRSVEYKTSGWKLSPDTKSIKFLDKKGIGLLLLKGTWELWRYDQNLIKRVRLVRRADGYYVQFCVKVEIKESLNPSHTNVGLDVGLKEFYTDSKGNTEPNPRFYRKGEKRLKFYQRRVSRKKKGSANRKKAIDRLGRQHLRISRQREEHAKRLARCVIRSNDLVAYEDLRVRNLVKNHCLAKSINDAGWYQFRKWLEHFGTKFGRITVAVNPAYTSQNCSQCGEVVKKSLSTRTHTCKCGCQLDRDHNAAINILKRAFSTVGHTGTRILDLNALGDLSSTLPDSGLVEQDGSLSKESPSF

SEQ ID NO: 12292 - protein, 426 aa, unknown
  TnpB Polypeptide
MAKATKTILKRLNLRKPEWFLETQKLFNQVAAFYFEVIQAHEEVLALKNKEALTALERLTMKTKDNPEPAMPLPYDVPAMFRRAAINAAIGSARSFYSTLHKHHTKKEKMEAKGKKYNRRPPVPPREWNRNVVFYQGMMKELTLNSVMLKLYTGTSWAWVKLEFRGRSIPEGWDTGSPHAVVHKNVIQLHFPVEKKIEKPQKTEKQAQNPDLRICAVDLNMGDRQAVCTILKSDGTEIARKFIEGGDFLQHRRKRLLGKVAVKRSKYGGILPEGTQDNARLWEKIRNIEDYEAHRISRRIVQFAQEHGATVVVFEHLDNLKPEKGRYSKRSNTKRAYWLKGRIYKYTKYKAWESGIITARVNPRNTSKQCSKCNAEVFRHRHGEEPKEYIVGAPLFTCPQGHRGNADLNASRNIGKKLFERYLKAC

SEQ ID NO: 12293 - protein, 390 aa, unknown
  TnpB Polypeptide
VATDQTSYGCSTGHPRGLVLVPAVVPSPVAPQGPRHRVLASAYTVLASRVAPGTVHHQRDSARTGDRGRDRRVGDRLVPGQPGGGHHGRHPRWPAAHRCPHPRLRRPRPGCAVGPAANRGPVSDGQDRPARPPGRHRTRTYTGSARREIAVLKDNRRALGVKRQQINRDMAFDFAQTMTTMAAGSGAGVIAVEDLRSLEPTNHGRVNNNRSAQSARRRAYQALEHTAARAGLEVVMCPPRGTSARCPGCDQELARPGGYHSASCQQCGINRADRDQIAGQNIAKRVLLAKTKVKRPKGKPKRVTTAEHQPVRKTRRKTTATPKQRRHKRVRHTTTPPAPTATNRPQPTTPARTASVWDRDQPTTPMESTSAQPIPDTRDTPHVPASIRDR

SEQ ID NO: 12294 - protein, 415 aa, unknown
  TnpB Polypeptide
MGMMRSQKIRLKLTKEQERLAWWYSKVSRNFWNLLVDIDKRNNKGEFDEILNKNGNKTYHSKFYDREIYSLNESDYRNLAKIVATKNYDKNKELWSWYYQPNQSFIYASLSRELVKIRKQNKGRLNFRSVDKIQPNFNICCSTSSNKKRPSRIYLKDSGKLQIPTIGDVRFGSVRAGFNLSCKKQVANISFDGKYWYLSYTEDIEIKTDDLPDYTDGIGIDLGIKTLATVSDGTSVPNIKMFRRVRILNKRLKRLQRKVSHKYLINKCNKHNKTKNIIKLERQIKLIHRSLKNIRINHIRKFVSVLVKKQPQYIAIEDLNVKGMMKNKHLAKDIINCSFYAIREHLIRKAIERHIAVRLVDRFYPSSKTCSNCGSYKKDLKLNQRVYHCDNCQETIDRDFNASLNIAKTDRYVLA

SEQ ID NO: 12295 - protein, 379 aa, unknown
  TnpB Polypeptide
MEQITITAKIQISATDKDKVLLNETMSVYRDACNYVSDYVFRTHDVKQFSLNKILYGKLREEFGLKSQMAQSVFKTVIARYKTILENECKWIKPSFKKPQYDLVWNRDYSLTQNCFSVNTLSGRVKLPYFAEGMSKYFDHTIYKFGTAKLVKKHDKYFLHIPVTYDVEESNVSDICHVVGIDRGINFVVSTYDSKHKSEFVSGKSIKQKRASYAKLRKELQMRKTPSARRRIKAIGSRENRWMQDRNHCVSKALVKNNPKHTLFVLEDLSGVRTATERVRMKNRYVSVSWSFNDLEQKLMYKAKQNQSTVIKVHPAYTSQCCPVCGHIEKANRNKKIHLFSCKNCGYKSNDDRIGAMNLYRMGINYLEDRQVPSTVTAE

SEQ ID NO: 12296 - protein, 239 aa, unknown
  TnpB Polypeptide
MSVITNVSITKKWEWRNTRTGIIRKNPIERICGINSFHLRQPRKSASCWIKHGNLFYALKRSGGIENPRPPRFKQESIPITYMQMGIVHEWDTEKVRLSLPKALKRYMEETYQIHENFLYLENKIFRGMDQIKQLRIYPPEKGECKVIVVYEISEREELSQNGHYLSVDLGLHNLMTCYDSGNGNTFILGRRYLALERYFHKEIARVQAQWYGQQSVKGIKHPVTSKHIRRYIRKSRTR

SEQ ID NO: 12297 - protein, 491 aa, Caldivirga sp.
VAVELEVAKELNRLLYSVEAMYLNIVREVVEYAVTNNVTNPTQLQRLFYSKYRSEYQGLHAHLIIQAIRQAAQIAKSFTMRRRRGLVSKPYPEVRSVSIRFVITTWNYEEFVKSIAPVRLSLSLLGGRREVWIKPHKRFWLYWWRVLRGEAELASTLIVKRRLNRWYAVFIFELKPREEELKSIVAFDINENTVAVGKLDIKTTVNKVAKWNKQYLTPQFYTIKTDFGRLAKRYERIRNAIIERLKPHFTLPNGKYVNIANTREYRKVVKRLREKNKKIGRVRHVANELTKTPGIIVTEELGDNPQESMINGIGKDEVRHRIKQTPFKSIEEAVEDKALEHGSKIFRVSSYRNSRVCPIHFTRLEKTDDWHTLYCPRGHYVNRDHASVMNMAWKITPEAWVKGVWWNMKLEMDWREYEGDSNPIIPQNIVQLLWLIMMNARASFEQSPAVLARGTPMNPARGANEDWARKPPRFKATPTLKGGEEASSGNR

SEQ ID NO: 12298 - protein, 416 aa, Aphanocapsa sp.
MLNMTWEFKLEPTAEQISEIEHILDVCRNVWNFALRERKDWLDSRKSPVNACSIRQELILPADAPFPSYAQQCKSLTAAKADFPRLKSVNAQVLQQVIRKLEASWESWRLKRSGFPRFKKPNRMRSFAFPQMLKNCISEEGMKLPQLGWVKVRWSRRIPDLFEVKQARIVRKASGYFVMLSLQSEVDIPSTMPHGHPVGIDVGLEYFLSTSDGEPVKRPRFFNDLHRKLKLLQRRLKTKQTGSANWLKLHKKIARVHQRIADTRKDWHFKLAHHLCDGAGMIFVEDLDFRIMAKGMLGQHPLDAGWGQFTHQILPWVCFKREVYYGKVDPRGTSQDCPDCGAEVKKDLSIRISHCLECGSIKPSDMAAAQVVCTRGQRGIENACGVGVTGSSVMNSSQLALKQEIFGATPGSSLCP

SEQ ID NO: 12299 - protein, 483 aa, Anaerosalibacter sp.
MKVTVRGILINVSKDAEFEINRLMTVFSSAKRYGFNRLIEGNMKKGEIEKYISKKYGLNIRQSKDALKAASQIIASQKKLVKEYYDNYSKKVKRIEKQLKKAKSKNKINALTKKLNKRKKKQQFYKNHIDSNTIPKVIFGGRKNFIKRCKGQITNEEWKELRDNNYYSRGDKTKGGNPNLRIIIKDNMTFLEISTLNKDKRNWAIKMQIPLYLPQKLSKKTGKINGRNYRQMVLDYLKIGEAYKVELIKREGKIYVHITIDESKLREYKELYTTDNGIIGVDTNPDGFALTRLDKNANYKNSTYLKQNELLYARSNKRNNLCGELAKEVIEIAKAEGCAISIEDLKFKNDRDVKSKFARIRDQFTYRKLLSNLESKARREGVQVIKVKPQYTSKIGLYKYSHQYGLNVHESSALVIGRRAFGYNEKVPKLLKDKLSTEKEKLKFNKENNWKQWSIISKKIKKKGGEKPGLWQRNRKYILSIAS

SEQ ID NO: 12300 - protein, 510 aa, Moorea sp.
MSKKVGVTKKLSTQIVPVVGMTESIETELLSTMKKLGIVRAESYNKLGSIKHWGLDWKKAIPEVKSFRTPDTLGLPAKIMDWTINDVAKAITAQQAACIDAVIKKIYRRFPGKENQKTRKKLCKQLKTLAFLENPLLHRLVRKEFQRGHSWVKNQIVYQQVGYKCKRLSRNTYQLELAGLRRGKRNRIIVRSNRKIKGQIRLIHNQVLQRFEIHFLVDHGNVEIPGERRPVGVDKGYTEAFYDSEGQAHGKGLGKVTTKKSVRICAKNRKRGKLWALHRKLEKIDPAKSDRILKNNLSRKTENKRYRQNQSELTAIIGAASKSLFNGKSLKIFAEDLTQPIKGKRQSKAMSRKLNSWMKGQMRDSLQKWADWTGSIVTEVQPSYTSQVDSVTGTLLGKRSGDNFTRFNGVVLQADHNAAKNILARGTDKELTRYMNKTEVMAVLLRRTARFLKGMGLSLLDAVELGWIDCKHELCSGFQATPGRDARNVQTDGWKVQLQLLHDHSSLGQQ

SEQ ID NO: 12301 - protein, 268 aa, unknown
  TnpB Polypeptide
MTGVAGFYTLIMRTAYQYRLRPTSSQVALMDQWLDLLRKQYNYRLAERFAWWEHNRCDINACPLICHLPELKDKPDFYSQKRDLVSTKALFPEYRAVHSQVLQNCIERVHKAFDRWLKGDGNGKRAGKPRFKGVGRYRSFSFPQMKQDCICGQFIHLPKIGAVRIIQHRPLPDGFVIKTATITRKADGWYVTLSLQDSSVPEFTPESATLENTTGIDVGLDSFLVTDAGESVPVPQYYRKAELRLKRLQRALSRKKKGSNRLWLVTSG

SEQ ID NO: 12302 - protein, 406 aa, unknown
  TnpB Polypeptide
LSVEAVIVRGVALYRLLPSTEQAAVLDQHCRHARFVWNLAVEQQKHWQPGRRAPGYKEQCAQLTAARADNDWLAAGSQTVQQQALRDFAQAMRNFFARTHRRPTWRRKGRHEGFRQVGVKSHHIEYLNRRLGQVWVPKVGWVRFRLSRPVPAGVKSYRVTCDRAGCWHVAFAHIPDPITSPNDGSVVGIDRGVAASAALSTGELLHAPGLTTGEAKRLKALQQRLARAKRGSYRRARTKLAIAKLRAREKDRRKDWIEKASTDIARRFDTIRIEALDVRAMSRSLRGTVEQPAVGAAQKRGLNRGIRRSGWGLLAERLQYKACGRVEQIPAAYTSQRCATCGHVAPTNRKSQAVFECEACNAGPCNADVNAARNIAAGRPVTARGDLGTGRSANREPQLCPPAAWE

SEQ ID NO: 12303 - protein, 297 aa, Streptomyces sp.
VEDPELPGTGRLTLAKQSEPLDVRWSRPLPVGGDPVKLSVTRDRAGRYFVSVLVEERIEPLPTVFLPGGREPRAVGIDLGLAALVTLNDGTKVDHPRLLRKYEKELAKVQRGLHRKKKGSANRGKARERIARLYALISDVRRDMLDQLTTRLVRENQVLVVEDLAIMNLLRPAVGRGRRRKAALSRSIMDAAWGELLRQLRYKCGWYGRTLVIVDRFFPSTRRCSDCHTKGSSLDVSVREWTCAECGAVHDRDVNAAQNLRDEGMRLYWLVASALPPGRRPPSVIKASELADVLLAA

SEQ ID NO: 12304 - protein, 466 aa, unknown
  TnpB Polypeptide
MKSPRKLSANSLNWKSCLTTFICSAGLTRSLEFTSSSNSSKAARLGICGKSSQFSRAACRLFGRTHIVVSPSGVRLSPSSSDTSRTRRMSEQMSEHRLAYVFRVYPTKAQETAMTGTLETCRQVYNSLLNWRKHDYDVLGKSPSKVEQQAAFPKWKQEHPELCDVYSQVLQNVAVRVDLAFDAFFRRVKSGETPGFPRVKGEGYDSFTYPQSGFGFYQGKLRLSKIGDIAIRLHRPIDGTIKTCTVRRVRHKWYVCLSCEVGPELLPPSTEEEKTYIGIDVGLKTFASLSNGENVANPRFFRRDEKALAKAQRKLAKVKNEQQVRGSRKRRKAKKVVSRIHERIRNRRHDFVHQTARKIVNRYGVIAVEKLNVKGMVKNHCLAKSISDASWSMFRNVLSQKAARAARTYAEVNPAYTSMTCSGCGHIERKTLAQRQHDCPMCGLSLDRDTNAAINILSVGQYRVAA

SEQ ID NO: 12305 - protein, 740 aa, Methanomassiliicoccales sp.
MIRPSGIGGGLTLLSKADTRILYCIGRGLTDAKDIHAEIGLSTEQVYARALVLKRIGILEDRKGIHLAERELPQKLASFLSGSIERADILANMGIRFLIALRESAPGRMIANRTGVCEATYFKWQRKAAKVGIVVSENGIHHIDYGLWPGLRELLDLMDMESRIIDRRIPDHSNILWMDGKDIIFSAQIGEPYQKTAFSAFGNSDKGDTVFYTTSDDPLNEQNLFDDAFHICESTDNPELRLKTIDYLLDNLDRIIPDNDFIVSLSRVVRGLDCKGWPDKKTLDGAFGDLSGLIEMMIPQDGPRIPPDYRTETFKLQPNRTQRRCLESILNTCNMLQNELLDHFTPMMEDGNIPSSKDVRSYVVHELKRNSINGQLYRDAPATILQEVCDRVCTSLSMTLKNNTITGKNRKPSKRSRMRSFVYPQVGRGVSFPRKAGETRKVIRLAGVGEVRYDGHMVRTDGKRTNSLGRRMPYENPIPGVMKRCRVLKDDTNQWFCQITYCPDNLSPERIIQDHPRTPIGIDLGAVDLITTSEGEKIANFRELSRLKKKIGREQTRMNRFEQGSEEWEKHRKRIAHFHRHYRNRQRDDMHKLSLDLIRKHDLIVFEDINIKRLISKERTRSLRFAQSEASWRKLTDMVDYKAADRGTDVIYVDPRNTSQLCSECGMMVKKGLYTRIHSCPYCGLEIDRDVNAAINVLKRGIEKRNGAIAGNRTRGLTLARSSVNPYTTIATSPYHSTFI

SEQ ID NO: 12306 - protein, 158 aa, Helicobacter sp.
MRTYHSKSLANASWGKFLTMLEYKAQRKGKTLLHIDRFFPSSQLCSYCGFNTGKKHERITQFTCPHCKITHHRDYNASVNIRNYALGMLDDRHKIKIDKSRVGIIRTDYAYYTNERIKACGASSNGVSSKYGNILDLASYGAMKQEKPNRFSGWVIHG

SEQ ID NO: 12307 - protein, 368 aa, Escherichia sp.
VKRLQAFKFQLRPGGQQEREMRRFAGACRFVFNRALARQNENHEAGNKYIPYGKMASWLVEWKNATETQWLKDSASQPLQQSLKDLERAYKNFFQKRAAFPRFKKRGQNDAFRYPQGVKLAQENSRIFLPKLGWMRYRNSRQVTGVVKNVTVSQSCGKWYISIQTESEVSTPVHPSASMVGLDAGVAKLATLSDGTVFEPVNSFQKNQKKLARLQRQLSRKVKFSNNWQKQKRKIQRLHSCIANIRRDYLHKVTTTVSKNHVMIVIEDLKVSNMSKSAAGTVSQPGRNVRAKSGLNRSILDQGWYEMRRQLEYKQLWRGGQVLAVPPAYTKPALRVLWSYSERKSPVTKSIQMPGMWIYSERRCKRRS

SEQ ID NO: 12308 - protein, 413 aa, unknown
  TnpB Polypeptide
MEYSHRYSAYPTREVAATLRRHINIHRQAYNYTRYEYENCSDDVDSIGSAYSHHDRLSDWKDDFPVFAEVHSKALQRTVTRFYQNLSSLTELKENGHSVGRLQWKPPREYRSITYSQSGFELNNTSGRRATLWLSKIGTIEIRHHRPIPDEAATKEVTIKREPTGEWFVSFGLEVDDADLPEKPAVDSLDTSNSVGIDLGILNYIHTSDGTTVDWLDLDAEYDRLRREQRSLSRKQEGSNNYEQQRQAVAKVKRHIRRKVHDYQQKITTWLVREYDAVFVEDLNVQSMLQGNGNARNKQDVAWRQFIQLLEYKADLYGCHVVQVEPRGTTKECASCGVETEKPIWVREHSCPSCGFETDRDANAAMNVLRRGFSELGPGWPEATPVETATATDTTQFESVSASRVIETGSLPS

SEQ ID NO: 12309 - protein, 387 aa, Oribacterium sp.
MANRAIKYRIYPTTEQSILFAKTFGCCRKVWNLMLSDKIEGYKVTSKFPAVTPAKYKKECPFLKEVDSLALANVQMNLQTAFSNRFNKKRKVKAGFPKFKSCKHSHKSFTTNCQYPKPSNKLKRPTIRLDDDGLILPKAGKVKAVVHRIPEDNWHIKSVTVSRESDGKFYASVLFEYENAVNTYAPDFDNAIGLDYASDGLYVDSNGNKGSDHKYYRESQRKLAKAQKVLSRRKGSKKNSAKSMNYLKQLRKVNKIHRHISNQRLDNLHKLSAKIANSHDIVCVEDLNMRSMSNKGFGNGKATLDNGYGMFLDFLSYKLHDRGKLLVKVDRWFPSSQICSCCGIRHSEMKDLAVRKMVCKCGLSIGRDHNAAINIKMEGLRILKSAA

SEQ ID NO: 12310 - protein, 367 aa, unknown
  TnpB Polypeptide
VEKAFKMRIYPTENQKTLIDKSFGCSRYVYNYFLDFKQREYKKYKNKYSYSATSKLLTSLKKELTWLKEVDKCALQNALKDLDYAYKRFFKGAGHPKFKSKHSSKMSYRSNFSNNNIELLEGSIKLPKLGKIKIKDKAYRPKDGRILNVTVSKTKTGKYFVSICYTDININPLPKTGRSVGIDLGLKSFITTSDAEQVDNPRYLEKSQVKLKKLQRMLSRKSKDSKNREKIRLKLARCHEKVANQRKDFLHKLSKSLVINYDVIVIEDLKVKNLLKNHHLANSISSVSWYTFTEMLRYKSLFYSKTLIKVDSFFPSSQLCSNCNFKNVEVKDLKVRSWVCPSCGSINHRDINAAINILNEGLRLLKL

SEQ ID NO: 12311 - protein, 417 aa, Catenulispora sp.
VQLRYNFRLDPTPGQRDALTKAFGCARWVYNQALAIRKSSYEEGGGWIASEVLSKRLITEAKKSSETAWLGSVSVVVLQQALRDNDVAYKNFFDSATGRRKGVRAGKPRFRSRRDNRQAIRFTANSKFKIMKSGRLSLPKIGEVAVRWSRDLPSDPSSVTVIKDASGRYFASFVVQTDPAADAERFPAGDAYAETGIDLGLTHFVVRDNGEKIDAPRFLRKAEQRLKKLQQSLARKQKGSNNRAKARVKVAKAHAHVADARKDFHHKLSTTIIRENQAVYVEDLAASSMARSRMNGMAKSVHDAGWSNFVRMLEYKSARYGRTFAKMDRWAPTSQVCSACGVKDGPKPLKVRGWTCGACGVHHDRDVNAARNILTLGRQVAAGRAETENACGGDVRPQLAVAGPDEAGTHLGDRTLA

SEQ ID NO: 12312 - protein, 228 aa, Catenulispora sp.
MFAVAAPGSHSIERMLLRYRYRMYPDAGQRAALAKAFGCARVVYNDGLRLRQEAFAAGRGFIDDGELQKRVITQGKRTPQRAWLAEVSSVALIQSLRDLNRAYSAFFAAQRGERRGPVVGLPRFKSKRDSRQSIRLTSNAFRLRDDGKLSVAKVGAADRYWASFAVEVARRLLPRVDAECGIDLGLTYFGMASGGDRIQAPRFLRQAERKLKRPHRELPPKQKGSANR

SEQ ID NO: 12313 - protein, 216 aa, Acinetobacter sp.
VFQTPTAQTTILFSILVVDSPKQDKPTATKAVGIDLGLKDIATCSDGTIISNPKFYHQYEQKLGIAQRARNKKRVRALHAKIANCRKDHLHKASTQLVKDNALIVVGDLRANKLVKTKMAKSVLDTGFSALKTMLKYKCENAGVMFEEVNERFTTQTCSSCGAITASSPKGRADLRIRVWKCECGSVNQRDLNSAKNILALGHKRLAVGITLLSGG

SEQ ID NO: 12314 - protein, 344 aa, Uncultured sp.
MLSSKARVDRKAYKFFYHMVTRVSRPVRGEGPALVETLRMRALPEGGGDDLLEFLRLYRDAVQAVVDRTWNVEGRLSIGTLHKLFYKDFVSMGFRAHHAKEIYVYAKGIVKSAKGSGGRRPTLRRLTARLDKYDYRLDLDDMTLTLRLHKGREARLRLTAPKERAEKFRGWENYELAIKYDGDGLWVTVYFRRDVKPAGPRTVTSVDLNFDNITLAVLTLSGKLIRLKRLRTPLRKALTHRIWIERIQRRYPRSWRFVKGVRMAVERHGERIKNISWDYAHRAGDLIAELALRYGSAVVLEDLNGLREDRKGGRDFNKRLTLWFYEKVQFCIEYEAKERGLQDR

SEQ ID NO: 12315 - protein, 434 aa, Uncultured sp.
VVEAVRTVVVRSATLPRRTFRIFVELEGMYRNMVEQLVLYAVNNGITKFTRLKAERYREVRSLYPQLSSHYAYTACQDAAERAHSFLRLRKMGRARKAYPEVRGVSIWLDDHLWRAEGLTSISMATHRGRVRVSVELNKHFLRYVNRGWRLASEAKVKLDRRNRRLILYLTFKKEVSEHRPKGYITVDVNENAEAVLIDGIVYLLETDLSRITLGYYYRKKRVQERYDRVYGPGSRPERKIFKSLRGNERALKREIRQKLAALIVREAARRQAAIVLERLGKEPAKGMIERIKDPQLRHRVYQAAFKGMQRAIEEKAREYGVPVVYVDPRNTSRVCPIHGAEIVYGKDRHGTCSRGGETWHRDVAACYNLLLRALGGDGGYAPSRVRAFVAVDGGPVPLGPTAAHEPIRISRSLWARWRSLGAINKHEQIRINT

SEQ ID NO: 12316 - protein, 414 aa, unknown
  TnpB Polypeptide
MLLFESKLDGMQQQYDAVDEAIRTARFIRNSCLKYWQENRGVGRYDLSRYCAVLADCPDFHWAKKLNSMARQASAERAWSAISRFFDNCKKNVAGGRVDRPDQKGYPKFKKHQTNSSVEYKTSGWKLSEDRRFLTFTDSFKAGTFKLWGSRDLHFYQQGKIKRIRVVRRADGYAQFCIDTERLEQREPTGKTIGLDVGLNHFSTDSDGNQIENPRYLRKSERALKRVQKRLSRKQKGSKNRIKARGRLGRKHLRVSRQRKDFAVKLARCIVRSSDLVAYEDLKVRNMIKNHHLAKSISDASWSLFRQWIEYFGKVFGVVTIAVPPHYTSRKCSRCGEVVKKTLSTRTHQCPHCGYVADRDENAARNIRQIGLATAGHVGSWEDDSRNVSGEIDLCLGESTPPSKSARGKRKSKA

SEQ ID NO: 12317 - protein, 540 aa, unknown
  TnpB Polypeptide
MGTQHTRQSKHPTQKTPTFLLELPLQVEAGQAKRLRAHLEAGRQFYNALLSEGQKRLRRMQADPAWQAARAIPCSQKQERWAAFSALREQYRFSEAGLHAYAKTARVSFLADHLDAVLAQTLATRAYQALNRVCVGKAKRVRFKSRGRRLDSIENKRNDTGLRFVLQKPEDGHHGFLIWQDDHLPARIDWNDPVVKYGLDHRIKYARLIRRPASSPRAQGADCQGYRYFVQLALEGVPSPKPKHPVGTDTIGLDLGPSTIASVPRKAEARLEQFCEELMPDAQAICRLQRQMDRQRRATNPDNYDAKRRIKKGGKKKLVWKTSKGYEATRRRKATKERKLAAHRKSLHGRKVHELVAVGNTMVTEKISYKGWQKQYGRSVGLRAPGMFIEMLRRTVASTGGTLHEIPTRSTKLSQYCHGCGQCTKKLLSQRLHQCACGIGPVQRDLYAAFLAAYLDPADPIPSCAQYVIPWEGAEARLRAAHERTMQRANEGQVLPRSMSIPHARARLPTSRSEPTQEPIFLLRRGRLEAWNERSEPPAL

SEQ ID NO: 12318 - protein, 412 aa, Actinomadura sp.
MQLRYNYRLYPTPAQRTSLGKAFGCARVVYNDGLRVREEARRQGRAISDNELSKLVITQAKRTPERSWLGEVSAVVLQQSLADLCVAYRNFWNSRAGRRGGPSVNPPSPKRRKGRQAIRFTRNARFSITSSGRLSLPKVGNVKIVWSRPLPADPSSVTVVKDAAGRYFASFAVALPALGPLPSTERQVGIDLGLTHFAVLSDGTRIGDPKWLRRRERKLKRAARAFSRTAEGSENRARARTRLARQHARAADARREFHHQLSTWLVRDNQAVHVEDLAVRGLARSRLAKSVHDAGWGRFLAMLEDKARRHGRVFARADRGFASSQICSACGRRDGPKPLKVREWRCPGCGTRHDRDVNAARNVLDEGRRTVAAGRTLARGHAETLNACGAPVRPPFCVARVVEAGTRRKTVE

SEQ ID NO: 12319 - protein, 520 aa, Myxococcales sp.
MRAKTDSFIAEVPLRTSAADERELSIRLDAARQIYNAVLGECLRVLGLMRESKDWQRARAIPKGAERNAAFRAVRERFDFKSSMADRFAIRCKNGCWIGDHLSSNETQKTALRAFSAVEQHALGARGRPHFKRVGELDSVEGKTNTCGIRFKDGFVEWSGLRLELMLDPRDPKAWQAEALERKTKFCRLLRRRVRGTSRWYVQLVQTGTSPLVPTTTAGAVVGLDLGPSTIAAVSEQDATLEQFCPGVEQPWRELRRLERAMDRSRRATNPEHFDAEGRAKKGKKKWKRSRRYRKLAEKRRERDRRLAAERKRSHGELANRVVAQGDTIKTEKLSYFGFQRAFGRSSKVRGAGLFVATVRRKVEAVGGQLVEFSTYKTRLSQLDLPTGTYAKKPLSQRVHVLGDGTGELQRDLYSAFLARFVVAENAMPARSAAVAFPAAKPLLRRAASSAAQPASGGGFPLPQALRRLRAGRPSKRDEGGREAGDVVAARRGPRRATAKMLVARHLHLSEPPGFIPGEV

SEQ ID NO: 12320 - protein, 401 aa, Pseudomonas sp.
MKRLQAFKFELMPDGGQERQMRRFAGSCRFVFNKALALQKKRYEQGEKKLGYAGVCKQLVEWKDHPETNWLSETPSQALQQTLKDLERSYANFFAKRAEFPRFKKKWKSDSFRYPQGMKIDETNNRIFLPKLGWIRYRNSRDILGKAKNITISQSCGKWYASIQTEREVEQSFPQGDAVGIDLGITRFATLSDGTFFKPLNSFRQHESRLRKAQQVMSHKVKFSNNWKRARARVQRIHSHIGNARRDYLHKTTSSISKNHAMVCVEDLQVRNMSKSSAGDSEQAGKNVRAKSGLNKSILDQGWFEFRRQLDYKLAWKGGYLVAVPPHYTSQTCPCCAHVCKDNRQTQAQFLCVECGFKENADVVGAINVLRAGYARFACEVNGAVRPSAAGTHRGESALTG

SEQ ID NO: 12321 - protein, 480 aa, unknown
  TnpB Polypeptide
MSFQTVKTAKLKITSHSKLFLPTLDIYRKALSFYVSTINDRWESFVDLKSNSIVLVAEKLTHATLKNPLPEIAFDNESSEFYKFPSYLRRACIMEANGIVNSHKSRLVNWEAKRSQKQSAGKRFFDHPPKLPDLHKTFPVFYKKEMYKNVASGDKKGSARIKLFLDNDWKWVEIVYDTSNLKSGKNLRFKDDFESMNPSLIQKGDKFFLHIPYSKKKDKLNSTSIDDQIAIGVDLGLTNSAVCSAVKSDGTVIGRLFINQPIEKDRLKTEINKLSKAKRLTGIADMPHHWRRINGLQNYIVQNTADQIVEFAIANNATHIVFEHLGSMKVPKGFYGAKRLRFKLQFWSKMRVQNKVMEKAHSLGIRYSKVLARGTSMYAFDGSGLVERSPRKDLCKFTNNKTYNADLSASYNIASRYFIREHLKPLSEKRRLQAEAKVPSLAVRTTHTLSSLIRLHEVLSTTAMLPDALIHDKEAPSIAS

SEQ ID NO: 12322 - protein, 402 aa, Oscillatoriales sp.
MLKVFKVRLYPDVQQQQSLAQSFGSCRWLWNYCLDLMNQTYKETGKGLSGYEVKKIIPQLKKEYEWLSLTYSQCLQQVCLNLGVAFNNFFEKRAKYPRFKSKQGKQSIQYPQNVKIADTFLTIPKIGNVSAIIHRPIEGKIKTVTISKNCSNQYFAAILFDDGKSKPESNSNGKAIGIDLGLTHFAATSDGSKFNNPRILTKYEKNLKVKQQQLSRKQKGSNNRIKARKKVARVHRKITNCREDFLHKLSRRIVNENQVIVVENLNVKGMMQNHKLAKSIHQVGWGMFCTMLKYKADMEGKIYLEVDRFFPSSKTCHVCLNQVGSLPLDVRFWTCENCQTRHDRDINASINLRDEGLRILTSGTGDKACRPDVSRSNRGRKKSTTTLSVGQEAYTVPLGQCR

SEQ ID NO: 12323 - protein, 398 aa, Acidimicrobiaceae sp.
  misc_feature (261)..(316): Xaa can be any naturally occurring amino acid
MPVYQAFRFELDPSTTTRSALGSHAGASRFAYNWGLALVKDRLEARQVLEVLAMRQGAGAGEARAWAAETAGPVPWTLYSLRKEWNRVKDESAPWWRENSKEAYNSGFDALARALKGYFDSRGGARAGKPMGFPSFKKKGGRPSCRFSTGVIRVLDDRHVQLPRLGVIRTKEHTTALSDQVVAGTARVLSATIKEEAGRWFVSFGCKVVRRDPVATYPEAIVGVDLGVHHFAVLSTGELFENPRPISQRARRMARLNRELXXXXXXXXXXXXXXXXXXXXXXXXXXXXXXXXXXXXXXXXXXXXXXXXXXXXXXXXRPKPRSLFRRGPTAASTVVWSWTGTTTQHATLPPTAGSTSSPGVARRLKTDAEAMLGVPATPVHTHRKALVAGSVKTAPGNR

SEQ ID NO: 12324 - protein, 424 aa, Thermoproteus sp.
MGKVYRTLLLKYNLLRLPPEEGEKIPALIRVQEEFRKWAAEWAKSGGKEPPPERNPLKYFAIEFLHANKMLNWLREIKKNGIEVRAVRPPLIFDAQLRLGGERDMSRGVLVDLPRREVRIRKWGGGTITLSDKAIEWMLARAREGGKLVLAAVWVGRSRRSHAVKLYVALVFRREVTPTEVKRLLVIDLNALHNGLAWAVVEGERLVEKGVMRPHVAKILHMQKIVSKLDRLCAERGEACGEAMAAKSRIWRLMTSWEDEAAKKIVRLALQYKAMVIVDVPDHNSIKALKEGGYASERKTFLNFGRLRRRLQGLAEWYGVPYREERLYSTVCPRCGRKMEELPNRRVRRACGFEAHRDEVPALWAMRRFPELISFSSSSAVLLRWVVERKRGKRGWSFAEPHREERLPHAALSVLLHEPLRLSP

SEQ ID NO: 12325 - protein, 388 aa, Deltaproteobacteria sp.
MIIITQKSFKYRIYPTEAQITNLINQFSMCRYLYNWSLEERIKAYENEQISITYNEQQNKLPELKKERPHFKGVYSQVLQDVLKRLDSAYQGFFRRVKKGDTAGFPKFKKKGDWDSITYPLYRYSVSSQIYVPKVGTVKIIYHREIPKEAKIKTLTITKESDKWFACFSVELSINIEHKQGLANSIGIDLGLIDFLYASDGSHVPAPKYYRKLQNRLARLQRRFAKADKYSSKWYKLLKAIQKVYYRIRCLKHDFLHKTANALLEKADIIFHENLNISGMMRRPKPKQDEEGKYLPNNASAKSGLNKSFADASLGQFLNTLKSKAVALGKKVIGVPPHYTSQECPVCHQIVKKSLSVRTHRCPCGFVANRDFAASLNILRIGLDTLTA

SEQ ID NO: 12326 - protein, 267 aa, Sulfobacillus sp.
VWDDDHWEVQTTQPVKVCWRPFRVKVLALDAGITEVFTDQRGERYGTEYGQIVAQVDERLVDTGKKRNRIRHAARHMKFADESAAQRHQAKVKKTQSRTEKAKAAAETSTSGGGHHDQPRYPWRASPRSRAGYCGRLGPYARQSPRQKMSRQVSLWTRSILQERRDFKMKVRGSHQQAVASAYTSQECSQCGYTAKDNRHGDHFRCLWCGTVDTADGNAAKVILKRSTDPEIKLWMKKEAIKTILDQRHARITGETLAPVVKDASLV

SEQ ID NO: 12327 - protein, 395 aa, Gammaproteobacteria sp.
MMLRAHKIQLRANNKQKTYFAKASGTARKAYNWALDEWEKQYKAGGRPTETALRRQLNSIKRKQFPWMLEVTKNAPQMAIIQLGQAFKNFFAKCANYPTLRRKWIDDRFTLTNDQFKVNGSRIRIPHLGWLRMRESLRYEGKIVSATISRHANKWFVSITVEMKKPAIVIANENQVAVGVDLGLHHFATLSTGKKLTGPKAHKALMGRLKRCAKNLSRKKNKSANRKKAKIKLAKLHYRISNIRRDAQHQLTSKLVEQFSIIGIEDLNVKGMMKNRRLSRSIADMGFHEFRRQLEYKTEAAGKKLVVADRWFASSKLCSCCGEKVEKLSLSDREWTCLHCLTHHDRDINAAKNLEKMAVSSTASACGAASDGAMVNAIASHVAMKQEFNVKVTYG

SEQ ID NO: 12328 - protein, 410 aa, Bifidobacterium sp.
METIRRYNYRAYPTRGQREALSRLFGACRYAWNRYLDQRKVAWWLHLPLPSYAELSRRFTEFKREPENGWLVSVSSGPMAQALRHAETAYSRAYAHKAGYPRYKSRHCGEQSATFTTSARFHVRHEHNARWMFLRLPKIDGELKLRWSRDLPSGPSSVTLMRHADGTYEAGFVVKTEPKPAPKPRHDACGIDMGLESLASIVYSDGTREKIAPLKALRKAERKLRKLDKELSRRQRGSNNYGRTRLAKARLYARIGARRRDLAYQLASRVAGENQAVAMETLCVKGLMRTRMGKSVADAAWSTFTDRVDMLCAQWGRRAVRIDRWCPSSQVCSQCGRKDGPKPLNVREWECPNCGAFLDRDWNAALNILDAAGLAESLNARGGDVRRRLASAGRNAIAREAGTHRTAMPH

SEQ ID NO: 12329 - protein, 397 aa, unknown
  TnpB Polypeptide
MLSAYKYRIYPNSGQEMRLKRSPLLLSNLYNKLRARKIEEYKEHRISLKQNDLRTIALEYRKRNIEFKSVYSQVAQNVADRVHAAFGNYFGGRARFPKVKQPRKYLSLTYPQSGFEFNEGRLCLSKIGRVRIFLHRAMQGTVQRLTIKYEAGEWYAIFLTEKAALAKPKINRILGRKIRGADLGLEKFATLDNAESVEYPAFLRKSEGKIKRLQRRLSKKHKGSKRWNATCFSLARLHQHVSRQREDFQNKLIAEIYKENDVLVLEKLNVENMLQNHSLAKSITDASFSKFIRKAVFKAEMLGKHFIAVDPWGTTQFCYHCLEWVPKDLSEREHKCQECGIELSRDLNSAKLIKRLGILSLRVSPPSDGGLSPAELKPLPSLRRMVSRGVEAGSPRL

SEQ ID NO: 12330 - protein, 394 aa, unknown
  TnpB Polypeptide
MNNKKTLYVTKQLNIAQTNQLDLLSLECGRIYSKCLVTFHRIWRKKGFWLSKYGMQRIVTEGELHAHTIDGVIDIFYENLNSYLVLKKTLPTAKPPQKRKRFFAIPYKSSAIKLNEGMLTLSNGRGNEKLSIPWAFDKPKTVTINYNHQKRCYKVNAVYPDFAHCIPLGEKVAGADPGDIHLLATYDGETAYLLNGKALRSKRRYQNKVKGHFQRKMDVKKKGSRKWKELNKAKKRVLGRLDNQVKDILHKQTTGLVKQMYEDGVNVIALGDLRELRSDVVAKSKRDGIKKTKRNASQRQIVHQMLSGKVKTYLAYKANRLGMKVELVNEAWSSKTCPKCLSRNDVKGRSYECNCGFNHHRDGVGSINIRSKYKYQRYVAVVGEMAPPVGLSYT

SEQ ID NO: 12331 - protein, 444 aa, Acidimicrobiaceae sp.
VTTTGPAAGSPTSVTQAYVFALDPTLEQVSLLRSHIGGSRFVYNALLGLVKTNWEANRARKDAGERVAKEDYLGTRQFDLQKTWYAERDELAPWWGENGSSTYNYACLNLSKAFINFRAGRAKFPTFKKKGTAVSVSFLSNAVRLVDSHHLRISRIGKIKTYESTRKMFRHLERGTGRIVASTITQRNGKFAVSFTVQVSRVVPTPRAPERVIGIDVGLSTLYTGAGPEGEHTLDVANPHHLIKAERMLAHAQRVAARRQGPRPGAAPSRRWKKANSRVVQIHTSTRDARRNLIHNTTSMLAKNYDVIVIEDLNVKGMVKNHALAKHISDVAWGQFARQLKYKTKWYGSTLVRAPRFFPSSKTCSQCGTVKAKLLLDQRTYHCVACGLTIDRDLNAAINLAKYGLPGTNSGTGRGGEVRPEQQKLVGTARPDEASTETLTLVSA

SEQ ID NO: 12332 - protein, 452 aa, unknown
  TnpB Polypeptide
MSKALGKRPGNDSLTLTYSTRLRIDNVEDRRYLDNRFEYYAHIEHELFNGLAHGKLESKGLRDRTAHKYGISGRQANSLVHKTLGRLASLKALKKLEKSALTQRIWSIEAKIQSLSDKISVLKQDASENIITDKQLHKLRALKAKKHRLSLKLNQLRQRLAEFDKRANSLCFGTKRLFKAQFHLEDSGFASHGDWLREWRKARANSWYFLGASAEHLGNQNCQYDINKESLFVRMDTVKLKHIVINGVKFPHGADEIRAAQQNGQPVTCKIQKTERKYYLRASVALPKPMAVTYEAHGSIGLDYNKGFIQACDVSGDGNITGFMKYHLPDSGKNKAMGETALRTAVKAIAEKAAQTGRPVIIENLDFTKKKALSNKHVSKRKKYNSMINSFDYSRYIEYLESACYKAGVRLSKVNPYKTSKTGSERYAKRKGINTHQAASYAIGRLGLGFHI

SEQ ID NO: 12333 - protein, 679 aa, Planctomycetia sp.
MNAIEEKKTKPPDKATDYFKCIKIPLQHILKNPDINSPKITDAVIRCNKIVINTLMFMKLYLLDHFEKNNKLPEIDKVFVNSCMKILCNESVSGRPPKKEIKELKDKLTAFYNSDYKPLIKDTDLDYTHLNTVLDYLTIGIITIYENNIKLHYVEYIERYVNIVWKKKETIVKIKEENKEEDKQKELVNEFCRQLRKIKNDILEISSEYKSEYKSDIKYHNWIKEIKKTITPNKDKYQKDNLYYDLQCNPQDYLPCMIRMMNEVEKDKVMIYNVFPMRNDIIPHSIKLDTTTLVHLLFTQKQGNKTYYLLEGNLKKYEDKIWEFFFRTERQCFKKPKYTFHHMIETDGISCSILMLRNDLIGKRIPNIKVGSNTEQYIDELSDYTNIKNKKIIAYDPGKLDLIYCVDDDSKDANEFRYTQDSRRKECKIKKYAKIILEFKKEKIDGKTVIEYETELSKLNRKTLTIKDFKDYIQKKSEINNKLYAFYEKYIFRKLKLNGYINRKKHEQKMINNFKKIFGKPEDVIICAGDFEQKQHMKYKEPVKGKGIRRIFRDNGYKLYLVDEFRTSCMCSICKEETGRCDKFQIRENPKPYKSGNILVHGLIKCQTCLGVWNRDVNGATNICRIAKNAINGLERPKYLCREKKDENIKVEKLKKEKVNKVVQKKAKKSVKVVALTKS

SEQ ID NO: 12334 - protein, 394 aa, unknown
  TnpB Polypeptide
MIKAIKVRLSPNNKQLTKLFQYAGCARFAYNWAIAREQENYKQGNKFLSDSELRKEFTQLKKLQKYKWLNEVSNNVTKQAIKDACNAYKRFFKGQCKHPNFKSKKRSPPSFYQDNIKIQFTDTHVKVEGFSMSNKRNKQKLNWIKLCERGRIPTGCKYMNPRFAYDGLYWYVSVGIEVDDTTNNTLPSNEGIGIDLGIKDLAICSDGNTYKNINKTQKVKKLEKRKRRLQRSISRRYDKNKKGGNYCKTSNIIKREKELLRVTKRLTNIRQNYLHQITSEIVKREPSFICLEDLNVSGMMKNRHLSKAVQQQGFYEFRRQIEYKSARNNIPVIIADRFFPSSKLCNCCGNIKKDLKLSDRIYKCECGNVIDRDYQASLNLKMYGKNVLETQSVV

SEQ ID NO: 12335 - protein, 471 aa, unknown
  TnpB Polypeptide
MQTPVKMLRNSSNIAWVNTLRRNFVTKTKCTCIRNTQCLPWRVSLLSRIGQSIICTMQRLQAFKYELQPNGEQRRAMGCFAGSRRFVYNKALALQKTHYEAGGKFIGYVAMAKHLTEWRNCVETPWLKDAPVHPLQQALKDLDRAYQNFFARRAMFPRFKRKGQSENFRYPDAKQFEIDQTNRRIKLPKLGWVRYRNSRDVLGVPRNITVSQSGGRWYASIQTMREVEQPVPSATSAVGIDLGVARFATLSDGSFVAPLNSFKRHQARLRRYQRALSRKTKFSRNWQKAKRRVQNIHTRIGNTRRDFLHKSTTTIGKNHAMVCIEDLQVRNMSRSAKGNAKKAGTNVRAKSGLNRSILDQGWFEFRRQLEYKLKWNGGTLVAVPPHNTSRTCPACGQVAAENRQRQAHFQCTHCSYQNNADVVGAMNILARGHRVAACGEDGSGLGRKTRTKPASVKQEPTEVTIREATHA

SEQ ID NO: 12336 - protein, 481 aa, unknown
  TnpB Polypeptide
MKITIRAFLPDISEEVDEILSDMMIKFCSALRYSFKRLLESVMPNDLEKIVAAKYGLNIRQAKDAVEEARQTIASQKELLKLNYDNYTKKVKAIEKLLAEDNLTERKRCALQKKLEKRRRKQAYYKGFIETGTIPPVVFGTKELFIKRCKGEITKEVWQAARNNRIYSRGDKTKGGNPNLRIVIDSDNQTYLEISTPARTETNRAVKIQMPVYLPQKLSKKTGKINGRNYRSIMLDYLKTGEAYKVELIRKNRRYYCHITIDETKIMEYKPLCTGHCGIAGVDTNPDGFAVTLINKDGNYKQSVYFKQPELQYASSNRRENLCGELAKKVVNYALENECAIAIENLRFSDDKDVSRKFSRIKHQFIYRKLLTMLETACVRAGIEVTKVKPQFTSKIGLYKYCHQFGLYIHNAAAMVVARRAYGYKERVPQILKDKLIPYKTSFEKKTEWGQWAIIHNILKKKGGTGFWIQNRKQILGLEKS

SEQ ID NO: 12337 - protein, 197 aa, unknown
  TnpB Polypeptide
LQRRLSKKYRKGANYYKACQQLGKQHLKVGRQRRDWAIQQAQALVASNDVVAYEDLSVSNLIRNHNLAKSISDAACSQFTDFVDYDGQVWGKAVVAVNPAFTSQDCHNCGHRVQKSLSTRTHKCPHCGIETCRDTNAALNILKRGMEALGMEWSNNSTQGHWETASKEGKTGETPASVDEGKPDSASGVDEPVIQNP

SEQ ID NO: 12338 - protein, 411 aa, unknown
  TnpB Polypeptide
MAERCVPELAYLARNEYTNDVQYRSQHRKRQVSNVQLVEQHCISKRDPRYAIIDAAAFRSKNLYNAASYEMRQTFFNEGMYLAYEEDSSKFTGRPRIPKYKHKTEGRNILIYTMQAVSRGKRSLQRGSIRPSMLPIEVKTQQDPKQIDQVRIIPRNCHYVIEVIYRKAPVQAQVDPSFCVAIDLGVTNLAAITSNREGFIPRLVNGRTLKARNQWYNKRMKELKLCLPKEERERVTKQMEQITNKRNRQVNHYLHAASKRMIDFLVKQGVGTIIVGKNPLWKQEAGMGKRNNQNFVQIPHARFIEMLIYKAALVGIQIEVQEESYTSKASFLDLDPIPTYQPNDDTEHTFSGKRIGRRNRLYRTKDGQIICADVNGSYNILRKSKPDAFAHVDAKGLAAYVVQPLRLAITV

SEQ ID NO: 12339 - protein, 322 aa, Bacillus sp.
  misc_feature (289)..(319): Xaa can be any naturally occurring amino acid
MILAKKVRLIPTPEQEKVLRNHAGASRFAYNYCKRMSDRYYKLFGKSVSQLALQKRFTKIKKRKRYEWLNDINAQVPKQASKDFDTARKHSFKKYKNGYHTSYKSKKDLIQGFYANYERLIIGKKVVDIQSIGEVKTSQQLPRNKKPSNPRVTFDGRHWWISVGFQEDFESQELTNESIGVDVGLKELFVASNGTKERNINKDAKVKKLLKRKKSAQRDMSRRFKKGVKIQSAGYEKAKTEHLRLSRKIMNIRNNHIHQATAKLVKTKPMRIVVEDLLISNLLKNKKLXXXXXXXXXXXXXXXXXXXXXXXXXXXXXXXQDG

SEQ ID NO: 12340 - protein, 240 aa, unknown
  TnpB Polypeptide
VGEDRHKKLASVHISSFEKRRSVQRKASHSKKAKRVLSKYSKRERNRARKHQLEIARVIQSVAGVVGLEELKKQGMYTRSRIWNRRISRSDWRGIAKILEGRLGEARVEELDPYGSSSFCSRCGWENKDLNGADIFVCGGCALRINRQLNAAINLYMRLRFGYTTNWEDGRKRVQLRMEGAPQRDWWDTMVLPSLLGGCVLTGAEQKTPDELVRELHEVVKPKLYYAYDRHADAYLCIPT

SEQ ID NO: 12341 - protein, 367 aa, unknown
  TnpB Polypeptide
MIFKTYKYRIYPNKKQEVLIQKTFGCCRYVYNKTLAYRKNLYETEKKSMGKFDCSNYVVRVLKAECEWLKEPDKFALTNAVFAMDDAYKRFFTLHSGYPKFKSKRDHRRSYTTCSCNSNIDVLFDSNCVKLPKLKLVKAKLSRPFIGKIKRATVSQTPSGKYFVSILVDTEHELLPPSGGAIGIDLGVKDLLITSNGEKYDNPKLTQRYAEKLAREQRRLSRKVKGSHNYNKQRIKVARVHEKIYNTRIDNLHKITHKLISENQVIVSEDLSVSDMVQNHNLAKSISDCGWYELTRQLAYKAEWNGRTYIKIGRYTKSSQPCSVCGYINSETKDLSVREWTCPECGTTHDRDINAAINILNEGMKLL

SEQ ID NO: 12342 - protein, 367 aa, unknown
  TnpB Polypeptide
MEKAYKYRIYPNKRQKELLVKTFGCCRYVYNHYLAMKINLYKESKKTMSYIQCSADLTALKKELEWLKEVDSTALQSSLKDLDTAYQKFFKGHTGFPKFKSKKTHEFSFKSKYSNNNIEFCNKHIKLPKLGMVKIRDRQVPQGRILNATISQVPSGKYYVSLCCTEVEIKPFEKTGKSIGLDLGIKSFCITNDGNVVENPKYLKKSLTKLAKLQKELSRRTKGGSNRNKARIKVARQYEKISNQRKDFLQKLSTELVKNNDIICIETLKVKDMVENQNHNFAREVSDVSWYEFTRQLEYKANWYGKQLIKVDTFYPSSQLCHVCGYKNPDIKDLTIREWTCPSCGTHHDRDVNAAINILNEGLKLVI

SEQ ID NO: 12343 - protein, 354 aa, unknown
  TnpB Polypeptide
MMRSKLIGSKEAIENFQFVTINGRVEFEDVEKISRIAYYYSKAVKAGINLALRRVSLNDAVKELYKIIPYAFYAETAYKQALALVENNGNKVEIRKRWIACRGNRSDNGNRGIKFHVLENHVLIKVKDPWGKWVYGEAYFGKEYLPLLKELEELSRRKAEGYGAVISFKHYPVIHLQIPLWLYLKHFSSPKPNGYGLFAGFDLNSDRLNVVVVNKEGKVVTSKTWRYSDVARPGFPKDKAKALRSNALSQALNFLSRIGIDYVVFEDLFLVKRREFTRSKSGNRKASRFAKRQMLTHGVVKALRLGFNVILVNPKGTTNSEAHDRMMREKGFDRHTASAYLIALKGLEVIRNNE

SEQ ID NO: 12344 - protein, 400 aa, Hassallia sp.
MYRAYKFRLYPTPEQQVALAKSFGCCRWFWNHSLNLCQETYKSTGKGLSRGAIQGLLPALKKEYPWLTDAYSQCLQYVALNLSTAYKNFFEKRAGFPKFKSKHGRQSISYPANVKLDGDYLKLPGKVGSIYCRQDREVAGKFVTTTISQNTDGKYYVAIIVDDGKAIPEASTDGKAVGIDLGLTHFCITSNGSKFDNPRHTKRHAKNLKKKQQSLARKQKGSLARAKAKRLVAKVHSRVSRVREDFLHKLSRKIVNENQVIAVENLCVKGMVRSHNFALAISDCGWGQFCTMLKYKAEWEGKTYTEIDRFFPSSKLCSVCLNKVDSLPLDIRAWTCDKCQTHHDRDINAAINIRNEALRILDLGTRSTANGGNVSQPGKTSVLLDAVPIEVGNPIRLAVG

SEQ ID NO: 12345 - protein, 158 aa, Hassallia sp.
LKAFADACNYANQKVKPQISSKTTIQNMVYNEIRALFRLSANLAVRACARVGANRKTAKLKDKPVKTFKPTSADYDARIFSFREKDWAVSLTLMNGREHIKIDVGNYQRGKLKGRKPTSAQLCKHRDGNYYIHIQIKDKAPTPIKSNNVIGVDFGRRV

SEQ ID NO: 12346 - protein, 394 aa, unknown
  TnpB Polypeptide
MRQAFVYRLYPSRSQERAMEAILTTTRSFYNSLLAERKQAWEERGERVTKVHQLRRVKERKATNPYAAAVHSHILQVVADDLDKAFQAFFRRVRTGEKPGYPRFRGANRWTSFGLKELGNGFKIDGRRLKVSGVGRLPVRWHRPIGGAIKTLRISKKAGKWYAAFSCVVPDAEPLPATGTAIGIDVGLTHLLTTSEGEMVENLRWYQAEQAKLRVIQRRIARRTKGGRNRKRAVDQVQRQHARITNRRKDYLNKLVADLVRSHDLIAIEDLRITNMTRNHHLAKSILDAGWGYLTDRLTRKAACAGRWAVCVDPSYTSKTCSGCGERFSQEITLAVRWVTCEACGLSLDRDHNAAINILNRARGVPNQQPARTSPLGVNVAGVPACVAQEAAPL

SEQ ID NO: 12347 - protein, 406 aa, Thaumarchaeota sp.
MTQVIRGYKTALRATKAQEELFTKASGIARFAYNWGLERNNNVYLWNQLPLHPPLKYESPVDQHRILNARKAKDYPWMYEVSKCAPQEALRDLGSAFHNFLIRRDRFRWPSFKSKRHGAKQSFTLTGAVRVKDRMIRLPTFGWVKLKERGYLPARSHVLCATVSRRAGRWFVSIGVRKKRVRPRENDGPVAGVDWGIIHPATVSDGTTLERPRLERLKWQERHAQKALTRKAKGSKNRLKALLRHQKIWYRITNIRVDRLHKFTTTLARTKSVVVVEDLAASKMAKNHSLAGAIYGGAPYEMRRQLEYKTKWHGTRLIVAPRNYPSTKMCSGCGIKNGVSLGERTYHCAGCGLVIDRDLNAAINLANYYHCYGTASSAGRACQMQEVTSPQGLVPAGEAGRVGGAV

SEQ ID NO: 12348 - protein, 449 aa, unknown
  TnpB Polypeptide
MQTMLTVKLKLLTTADQFQALRRTQLAYRDALNCVSQYAFAHGKTSNVKRLQGDNYARIRAEFGLPAQLACNVPRQVSGTYKALWTKTRKNAEARRLGYTKKRYRGLDKPPTYVSPTLTYNLGRDYSLRSGQEVSILTLAGRIHVSYRGYDKHVALLRAGATMGAAKLWYDRSKKRFYLLVSLHVKTSDPAPDTYKQVLGIDVGQRYLATVATTNGTQFYSGKQVRAQADHYARLRKRLQRKGTRSATRKLVAISGRERRLKLNTNHVISRRIVDAHPASLIGLEDLNGIRERAKRRKKRRKGSRLVAVSPQARKANRHASKWAFAELQGFLTYKAALASSLCMKVDARYTSQMCPHCGHTSPDNRPRKGLLFACQNPTCHYTLHADLIGARNVCLRTLLVWQDWASTGTLSGHLDVASDEAKAARWQRYAELRWSSVTSPSSSGDLGS

SEQ ID NO: 12349 - protein, 460 aa, unknown
  TnpB Polypeptide
MKKLQRDRKIVRSVRHSLLFANTNKKELLRAFLKNYRYAVKLYVDALWSMHREWDGKKPDKSGKIPHYVLDIKNERYDFPSMVSNVDIENTMSDDIKRMPISARAKACALSQAIGMCKASAEKARRYEYILDNVKHKRQRTEHERMLRERKRPVKPHCDNIRAELRSLCAEVIDNENSKFSFFVRLKSIGMGIPDIVIPTTKTRCDRKFIDLGFKRLSGILVSETDVDFRYEGEIPEIKDGATLGCDQGMKDTLVLSNGVVTPIVDNHGKRVEDLYAKLARKRKGSDAYRRAEIELTNFVNWQVRKTVENFNGSVKRINLEKVVNIRFKKRSCRKMQAWSNPRIVDALKANCEISGVHVHEEPSTYMSQRCSECGLVRKASRKGKTYKCPHCGNEMDADLNAAVNHTADLTPIDWRFRKLKLNRGSGFFWMADGLYSVSDEGEPGVHLDPKTGKPIEDFS

SEQ ID NO: 12350 - protein, 396 aa, unknown
  TnpB Polypeptide
MLKSIKFRLYPDQNQIELLDRQFGYCRFIYNWALDYSDWEYKTNQTVTFKKHWESKLPDLKQYLPWLKEANSQSLQHELKHLESAYQRFFKKLGGLPKFKSKYDKQSFSVPQNFKIENGMLSIPKLKNIPVIVSKDLSSSDIRSITISKTKTNKYFVSVLYDDGLTMPAKPELNKNESIGIDLGLKEFAVISDGTRIINPKFLESNLKKLKRFQQSLSRKKKDSSNRSKAKLKVALLHERISNQRSDFLHKTSNLVCKNQEAKTICIENLNVKGMVKNHKLAKAIQSASWSEFVRQLQYKSDWNGKNLIKCDRFDPSSKTCNECGSIKDDLKLSDRTWLCPCGARLDRDLNASKNIIDFAFGKIYPEDTGNYKSVERMDRSYISSESVLMKQKAFA

SEQ ID NO: 12351 - protein, 316 aa, unknown
  TnpB Polypeptide
LQQKLLDLDRAFRDSFDRNQPLKRVPVFKKKGRGEGIRFPQGFKIEGRRIFLPKIGWGGFFWSRAIEGKIKNITVSARAGRWYASIQTEQVLDIQKHPSDSEVGIDAGIKCFAAFSDGTLIKGVNSFSKHEHALAREQQKLARKEKGSQNWKKQRRKISKLHHTIANVRSDFLHKLSTETSQSHAKVYVEGLKIRGMSASARGTLEAPGRNVRAKSGLNKSILDQGWFEFKRQLDYKLDWKGGSLVEVEYRYSSQRCSGCGYTEKRNRKSQAEFVCLACGYEQHADVNAARNILTVGQTGLACGSNRISGRKQEPA

SEQ ID NO: 12352 - protein, 365 aa, unknown
  TnpB Polypeptide
MRTAYRCRAYPDPAQQAVLNRTFGCVRKVWNTTLAARQQRYVTSRTATSYAQTDRALTDMKKNPDLAFLNEVSSVPLQQTLRHQHQAFGAFFAKRAHYPRFKSRFVRQSAHYTRSAFTMRSGELHLAKTSGSLRFRWSWPNVDVAALNPSMVVVSREPDGRWYVTFTVEAEDPEPLRQAGRAVGLDLGIKDFAVTSDAKKLANPRHLERKARNLARYQRRLARCQRGSANRAKARLKVARAHRKVRNARSDFLHRSSTRLVRGNDVIVIDRWYPSTKTCSACGRLLAKLSLSTRTWQCPSCGTRHDRDVNAAKNILAAGQAVTACGADVRHSGTSRAQSAVKQEPQPVTAGIPVLQGEEKSTFSS

SEQ ID NO: 12353 - protein, 388 aa, Acidimicrobiaceae sp.
MTGAIAEEYLTRAVVFSADPTQAQERLLQSYCGAARFAHNWALGQVKDNLATRTGERESGIAQADLTPSQSWSAFSLNKAWNAAKEAATWWPEVSMHAFRSGVVAAAAGLENYRSSKKGTRKGRPVGFPRFKSRDRTNPSVTFTEINHQASWFEDPDVLAGRVSPNGHRIRLMLAEHPGSGGAAPSGQPGLDPHHRVHSAPVHEGGRQHRLHPEGHNLACRRTLAGGGAGAVSGAASGSVSCAPWCTRPIRPDHRHRGRALSIAHLATLSRPVPGLTDAHGHIANPRVLEKQLGRWAKVDRRLARCQKGSKNRTKVKRRRARMHDTITKARSLELHRVSNALANQFDVIAIVDPNLAGMANAKRHLGRALAPVCQADASLAELRRQLT

SEQ ID NO: 12354 - protein, 186 aa, Ferroplasma sp.
MQGYPHMIRKPIWTRRRQKLQKHIRNPQKRSKKLKQARGRQRRRIKDALHKQSTTIVREHPDTSSVLEDMKGIRKSGEDMGKKFRTHLNRWPYSEFQKMIEYKSQKKTVYVNPRGTSSECPVCGEKVKHPAWKISKCDNCDRDYDRDRLASLAITLRGIGMCGDPFPVSALASWQSMKNEYLYIRD

SEQ ID NO: 12355 - protein, 405 aa, unknown
  TnpB Polypeptide
MLVCSLVFYLKNPLPNEAKFLMEDFRLAVNNAIRLGVHSNVTSKYALTKLAYKDFRKEHPNMYSQHLVGAFEVAGSILKNHRRRLRRGIPVQTPFVRRLFIKAENQAYKLDRENGIIDMPIRAGLHIQLGLIVSDYHRRYLNDESLSLGSLTLLPDRVIVAIRKHPPKAYVPESIVSLDTNERSLDGVLAKEDRITAVVKAEFPEVSIIQSVHHDRRRRLQKKKSHDRRTARELCAREGTREHHRIDYRMHEVANAVLSFAEEQKSVIVLEDLTGIRPRMDKRMNRRISMWPRRKLHQIIEYKAAWQGIPIVKVDPRYSSRKCPVCGSIQDSRKGTEFVCGCGWHIDRHINASINLLQSAASEKAAGGLWFSPGAFQHDVVMVLCGPGRTARPEPNGTSGIRAMA

SEQ ID NO: 12356 - protein, 370 aa, Paenibacillus sp.
MILAKKVRIRPTPEQERQLWRSAGTARWVYNLTIARQEENYKNGGKFLNDGLMRKELTQLKQREEYAWLYDVSNNVAKQAVKDACDAYKKMFKGQSKKPKFKSKKRSKPVFYNDTVKFKVKDSKVLLEKIGWVATSEQLPESDKYSNPRVSFDGKYWYVSVGIEQEQKIPELSDEAIGIDVGIKELAVCSNGMVFKNINKTSAVRKTEKRLRRLQRKVSRKYEMNKEGKRFVKTCNIVKVEKSIRLLHRRITNIRTNHIHQATSAIAKTKPSAVVMEDLNVNGMMKNRHLSQAIAGQKLHEFTRQMKYKCEKIGAMFIQADRWFPSSKLCSCCRQIKNELKLSERTYECDCGLKINRDMNAAINLSKLVG

SEQ ID NO: 12357 - protein, 445 aa, unknown
  TnpB Polypeptide
MKVTNSYKVKLVNVNASLDATINVYRDAITYIIEIVNNEWKNIENLTNKDKNNYIEKLIHKTKKNPNPIYADFDKLFYKLPSYLRRSAIQDAIGIVSSYKSNLANYEAERYEAISNGKKFKKKSPNLQLKHFKCPALYKGNMYNRLSRNEAEIKVFKNNDWVWQTVKLREQDVKYIEKRCKEDKEFSPILVKSGRKYYLQFSYEKDVKLNDTKVKDQIIVAVDLGLNTSAVCSAIKSDGTVIGRKFIDQPIEKDRQKHLLNRLKLKQKQTGKGFKMPRVWNRINNLNNHIVNDTANKIISFALECNADVIVFEYLNFTGKKPKHIAMKMQMWAKREIQEKVKHKAHSNGIRYRRVNARNTSKLAYDGSGKVIRDKKNAKLCTFATGKQYNCDLNASYNIGARYFIKEAQENLSEKKWSQAVAKVPELGRRTQCTLSTLISLHQVM

SEQ ID NO: 12358 - protein, 438 aa, unknown
  TnpB Polypeptide
MAKPKKLLGIQQNQIYCNKDTLAILTYLCEQSNSLYNCGVYWARQIFFKTNRIVSKYDPIYEVGGNIHAQAMPSVTAQQTLLSVSEAFKSFKGLRELWFKGELEDKPKSPNYRDSGGLFKVSFPNIGAGKPTLQDGMIRFPLGLQVNRWFGLKEFLLPLPKNLDFAKLKEFTILPKNGVFYLECSYALTKVETKLDMDQALAIDLGTSSNLMACVDTLGHSFLVDSRQAKAMNQLYNKRVANRKEGKDKDYWDSVLDSFTRKRNHQMRDMVNKAAVLAAKHCLAHGIGTIVIGWNDGIKDGCKMGKKINQQFVQMPLAKIKTRLEQLGVLYGFRVVQNEEANTSAGSYLDGDSLPAHGCKPDGWKASGKRIKRGLYRSGDGWLVNADLNGAANILRKVAGNLGIDLSRLGRRCLTTVSRVKLWVAPKSNSCLKESHSL

SEQ ID NO: 12359 - protein, 181 aa, Okeania sp.
MNKSEATTQKITISRQAGDWYISLAFEFTPSVTSTSTEVVGVDLGIKTLATLSTGEVFESVKPYKKAQNRLAKLQRQLSRKVKHSSNWYKAVIKLAKQHRRVANIRKDALDKLTTYVAKNHGTVVIEDLNVSGMLANHKLAKSIADQGFYEFRRQLEYKCQWYDCELVVVDRFFPSSLDLL

SEQ ID NO: 12360 - protein, 400 aa, unknown
  TnpB Polypeptide
LDGRIFCLQCGKCIRRDAPKIYRKSRVGRWRQWVLKAYKYRIYPNSEQRIQIAKTFGCCRFVYNQTLAYREEIYEKEKKSVSKTDCNNYCNRELKKDYEWLKEIDKFALTNAIYHMDAAYQKFFKEHAGYPKFKSKHDNHKSYTTNFTNGNIAVDFETGKIKLPKLKAVKARLHREYRGQIKSATVSQVSSGKYYVSILVETEHKELAHTNHNIGIDLGLKDLCITSDGKVYENQKIIKKCEKQLVKLQRQLSHKGKRSKNYYKTKKKIAICHEKIRNMRKDYLHKVSHEIISENQVIVSENLQIKNMVKNHHLAKAISDVSWYELTRQLEYKAKWNGRKYIKIDTFYASSQLCSVCGYQNPDTKDLSVRTWICPKCGAEHDRDINAAKNILTEGLRQIA

SEQ ID NO: 12361 - protein, 379 aa, unknown
  TnpB Polypeptide
MITYNTTILGDSQELKKLLELHRFVFNYASKQQLPEQKNSLIVLHSKVYHNVRKSNPEIPSQVVIKAEQEVLASYRSAKSNKHKKKLIEKKNLSMRLDKRLYSIPDKFSIRITTTGKRQTFKFVVYPRLKELMEKYQYRDPLIYEDNGRICIAFSFENKVEKVKQRLALGVDLGIRRSAAMSDGRVIIDRKFNRDKRRLRHIKDELKSKGTKASRRKLRYSLRRKERNKNKNQTHLISNIVLNTNADTICLENLKSIKRKKNKYQNKHSIGQVPLYELRRVITYKAENAGKSVVLVSPQYTSQIDSMTGLLEGDRRGCRFFAKSGLVYDADLNAAMNIAKRSKLPVSYGNILDGQASVNTPNEYKSPLLGAVQAPIPLG

SEQ ID NO: 12362 - protein, 428 aa, Cyanobacteria sp.
MLTMNMTFRIDPNASQEQQMLEWLETCRRLYNRCLRDLKAWINSRKCPIDCCSLEQEYIVPADIPFPSYLEQKKHLTQWKKSDEYLKKVYSQVTQDVVKRLHNTWEAFKQRGYGFPRFKKFGQYCSFLFPQFKQNPIQGNTIKLPKIGNVVINQHRPIPDGFVVKGVRVLSRARNTKWYVVVTVQAKVDVPDPPAYGRAMGIDIGLENFLTTSDQYTVEPAYFFKDWQSKLSSLQRKVAKKKKGSKNWHKAQIKVAKLHHKIANARKYFHFQTAHDLCDQADIIFVEDIDFRVSAKGFLGKQMLDGGFGQFREILKWVCWKRGKYFSQVDHKYTSQICPICGTHTGKKELIQRNHSCAECGYETTRDHASAQVIQQRGLKSVPVDCGEGKLSSNKSASPGVSPGVYDGRGVLSGVLYLDQCRCRNTQS

SEQ ID NO: 12363 - protein, 382 aa, Moorea sp.
VEKSWFSTSLKAAPNWNLQQIFSPSFTSSLAESTDSGNTAKKSKKIRVFLSPEQRSMIKRWFGVSRYVFNKTVKIIQSGEVKANWKAIKTGILNDLPDWCKTVPYQIKSIAIKDACTSVREAKKKYKKTSQINRVKFRSRKNPTQSCYIPKSAVSSKGVYHTKLGALTFAEALPEKICDCRLVSNNGNYYLVVPYTTTQEKTENQGRVVALDPGVRTFLTFFSETYVGKIGQGDFSRIQRLCHHLDSLISKISKAKGKQKRRMRKAARRMVIKIQNLVNELHHKAARFFVNNFDVILLPTFETSQMSKKSKRKIRSKTVRNMLSFAHYRFKEFLKHKAIENGKIVVDVCEAYTSKTVSWTGELVNVGGSKIIRSKIDGRIMD

SEQ ID NO: 12364 - protein, 320 aa, unknown
  TnpB Polypeptide
LNDVSCVPLQQTLRHQQTAFSNFFAGRARYPKFKSKRHKQAAELTASAFKYRDGRLYMAKSKAPLDVRWSRPLPSTPSTVTITRDAAGRYFVSCLCEFEPASLPISPKMIGIDVGLKDLFITDSGFKSGNPRHTAKYAVRLALLQRRLSKKARGSKNRVKARLKVARLHAKIADCRLDALHKATRKLINENQVVCVESLKVKNMIRNPSLAKAIADAGWGELVRQLQYKGEWAGRSVVAIDPFFPSSKRCSCCGFTMQKMPLDVRKWHCPECGAEHDRDVNAARNIKAAGLAVLAHGEPVNPELHRAAQVRLSEVGILAL

SEQ ID NO: 12365 - protein, 150 aa, Bacillus sp.
  misc_feature (150)..(150): Xaa can be any naturally occurring amino acid
IDVGLKDCAILSDGTTYKNPNFFRILEEKLAKAQRILSRKTKGSSNWNKQRVKVARIHEHIANARADYSHKLSTGIIQNHDVIGMEGLQVSNMLKNRKLAKSISKVSWSQFRTMLEYKAKWDGNQVVMVSKTFASSQLCSNCEYKNKDVX

SEQ ID NO: 12366 - protein, 409 aa, unknown
  TnpB Polypeptide
MRRTVKTKIRNLTQAQYEHLRGLCQVSKNLYNQALYAVRQEFRNTGKYLSYGETDRLMKQTANLEGGINYRMLKAGVSQQILRRLDKNYRSFFSLLKTCPDMNPRPPKYIRTDFYNLIYDSQRFQVRDGLVILDKTVSVRIPSRIAGKKIVQVEIIHKFRQFNACFVYEDDTVYGRIEPNGRVAGIDLGLNNLAAVATSGGDAMLINGRPVKSINQFYNKKLAGIKSELKKRNGREWSEKAQKLTEKRNNKIADYQHKASRKIVNFCLEREISAVAVGDVSKSVNGISLGKRTNQNFVNVALGQFANKLGYKLEAHGIKVVKADESYTSKASFADNDPLPEKYEPDKEHHFSGKRIKRGLYRTAEGLSVNADLNGAFNIIRKAVPEFDFQKLKDGIEGLFIPHCRLLTC

SEQ ID NO: 12367 - protein, 272 aa, unknown
  TnpB Polypeptide
MKQTMLLQLAPSPEQHTALLDLMHAFNDACNSIAETSFKRQLANKFELQKIVYQSARLDFGLSSQLAIRAISKVVDSYKRDKSIKPTFRCEGAVTFDERVMSFKGLNTVSLLTLQGRVLVPFRVEGYQESRLDSIKGQADLLYRNHQFYLAVTLDVPTPEPMDTFEVLGVDIGIVNLATDNTGEAFSGKVIDLTRMRMAAHRQRLQKRSTKSAKRRLKQLSGKEARFRKDVNHVISKRIVQKAHATNQAIAIEDLRHIRVRTEGSFPFTVAS

SEQ ID NO: 12368 - protein, 466 aa, Lactobacillus sp.
MMIKLPKTTEYIRVRRYRLVATDDLVAKFERNIEVENKVYNYVLKYLEKTYGVKHLNRPYPTTKKAKVFLAKDVLIPKILKDIYGLSKWDGKKVGIHSQALRDEYLVSILTNFGEYRKTLMSAAKMSKQDKEDYKNNVHNNNPKHKSWYRKSSLNYLRPNQSKRCVSLPSNGQAKIMSAHFIKIQDYGTIQVVENLTSMKNTNIVTTKIKRKSDGKFELQVVFKTVNKRKEVINKIGADWNMKDNKAWHTSEDEELYIDKDVSDKADELENKINKLKSQRDLITWLPRNSKRIVKLNKEIRYCNSKRSHILTAEYNEMAKKLLSKNDLVAIENLDAKEMRKRQEDSSKSQNRAKNRKLAKIKPYEMEQLVIQMANRLGKTVILVDSYKTSQVEYGTEYQEKHSVDDREWTSKYTGKTIKRDLNASKNILAWALNPKEHIKYKESLELQKEDKIKKAIRPQSLITIN

SEQ ID NO: 12369 - protein, 433 aa, unknown
  TnpB Polypeptide
LFGGVLSRARLSGRGSGAGNGLRLEWPPQSPFANLPQSESAGHRGRASRSADALRVWVGVSRFAYNWALAEWKRQYQVGEKPSEVALRRQLNSIKCQQFPWMRLVPKSVPQQAIKNCGAAFRRYFQKQSRYPKFKKKGVRDSARFENGPGTFEFAGKRVRLPVIGWVKLREELRFSGKALSATVRRVADRWFVSVSVEVDLPEPVRESQAAVGLDLGVSTAATLSSGEKLPGPKALHAHLERLQRLSRWHSRKKKGSNNRRKSAMRLARLHARISSVRQDWLHQTTTRLAREFAVIGIEDLNVRGMMTNEKLARNIGDIGFHEFRRQLEYKSMLYGADLVTASRWFPSSKICSACGRISEELPLSLREWTCECGPFHDRDINAARNLRLYALDRASCARINACGEEGSDAGLTASVKPASLKQESAMSYLGMD

SEQ ID NO: 12370 - protein, 370 aa, unknown
  TnpB Polypeptide
MKTRITIKLKIPCNQQIINAMKQYSKTITYISNIGFKHNVSNRYKLHHLIYYKAKNKFNLPSQYIINAIRVASQTLKSVKTNKGSKPLFKEIMPLEFDRRTFNFSFDKVRITMPDKRIDLPIEIPEYYWKYLDWSYQTMRIIYDKRFNRMFLHITFSRDIPINNISGNFIGVDVGINNIAVTSNNQFFNSNKIKHIKSKFRYLRSRLQSKGTSSGRKLLKKISGRERRFMRQCNHEISKAIVSSINVGDTIVMEDIKGIRKCRVNKKQRYWLNNWSYYQLRQFIGYKAILNGNRIIFINPRNTSKTCSRCLSLNTIRNGSNFHCLNCSYHLNADLNASNNLKLLGRFLTTKVDVNQPYIPNNDCETIRIA

SEQ ID NO: 12371 - protein, 416 aa, Pleurocapsa sp.
MSITRRVTFRLYPSKTQNERLHNWRKLHKLLYNACVSQRSTDYKQFGKSINYFDQQNCLPEFKECWIEFKELGSHALQATVKRVDFAFQRFFKLKLGYPKFKSARRYKGWTYPCKAGWKACTEGKNGYLKLTNLGNIQMRGQARDWGTPKTCTILFKQGKWYASITVDCVLTRTQADTGAVGLDFGTHHAVAFSDGTIIDNPRFIKQSQDKVNQLAKKSRRKRAPNYKKRIRPSCRWEKANQAVSRIQLKVARQRQDWQHKVASDIVSGNSFVATEQLNLKNLTKKAKKGSKRKRQKTGLNRNLLDVGIGNLKSLIKYKVNEVGGIYIEIPTRKVAPSQTCPGCGSRRKKDLSERIHTCDCGIKSLDRDVAAAQVMLNYARGKELTSSDVESPSSILCGSMRQLGAKKRQKLVPNL

SEQ ID NO: 12372 - protein, 376 aa, unknown
  TnpB Polypeptide
MFQAYKYRIYPNKIQERQLIKTFGCVRWVYNHFLKSRLDLYRNLGKSSSSYADSKALTQLKRSSGTEWLAEADKFALRNTLFDLDVAFRNFFGTCRTTKRYGFPKFKSRKKSRNSYTTNFTNSNIAVGENWIKLPKLGKVKAVIHRPTEGRMISATVLRTPTGEYYASICCTEVEFEQYSQTGKSIGVDMGLTALATLSDGTVIENPKRLKQMSKKLARAQRAFARKQKGSKNRNRVRMQTARIYRDIVNARRDAAHQATAKLVREYGVIAAETLSVTNMQKNHRLAGAIADAAWGEFLRQLKYKSERHGRLFVQVPRNFASSQTCSVCGTKNPAVKDLKVREWNCPACGTHHDRDINAAVNILSEALRQEELKAG

SEQ ID NO: 12373 - protein, 342 aa, Escherichia sp.
  misc_feature (155)..(173): Xaa can be any naturally occurring amino acid
VKRLQAFKFQLRPGGQQECEMRRFAGACRFVFNRALALQNENHEAGNKYIPYGKMASWLVEWKNATETQWLKDAPSQPLQQSLKDLERAYKNFFQKRAAFPRFKKRGQNDAFRYPQGVKLDQENSRIFLPKLGWMRYRNSRQVTGVVKNVTVSQXXXXXXXXXXXXXXXXXXXKIQRLHSRIANIRRDYLHKVTTTVSKNHAMIVIEDLKVSNMSKSAAGTVSQPGRNVRAKSGLNRSILDQGWYEMRRQLEYKQLWRGGQVLAVSPAYTSQRCTCCGHTAKENRLSQSKFRCQVCGYTANADVNGARNILAAGHAVLACGEMVQSGRSLKQEPTEIIQATA

SEQ ID NO: 12374 - protein, 358 aa, Gammaproteobacteria sp.
VEKSWFSSRLIYPQNRSSQQTYSAFFTSSVVECMDSETTKAKSVKLYPSPQQKQTFKKWHDCSRYTFNQTIDYIRSCVNFSPSWMDIKKDLLKQLPEWCDEVPFQIKGIAVKEAHQAFWKAGGHPKFRSRKAPTQSCYIPKSAIKDTGIYPRISGKGMRLGESLPESPLDSRLIYQYNEWFLSVPHKIITHVAENQGRVVALDPGVRTFQSFYSESVAGHIGYDDFGRIQRLCFHLDALISRTSKATGKAKHEMKRATARIRKKIKNLTKEIHFKTARFLVDNFDVILLPTFETSQMVGKSHRKIRSKTVRAMLTWAHYQFKMRLKNKTIELGKKVIDVCEAYTSQTVSWTGFEDKVF

SEQ ID NO: 12375 - protein, 384 aa, unknown
  TnpB Polypeptide
VVTEATRTLRLKVRAESYAWLDAAAREVNTVWNWANATSMDAADRTRRSNPRWLSGFDLCNLSAGASEYFERIGADSIQRICCEYALKRRAAQRFRLRWRASTGAKRALGWVPFKAANLKRKGVSLRFAGKHFRVFERDRLDGVKWRDGCFAQDSVRDWWLCLPVMVNIGQIAPGRDAVGIDLGCKDAAVSSDGGRLVSGMYRSMESKIAQAQRRGHKRQARRLHRRAANQRRDALHNFSTMLVREYGRIYVGDVSSTRLAQTPMAKGALDAGWGMLKTQLQYKCQSAGREFAVVSERNTTRACSGCGALTGPAGLDMLAVRHWECADCGESHDRDVNAARNIRSVGSRCMTSVRGNEQHRQARRRAGHLARARPGKRAQAVAA

SEQ ID NO: 12376 - protein, 217 aa, unknown
  TnpB Polypeptide
LANGKYYVSIAVEEKHPVVKIIPKKIIGIDLGLKDVVITSDGEKIKNNKIIEKYEKRIKRKQRELARRKKGSSNYYKTKQKIAILYQKLKNARKYFIHKTTKKLVLENDIIISENLNVKSLIEGKKLSKQLSDVSLSRLCSVLEYKAKYFGKRYIKIDRYYPSSQECSHCGYKNIKVKNLAVRTWRCPSCGYGHDRDINASINILFEGLKIYMEELV

SEQ ID NO: 12377 - protein, 399 aa, unknown
  TnpB Polypeptide
MRFRLYPTSTQESLLLEACGQARFVWNLGLEQRLMWARWKGPTPGYNAQSAQLTQARAASPWLAAGSQTVQQQALRDLDQAWRNFFAGTHRRPTWRKQGRHEGLRVVGAQALRARADNHRWSSVLVPKVGWVRFRRSRALPAWKSYRITRDRAGRWHLGLAAIPAPVPGPGTGQVVGVDRGVAVAVALSTGELTSPAGLRPGEAGRLLRLQRRLARSRRRSNRRTVLKAQVAGLKARQADRRKDWVEKTSTDLARRFDVIRVEDLKVASMTRTARGTLAKPGRRVAQKAGLNRGILAAGWGALVTRLEHKAPGRVEKVSPAYTSQTCYACGYCAAENRKSQAVFVCASCGHRDNADVNAARNIARGRTAGGRSVAARGDMGALARSVKREPQLVAPSRW

SEQ ID NO: 12378 - protein, 390 aa, unknown
  TnpB Polypeptide
MEIRRTYKYRLYTSKREKYLHQQIDVAGIIWNHALAVQRRHYRLTGKYISKFRLITHIGKMRRTARFGHWQLVGSQAVQEVVERLDKAYMRFFAYIKGELGIKTGPPRFKKVKKYKSFTLKQAGWKLFAGNRIRLNGRNYKFVLSRPINGKIKTVTVKRDAGRLFVCLSVIEEVNLAVEASAGQIGGFDFGLKTFLTDDKGSAYQSPEFLKANLSEIARLNRQLARKQKGSGNWKKAKRQLALAHDRVANERRDAHFKLAHQLCDEYGAMGFETLNLRGMKKLWGRKMSDLGFSQFMLILEHVTCMRGKQVVKIGQWEPTSQTCSCCGQRQSIELRERVFRCEGCGLEIGRDHNAARNIRREAIALLEGVGASTPSLEGVRQSNVTASLA

SEQ ID NO: 12379 - protein, 287 aa, unknown
  TnpB Polypeptide
MNEKIHTKTLKVRVRDKHVKTLNAWAFAVNQVWNYCNELSHRAIKERQKWLSGYDLQDYTKGANKELGLNSATIQMIGHEYVTRRKQFKKAKLNWRKSGGVKRSLGWIPVRSDCISFKNGQLYHNRHYFKVWDSYGLSQYQFKSGSFNEDAQGRWYFNAVVEVKPEQSSGTASVGIDLGCKEAATDSNGHKVIGRQYRKLEQQLGIAQRANNKHRAKAIHAKIRNRRKDDLHKYSRQLVDSNAAIFVANVNSLTMTKNKNGQVRFRCGLGNAQNNAGIQMRSRRRCF

SEQ ID NO: 12380 - protein, 194 aa, unknown
  TnpB Polypeptide
VGVDLGITRLATLSDGRILENPKPLERSLERIRMLQRTLSRKKFLSNNWLKTKIRLAKQHERVKDFRRDLFLKLGVLLSQEYDVLVLEDLNVQGLIQKGVTKSRRLRLYDSSFSELRAVLEWEFRKRGKLVLPVPAFNSSRECFRCGEINRDLTLEDRVFRCPRCGFTVDRDLNACLVLLKRAWWVPPFWCACL

SEQ ID NO: 12381 - protein, 478 aa, Nocardia sp.
MSRHTAFRYCLDPTVEQQTVLARHAGAARFAYNQCLAMVKTALTQRRTDPEHPVPWTRFDLINAFNTWKKSEAAGRLFTVDPSGVTTVEVTGLVWRDQVCQQVFEEAATDCGRGLAGWSDSCSGKRRRPKVGFPRFKEKTTSTASFRLRNKHSRTGRSAIRVGDDDTPRSVTLPGLGQLRVREDTRRLRRMLTAGRAKILSATVSQRAGRWWVSVTVEAADLHPGHHHPARAPDDGGGWVGIDRGLSAFLIAATSEGREVARVDDPPKPLARGLARQRRLAKTLSRKEKGSRNRREAAARLARHHHRVANVRRHFLHQVTNELVKTHDRLVVEDLHVAGMLRNRRLARSIADAGWADFGRLLYYKQRWRGGTVVTADRWFPSSKRCSACGTLNPALTLSNRMFGCGCGYHADRDLNAAVNLAAWPTLHPQDPPRSPDLRAGGRVTNARRREGTDRHPMGAGATGPDDAGTKAPIPVGV

SEQ ID NO: 12382 - protein, 402 aa, unknown
  TnpB Polypeptide
MIKSYKYRLYPTAEQATFFEKSFGCCRYVYNWALQRRIETYQNSGERLSYVSIAKELTSLKKQEETEWLSEVSNQSLQSSIRNMDAAFTRFFREKKGFPKFKSKKRNRNSFQFVDCVFVDFDNKRVKMPKVGKVKFACDRTFVGKIGTCTVSKSPTNKYYISITVDDGKPMPEKPMIDFNTSVGIDVGIKDFAVLSNGQVFENPKFLEKEEKRLKVLQRRLAKKQKGSKRRERAKLAVAKQHERIRNKRTNFIHQVTSKIVRENQTIVVEDLNVDGMLKNHCLAKSISSVAWSEFFRQLQYKCDWYGKNLVRIGRFEPSSKMCLCGSVYKDLKLSQRRWVCPSCGRDNDRDLLAAVNILRFGLQEQNLTNNNKSPYVVGVEDAEWSELADTMKRQSISLLTK

SEQ ID NO: 12383 - protein, 368 aa, unknown
  TnpB Polypeptide
MKQTMLLKLTPTTEQSQALLDTMHAFNAACNYVAQVAFAEKTANKFELQKLVYSELRTTYKLAAQLAIRAISKASEAYKRDKSIQPAFKPEGALVYDERVMSFKGLLTVSLLTLSGRVLVPFQVGAYQESRMGSIKGQADLLYRHGTFSLAVTLDVPTPTPDEVTDTLGVDLGIINLATDSEGETFSGEQVERVRTRHQALRQRLQKRGTKSAKRHLKKLSGKERRFRKNTNHVISKRIVQKAKGHNQALAIEELRHIRTRTERTVRHSQRARQSSWAFWQLRFFLQYKAALAGVPLHTVDPRNTSRTCSECGHCAKANRKSQSAFLCQACGHTDNADRNAALNISRASVMVPIVSLGSRSGYTQIGA

SEQ ID NO: 12384 - protein, 318 aa, unknown
  TnpB Polypeptide
VDEQNHKLVLKDFDLEIEFVDRLRWYGKQGRLEIYYDETRNAWYASIPVEVGAEETKTGKGSKYIVRGERKSIQVESPKGNKVASIDLGINVLASVVLSDGTLLLYKGVRTKEDYFYFQKKIAQVQSLADKTKNIGEYEAYAELSREKRRLFKKLTRRLLHLYRNFASHLFKELHELGASTIYLGYPFNIAQDKGNKFTVNMWSYRKLMDAIELKAQEYGMKVFEVVEYNTSKYCAYHNVEVKRHPRGVVSCPKGHKLYSDLNGALNILKKAANIVVSAIKKPLSFIVDHNRVAPVKGCNPRDLREPSPFRVGRRSEV

SEQ ID NO: 12385 - protein, 387 aa, unknown
  TnpB Polypeptide
VRIFRGYKAELNINNTQRATLLRYSGTARWVWNWGLTRRIKEYKETGKSSTFFAQLKQLVALKNTEEYSWLRSVSSRVLLLSLRDLDQAYKNFFRRVKNGNKTAGFPKLKSRHNGIGGFALQGSIVVAHNAIKLPCIGWLKLKEHDYIPVGNVRILSAAVSEKAGHWFVSVQCEEEIVDRKPTKEPIGIDLGIKSLAVTLDGRVFKNPKALYKSMRKLKRLQRELSRRKRGGKNWKKTKTKLARQHYRVVNIRKDALHKATSSITATNKPDSETPNTIVIENLNVSGMMKNHHLSLAISDVGFGEFRRQIEYKCSWYGINLIVADRFYPSSKICSNCGNVNSELKLSDREWICSCGSILDRDLNAAINLRNLAITTAGSAESNACGE

SEQ ID NO: 12386 - protein, 276 aa, Halomonas sp.
  misc_feature (276)..(276): Xaa can be any naturally occurring amino acid
MTKRAYKYRFYPTPEQAELLAQTFGCVRFVYNSILRWRTDAFYQRQEKVGYVGANARLTELKKDPELAFLSEVSSVPLQQCLRHQQTAFKNFFEGRAKYPVFKSKRHRQSAEFTRSAFKYRDGKLYLAKSKTPLNIRWSRELPGEPSTVTVSKDSAGRYFVSCLCEFEPSKLPVTSNMTGIDLGLKDLFITDQGERVGNPRHTAKYAARLAKAQRRLSKKKLGSANRAKARQKVAKLHAKISDCRQDNLHKLSRRLINENQVICVESLKVKNMIRX

SEQ ID NO: 12387 - protein, 409 aa, unknown
  TnpB Polypeptide
MFRSYKYRLYPTKKQEVLLAKHFGCVRYIYNYGLERKIKSYSETNKSESRFTIQRDLPKLKKSESTKWLSEVNSLSLQAALLNLDMAFTRFFNEKKGFPKFKSKHDNKQSFQIPQNTKVDYEAKRVYLPKFKEGIKCKFDRQFSGKTKTSTVSRTPTGKYFISILVETEDTIPNKAPIDENQAVGVDLGIKMFATLSDGTEIQNPKYLKKALKKLKRLQRSVSRKVKGSNKRKKSVRLLALQYEKVTNKRKDFLHKTTKYLIDHYDTICLETLSASNMIKNHRLAQALSDISIGKFNTYMDYKAEWYGKNIIRIGRFEPSSKMCSCGHIYKGLTLKDRVWTCPVCGSVNQRDLLAAKNIKKFAFKLNNTARTAGIYAKESMNHVSGAALETSLADAVETHTSLEVGSSC

SEQ ID NO: 12388 - protein, 224 aa, unknown
  TnpB Polypeptide
MESPARNTLAERNPLAALAIDAQKLGANSFKKHQQRLKRYQRRLARKVKFSQKWKKAKAKVTQIHIKIGNARKDYLHQASAAISQNHAIVCIEDLQIRNRSKSSKGNAETHGKQVKQKSGLNRAILDQGWGEFRRQLDDKLAWRGGHLIAVPPHNTSRTCPACGHISKDNRRSQAQFACVACGYKNHADVVGAINVLERGHRLLACGESAQLGRSVKQEPAEVC

SEQ ID NO: 12389 - protein, 220 aa, Lactobacillus sp.
LVEQAELPKLELTGESIGIDLGLKEFAILNNGTLYHNQNKSSWIRRIRKRLRRLQRKLSRQYQALKARKQKEGKSATDLNLAKTQLKVQRLYQRLTNIQVDYQNKIIATVVRTKPQWVALEDLNVRGMMKNRHLAKAVSYQGFYNFRIKLVSKCQQLGIPVHLTDRFEPTSKLCHQCGYKKVDLKLSERTYQCPKCSYTANRDINAALNVRDTENFELAY

SEQ ID NO: 12390 - protein, 493 aa, unknown
  TnpB Polypeptide
VDLTRKKKIGPSERLDEITEACGDVWCDTVRWFWRSYDRHGVWLSKYDMQKWMCTRTISTEKKSNAFTHPDMQAFAGKRTNSMATARGKENVAMNTAQAVVGDFYDALRSWKKQDDEKANPPKAMKSHHKATWNYTQITLEGNTLKLQTPRGEDSVFIDWPHPEPKRVEVGWQEEEWEPGIEYEVRVQFDVEPDREPIGDKTIGIDLGEKHLAAATDGEQTWLVNGAEVRSLRRYQNKLKGTLQSKIDTKEPGSRRLERLVTSKNKQLASLRNQIRDVLHKLSRRLVETLFKAGASTLVFGDIRDIRDDLDHGTNQNQRMHQWVFGKFRRMVKYKAKLAGMTVADDIGEAWTSSTCPCCGDRTLVSRDWAEVCKDCGVTFHHDEVGSLNIRKKYLDGSRWQDGYLDSPVVADKGSTATEETSRGEFASNPQCSSPRGGKTNQLGLFASGDAAAPSSTRETPTRLDGLTHPVGIRYRPHMDCGPEGSPAISSEG

SEQ ID NO: 12391 - protein, 428 aa, Lactobacillus sp.
MLLSSKRRWQFMTKTMAQLPYYYGVKVRVFPSTEQKRLIKRNSDASRFIYNEMNGMNTDLFWLKKVKTPITLVLKRIADLTERLKKPSTAISNIHGWLNHPDFDSLMKANAIKNYKTAWKLFHQVHQAGTPKFHKRGYSQTYQTSCLYSAKVTVPTMRNGSVRLTDTHHLQLPKLGRLRFKGLPLKILERANDIRIGTTTVSMDAVGHYFVSLQIGSEHPFVAKQSIVKSKVGIDLNLDNFLTDSNGQVIENPRYYRMIKGKLAKAQRKLSRRARRAKRSQRRLSESKNYQKQRLQVAKLQRKVANQRKNFLHRVSTTLIKNHDLVVAEELRSKNMLRNHALAMSISDVGWRTLLSMLAYKADLYGRKFLTIDPRNTTQTCSHCGHVMIGENKLTLADRKWTCPSCGTFHVRDHNAAQNILAKGLAAL

SEQ ID NO: 12392 - protein, 487 aa, unknown
  TnpB Polypeptide
MHSATQICVKPGSEFYPYFDTIAALCNNLRNAALYRTRQVLTMVEKPFDKLTANELEVYNEIAFALPKMGNRYKMPVKGKQFLNYNFLDALLKVTKNPDYFAVGLPKHTAQQVLKEVVKNMKGFYAGVRKHKKDPAAFTGKVKLPRYGEKGGKHTAVFSNQECVIYDIKNKPGFHEIKFPGIKKRLYIADMPLRGRLKQITVSPSHGNFVISLIFDDGKENPVTRPPHRMVGIDLGVDNTAAITNNLGLPCLLFKGGVLKSINQLYNKKMAAIQSEQTKGTDKKFAMTKEAHGLCIWRNNRIEDTINKIGSSIVAWCYDNNVDTIVIGHNSRWKQTANMGKKNNQTFVQLPLYKLILNITYRAERCGIRVINREESYTSKASFLDNDVIPTYGKEDENYKFSGKRIKRGLYKAADGTVINADLNGSANILRKEFPDAFGFHQADFGNVIVIRHPDLENAKNNHKKQLAEPKAISKSKTKRLKAKGKM

SEQ ID NO: 12393 - protein, 204 aa, Kibdelosporangium sp.
MSGARSNRYRKRQQRIRKRLQAKKTASARRLLKKRRRKEQRVTTDVNHQISERIVAEAERTGRGIAIENLGGIRERVRLRKPQRATMHSWAFARLGQYLACNARRAGTAFVRVDPAYTSQECHSCGWIDRGNRRSQASFICGRCGFVGHADHNAARNIPDRGVTCWGEVMRPHALPSLAASQGGSSRPVGTPQSGARAANLGLQ

SEQ ID NO: 12394 - protein, 404 aa, Kibdelosporangium sp.
LLWCPTVIIVKQAVRVRVLPTPEQAAALLATLHTCDAAASWLSGRMHADRALRKFDVQKRFYAELRERFGLAAQPAIRVIGKTVDAYTTLRANLRAGNYGMPGSDRHRRVGGKPISFRAEAGQPFDARCLSWQLGDVGRGGTVSMWTVTGRLRGVRVVGDPGHLALLRSQSVIGETDLVYRDGVWFLHAVIDIPEPAAREPLNGFLGVDLGIVNIATTSDGDQMSGSRLNHYRKRQLRLRKRLQAKKTSSARRLLKKRRRRETRFTADVNHQISKGIVAEAERTGRGIAVENLTGIRARVRLRKPQRATLHTWAFAQLGQFLTYKAQRAGVMVVQVDPAYTSQTCHACGHVDRRNRRSQAVFQCGRCDFVGHADHNAALNIAARGVECWGEVMRPHAAPILAAS

SEQ ID NO: 12395 - protein, 407 aa, Holophagaceae sp.
MKVLKGHRFRFDLNEAQESLSSRTAGICRCLWNLALEQRSMAWTHGRHSVGYYAQAGELTDLKAAYPWVAEAPSHCLQQTLMDLDRAFQNFFAGRASYPTFRKKFQRDSFRFPDPKAFVVDEIGQRVKLPKLGWVSYRNGKGRHSLKLAGKTKSITVSREGKHWFASVLCEIEMADPKPIQAPAVGVDLGVAQAITTSTGEVLAVLGMTKAEERRKARLQRSMARKQNGSKNRSKARKRLAEFQTRISRRRRDAIHKATTYLSKNHGRVVVEDLRVKNMTASAKGTLEAPGKNVKAKAGLNRVILDKGFGEIRRQLEYKCRWYGSELVAVNPAYTSQRCHECGHTEAGNRPSQAVFRCLKCGHEANADVNAAKNILKAGLGLPAAGLAAEACGGKALAARRSRKPAA

SEQ ID NO: 12396 - protein, 453 aa, Acidimicrobiaceae sp.
VESRSNSLLPRSRGRGSPSSTNSTPGRMGSPTTLQSTKTEPEAFPGVTSCPETSSSAPAWTAARALANFAASRRGERSGVSLGFPRFRAKGKVTPSFRLRNRATSGQSPMSQLIRFSDPTHLRLPKIGPVKLFGPPRKIRRMIDAGRFHVYSATLTERAGRWTVSLTGVAAELHQAERSRRTRHRVPVGVDRGITSLCVAADANGTPFEDFEGVKTLRKAQRTLKAANQALARTTPGSKGRQRARARLAKTHRKVANTRRHLVHEASKTLVTRAQVVVLEDLCVAGMMRNRHLARSISDAAMGELFDQILYKAKWHGVEVRVADRFFPSSKTCSGCGEVKGELNLSERTYSCNVCGLAIDRDLNAAINLARWRPDEPSPTRQTEKSRAARLNRLIPYTNLHRQVRGKSRSSPAQTSRHRDEGTGSEPRTQTDHRLGSRTVNKNHRATWLSRSR

SEQ ID NO: 12397 - protein, 335 aa, unknown
  TnpB Polypeptide
  misc_feature (265)..(333): Xaa can be any naturally occurring amino acid
MIKKKAFKFLLEPSKSQISDVLVFAGACRFVYNKGLALLSENYNNGKPFLNYNKLAPLLVEWKNDNKLEWLKFCPSQCLQQSLRDLDRAFQNFFSGRSQYPRFKKKGRSDSFRVPCQRVRLDQEKGLVSLPKLGWVKYRKSRAITGDLKNVTVSRKFDKWYISFNTEEVVSNPVHPSVDKTRILLNDGYVTLCTGGDLSVKKFTSLVDEKKIKRLNKELSRKVKNSNNWLKNKKKIDKIRLKSGSFRLDAIHKITTTICKKHAVXXXXXXXXXXXXXXXXXXXXXXXXXXXXXXXXXXXXXXXXXXXXXXXXXXXXXXXXXXXXXXXXXXXXXCH

SEQ ID NO: 12398 - protein, 424 aa, unknown
  TnpB Polypeptide
MLIRRAFKFELKPNGRQARQISQFCGCARYVYNRTLSLEKSLYAKDNKHSFRYTEAANRLPEWKTKHPFLKECHSQVLQQSLKDLDRAYTNFFEKRANFPKYKKKFRHDSIRFPQGVELDEIKQKIRLPKVGWVGYRKSQNIIGTIKNVTVIRRGEKWDVSIQTEYDNIPPETTPSEVGIDMGVKRFATLSNGEFFEPISPFKREQEKLAKLQRKLARQKKESRNSRKTKRKIARLYRHIADSRRDFLHKTSTQIAQNHSTVFVEDLKVSNMSASAAGTKENPGKKVKQKRGLNRSILDQGWYGFFQMLSYKLERKGGKLIKVDSRNTSRTCPQCGYVSAENRKTQASFACIHCGYHARFGRSNKCIKGRTGPASLWKEWCSKAAVSRNPERPVAALGYGRCRGGMESSPFMTRRTSIALRFRM

SEQ ID NO: 12399 - protein, 369 aa, unknown
  TnpB Polypeptide
MLKACKYRIYPNKQQEELIQKTFGCCRFVYNQTLAYRKDLYECQKKSMSKFDCNNYVNRILKPEYEWLKEVDKFALTNSVHNMDSAYRKFFKEHAGYPKFKNKRDNKKSYTTNYTNNNIEISFENNKIKLPKLKWIKSKLHREFVGKIKFATISQVPSGKYFVSILVETEHIPMDTTGCMVGIDLGIKDLLITSDGEKFDNIRTTKKYEKKLAKEQRKLSHKEKGSKNWNKQRIKVVRIYEKIHNIRIDNLHKISHKLMNENQVIVSEDLAVSNMVKNHNLAKAISDCGWYELTRQLTYKAEWNNRQYVKVDRFYASSQTCSCCGYVNKATKDLSVREWTCPKCKTKHDRDINAAKNILNEGLRMLQVA

SEQ ID NO: 12400 - protein, 386 aa, Lactobacillus sp.
MNKVIKGIKLRLYPNQSQRDQLWQMFGNDRFVWNQMLSMAKERYQNNPSSHFVNEYGMNYLLKQLKREYPFLKESDSTSFLVVNHNLTEAFKRLFKHQGGYPRFKSRHVAYQAYTGRSTCKVLAKRRLQLPKLGSIRTSKTTLIGETKIKRYTVSYDPTGRYYLSLQVETTVERLPKTGQMVGLDVGLADLAISSDGVKYGTFNAKLLEHQVTKWQSKFSKRRHRATVAVRQWNHNHQDTKLALNDYQNWQRARLVKAHYQQRIANKRKDYLHKLTTALVKQYDVIVIEDLKAKNLQKNHHLAKSIANASWYQFRTMLEYKCAWYGKQLVLVKPNYTSQICSHCGFNSGKKPLEVREWTCPKCGVHHDRDVNAAVNILQKGLKAVG

SEQ ID NO: 12401 - protein, 396 aa, Streptomyces sp.
VSRYRLYPTLEQEVGLRLHCGHARFVWNLCVEQHGWWTPRRGPAPNFAVQCRQLTEARADNLWLAAGSVTVQQQALRDFAQATANFFAGTHRRPTWRRAGRHEGFRVIAVRPDDVRRVNRATGEVKVPKVGWVRFRWSRAVPEARSYRITRDAAGRWHVAFAAVPASIEVPGNGAVVGVDRGVSVSAALSTGAMLNVPGLRRTEARRLTLLQRRLARAKRGGRRRRILKAAIARLKARETDRRKDWVEKTTTRLASGFDVIGIEDLRVKNMTASAKGTIEAPGRGVRAKAGLNKAILASGWGQLARRLEHKAQGRVIPVDPAYTSQRCSACGHVDTKNRESQSVFVCTACGFACHADVNAAINIETAAGRAVAAREGPRVAGPTHREPQHDLLLSA

SEQ ID NO: 12402 - protein, 327 aa, Crocosphaera sp.
LQQTLRTLEAAFVNMWERGFGFPRLKKKMRSFLYPSVKQEWVGDGWVKLPKIGKVKMRMSRPISNGFVLKQIRVVKRASGYFVQLIYQLSVNIPETPIQGYPLGVDIGLDSYLATSEGELVKRPRFFNQLHGKLKSLQRRLKNKKKGSNNWQKLQTQIARVYQKIHDTRKDWHFKLAHHLCDQAGMMFVEDINFKAWAKGLFGKHTLDAGFGQFFNILSYICWKRDVYFLKVDKDYTSQICPNCNTQTGKKNLSNRIHHCPNCGYKTNRDVAASQVIRNRGLVAVGQPVNENAMQRGLGGFPHERLHQEASGGVLSGSIFDWLDKSL

SEQ ID NO: 12403 - protein, 167 aa, Blautia sp.
MEVGKINHVTMERTPTDKYFVVLNVEFESQPRKNKGGYIGIDVGIKDFYSDSNGNVVPNPKYLEKSVRKLIREQRKLSRRQKGSNNHNKQRVKVALVHEKITNQRNDFLQKQSTILICENQTICIEDLKVKNMMRNHKLAVRIWECPDCHTVHNRDRNASINIYPMQ

SEQ ID NO: 12404 - protein, 378 aa, unknown
  TnpB Polypeptide
MKLVAPVQLVVNVAEKQRLLATLRRVNEACEWLGGRAFDLHSADKIHLQHLYYAELRQRFGLPAQYAVRTISKVCEVYRRDKAKRPHFKLLGAIPVDQRLYSFKKGLDRLSILAIDGRMLVPVMVGDYHRGRLEGVRGQADLVYRAGKFYLFVTVEVPDGTPIKINGTLGVDLGIRNLATDSDGESYSGDAVEAIRARYSTLRAGLQSCGTRSAKRHLKRSSGQEAHFRADVNHRISKQVVAKARGTGRQIALEDLTHIRDRVTVRGPQQRSRLHGWSFFQLRSYINYKAALSGVPVVLIDPRNTSRECPECHHIDKRNRRTQAEFRCISCGFAAHADWVGARNIAERAIVNWRIVAGIGCGTVQSDTLLSLAASCPL

SEQ ID NO: 12405 - protein, 405 aa, unknown
  TnpB Polypeptide
MQLVEQHCIGKQDSRYAVIDRVAFASKNLYNAALYEMRQEFIHHGRRIYFNELYHLMKSHEAYHALPAKVAQQVLKLLDQNWESYSEACKAYRLDPSKFVGHPKLPKYKDKQKGRNVLVFTVQVVSKRGLTRGIVQPSGVPIEIHTTHTSVNQVRIVPRSGFYVVEVVYEQTTKQTDVDTSLVASLDLGINNLVALTSNKVGFVPRLVNGRPIKSVNQFYNKRKAELQTIIKPDTRFTARMERMTIKRTRRIDHSLHTASKRIIDLLVSERIGTLVVGKNPLWKQETNMGKRNNQQFVMIPHARFIAMLTYKAELVGIQVIVGEESYTSKASFLDSDFIPTYGKVKQEPVFSGKRVKRGLYKAANGRKINADVNGSYNILRKVAPNALRGKGVEDCVVNPIRLHV

SEQ ID NO: 12406 - protein, 94 aa, Clostridioides sp.
VIAVKKAYKFRLYPNKKQQELINKTFGCCRFVYNKYLAKRIDVYKNNKETFTYKQCSSDLTNLKKELKWLKEPDKFSLQNALKDLDNAYKKFFK

SEQ ID NO: 12407 - protein, 413 aa, Clostridiales sp.
MEQTLTAKLKILPDPADKQLLIDTMRAYSAACDFVSSHVFLFRDLSIASLNRDLYRSIREKFGLRSQMAQSVIRTVVSKYKGILTSQHKWIRPRFDLPQLDLVWNRDYSLIKDRTLFSVNTLQGRIKVPFYAKGVDIDGRFGTAKLVCKHGRFFLHVPVTKEIEELSPSDVTNVVGIDRGIRFLATSYDSGGKTTFFSGAAVKQKRARYKDLRRQLQQVKTPSSRRRLKAIGQRENRWMRDVDHCISKALVCDNPEGTLFVLEDLAGIRSVTERARVKDRYVSVSWAFDDLAKKLVYKALKNHQSVIFVDPAYTSQTCPKCGHVLPANRDKKKHVFCCRECGYTSNDDRIGAMNLHRMGTEYLAQCRGSMSPPAGSQSIGPDVTTAASAVTNVGGDGAGHHGSVTSPHFKASA

SEQ ID NO: 12408 - protein, 368 aa, unknown
  TnpB Polypeptide
VRKINRAVKIRIYPNAEQRVQIEKTIGCSRFIYNCMLADKIEHYKKEKKMLRNTPASYKKEYPWLKEVDSLALANVQMHLESAFRKFFREPSVGFPRFKSKKSARKSYTTNVVNGNIFLEGKYLKLPKMAAVRIKLHRPISEKWKLKSVTVRREPSGKYFASLLFYCENQTAEKGPAEKFIGIDFAMQGMCVFSTNERAKYPMFYRHAEKKLVREQRKLSRCQKGSQNYKKQKKRVALCHEKIRNQRKDFQHKLSTSLAESYDAVCVEDLNLKGMAGGFHFGKGVHDNGYGLFLSMLEYKLEERGKYLIKVDCYFASSKICSVCGKKKEELSLSDRIYCCECGNRMDRDVNAAVNIMNEGKRIFAECA

SEQ ID NO: 12409 - protein, 374 aa, unknown
  TnpB Polypeptide
MKTFKYRLRPSKNQRTQLIHTLEVCRWVYNKTLATRKIAWEQEGKPLSLYDTNKLLTVWKRNHPELKGTHSQVLQNVQERVDLAFRAFFRRLQAGEKPGYPRFRGYGRYDSFTFKQSGFELGDNGLRLSKIGTVKILLHRPVAGRIKTLTIQRDVIGNWYACFVCEVEPEPLLVNDLAVGVDMGIESYATLSTGEKVPNPRFFRSNEKDLAKAQRKLSKAGQGTLEWMLRRRVVQHIHQRIANRRKDFAHQLSREWVDSFGKIVFEKLAEKNMLRNHYLAKSISDAAWNQLIAYTTYKAENAGRVVVTVDPRNTSRQCSCCGTMVEKSLSVRVHTCPICGLSMDRDQNAAINILGLGLQSLGIAHEAPASRHGE

SEQ ID NO: 12410 - protein, 321 aa, unknown
  TnpB Polypeptide
MFLYSQNLINTNQQLKAVLEFICSESHTLTNFGIYYARQIYFRIGKIVKKFDLINEYKSNKHYQVLYSQVAQQNLISVAESFKSFKALDKKYKKGESTNKAKLPKYRKSGFFALVTYPMQALKPVGDKIRIPLGTTVKIWFGLEGFWLKMLSHLNFGDIKEVRILPRNRCFYAEFVCQSQPEGKPQLTLDKCLGIYPGINNWLTCISNVGTSFIVDGKHVKSVNQWCNKIVSNIKENKPQGFWSNRLAAMTEKRNRQMCDAVNKAARLLINHCLQQGIGTIVLGWNKGERQEVDLGKKTNQSFVKIPTAKLKDRITQMCDQ

SEQ ID NO: 12411 - protein, 244 aa, unknown
  TnpB Polypeptide
VAFSHWAEKGEGELKPTVSIIWASFLVDAPPIKSINQWFNKRNAQLQYIKDTLLIKGITNQQVKLTAKRNNQVRDYLNKTGRFMVNHCIQNSIANLIVGYNPSIKQEINIGGCNNQNFVQIPFHTLPYKLKAMCERYGLNYQEQDESYTSKASAPDGDEIPVYNAENPKEYQFSDKRIQRGFYRTKTAHLVNADLNGSLNIGRKSKHEGFNRVSRGSLTAPRRINLLKLERKTPSKQYGFSLVV

SEQ ID NO: 12412 - protein, 191 aa, unknown
  TnpB Polypeptide
VKLTAKHNNQVRDYLNKTARFMVNHCIQNSIANLILGYNPAIKQEINIGGCNNQNFVQIPFHTLSSAYKAMCERYGLNYQEQDESYTSKASALDGDEIPVYNAENPKEYQFSGKRIQRGFYRTKSAHLVNADLNGSLNIGRKSKHEGFHQVSRGSLTAPRRINLLKLQRKTPSKQYGFSLLRSILLESPSL

SEQ ID NO: 12413 - protein, 127 aa, unknown
  TnpB Polypeptide
LSFVVEVEPNLTSAKRQSIGIDLGIKTFTVMSNSGKVQSPDYSKLDRKIRKLRRKLARSQKDSKTRNKTCVKFATLHNQTADKRKDFLHKLSIKIISNNQVISLEDLNVSGMVKNRKLSRVISLQGS

SEQ ID NO: 12414 - protein, 408 aa, Streptomyces sp.
VQLRYNYRAYPDAAQRRALARAFGCARVVWNDCLRTRKEAHAAGLPHVKSVELSRTHITEAKRTPERAWLADVSAVVLQQSLRDLDTAYKNFFDGLKGKRQGRKVGPPRYKSKKDTRQSVRLNTNAFSLQAGGTVYVAKVGNLKVRWSRPLPAAPTSLTVTKDSAGRYFLSFVVDTDPAHLPEAETEAGIDLGLSAFAVLSDGRKIDSPRFLRRAEKKLKRLQRELSRKVKGSKNRAKARIKVARQHARVADRRRDFHHKASTQIIRDNQAVYVEDLQVSGLGRTRLAKSVHDAGWSAFVGMLRYKAARHGRYFARIARFEPTSQVCSACGVKDGPKPLHVREWTCRACGTVHDRDQNAARNILAAGRADRLNASWSAGKTRAKVPAQRGEAGSPRKGRTTQAGIPGL

SEQ ID NO: 12415 - protein, 419 aa, Natrialba sp.
VKRSRTTFKNTRRAIRDRTHEDARTQTCGPERPQAEETPRDTRGVPERPPRRLRRPMHHADRSERRGGQLRPERVREERAQKVRPATHDDLQRGRTSRRPPCALHQRGATARPQARERYRVVRQNPAPRGLPPLATGPTESRTTGLAGSVERGRRHDGRESAVRAGWDVVSPRHRHPRRGGTPRGVRQRTDTHRSGHRGSVTRHGSPTAPELWADEGKTVRRLRKTYFTAKRRLQTRGSKRIAESFGDDVWKQIDDVFHRVTREVVEYAESVENPVLVLEDLTYIRESMDYGDFMNRRLHGWGFAKLHAQIRYKAVEKGIPVETVNPRNTSKECHACGEVGYRPRQATFKCTNDACWMGEYQADVNGAINIADRYLSGESHSREHTDGNDSAEDGGRLTAPQDTQADATKQETLGTYAS

SEQ ID NO: 12416 - protein, 439 aa, Microbispora sp.
MTVSFSRSDQGSGWQNADVRTAYKVRVYPAPEQAAVLNRTFGCVRLVWNTVLAWRQARYRAEGVKTSYAQTDRYLTELKRDGGHDFLYEVSSVPLQQALRHQHTAFANFFAGRAKYPRFKSRHGRQSATYTRSAFRWRDGRLYLAKMDAPLEFVWSWPERDPTTISPTTVTVSRDPDGRWYASFAVETENATEPEPAPATGSHAGIDLGVSDFAVLSTGKKIRNPRHLERKARNLARYQRRMARKQRGSNNRAKARAKVARAHTKVRDARADFLHRTSTRLVRDHDLIVIEDLNVKGMIRNRSLARAISDAGWGEFRRQLEYKTARAGRRLVVIDRWYPSSKTCSACGHLLTTLSLSTRHWTCPGCGTRHDRDVNAAKNILAAGRAVSACGADVSPQGSSLRRSAVKQEAQPARAGIPRPQAGEEANCFTRRRAGSSVS

SEQ ID NO: 12417 - protein, 256 aa, Streptomyces sp.
VSIWTVDGRMKGVRFACSPDQLKTLVQYRKGESDLVQRGGKWFLTATCDIPEPAAYEPAGWIGVDRGIVNLATTSDGTNHQGRRLSRYRRRQARKRAELQARQTRSATRRLARRTRKERRHATQVNHVISKEIVSVAQRTGRGIAVEHLGGIRERVRLRRDQRDTLSSWPFHQLGQHLAYKARRAGVPFLEVDAAHTSQRCPRCGHTERANRPTRDHFRCRRCGLAGPADAVAGVNVRDRARSVWAFVTMPVPQPV

SEQ ID NO: 12418 - protein, 543 aa, Streptomyces sp.
MGGLREVAASFVVPGPAGVAVRDRLRVSESDAAVLTEVGAFLGSLAAGDLAVRSRQGLEHDAGSWAVRKRELTGRSSARWAGSITKASHDQWALARRGQAAHMTWLRRQIASVEARLARPLGAKADKRAGLVRGYASRGEWHAKSRRLQTLKDRLSVVEADWAAGRVRVVRGGKRLAHARHHLEAAGLDEAAWWERWRAERMFLATDGESGKRLGNETIRVTDTGQVSIRLPAPLAHLANAPHGRYLLDATVRFQHRGEEWLDRITANRAVAYRIHHDTVRGRWYVTASWQRAAAPVLPLEAALARGVVGVDMNDDHLACWRLDVHGNPVGEPRRFFYDLTGNAAHRDAQIRHALTRLLHHTRRTGAAAIAIEDLDFREGTSREKHGRNKRFRHLLSRFPTAKLRARLVSMAAEQDIAIVAVDPAYTSRWGAQHWQKPLTTPRRKTSRHDAASIAIGRRALGHPIRRRAAPPHDDQSDRRGHRTVQARPDTRRREETRPRIPGPRTRSVSPDTERKRATRTSNTVRGVRSDQVWVQDSLLLTD

SEQ ID NO: 12419 - protein, 409 aa, Streptomyces sp.
VEEGGRLVIRAYKFLLRPTARQAVALGEMLRDHCSLYNGALQERRDAYRHTSKTTVRYGDQSAQLKEIRAFDPERQGRWSFSSQQATLRRLDKAFQAFFRRIKAGRAPGYPRFKGIGHFDTVTFPKDGDGCRWDSTPHDPQTRVRLQGVGHVRVHQHRPVQGRVKTISVKREGNRWYVILACDDVPAEELPPTGAFVGIDMGVTHFLTTSDGEHVANPRFLQAMADELAEAQRHLATFPKRTLQRTKRHRAAARKVAKLHGKIRRQRADFHHKTARAFITDHDVIAHERLNTAGLTQSPAPKADPEQPGSFLPNGAAAKAGLNRSILDAGWAQFLGILANKAESAGRLVVPVDARNTSRTCLSCGHATKENRATQAKFLCVRCGFAANADHVGAVNVLNRAGLALCDVA

SEQ ID NO: 12420 - protein, 317 aa, Megamonas sp.
MFKRAYSIKKRKKWLKEPDKSSLQNALKNLDTAYKNFFYRQKAGFPKFKSKKNRYKSYKTNMTNNNIGFLGNKIKLPKIGKIKTRDKYRQIEGRILSATVSQTPSGKYYVALCCTDLPQPELIKTNKYVGLDLGIKDFVITSDAVKYSNPKYLQKSLTRLAKLQRELSRKTKGSSNWEKARVKMAKLHERIANQRHNLLHQVTCQLIRNYDVICLEDLQVENMMKNHKLARNIVDVSWSEFIRQLTYKAKWFGKVIVKIDKFYPSSQLCHVCGYKNTEVKDLNVRKWNCPKCKTHHDRDVNAAINIRNEGLRILNIA

SEQ ID NO: 12421 - protein, 283 aa, Megamonas sp.
CKLFFRNLKHKIRTAPPSFKKIRKYKSFTLKQAGWKLLKDNVIEINKQKYKYFKSRDIEGIVKTITIKRDTLGDIYLYFVCETNENKVLARTGKSVGYDFGLKQFLTASDNKDIKAPLFFKQNANDIKKANRILSRKKKGSNHRRLAKIALARLYKKISNQRKDFHFKLANKICSEYALICIEDLNIKGMQKRWGRKISDYGFSEFIKILEYKAREIGSIVQKIDRYYPSSQICHVCGTKNPETKNLAVREWICAKCKTNHDRDRNAAINIWKVGASTFFGEI

SEQ ID NO: 12422 - protein, 372 aa, Thermoplasmata sp.
MKAEKTVKSAVVELTNIKQEELELMWSNYQRWLHTGKGGDRVYSAHRQQAERNLDMDYLKGGKVYPLFLRKDLIEFKDCESDLADYFFKIPSKQRYGGIKVPIKTHMDIKDKYEICESKLLKRNGRFHLHIMIKKDVFVRERYDGVLGIDLGLRQPVTSVALPDRDTVLDGCRIRDVQTHFFYLRRQTNYGSNRSRFYRREYDKVNDCIHKLTNKIVQYAEENNLLIVVGDLEGVQDQKNGKTMNRKLHRFPHYELRRQLEYKARWNGIGYVEVSEAWTSQLCSRCGAKGKRSAGLFRCNNCGLEIHSDKNGAHNIGRRALGKFSRPLSRAGGFVASPRAGSDDLTALRDFYSLVKSASGMQPHQLWSEAPS

SEQ ID NO: 12423 - protein, 383 aa, Ruminococcaceae sp.
MGWAAKRKARSEFMEKAYKFRIYPNTDQEALIQKTFGSCRFVFNYFLSRRIKLYEESKETLGLYACNRELTQLKKELKWLKEPDKWALQGANADLDQAYQNFFRRVKQGEKPGFPHFKSKKSKHKSYRTTQTNNSISVLDKHIKLPKLGLVSAKISKQVQGRILNATISQNPSGKYFVSICCTDVKIPQYESTGATVGIDLGLKALAITSDGQIFENPKYLRKSEKKLAKLQRQLSRKQIGSNNRNKARIKVARLHEHITNQRLDGIHKMTTGLVRNYDIICIEDLAVKNMVKNHCLAKSISDASWGEIRRQLAYKTKWQHKLLQVVDRYFPSSQLCGCGYRNKDVKNLNIREWICPECGGLHDRDVNAANNIHKEGLKLAVA

SEQ ID NO: 12424 - protein, 360 aa, Methanocella sp.
MLLILKAKLQPCEEQRRSLLKTMERFNAACNYISKAAFSSKTYNKVKLQRRLYYDIRKKYGLSAQLAIRAISKVVESYKVERNTLHEFDEHGAIVYDQRILSFVGLDKVSLNTVDGRLIIPMLIGAYAKLDERRIKGQADLIYVKGEFYLCIVVDVPEESPITPEGYLGVDLGVVNIATTSDGVRYTGEACDKTRTKYCRLKAGLQSTWTKSAKRRLRIISGRERRFKTSINHKISKEIVQAAKGTKRAIVLEDLTYIRSRTTVRHEQRERYSKWAFDQLRSFIEYKAKIAGVLVELIDGRNTSRQCSECGYIDKSNRHGQVFKCLACGHEENADLNAAKNIRQRAAVNRPIAVCPATGS

SEQ ID NO: 12425 - protein, 472 aa, Sulfobacillus sp.
MRTRRRLTRQPNKRKTVLLHDLIDRYAQQKDAYLVALAKTKNWHIWQSPRKVKRRFARQYSYHTLPIHIEDQCVFDAVATMVAWVESANALNHWKSQVFAHTEDANARIRYFKAFKSYAELAQVLSGAWHDPWLFHLIRNPLMHPPRVHNRHSAMLDDSSYRVFIEKGKQYISLTSLVKGQRIVLPLLGNAGIRGNIRVMYAADHFEIHTMTQVNVKKMSPGIKNIALDAGTTEVYTDQNNRRYGTDFGRILAKVDARVTDKGKKRNHIRDAAKNKVLVREEERQAHLKKVHRNNLGKKKQNMRRTKARAAFATEINHALNDVLEQRPQRIIVEDLSHMRGKAQGKTMSRQVSLWMRSVLAERLDFKTTARGSRRQAVALAYTSQECAHCGFTAKDNRKGDHFRCVFCGTVDTADGNAAKVILKRSTDPEIKPWMTKEAIKKILDQRNAQITGATPAPVVKVASLVEDVTHR

SEQ ID NO: 12426 - protein, 424 aa, Oscillatoriales sp.
MRLAYQYKLLPTTEQKAELNRWLDMLRHQYNWLLQDRFDWWERNRCDINACPLICHLPSLRAHPDYYSQKRSLVQLKKDRPWYKDIYSQVLQNCVDRVKLAFDRFIKGDCNGNRSGKPRFKGKGRYRSFTYTQMDMDCLKGNRITLPKFGDVKLILHRLIPDGFDVKTAIISKKADGWYVTLTIQSHAVPDIAIDIIPTWENSIGIDLGLEKFLADSEKEFEPIPQHFRKSEKKLAFLQRKAAARKKKSRAKNRQYRKVARLHQKVARQRKQFHFETAKKLLNKADVVFVEALKVKNMSRRAKPKQDETGKFLPNRQSAKSGLNKSIADAGWSQFNEILSFKAQRAGCLVIEVDPRGTSQHCSECLNRVPKELRDRWHSCPHCGLELDRDTNSAILIKKVGLGVSLTIKRSKRTSSERSPRCTA

SEQ ID NO: 12427 - protein, 428 aa, Chloroflexi sp.
MQQATLQYRVHTSKAGHRRLEQALLDMGELYNALLLHRKAARGSHRGQFSLSAQTKAITQLRREESRYAGYAYRLLDRVVKQANLAWNAASRSGARPQAKSLDSRDSLEVSAPGKNHLRLTPDGRYATISIKGLPALKFKPDWRMPRDQQPRLITVVRKPRGLVVNLVFNRPEGPPVPAPEHSVGITPGVGYLLSASGSDGTALQVSGHDGPENQKLARRLRRKMQRQQDAALRDGRARWVSQKARDGRVKHRFRWNDRPSKSYLKCVARLRKVEQKRSDSLRGLHHRVSTALAGRYGTVCLEDAKIQNTTKPVRRTAENPGRNAQRKPGLNRRSLPQGWHLFRRTLEYKCQWQERRLVVLPVQSSPATCSKRNHADGGIDAAENIRRKGIETLASAGDLAGRAAGVPFGTTSTETPGPHCARGLSCA

SEQ ID NO: 12428 - protein, 443 aa, Moorea sp.
MYRTIPVKTTFADEEKAFWLFQCENANSLWNCATYYSRQKHYNWLEQQQESFITYWKEDVLCYGWKTYKCNVKYAELCKELKDNPHYKAMAAQSAQQTLKSVAESITGYNQLVSLYYRGQVNRPRLPKYRKKGGKAAVTFPRQALTYKKGLFYPSVSKESKPELLTEIVLEAPGFIDPEWVKEVTIRPYLGELWIDWVIDDGKQPVENNPNLDYSQAWSFDHGGDNWLTGVSTHGKSLILDGRKLKSMNQGYSRFVAKYKEGKPDFYWDSNLDSPKATLRERVQRKRNNQMRDGINKAARFIINRCLNDRIGNLIIGWNERQKDSARMGRRGNQNFVAIPTKRLINRLEQLACEYGIKLTITEEAYTSKASYLDDDSLPKYGEKPNGWTPSGKRVKRGLYRSSRGHLVNADCNGAGNIAKKVATQLGLNLAKLGRGALTLPHR

SEQ ID NO: 12429 - protein, 422 aa, Microcoleus sp.
MQLTERHVIKSTEHRFAKIDELAFKSKNLYNAANYVIRQSFLYGWGYVNYNEINRVMKSHEAYKALPAKVSQQILMVLDRNWQSFFEAVKAYKADASKFTGRPKLPKYKDKVKGRNLLVYTLQAMSSQQLKKGIIKLSGTDFLIKTQVNPERICQVRVVPKCDSYVVEVIYNEPESTINDANFVASIDLGLDNLVALTSNQPGFIPLLINGRPLKSINQFYNKRCSRLKSQLKGNRQTSPRMQRLNRCRNQKVDNYLHHTSRLIINLLTVQQIGTLVIGKNAQWKTGIELGKPTNQNFVSIPHSRLIEMLEYKARLVGITVIVQEESYTSRSSFLGLDPIPVYGKTDKDPVFTGKRIKRGLYKTSTGRLINSDVNGSYNILRKAIPNAFSDGIESCVVQPRRVNPLKVKAKGEELEASHVYQ

SEQ ID NO: 12430 - protein, 314 aa, Lactobacillus sp.
MAKLPYHYGVKLRIFPSNEQKRLIKRNSDASRFIYNEMNGMNKELFLLHQVKIPIELVQKRIQTLEQRLKTPSTGISNVHGWLNDNDLDSLMKANAIKNYRAAWNLFREVHHAGTPVFHKKRIEQSYQTSCMYASKLAIPNMQNGSVRIINSRQAQLPKLGRLRFKGIPPKIFNRMDSIRIGTTAISMDATGRYYVAMQLASEQPFADKVSNETATAIGIDLNTDNFLTDSEGNIVANPRYYRSVSGKLAKAQRKLSRRARRAKQEHRPLRDAKNYQKQRNVVATIQRKIANRRKNFLHLVSTTLIKNHDFGCR

SEQ ID NO: 12431 - protein, 402 aa, Escherichia sp.
VKRLQAFKFQLRPGDQQECEMRRFAGACRFVFNRDLALQNENHEAGNKYIPYGKMASWLVEWKNATETQWLKDSPSQPLQQSLKDLERAYKNFFRKRAAFPRFKKRGQNDAFRYPQGVKLDQENSRIFLPKLGWMRYRNSRQVTGVVKNVTVSQSCGKWYISIQTESEVSTPVHPSASMVGLDAGVAKLATLSDGTVFEPVNSFQKNQKTLARLQRQLSRKVKFSNNWQKQKRKIQRLHSRIANIRRDYLHKVTTTVSKNHAMIVIEDLKVSNMSKSAAGTVSQPGRNVRAKSGLNRSILDQGWYEMRRQLEYKQLWRGGQVLAVPPAYTSQRCACCGHTAKENRLSQSQFRCQVCGYTANADVNGARNILAAGHAVLACGEMVQSGRSLKQEPTEMIQATA

SEQ ID NO: 12432 - protein, 389 aa, unknown
  TnpB Polypeptide
VHDIISPVESVLTVKCKLKPDSVQAEALQATAELFAAGCNAALKLAREHFEFRRFKLHHLAYPVLRDMGLSANLAVQAVARVGKRKGSRVGGFKVGSVTYDQRTLSMNSETENVSLTTTAGRLKIPMHIGNYQRHLIRTAVSCQGGQLVKDKTGKWYINLTLKFEDSGTPDPTGKVLGIDFGQKVLASLSTGERFTGGELKAVRLRHLRTRAELRSKLDRKGTKGLKRAWQRFSGKEERFVQHSLHVMTRRIVDSLQASDTIAIEDLTGIRDRTTKRGKEARHLHNLWPYHLFRTYLTYKAQRRGIGVVAVDPRDTSKTCSRCGHCSKGNRKRQALFRCEECGYSTNADLNASFNIAQRAGSMGKGDVTTPLILGKLVQRHHPQESQRL

SEQ ID NO: 12433 - protein, 390 aa, Nodularia sp.
MRTSYQYKIKPTKEQAEKIDQTLEMLRCQYNYLLCQRFDWYEQNRCPIDRCPLICYLPDLKHQPNYYNQKASLTQLKKDRPWYKDIHSQVLQEVPKKVDKAFDRWLKGDANGKKSGRPRFKGQCHYRTFTYPQFKKHNFANDKITLSKIGDVKVIAHRLIPEEFDIKTVSVTKKADGYYLTLSLDDKRVPTIKPDFNAENIVGVDVGLIDFYVASDNTRIAAPKHLRKAERKLQSAQRRVSRRKKGSNRRKKAIKKLAVRHKKVADTRKDFHFKTAKALLDKYDVVAVERLNIKGLARTRLAKSIHDAGWGQFINILSNKAENAGLKVITVNPNGTSQECSSCGHKVKKPLFQRMHNCPVCHISLCRDLNAALNIKNRGSHGLKAQLMSS

SEQ ID NO: 12434 - protein, 520 aa, Methylacidimicrobium sp.
MKKKPEHPPVLRTDLLPSNLTAGKRAKVLDLLAAYRRGAVLLGREQWRLFFETGRFDKIHDVDKKTFAAVMGAANRVQMCRYQVVGQLKGWVSNRANEFRDVVNRSSLPPETKHRLHVLNRMGAWFVRADVAMRETGEVIPREVRRLARSIMRHLMSRHRRPDLSRISLRLDHRAASLAAPVKATQGGRVRWWLKLSTMEPGKRIAIPLLDYEYHARRAGRTIDGIQIHCDREGRLNFGVVTDIGEACARSRAEYDGRGVLALDFGLSTLLATSEGQLLGRDWLKRLRRYDALLTMIAASQQRAGKKPRRSRRYRAFVEDLRGFLRTEIGRVLNKLVADGRPEELVLERLDFCHPDLSRRMNSLLHRCGRAVLRSKLADLADRFGVAAVEVNAAYTSQTCSSCGYVDRRNRAGRSRFRCLWCGKELHADLNAASNIGARRARPIGSVFVGKAAVLAELVREFGERRMRAYGPRRTGSRGAPVDPRETNPYFGGMPSSVVRSSGRRKASRKSVSAPAPAAA

SEQ ID NO: 12435 - protein, 520 aa, Methylacidimicrobium sp.
MRAKTPSFIAEFPLRTTAADEVALSTRLNAARRLYNAVLGETLRRLSLMRQSKDWQRACKMPKTVKDERSGKRISNRERTALFRQIRESFGFSSFSLQKFAQACRDACFLADHLGSHDTQTTSRRAFQAVKEYAFGVRGRPRFKPASRFHSVEGKGDAVIRFRKEPVPAIYWAGLALPLRLDPKDKRGWQRIALEARTKHVRIVRRTIRGKARWYAQLVQEGVAPQVRSAGEGVVGYDLGPSTLAFVSDTDAGLERLCPEVDQPWRETRRILRSMDRSRRATNPRNYDTEGRVKRGVKRWIRSERYKRRQRYLAETERRLAAARKTAHGNLANRILAQGKTIKGEKLCYRSFQRNFGRSVKVRAPGMLVERIRRKAESAGGGLIEIDPRKTRLSQFDHTTGHYAKKPLSERMHVFGDGRTEPVQRDLYSAFLAKCSEKDFLDISQVRKAWPGAEPLLRRAMSRMQEPARREGLSRPHVRNVRAGRPSKGKKGSGCPRSRSGEAGDVVAQARAPESRISIL

SEQ ID NO: 12436 - protein, 213 aa, Methanomassiliicoccaceae sp.
VVQHRHFVRRRKLNKKKANDRRVWRRLASKEGRRERNRVSQRLHLISKGLVELAVREKAAIALEDLHLPKGGGRGRRLRRRLSSWPQREMHRQIEYKAEGRGVPIIKVDPSYTSKTCPRCGEIKKRRSRVGQVFECAKCGWRLDRQINAGLNICRTALAQLPNEVEMRELGGLRLDPDALANDAMILLYAPGNAGAHGVSGRPGSTGLVNVSR

SEQ ID NO: 12437 - protein, 305 aa, unknown
  TnpB Polypeptide
MTTYGNLKPMDATKININGVENIFFTSVAINTHRGWVYLDLEPSKEFYKLLARGFKPTSHAKIKLDRRNRRAIFHLSLEKEVEIYRPENIVKPVDVNENSVATLYEAFTVILETDLAETTLGYSYRKESIQRRNGSGSRETRKAMEKLREGKKRDYRMKTASLIVRDALRTRGVIVVERISGEDIRVMIARHKNKQLRHRIYQSALKGELNTIIDKAREYGVPVLMVDPRNTSKICPIHKAVIEYGEDRIRICSKGGERWHREVVALISIYFKALEALYEGIAQKGFGVLSLDGSPVSLGSTANP

SEQ ID NO: 12438 - protein, 256 aa, unknown
  TnpB Polypeptide
LARGFKPTSHAKIKLDRKNRRVIFHLSLEKEVEIYRPEKAVKPVDVNEDSVATLYEAFAVILETDLAKTTLGYSYRKVSIQRRDGSGNKDAREAMKKLKERKKKGDYRWKIANLIVREAMRMRGVIVIERISGEDIRVMIARHKNKQLRHRIYQSALKGELNTIIDKAREYGVPVLMVDPRNTSKICPIHKAVIEYGEDRIRICSKGGERWHREVVALISIYFKALEALYEGIAQKGFGVLSLDGSPVSLGSTANP

SEQ ID NO: 12439 - protein, 206 aa, Moorea sp.
MIILEFKAKGKRCQYQAIDEAIRTVQFIRNSCLRYWMDNKGVNKFDLNKYSAVLAKNFTFANELNSTARQSSAERAWSSIVRFFDNCKKKVPGKKGFPKFQKHCRSVEYKQSGWKLSPNKKSITFSDKKGIGKLKLKGKWDLWRFDKKQIKRVRIVRRADGYYVQLCVQADNNETLKPTSKNVGLDVGLKDFYTDSDGNTEPNPRF

SEQ ID NO: 12440 - protein, 415 aa, unknown
  TnpB Polypeptide
VVRLSLPCLSRPDRCGCGSGPSHRHPPPSLQPHPLRIPNPRHRRGNIGSAFQHQKRLTEWKTEWPVFSEVHSKALQKTVERFYDNLSTLSEKKQNGHTVGWLRWKAPREYQSVTYSQSGFELKNTSGRHAMLWLSKIGDIPIRYHRPVPDNATIKEVTLKKEPTGEWYVTFGLEIEDTALPEKPCVDDLDAEDCVGIDLGINNYIYTSDGDSADWLDLSAEYDRLQREQRSLSRKEHGSNNWEKQRREVATIKRRIKRKVEDFQHKLTTWLVSTYDAVFVEDLNVSGMLQSEGNARNKQDAAWRGFIEMLEYKGDLYGTHVIQVNPVGTTKECAECGVETEKPLWVREHSCPSCGFEADRDANASYNVLARGLQRLGLGQAEVTPVKTATAVETDGAGSSSVPASRVIETGSLRA

SEQ ID NO: 12441 - protein, 408 aa, unknown
  TnpB Polypeptide
MDTRALAQVYKLAPTPDQRVALARLAGCRRYVYNWALARRREHYAATGTHLASAVISTVLTALKRQPDTAWLAEVDSQALQQALRDLDRSYANCFAKRARRPRFASKHRGDQTARIPQRVTVDEAAGTVRIPKVGVMRLHLSRPLGGVIKSATVRRDTCGDWFVSLRLEAPALTDAPVSPERAATNAVGIDLGLTTYATCSNGEATPNPRHLRTRQRALARAQRHLARKQRGSKNRQKARLRLARLHRKVARQRADFQHKLTINLVRRYDLLCVEDRNIAGLAKTTLARSFADAAFGALLRQLRYKAAWHGKHVVAVGGFFPSSKTCGACGTVYAGLTLKERVWTCAACGATHDRDANAARNLLGEGLRLFALRQAGPGTAPPGAGVAAVGVRVPTTTSVVAAGTPAT

SEQ ID NO: 12442 - protein, 202 aa, Okeania sp.
LSSGEKILAPKPLKKSLKKLAKFQRKFAKTESGSKRRERRRLKIARLHCKIKDIRTDFLHKLSTNLVRKYDIIVLEDLNVSGMIRNRKLAKAISDLGWRQFRTLTEAKCEKYGREFRVINRWEPTSQKCSCCGFRGGKKELNVREWTCLNCGTFHDRDVNAALNILEVVQPKNNHKGVGKGVLVSPLLHRVGRKAPPYINKC

SEQ ID NO: 12443 - protein, 429 aa, unknown
  TnpB Polypeptide
MCLIGIFLFEHACSIIAGMLITHRVALDPTNKQKALFRQHAGFARFAWNRCLEESRRALDAGEAGATSQYRLRRFFNSVKGEIAPWSGSLSQNAAKYALVGLGEAWGRFWSELNKTRRVGTKCHVRPPRFKSRKRSVQAFRADNGPGTVKCRGKIVRLPRIGKVRMREACRFEGVVRECTVKHDGVRWHAVVVFDVVEPETKSEGACVGVDAGLRWLATVHDGESVEVIANPRPLKAALGKLRSVNRRIARSLRIHGRKSRSNRRERMYAQRRRLYVRVRSLRFEVAHKATTAIAKRSRLVCVESLNVSGWMRNRRLARSTADASPSRFLSLLKWKCRREGVRLVEAGRFYPSSKTCSSCGKVNAGLGMDHRWRCPSCGVVHDRDANASLNLRRQGLAADVEGVSDGRKAAVPVEASTRQISSHQCGSA

SEQ ID NO: 12444 - protein, 314 aa, unknown
  TnpB Polypeptide
LVRNDKSPKIPHVRKPFVVNCYGLKINGSLLSIPFKSRESINILLNRYTQKILSDKTLKVNSFSLTAFNISLCISKDIAELECTKIVGIDRNLRNVTVGNMEEITVYRTNKLLSIKQNTIYARAGFKRNDHRKKRQFYKRLQKRLQDRTRQFIHKISKQIVQNAVQTKSIIAFEDIKGIRRLYRKGNGQGNKYRRKLNGWQFYELQRQVQYKALWSGIPVVFVDPRRTSKLCPICGDRIQEDKQNSRKVLCINCGKTMDRDVIASMNIAHKAWSRFNHARGDTCEAKYFTFEKSMLEPRETAIQIVDVSKSGSR

SEQ ID NO: 12445 - protein, 288 aa, Bacillus sp.
LQKAYQNFFSGRAEFPKFKSRKARQSYTTNVVNGNIMLLDGYIKLPKLKLVKIKQHQEIPSHHIIKSCTVSRTKTGKYYVSILTECEHQPVQKEVQAVVGLDFSMNGLFVDSEEGKTANYPRFYRQALGKLAKEQRVLSRRKKGSNRWHKQRLKVAKLHERIANQRKDFLHKESHKLAKLYDCVVIEDLNMKGMSQALNFGKSVADHAWGMFTKFLQYKLEEQGKKLLKIDKWFPSSKTCSCCGQVKESLSLSERIFHCDCGFVADRDWNASINIKREGLRLLALASS

SEQ ID NO: 12446 - protein, 549 aa, Mycolicibacterium sp.
MIVAMRTRAQAAKVAEATGGVQLAGKAKPDGTPTVSRLVQVGSDFEAHRSAVESVSVLFDLFDGDAASYAATGSPGRHLSTGWMVTAAKFEVEWPADEARAGLVRSHFGARRIAFNWGLDRVKADLDAKAVDPAHESVGWDLGSLRKAWNRAKDEVAPWWADNSKECYSAGLADLAQALSNWSASRNGTRNGRRVGFPRFQSARRDPGRVRFSTGVMRLEDDRRTITMPVIGGLRAKENTRRVQRRVASGRARILNMTLSQRWGRLFVSVGYALRTPDTARTPTRPSVRAGVDLGVRTLATVATIDTATGAQTLVEYQSPAPLKATLAARRRAGRQLSRRIAGSHGHRAAKAKLARLDRRCVHLRRETAHQLSTELALTYGQVVIEDLDVAAMKRSMGRRAYRRAVSDAAMGLVAPMLAYKTTRSGSTLIVADRWFASSQIHHGCTQPDGTPCRLVGKGRIDKHLRCPITGEVIDRDRNAAKNLRDWPDSASCGPVGTTAQSVPGPTTVGTGHGADTGSSGARGASLRPRPRGAGRSEAKTQTPQGDAA

SEQ ID NO: 12447 - protein, 452 aa, Glycomyces sp.
VYPTAPQRVSLARAFGSARVVYNDAVAARKHAHADGLPYPTTAVLSKQLITEAKRTPERSWLAEVSAVVLQQALADADRAFQNFFASVKGKRAGARVGPPRFKRRSNTQTIRFTRNARFKVLGNGRLRLPKIGDVKVAWSRAMPSESSSVTVVKTPTGKYYASFVVAVEDGANLLEPLTDPDAETGIDLGLKDFAVLRGGRVIESPKFFRKLERKLGKAQRVLARKTKGSANRAKARVRVAKVHEKIKDTRSDWVDKRVKMLVGENQALYVEDLCVKGLARGRAAKSIHDASFGMFLARLESKAARSGRTFVKVDRFFPSTRLCSACGALTGPKGLEGLKAREWACGCGAIHDRDANAEINIRREGKRMVAEGHSDTVNASGGDVRPGTPGRLRNPRMGQNEEPVRSGAVSTVPEPGILVPLGREEDVKTASGGSRRGSGARSGPAPRRGSP

SEQ ID NO: 12448 - protein, 298 aa, unknown
  TnpB Polypeptide
LYCRLLKRVVNGKNKYYVQITFEGTPPKKHKVGGENEIGIDIGTSTIAIVSNNKVELKILAENIGINEKEKIRLQRKLDRQRRANNPNKYNADGTINIENKEKWKKSKSYLKTQLKLANIQRKIADKRKQSHNILANSILEIGTIVKVENMSFKGLQRRSKKTEISEKTGKFKKKKRFGKSLSNRAPALLIEIINRKLEYIGKNIIKIDTFKVKASQLNHSTNEYEKKSLSKRWVEILGNKIQRDLYSAFLIKNVKENLEEVNIEKAQKEFKNFVKLHKEEIERIKKGNVKTLKCMGF

SEQ ID NO: 12449 - protein, 406 aa, unknown
  TnpB Polypeptide
MWWRFSENVREGNVIKMVVRKVAQRIPFTPSKTQAALLEQCFGARRFAYNQQVEAFNSYDKETNPRPAYPNVTDMKNENEWLRDSPIPSNALSNAIQDFRKVQSSYFRKAQYGKNRPRFASKGDNVQSFRNAAPMRRMEGNRYPLSKKLGSVRIRRRDRIRYPLESLSSWTVKRENGVYYLVLLFNVDVQPKPTVDGRVGIDVGVKDFLTLSTGEKINYPDRLRQLEEKVRWEQRKLSRRVKGSSNYRKQKAALAKAYAKLHHFREDFQHQVSHRLIEDSQFIGMETLAVGKMTRRAKKKLDENGKYTRNGQSVKRAMNRSILRNGWSSFAEKLAYKAQWYGRTFVQVDMFYPSSRLCHNCGHKCDSLLLSEREWMCESCGVSHDRDVNAAMNILDEALRLNQAGE

SEQ ID NO: 12450 - protein, 351 aa, Palaeococcus sp.
MKIVERNFRSFFHVLNERKKGNYNRPVRPPKYLPKNGHFVLIFPYQSFRVKEDRIILTLGKNFAEKYGVKHLEIPLPKNVKGHRIKEIRILPRYNALWFEVEYVYEVQPEERDLDRSKYLAIDLGLDNFATCVSTTGTAFIIEGRGLKSFNRWWNKEKAKLQIQYDRQGIKFGRKMAWLLKKRKNVVNDFMNKAVSYIVNYCLENGIGNVVIGELKGIKQNANLGKRNNQSFQFVPYGLFKRKLKAKCGRYGINYIEVDEAYTSKVDALALEPIEKRDKYLGKRVKRGLFQSSTGVLINADVNGALNILRKVAGDSPVGEIAGSGLVNRPVRVRLPWGGLTPHEAPSVRAG

SEQ ID NO: 12451 - protein, 358 aa, unknown
  TnpB Polypeptide
MMLRQTMERFNAAASWVAGIAFERQLPNKFALQKLVYRELRERFGLPADTAIRCIARACEAFKPDKTKRPRFRKHAAVPFAMGKNIGFKGVDRVSISTLEGRVIVPFLMGKYQADRFGFAKGQSDLVLRKDGKWFLLVTIDVPDKTPIPVTDFIGVDLGVSNLAATSDGQRFAGDNVESVRIKYHRIHRGLGRKMHSSHKRRTRKNARRAMKRIGGKESNFRKDVNHVISKRIVALAKDTGRGIALENLKGIRDRTRFRKRQRSKMNGWAFYQLRSFITYKGQLFGIPVVAVDPRNSSRTCSACGHCDKRNRTSQASFKCRQCGHEAHADHNAAINLAARAVANRLQVSETHRHSAVA

SEQ ID NO: 12452 - protein, 424 aa, unknown
  TnpB Polypeptide
MYEEKNRKIRENGKATRERHSKMDCRVFSVKVQENRLSRAKYEKIVRCFLEGKWLYNAVVATDSLSPEDTSTVQVKVKDKFETREISNLSSQMKQSVVESAKQDIYNLSKAKKKGLKVGRLKFKKECNEINLKQFGNTYSIKGKNKIYVQRIGVLVVNGLEQIDLEEVEFANAKLIKKPSGFYINITVYTKKQTQSNTEKEILGLDMGIKDQLTFSNGVKVNFYLEESEQLKGLTRKLNRQVKGSNQYKQTLNRIKRIYEHQNNKKSDVVNKLNSVLKQNYVICFQDELLNSWKHKKSNQKFSFGKQVQHGILGRIKSNLKKNTSNVMLDSSVPTTQTCPVCGCLTKHSLGKRTYHCNHCGFENQDRDIHSANMMVLLSGYGTYRSLNTDTVSTERMIILFDSLSELGVVVTTNSMKAPCIGRR

SEQ ID NO: 12453 - protein, 373 aa, Chloroflexi sp.
KTFKYRLQLSKSQRTKLMQTLEICRWVYNETLATRKNSWEQDKKTLSLYDTNKLLTIWKKEHPELKGVFSQVLQNVQERVDLAFKAFFRRVKAGEEPGYPRFRGYGWYDSFTYKQFGFELLNNGLLLSKIGTVKIILHRPIEGKIKTLTIQRDTVGNWYACFACEVEPEPLPLNELAVGIDVGLESFAPLSNGIKIENPRFFRRDERELAKAQRKLSKAEKGTPERAKRRKAVQHIHQRIANCRKDFAHKLSHEWVSSFGMIAFEKLNGKNMLQNHCLAKSISDAAWNQLIAYTTYKAENAGRVIVLVDPRNTSKQCSCCGTMVEKSLSVRVHACPVCGLMMDRDENAAINILGLGLQSLGTALESSAFWRGE

SEQ ID NO: 12454 - protein, 458 aa, Natronococcus sp.
VRRVNTFEIRPLRKRDRLLLLEILDASASLWNEITYDRRSALFSGDDIWRSETDTYRDKYKGTIGAAAVQQITRRSDEAWRSFFALCKEDADANPPGYWKDDDRRELQTLVRNDQYTIEWGDRSRLEIPVGLDLKEKCGLGYNERLRVEICGRPRWAGEKGRLEIVYERDTDSFRVYQPVTNAVRERDESLAVESSNDGSVAALDIGANNLVAVTTSRGKQRLYDGRSPFRRFHRTTERIADLQAALGPGEWTSRRIRRLYRYRSARRNHLQDALVRDLAEWFRHQGVGTVLVGDLGELSSHWSTRVNEKVHLFWAYGRFRRRLKEVLDECSIDVRDVDERGSSSRCPRCNDTNVHRNGDAFRCRECGFNGHSDLAASENMLQQYASYGSTARPATPDQNRSREGYRQVPCLEWNDHRWQRRGRSTKENLANRSTRNTGNIASSETDPSEPRRGNLAQ

SEQ ID NO: 12455 - protein, 376 aa, unknown
  TnpB Polypeptide
MNPTEEQKVKIRKTIGTCRYVYNFYLAHNKELFEKGEPFMSGKSFSVWLNNEYLPKHPEYSWIKEVSSKSVKHSIECGCTAFSRFFKHQSAFPNFKKKGKSDVKMYFVKNNPGDCRCERHRINIPTLGWIRIKEKGYIPTTKDGYVIKSGSVSMKAGRFYVSALVEIPDPEITDPKNEGIGIDLGVKEFAICSNGRTYKNINKSARLKKIEKHLIREQRSLSRKYENLKKGESTQRANIQKQKLKVQKLHHKLDLIRTDYINKTIAEIVKTKPSYITIENLNVSGMMKNRHLSKAVASQKFYEFRVKLQAKCHENSIEFRVADRWYPSSRICHGCGCIKKDLKLSDRTYRCGCGYVEDRDLNAALNLRDAATYEVA

SEQ ID NO: 12456 - protein, 401 aa, Symploca sp.
LLVLEYKIKAKPHQYKAIDEAIRTVQFVRNKCLRYWIDAPSEVNIKRFDLNKYSTELRSEFAFVKALNSMACQASAERAWFAINRFYDNCKSNKPGNIGFPKFQKDNRSVEYKTTGWKLHSTKRRIKITDNKGIGELKLLGKWNIHTYLVKSIKRVRLLRRADGYYCQFCIDVECVDVQPKTGEEIGLDVGIESFYTDSNGHQEPNPRFLRKAESDIKNTQRRIYKKNKGSAGRRKARARYSRKHLRVSRQRNEHAKSLARNVCKSNDLVAYEDLRVSNMLKNHCLAKSIADASWYQFREWIEHFANKFEKLAIPVPPQYTSQECSQCQRVVKKSLSTRTHVCQCGCVLHRDTNAAINILRKAKSRVGHTRSNAKGVATSTLVGATLLEQVATMNLESPRL

SEQ ID NO: 12457 - protein, 403 aa, unknown
  TnpB Polypeptide
VKGWIFSFAFPIDQAYNLDMIIRKGYRFVLEPTAEQAALICRSAGSSRFVWNKGLELQKDRVENGKRVLSYTEICGRLVEWKSEWDFLKEVHSQPLQQSLKDLSRALKDGLDGTKGFPKFKKKGEHDTFRFPQGTKLENKKVYLPKIGWVKFRKSQHVDGTIKNVTVSLLMGKWLVSIQVEMEVPEPVHPSNSEVGIDMGVIRFATLSDGTFAAPINSFGKVRSKLAREQRKLSKKQKYSSNWRKQKGKVQGIHAKVARVRKDFLHKLTSSISKNHAVIVLEDLQVKNMSASGKGTIEDPGKNVKAKSGLNRAILDQGWYEFRRQLDYKQHWRGGKVIAVNAANTSLECSECHHRAKENRVSQADFRCVKCHHEEHADLNAAKNILAAGRAVQACGDIRQTAA

SEQ ID NO: 12458 - protein, 386 aa, Cyanobacteria sp.
MLKAYKYRIYPNQEQQVLLAKSFGSCRFFFNYALNLTSQTYKETGKGLSRNEIINLLPALKKEYEWLKEPPSQALQQVALNLSSAFLNFFEGRGRYPRFKKKQNRQSIRLPQGCKLEDDYIRLPKIGKVFCKISRQPTGKLKSVTVSQTPSGQYYASCLFDNGAENPKPSIEGKVVGIDLGISDFAITSDGSKHGSPSYYRKHEQKLSKKQKELSRKQKGSNNRRKARVKVARVHEKITRCREDFLHKLSRNLVDDNQVCVVENLAVKNMVKNPKLAKSISDAGWGQFLTMLKYKCEWEGKTYVEVDRFFPSSKTCHHCLHQVDSLPLEIRHWECPSCGTQHNRDINAAKNIRDEGLRILAVGRIATASGQRVRPAKGTAFSGIAG

SEQ ID NO: 12459 - protein, 579 aa, Mycolicibacterium sp.
MTHRRLRQWRGVVPVAAPSGVAVTTRLRTTVDEDRVLDAVAGHVGRLRRADLAAASRPVPVDAGLDADERPTVRRARLNARKRRLTTESSSRWASAIIAGNDDQYRLARDAQYRHICGLRSAITTIETRLAAPTVDTLSVSERQAARTARREAKAVKGYASQAERFQKQRRLQHLQAELARAEHDRAAGVVHVVQGGKRLAKTRHHLDAAGLTIQQWRQRWDAARWRLTANGSPDEPFGNLTITITPAGQVSIRLPKPLEHLANAPRGRFVLSGVAVFSHRGEQWAERITGGHSISYTLTRRPGRAGVYVTGSWALPALPALPYWAGRDDGTTAGTAAGDDVYAEGPVVGVDLNDGHLAVRRLDAYGNPVGAAKRIDIDLTGASTRRDAWVRHAITRLLHYTRRYGITTIAVENLTFADARATGRETMGRGPRGKRFRRTVAGIPTAVFRNRLTAMATTAGIDLYGVNPAYSSIWGAQHWQHPYRNVTRHQAAATVIARRAQGFSARRRKGVTPQRPEDRAVRATNQTEPKSPTASTGSRHEPGTRGTTSRRPSSTGTRQSGRATVIPAQLANNGQLQM

SEQ ID NO: 12460 - protein, 320 aa, Halococcus sp.
VYDKRSATFYRDHASLSTVNGRVECEYVLPCDTERDTPHAKYLLNGDFEFRTSTLQYRERTDEFYLHVGLRQYDNDEDSTTTGNGTVLGVDLNVDGHLAVTSTGLFGESADYINHRRRQFEQVRGDLQQTGTESAYDTLHRLSGREWRWVEDLLHRESKTLVAEAVKHGCSTIAFEDLTDIRDRMANAKKFHAWTFRRLFDYTAYKAEERGISVEQINPAYTSQRCSRCGTTLSENRDGDSFSCRKCGYELHADYNAAKNIARKHVRSGQKSRDGWATRQLALKSGMLSANGSFEPAEPVSDGAPAEAGVHRQAHEFTRG

SEQ ID NO: 12461 - protein, 380 aa, Natronolimnobius sp.
MEYSPRYRLFPTTEQRESLDWTRDIVRQVYNHALHEFNQIPEDDGTLRQRVWQVRDNLPQLKQQWTDLKQVYSTVLQKAVERIHTNITNLGKLKAKGYAVGSLNWKGLREYRSFTYRQSGFELDKKSGPRDRAILRLKKVRGETLEIPIRLHRDLPEYAAIKEVTVKKEPTGAWDASFCIRTEEPEKPVVDDIDSEDTVGLDLGVLNFIHDSDGRSIGRLDLTAERERLEHEQRSLSRKQHESNNWEKQRRRVAKVHARMSNKKHDYKHKLAHFYAKEYDAVFVEDLNVKSMLEADGNARNKAEVGWSDFRAILEHHCDKHGTHYVEVNPRGTTKECAKCGVETEKPLWVREHSCPSCGFELDRDWNAALNVKSRGLEKL

SEQ ID NO: 12462 - protein, 836 aa, Streptomyces sp.
MSSASHSSAASAGPEEPILQGGAWLPHGFQLAPHSHLHGQLVYAAAGALATATERGTWVAPADRVTWTPPRFAHSHRFYGHTDVRLVTVPLDLCGEFVQHPSVFAVSPLLRETLLALTDRPERRPGAHRRLLAVIVDELADTAETSLHLPEPVDDRLRAATDLLHEDPARPATLAELGRMVGASERTLSRLFHSELSMSFHRWRTTLRIHLAHPPCPGSPHRRDVGDRDLGGVRVVQPLQLHRRLHRGRRPDSRPLSVDAANRPKVINGTLGTRTTAVDRCWRLSGIGCPVTGGRHRRRLSQWWALPVHDGAVDSAGELLPYPAGGDALEAVDQLGDGGLGRVVHEEVDVIAFAVELLQLRFEVLADLAHDLFAACQHLVVEHPAPVLRHEDQVHVHRRNDMPATSAIVLPTSEIHRRRVLGVQLRYNYRAYPDASQRRALAQAFGCARVVWNDCLRDRKEAHAAGLPYVKSAELSRLRITQAKRTAERVWLADVSAVVLQQSLRDLDAAYKNFFDSLKGKRQGRKAGPPRYKSKKDTRQSIRLNTNAFSLQDDGTVYVAKVGNLKAKWSRQLPAAPTSLTVTKDSCGRYFLSFVVDTEPDILPGVESDAGIDLGLSAFAVLSDGSRIDSPRFLRRAEKKLKRLQRELSRKTKGSNNRAKARIKVARQHAKVADRRRDFHHKASTQIIRDSQAVYVEDLTVSALARTRLAKSVHDAGWSAFVGMLQYKAALHGRTFAKVDRVFPSSQVCSACGFRDGPKPLHVREWTCSACGTVHDRDHNAARNILLEGRRIVATGRVETPNACGAPVRRAHVPAQRVEAGSPRKGQTTQAGIPGL

SEQ ID NO: 12463 - protein, 394 aa, Erysipelotrichia sp.
LQRAYKVELKPSIQQINKINQSFGVCRWLYNTYISKNKSLYQDFKDGKINRKESFMSANAFDKYINNELKILSEYAWINSCGSKARKKSICNAELAFKKFFKGETKFPRFKKKGKSEVGLYFPKNNKTDWKVERHRINIPTLKWVRVKEFGYIPTNAKVVSGTVTQQAGRYYVSVICEVEEVKNHKLETQPIGIDLGLKDFAVLSNGVTKKNINKSSKVKKLEKKLKREQSRLSRKYENLKKQTKIEQGGVTRQNIHKQTVKVQKLHQRLTNIRTDYINKCISEIVEQKPSSITIEDLNVRGMMKNRHISKAVSQQKFYEFRVKLTNKCKQNGIELRIADRWYPSSKLCSCCGSFKKDLKLSDRIYICNECDLVIDRDLQASINLREAKTYKVA

SEQ ID NO: 12464 - protein, 707 aa, unknown
  TnpB Polypeptide
MAWYHEEPLPQDEVAGTTYLVMECGLGGQDGLPAWKQAVLDKASLMVSVALAATMQALCRAFTIVVRSQDTGETMEVSWPWQAPAGSWVVDSAVLTFPVGEKQARQAKDLLSQETKPYGYRNAYRIVSLNGCTLTVEIARLMWRATREGADGKKESVMRRTETELTAATGDWNARDTKVQRQFSPIDAKTGLQALINSYLQPPELMALPSTLRPGVCQEAAQQVMSCVGLVNSPRVREPVTFPTVANRDPAVHRAAWEAAVSDMVSDLRPLARRPKREVFPGEYAADDPAGDRLVIVDPRWSAVMASRPPKPMPIRFVSADAVRVVWGHADFPIDVSKPDRHRGTLRESLQVRADRLRPQGMGDESTPRSERQRRRHNRRVNALAAKSATRALAFYARLPLLDAPELLAIADGRQGSAGSRGRGLDFNLMPMALHDAGTSAKERKGDMPVLLRFSREQLAVFFRDDIRIAWSNLVRKNGEWRLQLTLEVSYPKRTEFRRVLGVTFGLNHIATWILMDNSGAVLETGAFSPNEQLRAFLQEKGTMERDQKDGRWVGDHGFARRLEGVAHRVANQLVELALTHKAVLAIHDIDWVDKRGGESPENLVFSAWNYGQLRRYLEYKGKVAGLGPPFFAHDFAVKYACHACGACRKAGQKPENATTWVHWPDRTFHCTKCGAETALTGQLMAERAARLSLPYHQKLWAKEAGR

SEQ ID NO: 12465 - protein, 488 aa, unknown
  TnpB Polypeptide
MARFEIPQGWTAQAYQFALDPSPSQVRLFESHCGAARFAYNYMLDVVKKNLNQRVAERSYGVDEAALTPAQGWSLAKLRKTWNEHKSAVAPWWEANSKEAYNSGLDGLARALANWSASTTGKRPGAAIGFPRLKSRRVSARSVRFTTGAIRVAEDRQHVVLPRLGRIRTHESTRKLNRRLEAGTARILSATVAMRGGRWFCTFQVIVANKGRRPRNAARSRHPVVGIDVGVRDLLVVATPDGDEVVRIPAAKPFAQAQARLAALQRRASRQRGPYDRGAETRREPSKRWQRTQARVGRTHTRIANLRAHQLHVATTALATRHETVVVESLHVAGMRRRDGSHKRGLNRALGDAALGRIRTQLGYKAKWYGSEAITAPRWYPSTQMCSRCGTKTKLALRDRTYRCRNGCPPIDRDLNAAINLARLGDPLLRGTGTGTGSGPAANQRVGDGRGAIHKTSPTTVAGTAGGVEASTPRTVKTGTADPQGEAA

SEQ ID NO: 12466 - protein, 367 aa, Lactobacillus sp.
MFGNDRFVWNQMLAMMNERYQNNKALPFLGKFKLNYLLKPLKKEYPFLKTSDSSSLQVVNEFLTQSWKNFFQDKTGQIGKPRFHSRKYLKKSYTGKSIIKTAGKRYLKIPKLGYVKTSKTGVLQNTKINESTGKYYLSLQVEISEPEKYSLTGKRVGIDVGVADLAILANGLKYPSFDSSYFEKKAKVWQRKYARRRHLAKLLVLQDRNKKVLCPRSLESFTNWQKAQKSKAKYQAKAANQRRDYLHKLTTHLVKQYDVIAIEDLKTKNLQKNHHLAKSIANASWRMFRQMLEYKCEWYGKKLIAVDPKKTSRICSKCGYNSGAKPLEIREWTCSKCQTKHDRDINAAVNILHKATPTGQGLTMVTS

SEQ ID NO: 12467 - protein, 579 aa, unknown
  TnpB Polypeptide
MELPKVKKKRSDVSKRIEGNKDTDFVCIKMSWNSLCKNNYLKQGIQEIVYNINKISFLSYKLLNFHFTRLLEDNKELPEITQNLFYNACCYVSIMKNRKSTIDKEDEMYKSFSQFYHLIKNLPFRDKMGALINNLTKQQFTMTKNHLKLNFYKRFSKYLELRTGETRKSIIYKWCKDIYDEKYNGKNYFILSMKQWLKYIPTETNIVKHSSHFIRIYHKILKEFEKHKNTKGVRVFSLLPNKSSFTMDNIQICSTALNDIISYLTKEQNCKDFDEKKREYWLNLFNIEKYETEHKKFHYTIFTDGKCGVITMDKPKAKEVKTKEIKNIDYEQYVGIDPGIRALFTSCNENNEILQCSTKEYRHKSKMIYACKKRETWYKEWEHYALWKSIPSFKVSNTKNMLSYFEYVLPNIDVFFQFHCDKNFRGLNFNSYCRGKATLEKICRNITKNKKTLIGFGDYSQQHGLIKNHPTTPILKLKKELKRFCDVVDIDEWGTSKTCHKCFERITLYRNKKLCKPKATNVKGKARMSQYHSVIRCSSNECKLYCMDRDINASKNILLLLQCEKQGKRRPKCFREQKE

SEQ ID NO: 12468 - protein, 209 aa, Okeania sp.
LHKRLIAEVKTENPWYYEVSKCAPQQALRDLDRAFKNFLTIPKRGFPNFKKKGKKDSFYLEGSIKIIQGNYIKLPRIGIVKTYEILPSCRVKNVRISKRADNWYISFKYDYQPKPTPKERDVIGVDVGINTLATCSDGTKFANVKAYKQAKKRRTRYQRRVNKKELGSKNRAKAIKKLAKIHKKVADIRADALHKVTTWASFEPQHHCN

SEQ ID NO: 12469 - protein, 380 aa, unknown
  TnpB Polypeptide
VYIWAVKLTLKIKLLPTDEQAKNLLQTIKEANKACNLISDIAWAQKAFQQFKLHNASYHAIKGSTNLSSQVIVRCISKVADAYKLDKKTKRSFKPLGSISYDSRILTYKPNNIVSIWSIDGRLKMPFVCHNSNYLPYIKGEADLLFRKGKFYLFQTVDIIEDAVKDVEEFIGCDFGQADVCTLSDGTNYNSEQLKKVRKKYSKVRASVQAKGTRSSRKLLKRLSGRERRFVSINNHYIAKQIVEKAVRENKGIAIEDLSNIRKTAKPKSKAMKTELNRWSFYQLRQFLTYKAQLKGVKLFAIPPAYTSKMCSECLHIGDRKGKRFSCENCGNTSDADHNAAKNISAWGCVVNQPEKQSILCCTTHDAYCLKPIPSLCVGG

SEQ ID NO: 12470 - protein, 373 aa, unknown
  TnpB Polypeptide
MNKAYRYRLYPNKEQSELINKTFGCVRFVYNRMLSDRKGKYEQNKDDKETLKKLKYTTPADYKDEFVWLKEVDSLALANAQLNLNTAYKNFFRYKSIGFPKFKSKHKDRKSYTTNNQNGTIRIIDDSHIRIPKLKDVKIKLHRQIPQDYEIKSATISQTASGKYYISILVEFDADIQSMLPCADNVIGLDYSSKALYIDNFGTSADYPRYYRKMEAKLKREQRKLSKRIKGGKNREKQRQKVAKLHEKVANQRKDFLHKQSRQIANAYDAVVIEDLNMRGMAQGLRLAKSTNDNGFGMLRAFLEYKLKEQGKQLVIIDKWYPSSKTCHICGKINNKLTLADRIWTCSCGAVLERDTNAAINIRNEGCHILGIA

SEQ ID NO: 12471 - protein, 323 aa, unknown
  TnpB Polypeptide
MLQNRKLSSSKDYPELPCVVAKSLITKYQRNRKCVTVKNIVLPICGDKGKQVKLVDGGLRVPALFKKEVLPVAFPKPVYGFVRSVEFFKRGSPWRCSICYWTPVIAERTLKGCVGIDRNSVGNVAVLADPQNGKVRHLGFNPAGCKQNFRNRRAKLQSQGKCRTLRALRRKQSRRTKHENHIVSKQIVSYAVTHRRVIAVENLEGVRKPKSKIKGYVNRSQWSFYQLLEFIRYKAALRGIPVIEVNPAYTTQNCSRCGQRNTPEGKIYVCEHCSHKDHRDANAAFNIAQRGLGILVGFAKDSVSLGGALLVTPYSGGQELAYA

SEQ ID NO: 12472 - protein, 323 aa, unknown; identical to SEQ ID NO: 12471
  TnpB Polypeptide

SEQ ID NO: 12473 - protein, 330 aa, Methanobrevibacter sp.
  misc_feature (323)..(325): Xaa can be any naturally occurring amino acid
MCDKTFILTDKVEFVPDEGMEKELWFNINASAFVYNKTLEYSIYRENFVKEFGIGNKFKVNRTYTQKIVKTLKKHYPFLEDADSTCLQASTEGYYDHRTGAPRFKKRKKNPVTSITLRNNFYDTKEGNVGAIRWLSENELRVTKLGKITVKHRRHIKGQIKEATLKYENGRWYICIVYELDENKHGEFSYGGLYVGIDVGIDVGITDFLTFSNGKVIAKPDLKKINGRIQYYQQKIDGKKEGGSNWKKTLKKLHKWIRKKNNIVNDYYHKISYNIAKHCQFIAMETLNIRGMLKSNLSRSIHEIGWGKLIEMIKYKAELYGRXXXYIKEM

SEQ ID NO: 12474 - protein, 383 aa, Actinomadura sp.
VKLVVQVELLPDTATAAALWETLKLCNQAAGHASRRAHATGVTGKTALQRLVYGELKAMGLSAQPAIHCVRKVAGAYATLAENLKAGNYGPVGSRRRARVEGTPVRFRKDAAQPFDDRSLSWQIAERTVSVWTVRGRLQGIPFACSVEQAALLAASRRGESDLVWRGDCFYLHATCDVPSAPEYIPDGFVGVDLGIVNIATTSDGTVHSGKQVNQVRHRNRRLRRRLQRKGSKSAKRLLRHLSGREARFAADTNHRISKQIVTEAQRTTHGIALEDLGGIRARVRLRKPQRVTLHTWSFAQLGAFITYKAKRAGVPVVFVDPRYTSQGCSSCGHIHRKNRPDQATFKCTSCGFAEHADINAARNIAARGAAGWAVSHAADDAA

SEQ ID NO: 12475 - protein, 451 aa, unknown
  TnpB Polypeptide
VKGRSNEPELLNGEGQVKKSKLNTHIQGRFGVSKRTANSIISEAQGRFQSLKELKYVEQRQRGHKIRELECQVSKLDAKIRKMNPGIAVNEATDKEIKQYRIWKQSIYWKRQRLNKFRLRLARQSELIRRGVYSICFGTAEFFSAQRRLRENGFRSHRGWYNAFVKNRDKNIFYLGSKDECCGNQMFQLKYDPRKDMFKATVRTNNDDKKYINGYVDFKYQKNALIEQLAKNAAGAGKVKEVLPDGKVKYKTAYNGGEAPLSCRAIRRGNKWYLQVILTLTRNEQDLATKIGNGAFGLDYNDGYIAAAETDAQGRLAGMHEYWLEFHGAGSKAESEIREAVAEIVGMAKRAGKHLVVEDLDFEDKKSKQQKGGNPVYNRMLHLFDYGRYRDTLHNSCFRNNVGLTKVNPRDTTKIGKELYCYAMKLSAHQAAAYVIARRGQGFEDKLAVTN

SEQ ID NO: 12476 - protein, 351 aa, Burkholderia sp.
MNVVYRYRVKSLIGLLNQQSRAVNFVWNFCNDTQRHALRWRKIWPTAYDIEKLTAGSNKELGIHSGVINQICQQYVQSRRQFKRPYLRYRGKKSLGWIPLKGRDLKREGDSFRFAGNTFRVFNSRPLPEGKIKDGTNFSRDRRGNWFLNIVIDIADAPRREILNGVGIDLGLKNFATLSTGERIINPRHLRQLEEALAKAQRAGRKRQVLNIHARIKNTRSDFLHKLSHRIVQEFDYVAIGNVSASKLAKTSMAKSVLDASWSSFRQMLAHKAVRHGAWYEEIDERFTSQACSCCGSIPPSSPKGRAALGIRHWVCSACGSVHDRDVNAAQNILARSGHRSPVEGISAVVG

SEQ ID NO: 12477 - protein, 561 aa, unknown
  TnpB Polypeptide
MECTNCTQPNFPQTQKQFSLTNYVEIIIIESICGKNRNQYHLIPYNKITLRKATAQYATPDTHKAYKTTEIKNDQIKTQETSYNEIITKKATYFIINKQITCRINQLESILYQLWTSIDQPKITKNRHNAYRRPIILPSRTLFTSGSGSGSGSGSRSGSGSGSGSGSGSGSNTYLNYVKIHRASKTRFYPTTKQQLKHKQHFDNTRYVYNYYLDLKTKQYKETKKSYSFIETARDLTNHKKEKPWLNNSSRQAYTNKLKDLDTAFKNFYKKKSKYPKFKSKHHKQSYRISHPFFKIKPEGILITKIGLIYCNLNLPKQIKPLSITISKDTLNRYYISCSYETEIPEPTIDTTKPIIGCDYGLKTFMTTWNGINENHINHPLPYKKSEKRLKRLSRRLSRRKKGSRRRRTARHNIAVLHARIASRRNDFLHKLSSKMVRENQAIIIEDLNTRGIITRWGKKASDQGWAEFIRQLQYKGTWYGCNIIKTPRFYPSSKTCSNCGVINDGLTLKDRSWICPVCGVDHDRDVNAACNIFNYGRADRKLRTGTGGLVKTLVEPSRQE

SEQ ID NO: 12478 - protein, 435 aa, unknown
  TnpB Polypeptide
LNGIAISHRIEILPNNKAKTYFKNAFGCARLAWNWGLARWRRNYKLGIKESVYDMKKAFNAEKKEKFPFTGNVTKYATQQPFIHLGRGITKYFKDLKEGILSYPQFKLKKDKHQSFYIGGDQVKLSDINTNSDKIEQGNSQYVVIPKLGCVKMTEKLRFNGKIESVTISLEGGRYYASFNMTISKEEYDRTHKKDENKNLGVGIDVGISSFASMSNGIKVKVPKPLEKSLRQLQNLNRQSAKKQHPRTKEEKKRGMKCSNNYKKHKQKIQKLYVKIANQRKDFLHKLSTCIVSQFDYICAENLDVQEMLKNKRLARKVSDMSFYEFTRQLDYKTRYAEKQLIRVDQFFPSSKMCSNCGGIKKDLTLQQRTYICDTCGLKIDRDYNASLNLYNELKQHLGEVLPEVTPADLTAMLSRFEKNGLVTSKVETGIQQKT

SEQ ID NO: 12479 - protein, 442 aa, unknown
  TnpB Polypeptide
MQIISSYGVELRKQNIPIRQTLEIYRAAVSYLIGIYVQVWEELAEIPDAKRRFNAAEHLVHTTKKNHACFDFDIRFPKMPSYLRRSAIQHALGTVSSYKTRLDLWEKTDGKSGKPKLVYENHAMPVFYRDVMYREGAEGKDEAYLKLYDGHDWKWSCVRLDHTDMEYLRKCWSGKKASAPTLEKRHQKYFLRFSYKEEVTLTKTPVKEQIICSVDLGINTDAVCTIMRADGTVLGRRFIDHPSEKDRMYRTLGRIRRSQREHGSAQTQGRWAYTKRLNTELGKKTAGAIVRYAEENHADVIVFEYLEMQGKISGKKKQKLHLWRKRDIQKCCEHQAHRKGMRVSRICAWNTSRLAYDGSGTVTRDRENHSLCTFQTGKRYNCDLSASYNIGARYFIRELLKPLPATERSLLEAKVPPVKRRTSCVYADLRKLHSEMELLKAA

SEQ ID NO: 12480 - protein, 365 aa, unknown
  TnpB Polypeptide
MKLTLKIKLLPSNEQADLLLETIKEANMVCNAISEVAWEEKIFNNFKLHHKVYHAYKASFNLCSQVLVRCIAKVADAYKLDKKSKREFRPLGGICYDSRIMTYKPDDIVSLWVIGGRIKIPFICHNRNYLPYIKGEADLVYKNGKFYLFQTIDVPEQDIDDIENFLGVDFGLTDIAVTSDGVKYSADGLNKYREHRQKVRSSLQSKGTKGAKKLLKRLSGKEKTHCIIKNHTIAKSIILCAKEQKKGVSIEDLTNIRVTSKRRNKSFRTKLGRWSFQQLRSFIEYKGILYGVPVVVVEPRYTSQTCSVCKHIGKRANKNFKCNNCGNNMDADVNASLNIATLGRVINHAGKSTDMCCSIAHISQV

SEQ ID NO: 12481 - protein, 364 aa, unknown
  TnpB Polypeptide
MKQTIAVKLETTAEQSQALRLTMEAFNRGCDYIAEVAFKKRQANKIAIQPFVYGALCADYGLSSQMAIRSIAKAIEAYKRDKNIQPAFDPHGAMVLDDRLMSFKGLSHVSILTLQGRILVPMRFGAYQAARIDRAKGQADLILKKGVFFLYLTIDLPSPPPIEPTGILGVDLGITEIATDSEGNQYSGSVVKAVRCRVREHRRRLQKRKTRSAYKRLQKIRRRQSRFSRDVNHCVSKELVQRASSLSKALAIEDLSGIRERASVFGRQMRWLMGNWSFDQLKQFLVYKAEAAGIPVVFVDPRNTSRTCSECGHCAKENRKSQAKFLCLNCGLDTNADKNAALNIMARGAQSNALMFRPLATAIG

SEQ ID NO: 12482 - protein, 191 aa, Acinetobacter sp.
VHHSKKANIRKDFAHKTSHSLVNGLAKVFIFEKLNTKSMTKKPLPKIDESGRFIPNKAKAKAGLNKSILNVGWHRIASFLAYKAVKLGKAVFTINASYTSQECALCGHTHPDNRKSQDKFKCVSCGHIDNADHNASVVIKNRAINLILDSGTLLDDNHLSSSGRRGVRKTTKGVKALFRSTNEASKEMCAT

SEQ ID NO: 12483 - protein, 305 aa, unknown
  TnpB Polypeptide
MKFCCDLFNPLCRFRFQICIEFCNPLFLLLILELLLILGSLPKDCRCERHRLNIPTLGWVRIKEKGYIPTTKDGWKIKSGTVSIKAGRYYVSVLVEIPDAKIANNSNDGIGIDLGLKDLAIVSNGKTYKNINKSARVKKLEKKLRREQRCLSRKYENLKKGESTQKNIQKQKLKVQRLHHKIDNIRTDYINKSIAKIVKTKPSYITIEDLNISGMMKNRHLSKAVASQKFYEFRTKLKAKCDENGIELRVVDRWYPSSKICHCCGAIKKDLKLSDRIYRCDCGYVEDRDFNAALNLRDALTYEVA

SEQ ID NO: 12484 - protein, 369 aa, Pectinatus sp.
MEKAFKFRIYPNKIQEILIQKTFGCVRYVFNHYLAMRIKAYQDDKTTLTFSKCSRNLTQLKKENIWLREPDKCSLQNSLKDLDMAYQNFFKRKNVGFPKFKSKKNRHKSYKTNFTNGNIEFLGTKIKLPKLGKVKIRDKQIPQGRILNAVISQTPDGKYFVSLCCTEVEKPVFKRTDNYVGIDLGLKEFAITSDGDKHPHHKYLKQSLEKLAKLQRRLSRKTKGSANRNKARIKVAHLQARIANQRKDMLHKLSLKLIENYDVICLEELQVNNMLKNHKLAQSIIDASWSEFTRQLKYKAQWYGKEIMQIDKFYPSSQLCHNCGYQNKEIKDLTIRQWECPECKSHHDRDINAAINIRNEGLRILNTAV

SEQ ID NO: 12485 - protein, 454 aa, unknown
  TnpB Polypeptide
MIRVVLVSDRERFWRCCRQMGSYEAVKVRLDPTPRQERLMASHAGAARFAYNAGLAHVKEALDNGESADWSHYGLIRWWNKSKDELAVNRDTGEVWWSHNSKEAYSMGLRSLAQGFSNWSKSRKGKRKGRRVGFPKFKSKNNTMRFAYSTGFTAPTACDPYGLKLPRIGRVHCMENVCKHVSGARLIRITVSRWGGNWYASLTVERESAMPVTSPKLGAVGVDLGVKNLATLSDGTVIANPRALGTRLKALRKAQKALSRKVKGSARREKAKERVARLHARVADVRADAINKATTMIATTYSVVCIEDLHVAGMVKNHSLARSVSDAAFGEFRRQLEYKTTRSGATLHVVDRWYRSSKTCSGCGSVKAKLSLSERTYRCDSCGLVLDRDLNAAINICVAGSAPETLNARGGDVRRANSLLGNADPCEARTKQSPAGGVRLGAGLGNEVMRSMVK

SEQ ID NO: 12486 - protein, 488 aa, unknown
  TnpB Polypeptide
LTWLASEVRDISSYATYVVRNDEALGGELARVAAVQPAVAGRQAGVTMPDFLVSGKSGRSRKEKLLQYNVVTTHRSWKERANAANGESSKYVSQGWKRTVDASAPSYGVDYVNLGAVDKQYAVIENNPFTDGEIVLKMVIQGQWYRLIFSFDNTRFTEGKVTLPIIKIQDGRPVFIFTVVTDNPVVQFSGDYVIGVDVGINNYATVVVREVEAGRIVYETTLSQRVHSLWNSVRASEAQVRALRKKAAAMLGDRQERMAALDEAQFHREAASRKKRELAILASQEIAYLSHVWGNAVVAVEDLGWIANTMQNGRWNRGELVKWLTHYVSQNGGWVVAVNPANTSQQCHECGQQVSHPTHELSVCPEHGTMDRDVNAATNIAARAVPRVTKARATRAKKRKLRPQTPLRTPTARASLKYPGRDRAKNSPTPKRKKHRIAKEVNLPVCPARVQAHSLDARVLADQGTRGTLGTVQAALKQGCVTYKCMLL

SEQ ID NO: 12487 - protein, 503 aa, unknown
  TnpB Polypeptide
LSGELLDSDRVLARLASEVRDISAYATFVVRNDVELGGELARVTAVQPATAGRSAGVTMPGFLVSGKSGRSRKERLVQHRVVTEYRSWQERVNAANGESAKYVSQGWKRTVDTSAPSYGVDYVNLGTVDRAYARIENNPFLDGEIVLKMVIQGAWYHLIFDFNNARFTGGKVTLPVIKVQDGKPVFIFAVVTDNPVVQFSGDYVVGVDVGINNYATVVVREVETGRIAYETTLSQRVHSLWNSVRASEQQVRDLRRKAATLLRDRQAHMAALDEAQLHREAASRKKRELAILAAQEIAYLSHVWGNAVVAVEDLSWIANTMQNGRWNRGAFVKWLTHYVSQNGGWVVSVSPSNTSQLCHTCGSKVTHPTHEVSVCAEHGAMDRDINAAVNIASRAVPRVAKARVTRAKNRKIQPQRTLKTPVARNSLRYPGRDRTKSKPTPKRKNRRRVSREVILPLRPARAQAQRLDARVLADGGTYGVAGTSEAALKQGNTAYKSRLCCLI

SEQ ID NO: 12488 - protein, 433 aa, unknown
  TnpB Polypeptide
MFEAVKVRLDPTPRQERLMASHAGAARFAYNAGLAHVKEALENGEPADWSHYSLLRWWNANKDKLAVNQTTGVVWWSQNSKESYSRALRDLAQGLSNWSKSRKGQRKGKRVGFPRFKSKNTTMRFAYSTGFTTPTASDPYGLKLPRIGRVHCMENVYRRVAGARLIRITVSRRAGRWYASLTVERETTAPATTPKLGAVGVDLGVKNLATLSDGTVISNPRALGARLKALRKAQKALSRKVAGSVRREKARARVARLHARVADVRADAIHKATTMIARNYSTVCIEDLNVAGMVKNHSLARSLSDAALGEFRRQLEHKTARTGAVLRVVDRWFPSSKTCSNCGTVKAKLSLSERTFNCDACGLSIDRDLNAAINIQVAGSAPETLNARGEDVRRANDMLGNADPGEARTKRAHQSAVRLGAGLGNEAMQPRIN

SEQ ID NO: 12489 - protein, 533 aa, unknown
  TnpB Polypeptide
LGVFLFDGRGALAKNQTYKAFVARPSHVLELDGELLDGSSVMAELASEVRDISSYATYVVRNDEILGDELARVTDTQPAAAGRRAGVTMPDFLVSGKSGRSRKENLLRYNVVTSYRSYMERVQAANGESSKYVSQGWKRTVDASAPSYGEDYVNLGAVDRAYASIENDPFADGEIVLRMVIQGQWYRLIFNFDNRRFAEGRVTLPVIKAEDGYPVFIFTVVTNNPVVQFSGDYVIGVDVGINNYATVVVREVEAGRIVYETTLSQRVHSLWNSVRASEAQVCDLKKKAATLLHDRQARMSALDEAQFHRKAASRKKRELAILAAQEIAYLSHAWSNAVVAVEDLGWISNTMQNGRWNRGAFVQWLTHYVSQNGGWVVAVNPSNTSQLCHKCGARVSHPTHEVSVCPEHGTMDRDVNAAVNIASRAVPRVAKARVTRAKNRKLQPQAPLKTPVARNSLKYPGRDRTKSKPTPKRNKRHLVSEGVNLPLRPARAQAYCLEASVLADGGTARAAGTSQAALNQGNAAYKSRLCCLI

SEQ ID NO: 12490 - protein, 375 aa, Paenibacillus sp.
MNKAYRFRIYPTPTQETMIRKTFGCVRFLYNQMLAERKAPSEWDRTDAERPKRQKFRTPAAFKTEFPWLREVDSLALCNAELNLKSAFRHFFRDKRTGYPKFKSRKNPVQSYTTNNQKGTIRLEAGGKHVRIPKLGEIRIKLHRHIPESHTIKSATISRSSSGKYHISILTYYETEEKPIFPHPDKVLGLDYSSKALYIDHRNTSADYPKYLRNMEIRLKNEQRVLSRRKTGGSNWRKQKLRIARLHEKVANQRKDFLHKVSKQLAETWEAIVVEDLNMKAMSQSLSLGKATMDNGNGLFRTFLGYKLADRGKRLVRIDKWFPSSKRCGACSKINKLLTLKERVWVCEGCGRIHLRDANAAGNIRAEGLRMLGLA

SEQ ID NO: 12491 - protein, 402 aa, Escherichia sp.
VKRLQAFKFQLRPGGQQEREMRRFAGACRFVFNRALALQNENHEAGNKYIPYGKMASWLVEWKNATETQWLKDAPSQPLQQSLKDLERAYKNFFRKRAAFPRFKKRGQNDAFRYPQGVKLDQENSRIFLPKLGWMRYLNSRQVTGVVKNVTVSQSCGKWYISIQTENEVSTPVHPSASMVGLDAGVAKLATLSDGTVFEPVNSFQKNQKKLARLQRQLSRKVKFSNNWQKQKRKIQRLHSCTANIRRDYLHKVTTTVSKNHAMIVIEDLKVSNMSKSAAGTVSQPGRNVRAKSGLNRSILDQGWYEMRRQLEYKQLWRGGQVLAVPPAYTSQRCACCGHTAKENRLSQSKFRCQACGYTANADVNGARNILAAGHAVLACGEMVQSGRSLKQEPTEMIQATA

SEQ ID NO: 12492 - protein, 363 aa, unknown
  TnpB Polypeptide
MRKTYKYRLVPTAAQHQALDAQLGEACRLYNAALQERRDAYQCSGISLNYYSQANQLKEIRSAGHLGLANFSAAQDVLRRVDKTFKAFFRGIMAGLKAGYPRFKSRRRFDSYTFPSYGDGCRLTGSRLYVQGVGHIKVKLHRSVDGAIKTLTLKRECGKWYVCFSVEYDPAPLPESDARTGLDVGLLAFATLADGSTIENPRFHKRSQAKLRLAQRRVARRKRGGKNRRKAVLLLQKAHAKIKNQRSDFQHKVARQLVNAYGMIAVEDLNIKGLASGMLAKSVNDAGWSSFIDTLTYKAAEAGRQLVKVDAHGTSQACLCGAEVRKTLAQRWHQCPDCGLSAARDHVSAQLILGLGLSLLGLT

SEQ ID NO: 12493 - protein, 256 aa, Paenibacillus sp.
VRVAFVYRLYPTREQMRTIHFTLERCRLLYNRLLEERILAYKTEGKSLNYDQANTFNERKQHIPALKQVHSQVLQDVAKRLDKAFQAFFRRVKHGETPGFPRFKPQQQYDSFTYPQGGHAIKGNKVRLSKIGDVKIKLHRQPQGKIKTCTITVKNGKYYACFSFEVDPQQLPVSDEKVVLILACCILQLLQTAQRLRHQSNCEETKCRLKQLLTVCNTQETRFLIAERRLFTFWPNCMKRWRISIRIMHIRFPDNW

SEQ ID NO: 12494 - protein, 147 aa, Paenibacillus sp.
MELLRKAKLGLMRIIEKSGKWYAQISIEVPTSVTNNENIMGIDLGLKVPAVSVTSTGKTRFFGNGRENKYIRRKYQQRRRKLGKLKKLSAIRKLGNKEQRWMKDQNHKISRQIVDTAIQENVSIIKIERLEYSQDGKNKPQKRKESA

SEQ ID NO: 12495 - protein, 188 aa, Paenibacillus sp.
MGIDLGLKVPAVSVTSTGKTRFFGNGRENKYIRRKYQQRRRKLGKLKKLSAIRKLGNKEQRWMKDQNHKISRQIVDTAIQEGVSIIKLERLENIRKTARTSRKNAKNLHSWTFYQLQQFISYKANLVGIKIVEVNPAYTSQTCPACAEKNKAKDRGYECSCGFNAHRDRVGAINIMNQPVADGNSLSA

SEQ ID NO: 12496 - protein, 432 aa, Halorubrum sp.
VKDVIRTVKVKLDVPDERCDDLHQTKEQFLHCANTTAAWAWRHPDNHCVTSKQQAETALYERLRDETALTANLVQKGIRRAIEATKSGVARLKKGEPTSQPQFDAWSVVYDKRSATFHRDHVSLSTVNGRVECEYVLPDDPAETPIGEYLLNEDYEFRMSTLQYDRSTEAFYLHARMRRTTDEHEQSTVSSEAKHRTVLGVDLNVDGSLAVTSTGAFIGNADEMTHRRREFEKTRGSMQQTGTRSAHLSIQSMDDREHRWAQDELHQASNRILEEARNHGCTHIALENLTGIRDRMGGAKRFHAWAFRRLFEYVEYKAEMDGIEVEQVSPAYTSQRCSSCGFTHETNRRSKHRFVCQKCEYELNADYNASKNIARKLLNRLRSGQTSPSGGAPCQCALKSGTLNLNGGFTATVNSTTEGESTDKPTTPVVGH

SEQ ID NO: 12497 - protein, 415 aa, unknown
  TnpB Polypeptide
VSELTRTVIVPSVKLSEKKFRVFKELEELYRQILAELVDYGFRNNIDSFTRLKRDKYRELRRRFPQLPSHYIHTACQDASTRIKSFNKLRKKGLAKSEKPEVSRVSIWLDDHLWRHIGYTAILIYTHRGWIPVELVPHKLYWRYINNGWALRTQPKVKIDCKRKRLLIHFVFVKTTSTGKDGAKRVISVDVNENNIAVKVLGKVYILETGIKRITIGYARYREVVQSVKDNGYVGRAIRGRERKRKKDIRLKIANTVANTAKNINAVVVLEKLPKQCPRNMIKGVKDPALRHRIYQAGFRGIVRAIEEKCLERGVPVVKVDPRNTSSTCPYCSSKLMRGDAPRQLKCPRCGFRAGRDVIAVLNLEKKYSTSKGLVPLAPMPHDPALEVVVLPMKEWARRKSLDAINKHGLMRMSI

SEQ ID NO: 12498 - protein, 431 aa, unknown
  TnpB Polypeptide
MYSIPVGDPRVSELITWYLRVLQRAIDVIWENIEWRYKFPRIERRKGRQVVVIPGKLKVPELPKSRAFKKRLRDKLLLDCPYARHWVDAVIRTAYSIMESWRKRYLKGRARKVKPGVRRRFARCKITLMKVDYEEKKIRIAVKPGEYIEVSWSSRWFTKRLEGWRVGEVILKDDRILIPFKSTRVIEVRDVVAWDSNELSLDGFSPGVGFIRVDLKPLQSMKITYERKKRVAQSKGLKDIYEKYVARERNRERDFINKLTSGLTRLLLNTIHVFENLDKEDLVSKKRVEKVRRKRNARTPWINIQKKISEKAIIIKVSPENTSRTCPRCGYVVKTRVGRVFKCPRCGFELDRQKLASVNIYLKYIKMRGFPHSYEPERTMMEELWVGVTLSGWSPVMWIPMKGILRAVKPRVEGLVLFDTKPYETRTPQYN

SEQ ID NO: 12499 - protein, 383 aa, unknown
  TnpB Polypeptide
VQVISVKCKLQVPQEFRQEIDLTLEGFADACNQILAVAKENKQWNTTKLHHLVYKPVRESTGLKANHVCQAIRRVIGNAKAVKQIHKFRPTSLNLDVRTFVYLEDLQTVGVTLIAGRKKFKLSIGNYQVALLRGQIPTAATLNKTRKGDYYINICVEIPSDPTGKTPKVIGVDLGRRDIATTSTDKSWSGAKIQATRDRYSKVRSNVQSKRTRSSRRLLRRLSGREQRFQKWLNHTISSQLVKEAKQVNAALAFEDLTNIRKSLNEKPRNRTERRRTNNWAFYQLRMFTQYKAVIAGVPVILVPAAYTSQTCSRCGHVHPTKGKSFRSGKKFKCGHCGFEHDADVNAAKNIAALGRAVTSPESPGMTCLLVGQLPFLDLSELG

SEQ ID NO: 12500 - protein, 417 aa, unknown
  TnpB Polypeptide
MERKVIRAVELNLLPLTGAKQDELSSLFSEYLAAANEILSTLKFERPRSSTKLHHLTYAYIRKKSKLPTQLVCAARQEVWAKRKHKIAKFKRLPVSYNVPRSGSLKQTKRNNPILSIATLNGRLGLPIAQDGAWRRFNRLLEDGWTFTEFKLLNLQMARVTLKREFEVAEPKPSQAIIGVDVGVGTLAAVTVFKDGKIERQLYFGRDVWQVKRDLGIRRSKLQAHASKGSRRARRVLRELRGYERNFDKTRCYQEAHKIVALAKQYDATIAIEDLRGLNNAKLNRKSNRKVKRMPYSMFRQALQSVAWQEGVEISLVSARYTSQTCPRCSAKGVRKGSSFKCECGFAANADRSASVNIAKLLSERVKHAQTPTCFSRPSLSGAAVNQPILCHDGGQVLVRNHASHHERKPPISIGGS

SEQ ID NO: 12501 - protein, 386 aa, Paenibacillus sp.
ILNHHKAYKFRLYPTKEQAIFINKTIGCTRFVFNHFLGKQKEKDAYWTITKEMVQNGQLPLNRWKGEFFNKNESIKSVKQLKQYYSFLKEVDSIALQKSVENLNDAYTRYYKKQNNTPRFKSKKNPVQSYTTKQMNGNIAIDGNQLKLPKLGWVCFTKSREVDGRILNATIRRNTSGKYFVSIVAEVDIQLSPKTHQEVGMDLDIKQFAVLSQGKPMENPHFLRNMEQKLIREQRTLSRRTMGSSNWHKQKIKVARMHEQIVNARMDFLHQHSTALVKNHDLIAIEDLQVSHMVKNHRLAKSIADAYWAEFRRQLEYKAKWYGKQVVAVSPWFPSSQLCSCCGFQYKEAKKLSIRKWDCPQCGIHQKRDQNASMNILQEAKRLLSA

SEQ ID NO: 12502 - protein, 325 aa, Cyanobacteria sp.
MKTRYKYRFYPTDQQQQSLAQLFGCVRVVWNDALAFSKSDKYPGYNKLSAMLTQAKKTEARSWLSGVSSVPLQQSLKQLETAYKNYFNSLKGKRKSKKVGQPKFKKKTYDQSATFTKAAFSIKERGVFLAKIGNLKPIGSRELPSSPSSVTVIKDCSNRYFLSFVVETEPVHVDAKNQSIGIDLGIKTFAVMSDGSKAVSPDYSKVDRKIRQLQKKLARQQKGSNRRNNTRLQIARLHNRISDTRQDFLHQLSTKLVRENQTIVLEDLNVSGMVKNRKLARSISLQGWREFRTLCEAKSQKFDREFHLINRWEPTSQICSKCGYK

SEQ ID NO: 12503 - protein, 387 aa, unknown
  TnpB Polypeptide
MAQQVKRAFKYRFYPTDEQAAELSRTFGCVRLVYNRALQERTEAWYGEQRRVSYAESSTRLTQWKKTEELAFLAEVSSVPLQQALRHLQGAFANFFSKRTKYPRFKSKKNARQAAEYTASAFRWRDGRLTLAKMAEPLDIRWSRPLPEGTQPTTATVSRDAAGRWFVSLLCDDAIAPAAATANAVGVDAGITSLVTLSTGEKVANPKHERRDRARLANAQRELARTVRGSKNREKARRKVARVHARIADRRRDFLHKLTTRLVRENQTVVIEDITVRNLVKNHSRARAISDAAWAELRSMLEYKCAWYGRELVVVDRWFPSSKLCGACGTIAAKMPLNVRDWTCDCGAVHDRDVNAARNILAAGLAVSACGAGVRPQRESSRAGDRR

SEQ ID NO: 12504 - protein, 281 aa, unknown
  TnpB Polypeptide
MRTVSSYGVEIRKQNIPARQTMEIYRQAVGYLTEIYAQVWEELRKIPETKKRFNTAEHMVHMTKKNTARFDFDLRFPKMPSYLRRSAIQHALGSVSSYETRLGQWKETGVLSGRPKLTCRNHAMPVFYRDVMYREGAEGKDEAYLKLYDGHDWKWFRVYLKRTDMEYLPRNWKGKKTSAPALEKRHRRIFLRFSCTEEVTLTKTPVKEQIICSVDLGINTDAVCTIMRSDGTVLGRRFIDHPVKKTGCTHTGTDPQIPEGTWLCADTGKMGIYETSEHRTG

SEQ ID NO: 12505 - protein, 403 aa, unknown
  TnpB Polypeptide
MVKTFKYRLYPSNAQELRLFQTLDVCRHWYNMCLSERKWAYQLEGRSVKKSEQEKTAIRYRQSFPQARTVFSQTMQSVCDDLDKAFKAFFRRVKAGEKPGYPRFKGRDQFHSFAFKQFGIGARLDGKRLKLYGIGRVPVRWHRPIEGKIKTVRIVHKAGRWHVCFVVETPETEAIPLTGKAIGLDMGVCAMITTSDGDKATNSAYYRLSQAQLRIAQRSLSRKQRGGKNRRRALLRLQRLQDHTASQRRDYAHKLARKLVNEYDLIALENLSIKNMAQNLHLSKSILDSGWYLFRQFLTHKAENASREIVLVNPAYTSQCCSNCGVTFQNFGLSTRWVECACGLMLDRDHNAAINILNRAGRDTSVQHNVDPLPEPHGADKVMRAVETARLLSPQNVTSFRLD

SEQ ID NO: 12506 - protein, 397 aa, Oscillatoriales sp.
MQLAERHIIKSTEHRFIEIDVLAFKSKNLYNAANYIIRQSFVYGWGYINYNEMNRLMKSHQAYKELPAKVSQQILMILDKNWKSFFEAVKAYKNNPTKFSGRPKLPKYKDKVKGRNILVYTIQAISSKELKKGIIKLSGTNILIKTQVKPEKICQIRLVPKCDSYVIEVIYNACTQPEPTIENKKELVGSIDLGLNNLVALTSNQPGFVPLLINGRPLKSINQFYNKRKAQLQSQLKGNRCSSSRLGRLTRCRHQKVDNYLHHTSRQIINLLASQKIGMLVIGKNVQGQNEINLGKRTNQNFVNIPHARLIEMLKYKAELVGIKVIEQEESYTSKSNVRFVLKKPRNGGNSGSNKVIQYGLSSHFNPLLDDNLFVLWVRTLFKSHPAGAAVKASPLR

SEQ ID NO: 12507 - protein, 284 aa, unknown
  TnpB Polypeptide
MLKAYKYRIYPNDEQKAQIAKTFGCCRFVYNQTLAYRKETYEQDKKSVSKTDCNNYCNRKLKKDYEWLKEVDKFALTNAIYNMDAAYQKFFREHAGYPKFKSKHDSHQSYTTNFTNGNIAVDFEGEKIKLPKLKAVKAKLHRNFSGQIKSATISQVPSGKYYVSILVETEHVELPHTNQTIGIDLGIKDLCITSDGKKYENPKTIRKYEKKLVKLQRQLAHKEKRSQNYCKTRKKIALCHEKITNTRKDYLHKISHEIISENQVIVSENLQIKNMVKTIIWQSP

SEQ ID NO: 12508 - protein, 416 aa, Moorea sp.
MIIAYQYRLKPTKKQRAKIDHWLSMLCAQYNYLLADRFNWYEQNRCSINACPLVCYLPELRNNPDYYSQKKSLPNLKKTHPWYKDIHSQVLQDAVKRVKLAFDRFIKGDSNGKRSGRPRFKKPHRYRTFTYPQMKEGCLESNLINLPKIGKVKVVLHRPIPDGFKIKTASITNKCDGYYLVLSLEDKTVPEIKPNINPDSIIGIDVGLKDFLTTSEGETIEIPQYYRKSQKRLRVLQKRVSRRKKGGSNRLKAIKQLGKQHKKVADKRKDFHFKTANYLLSKYDVIAHEKLNVKGLVLSRLAKSVLDAGWSNFLTILTSKAVRVAWPTALNAGLLAIPVSAQNTSQNCSNCGKKVPKKLHIRWHDCPHCGCSLDRDHNAAINIRNRAAGQSVLKAQRLLRDARIGWEAYTELKESV

SEQ ID NO: 12509 - protein, 479 aa, unknown
  TnpB Polypeptide
MANLTDYTIKECDYHFGVKFRIYPTKQQQAIIHYNSTVSRYMYNKILETDTKIYELKQYVESNKQQQLFAKQPHTTHIYNNSYETHENVKHSIGRYHETHQTTNVLSNFKPYTNELKYLKDVQKIRNMASLIGDTYADDSLTKNHPYLDSNIISYANRNYQQAWQNYHNGIQKKPTFHSIKSNPYSDNYQTYYNPTTMNIFVDDTHIMLPKLCKKHQYIKCDPLRDLLRIDKRNDFTVGTITVNKDNNNRYWVSLQLGSKTPFVEPLPKTGNMIGIDLNLDNYYTDSNGKVIPNPRFFRTQEERLSRMLRILSRRFEVAKRQKRSLKDASNYQKMRLKVAKLSLKIANQRNTFLHNLTTKIIKENDIIVTEEIRSSNMLRNSKLAKSISDAGWRTFIGMLQYKAELYGRTMITVDARLTTQTCSECGYVLHKDDDASKNERLDLGKRQWTCPKCKVHHIRDHNAAKNILKKGLNKLQNP

SEQ ID NO: 12510 - protein, 516 aa, Lactobacillus sp.
VKKTQPKTIRVYSKKLSDEEFARMSDFFERYGRCRHFFLNRYCGINSMLAVNNWQALRNQVRKWDKPVKGSKGKLETVYNFQTKHWVGALREACANIKSMWSNLANRLKKLIQGNENFSADQRHLLFFILKLKSAWQAVLLHKPIELPEEYTGALTEIEAKLTDKQIKQAHSYLRRITYRYHYRARKSGKLGSSMKCDLNWAFEGNTFSFSSDVPRKQFSVEMTSPWSYPRTGDITVVLDRIKQRLEVHKLISSKRYSNDSKKAIGIDKGLVTLLSCSSGNEYGENFSKLANAIVDKYGKRNANRQPYMSLRWQLNQQLEQLEKANQPLSKTALRKKIKLLGKLKNLEQNNIGRKSYDKSYRSAHETVRSFINCAINRMIETEHPAVIAKEDLTFVKEKGVKSDNSRFARKMRKRLNSWTKGQLDERIEYLSSKNSIETHDINPAYTSQYCPICGQHFEERYGSHHELTKCKKCGEMNANIAAAKNILSRLTDEEITLYTPYKRVKEILDSRIKEA

SEQ ID NO: 12511 - protein, 176 aa, Methanotorris sp.
LGIYNLVVVADDKGNELLRIHGDGIIGYKTKLEKRDIRRYVNVYKNCYAKIGDKFKRYSAYINHVISKKIVEIAKNRNATIIIENLKGLKGKSRSLRNLFMKWTYHDLISKIEYKAKENGIPVVKVNPKYTSKKCSKCGFINKNLKNERMFVCPKCGLEIDRDLNAAINLAKSSPP

SEQ ID NO: 12512 - protein, 434 aa, Methanotorris sp.
MQNKNKLPSEIVLTYKIKHNYDLKNLLDGFMSTSQKAVDIIWENINWKEKQVKHRFKSKNKYKYYTTTRLIPEIPKDKDFKRELRNYLLNGWNFASHYVDGAIKVAYSTIESWKSNYLDGKRKRNKPTFKRPFVRVKNTLIKYDKENGTIRITIKARKEYLVLDIKNEWFFEKIRGFDIGEIILKDNEALITFKKPLNIFDKKVVIGVDSNLKSLDLFHPEEGWIRVDLSELHRIKNVYDVIIDKLKSIYKKAPKRIGILLKKYYNRRKNRVEDFINKLTSQLSKLFPNAIFIFEDLDKLNMYKNSNFNRDLDRTSWREIAKKLEYKSIVFYVNPHYTSKTCPICGSRMESQEGQVVTCEKCGVFNRQFVGSFNIFKRGVKLVKKLLGGVGVPVTGVEVDDLLSNEPRGELRPMSPKSIVRVNLSGSTFIHIYS

SEQ ID NO: 12513 - protein, 175 aa, Methanotorris sp.
LLKKYYNRRKNRVEDFINKLTSQLSKLFPNAVFIFEDLDKLNMYKNSNFNKDLDRTSWREIAKRLKYKSIVFYVNPHYTSKTCPVCGSKMESQEGQVVTCEKCGVFNRQFVGSFNIFKRGVKLVKKLLGGIGVPVTGVEVDDLLSNEPRGELRPMSPKSIVRVNLSGSTFIHIYS

SEQ ID NO: 12514 - protein, 412 aa, Methanotorris sp.
MPNKTKSKGTQELSYQVVLSYKVSHNYPLKTFLIECKDKLNECIDMIWNNIEYTKKDKPKLPKSNEFKRNLRNKLLENWSYASHYIDGIIKTSYSILQSWASNYKRGYRTKTKPVVERLFVRVKTTLIKYDKERAEIRITIKPRKEYLTLNIKNEWFFDKVKDLTIGEIILKENEAFLTFKDNLNYSDKDIIVGVDSNLKSLDLFHPIEGWIRIDLTELHRLKEVYDKKIDGLKKLLKKCPLRVLRKINRLFERRRNRVKDFLHKLTTQLSRLFPDAIFVFEDLNKRRMYKNKHFNRRIDRANWNGIIEKISYKAVVILVNPAYTSTTCPICGSRMESQEGQVVCYNCSNSFNRQVVGCFNIFKRGLGAIKRFMGGSGVTTTGAEVSAKGLMTPNPNVVYYVDLNGKYLKCI

SEQ ID NO: 12515 - protein, 438 aa, unknown
  TnpB Polypeptide
MTAVIQAYRFALDPTPAQERALRSHAGAARFAWNWGLVKCKERYEAEGKWYSSFDLHKLWNAEKKADPALAWWSENSKATYQEAFHHLDRALRDFVKSRDGQRKGKRLGFPQFKRRGRCRDSFRIHGGRTRCADSTVTLPKLGVIATHESTRKLAQRLEAGSARIFSAAITRTAQRWFVSFAVEVERAIPARHGHPGSAVGVDLGVKTLLTGVDDQGAVIAVEGSKPLRSALRKLRRASRAHSRKAKGSANRRKSAARLARIHARATRIRADALHKATTDLAGRYETVVAEDLNVAGMVRNRRLARAIADQGFGLARQMLSYKTTWNGGRLILADRWFPSSKTCSVCGWRKPSLTLAERTFCCESCGHTEDRDVNAARNLLKLAASGAESLNACGGHVRPGSAGRRPLNQEPGTALAGETETATAQDVAAEQERTHAA

SEQ ID NO: 12516 - protein, 368 aa, unknown
  TnpB Polypeptide
VRKVVQVKLLPDQEENGSLLATMQRFNAACNWLSERALELGVFSRSKLQAACYRDIRILFGLSAQAACLVVRKVADAYAISKDLRTFRPTGAITYDLRVLSWNISESTVSIWALPERLSISFVCADWQREVLSLPRGQSDLVYRNGKFYLHTTVEVEEPKAEVPSDLIGVDLGVSNIAFDSDGNNYSGAHLNRARHRHHALRRKLQTKGTKSAKRLLKKRRRKERRFATNLNHIISKSVVTLAQRTGRGIVLEELDGIRDRIRAKRDQRYRLHSWAFSQLADFIVYKATRSGVFGVFVNPKHTSQQCSQCGHIEKANRKTQSLFVCRRCGHTEHADQNGAKIIRSRGLDVLARLPVMQPNAGVISYAN

SEQ ID NO: 12517 - protein, 386 aa, unknown
  TnpB Polypeptide
MYKAIRIELKLTKEQKIQVCKTIGTERFIYNEYIKYNQEQYELGNKFVSAFEFSKYINNVYLPSNPDKKWIKDVCSKSVSQAMIYGEKAFKNFFKGLSGFPVFKKKGKNEIGAYFVKNNKTDFEFYRHKIKIPTLKFVRVKEYGYIPKNANIKSGTISKIADRYFLSLVMEVDDIVKSENTSTKGLGIDLGIKDTAICSDGRVFKNINKTKKVKKIKKKLKREQRKMARSIEYSKSNKIKLKECKNFNKKKLKVQRLFYRLNCIRDDYNNKMVDEITRTKLKYITIEDLKVSNMMKNRHLSKAIQEQNFFSIKTKLINKCKERNIELRIVDTFYPSSKTCSCCGKIKKDLKLNDRIYKCCNCGLEIDRDYNASINLEKAKIYKVIA

SEQ ID NO: 12518 - protein, 391 aa, Mobiluncus sp.
MLKGKRIRLYPTEEQAQTFFRYAGAARFAYNECVAYCKAQYQAGRTDLVKQPELRQHLRDLRDNTPSYEWLREIPVSVVSRATKTFDRARAKAFKKQAGFPRLHKKQLSKASFYQRTDRIYTTKHGVKITGVKEPVYVKFRKIPDHILNPHIVWDGKYWYLSYTYETGTEPAKPRKHGDTLGIDLGIKNFAVVSDGTVFSNINYSKEVKKLEKRKRHLQRRLSKKLESNKQGTKFVRTSNSNKLQRKVALIDRKLTNIRSTYINEVIKDILSARPKRIVIEDLNVRGMLRNKYLAKSIASQKFAEFTTKLAQKCEETGIELVKANRWYPSSKTCSGCGFKKQDLSLAERIYTCEHCGLVIDRDLNAALNLANYPSVAGKLSPGRIKPTLVA

SEQ ID NO: 12519 - protein, 100 aa, unknown
  TnpB Polypeptide
MEKRSLIIRIMYYRVKRCIKRCRNVVYFLNIPILLIKEWLKIKVSCFCCGNIKEDLQLSDRIYECACGNRMDRDQNAAINICREGIRISGMMPDIEKKIS

SEQ ID NO: 12520 - protein, 378 aa, unknown
  TnpB Polypeptide
MLRGIKIRLYPNKTQEQVLNKVLGCYRFVYNHMLALKQKEYNDNKKSLGLAELSKYFHGTLLKNEQYTWLKEQNTKVMNQSIRQMLTAYDNFFKQHNGFPKFKSKKDKQSALFPIDAISKRNHFNDRKITLTQPLKDIKFRCSDLYFKRLQTYKDGIRSATLSKTKSGNYFLSILVELPQEEVIKFRVTNKHVGIDLGVKDFVITSDGEVFENRHFFKKQESKLLRLQIQLSKKQKGSNNRNKQRVRIAKVFERLTNQKIAYIHSVVNELLTYYDTVFMEDLNVKGMLKNHHLAKAIQEIGFYKFKSVLQRKALANGKQVVIIDRFYPSSKTCSNCSYKNQGLKLSDRFWTCPVCREYHDRDLNAAVNILQEGERLIS

SEQ ID NO: 12521 - protein, 403 aa, Planktothrix sp.
MLVLEFKAKGKTTQYAAIDDAIRTAQFVRNKCIRFWMDNRGVGQKELYRHNTVLRAEFPFVKALNSHACQVAVERAYTSIARFYSNCKKSVPGKKGYPQFKKNCRSVEYKVSGWKLSETRKQITFTDSKGIGKLKLKGTWDLNFYQIDQIKRVRIVRRADGYYVQFLVNADRKVESKPTGKTIGLDVGLKEFYTDSNGQTEPNPRFYRIGEKRLKFRQRRVSRKSKGSANRKKAVNRLGRVHLKISRQREEHAKRLARCVIQSNDLIAYEDLRIKNLVKNHCLAKSINDAGWYLFRKWLEYFGIKFGKITVSVNPAYTSQECSNCGAIVKKSLSTRTHRCQCGFEVDRDWNAAINILNLALGTTGHVGTWILDPNASGDSTSTQAGVILSEQVGSVNEESSCL

SEQ ID NO: 12522 - protein, 377 aa, unknown
  TnpB Polypeptide
VTIILRAYKFRIYPNEIQKEQLAKTFGCARFVYNYYLNKKIKLYKDKQESLSKIDCNNHLNRELKKELIWLKEVDKFALTNSIYNLDASYQNFYRRVKQANNKAGFPKFKSRHSNRFSYTTNFTNNNIEVNFAENKIKLPKLKWIEAKVHRVIDGKIKTATVSQNPSGRYFVSILVDTAETKKLPKTDKNIGFDLGISDFLIDSNGNKVTNPKNLCKYERKLSKLQIQLSKKQKGSKNRNKMRIKVAKLHEKILDTRKDFLHKLSSQIISENQVIVSEDLNVSGMVKNHKLAKAISDVSWAEFTRQLEYKANWYGRTYIKVGRFFPSSQLCSACGFKNSETKRLSVRDWTCGNCGSHHNRDTNAGKTILQEGLRLLA

SEQ ID NO: 12523 - protein, 387 aa, unknown
  TnpB Polypeptide
MTRRANAIRATVSMNIAISETLLVFSKNYLEALRYVLYWLKEKRINPNKNNVISIVHKKLYSILKSYNLPSKIAQDCYRNAISIYKGWYNNPKKGRFPIVFKPTVWLSPKLSYTVDFERMIVRISKLGEFKIIGYPKNLKEYLSWKMKEARQVIRNGKAFIKITFEKIIQKIEPKDSIAVDINMQNITVGKDENNYVRINTRINEIHRYKLLAENLQIKYPNKWKENRNIKRRILSFHSKAKRIAEDFARKVSKRIVNEAIKMDANVIKLENLKYMIKKVKKLPKKFRNKLYLMQYRKIQYWIDWQSKKHGLLINYVHAAYSSIKCPKCNKNMNEISYRCFKCNCGYENDRDVIAIINLNGRGSLSLSTAPHMRYVATNQLRGTLVL

SEQ ID NO: 12524 - protein, 483 aa, unknown
  TnpB Polypeptide
MSSFGQLLGHEEREPITPAIPEEGIYEVEFKNKRTNVVRLLPNVFQGRKLRRLANISAKLFNELNYERRQQFFQPQRVDFKGTWDKYYEKYKNILGVNAQAVIQKNNEAWNSFFSLLKLKKENKLPPFMKHVSPPRYWKDREAKKRKLILVVRQDIYEVDEQNNKFILKDFDLEIEFVDRLRWYGKQGRLEISYDETRNAWYASIPVEVGVEESKTGKKSKWIVRGERKSIQIASPKGNKVASIDLGINVLASVVLNDGTWLLYKGVRAKEDYFYLQKKIAEVQSLADKARNIGEYEAQEELNREKRRLFKKLTRRLLHLYRNFASHLFKELHELGTSTIYLGYPFNIAQDKGNKFTVNMWSYRKLVNVIELKAQEYGMKVYEVVEYNTSKYCAYHDVEVNRKPRGVVSCPKGHKLHSDLNGVLNILKKAIGTVVSTVRKPLSFIVDHNRVAPVKGCNPRDLREPSPFRAGRRSEINLITLLT

SEQ ID NO: 12525 - protein, 387 aa, unknown
  TnpB Polypeptide
MTRRNNAIRATVSMNIALTSSLLVFSKNYLEALRYVLYWLREKRINPNKNNVISVVHKKLYNILKSFNLPSKIAQDCYRNALSIYKGWYNNPNKGRFPIVFKPTVWLTPKFSYTVDFERMIIRISKVGEFKITGYPRNLKEYLSWKMKEARQVIRNGKAFIKITFEKFIQKIDPKDSIAVDINMKTIVVGKDENNFVKINTRINEIYHYKSLAENLQIKYPKIWKENRNIKQRIIAFHSKAKRIAEDFARKVSKRIIDEAIKMDANVIKLENLKYMIKKVKKLHKKFRNKLYLMQYRKIQYWIDWLSKKNGLLINYVYAAYSSIKCPKCNNKMNEISYRWFKCNCGYENDRDIIAIENLNGRGSLSLSTAPHMRDVATNQLRGTLVL

SEQ ID NO: 12526 - protein, 222 aa, Streptomyces sp.
VLDVKLRYNFRVYSSASQRGSLARAFGCARVVWNDALRLRRDAYANGLPLPKAAELSKQVITEAKKAPERAWLGEVFAVVLQQSLRDLETAYSNFFASKNGRRKGPKIGPPRMKKKTARQSIRFTANARWSITKGGKLRLPKIGDIEVRWSRELPAGASTVTIIKDPSGRYFAKPLPELDGDETDSGIDLGLSSYAVLRGRKIASPKFFRRQKRKLKRASAS

SEQ ID NO: 12527 - protein, 437 aa, Cyanobacteria sp.
MLSEIFFHKPSGIYAIFSVTENNNSNNKGVIKVLKAVKVRLYPTPEQELILFRSFGCARWYWNFALNTCIQHYQETGKSLKLAAYKGMLPTLKKEHPWLKEDCYSAVLQCVAINLNKAYTNFFAGRAKHPRFKSKNGKQSIQYPQNVTVKGDLLFVPKIGEIKAVFHREIVGTIKTVTISKTPAEKYFASILCETEDSSQDNPGGKTLGIDLGLKDFAIVHDGEEVTKYSNPRHLKRHEKNLVRKQQKLAGKTKGSKTRQKFRLLVAKVHEQVSNSRQDFWHKLSRKLVDESQVIVVENLNVKGLVRNRKLSKAISDVGWGMFVNFLAYKLERKEGKLVEIDRFFPSSKKCSCCGHVMNELPLDIREWDCPSCRTHHDRDGNAALNIRTEGIRVMTMGGGNPVPASGACVRPNTYKGKGQRAMKLEAHTEPARVGVR

SEQ ID NO: 12528 - protein, 391 aa, Deinococcus sp.
MENNTTIKTHKYRLYPTKPQEAAMFETLRLTRTLYNAALEQRISAYKKQGKTVTGYDQQKELTALKEACPEFAGVYSHVLQEPLERLDKTYKSFFARVKRGEKAGFPRFKPAGRWNSFKFKEVWDKKKGRWLSPGRPTDDGKRINIPKIGSVKIKFHRPLEGTPKTLQIVLDVNEWYAVYTCEVAKNPLPATGSSVGVDVGTTWFAITSDGEFVENPRHLKNGLRKLRVQQRTVTRRKKGSNRRRKAVKLVAKTHQKIRRQRLDFHHKTARKMVNEHDVIAHEDLKVSNMVQSNLARSISDAGWSQFFTLLAMKAESAARRVVPVAPNYTSQRCHQCGHACRENRLSQARFKCVSCGHEANADHNAALNILDKAGARPSGVNGSGVSHAVV

SEQ ID NO: 12529 - protein, 403 aa, unknown
  TnpB Polypeptide
MRNTKHKLFRDETLRHLHDDLNIIGVVRNHFIALSMRYYRRYGKGLSYKKLSKHLTKLKKLEKYEHWNIPYSWALQNMLKRLAQSFREMKTLGRGHPQFRSVKKHKGMTFDGIQAPLKKVLDKQKYERNHPTYRIRLNGRWYRFALHRAIEGEIRRVQVTRDALGDMYITLTEDFTEVRYEPKTGKAEGFDFGIKDFLTGSDGERRKSPMFYKQNSEKLVKAQQEHSRKVKGSNNRERERKNVVRIHKKTANQRTDHHWKLAIELCRKFDILFFEDLNLEGMKRLSGKQVSDLALGEFMRKLKHQSHKRIRSVLKIGRWTPSTKCCSVCNHKNEDLTLEDRHWTCPKCHTHLDRDQNAAMNILKEGVASFALGVVSPIVLFNKIVGISVEASSPLLKTTNASV

SEQ ID NO: 12530 - protein, 380 aa, unknown
  TnpB Polypeptide
MKVVRGYKTELDPTPEQCVLLCQCAGISRYAYNYGLARKQEAYKSGEKTPYSQHLQKELTARKHDDLDWLSHVSKWIVQNSLRDLDTAFENFYRKCTLKKEGKWRGKCGYPKFKSKHKGRGSFRLDCPVRAFDGAMQLPKLGTIRLKEQEYVPTWGVKVLSATVSEKAGCWFVSVQVQEEHTDPIPATGPTIGVDVGIKTLATLSTGETFAHPKALRSRLKALKRASRKHSKKQKGSNSRKKAQRKLAKLHLRIANIRKDTLHKTTSAIVAKTKSSAERPSVIVLEDLNIQGMLKNRKLSRAISDVGLYEFKRQLMYKSAQAGIEVKQVSRWYPSSKTCSSCGNIKDELDLEERVYVCLDCGYVADRDYNAAKVLAVSAS

SEQ ID NO: 12531 - protein, 392 aa, unknown
  TnpB Polypeptide
MCHSKAYKYRFLPTPEQAHNLACTFGCCRFVYNWALKLRTTSYCQHGIRLSHNDLSAALTSLKKEEATAWLAEVSSVPLQQSLRHLDKAMVNFFEGRAKYPKYHTKHKKQSATYAATAFGWNGSTLILAKQKEPLDIMWSRPLPEGCKPSSVTVSKDASGRYFVSILVEETIATLPMTDKAIGIDLGLKSFLITSEGETIDNPKYYAKAEKKLAKLERKKAKKKKGSKNRTKARIKVARLHAKIADMRRDFQHQLSTRLIRENQTICLESLAVKNMLHNHCLAKAIQDVGWSEFVRQLEYKAAWYGRQVVKIDRWTPSSKTCHCCGCVKENLTLSDRVFVCEDCGNVTDRDYNAACNILSEGLSAVNDCGGVVRRGRRKSGHADAVEPVSPS

SEQ ID NO: 12532 - protein, 399 aa, unknown
  TnpB Polypeptide
MKLIHRTYKFELLPNKEQKTLLDKHFGCVRYIYNHFLNERKEQYQADKKTDNYYGQAKTLTELKKKEDTIWLKEVNSQTLQFALRSLDTAYVNFFRGNAQFPQFKSKRKKNVFTIPQFTKVLDGRIYAPKFKGGIKVNIHREIKGKVGKFTISKTPTGKYFVSILTEQEYIPSKKTGKSVGIDLGLKDFAITSDNIKYKNNRYTKNYERQLKKAQQHLSRKQKGSNEFEKQKLKVAKIHEKISNTRQDILHKVSKEIVSNYDIICLEDLNVKGMIKNHKLSKHIADASWGTFVRFVEYKANWNDKTVVKINRWYPSSKTCNVCGYINQDLNLSIRNWTCPKCSTELDRDENASINILKEGLKIHRQELSITKVEEKLDISNSAYPVKPEAHHIGSAVCG

SEQ ID NO: 12533 - protein, 365 aa, Dethiosulfovibrio sp.
MLRAYKYRIYPNMEQKSYFAKCFGCVRFIYNRMLSDKIEHYKTTGKMLYNTPAKYKKEFEWLREVDSLALANAQLNLQKAYLNFFKKPSVGFPKFKSKKSHVDTYTTNNQKGTVAIEDGRIKLPKLKSRVKIKQHRTFEGKIKSCTISHVPSGKYFVSILVDTEVEKLPASTNKVGVDVGIKNFAICSNGETYENPRWLKRSEKRLVKLQKDLSRKVKGSKNRQKARLKVAKLHGKIADQRRDFLHKVSTEIIRENQAIVIEDLRVKNMLKNHCLAKAISEVSWSMFRSMLEYKALWYGRDLIIAGANYASSQLCSECGYKNPLVKDLALREWVCPSCGTHHDRDVNAAQNLLKLALPTEISTAV

SEQ ID NO: 12534 - protein, 409 aa, unknown
  TnpB Polypeptide
LRINIGDRQYIYAKVIRTVSRKNDKWIDFMLMLLKAKESGSWFPYSVRLKLKNSKFYAFISVEEKLPPVTIKKDNGIIGIDINAYPFHLALATASKDGNLENYQAISLHELLDVSSEKRQYLEWQIAHQIIEIAKKENKAIAIENLDKIPKGKRGDGFAKLRQKLQKWIYKRLLNKIEITARRNGIEIRKVNPAYTSVIGKLKYAPQFNIDKDIAAAFVIARRGLGYKEKLPKNYKELLNDKDFLLFSEASIDGKIAKLKKEIKEEKNQYKRNKLKSKLVKLKKDLKTLQKHLSFIIESEKSKSVSQQPVNQRKEQVRGLPVGRYKNWQVLFTALAFPCLESYRDFSPLKRVMISRDWARMVNRLVPVLGAGTMILPKYRLLGLEVSEMAEYKYPNSSCTEQYSFVQFG

SEQ ID NO: 12535 - protein, 385 aa, Streptomyces sp.
MRLVVQVKLLPTPEQAQALDATLHACNRAANYVSRIAFESGVRDRNGLQKAVYADVKAAFDLSAQPAVGVVRKVVDAYTTLAAQLKAGLLDGKGPKRHRKATGSPVSFRPEAAQPFDDRCLSWQTDAHTVSIWTVNGRLRGMRYTGEPGQMKLLSEHRKGESDLIRKKGKWYLLATCEVPDPEITEPTDWIGVDRGIVNLATTSDSVNYQGHRLRRYRRWQAHKRAELQRKGTRSATRRLARRAQKEQRHATHVNHKISKEIVSVAQRTGRGIGVEQLDGILDRVRLRRDQRNTLSSWPFHQLGQHLAYKARRAGVPFLEVDAAHTSQRCPRCGHIEKANRPSRDRFCCRRCGLAGPADVVAGVNVRNRARSAWVFVTAPVSAPT

SEQ ID NO: 12536 - protein, 611 aa, unknown
  TnpB Polypeptide
VRSTSSCPSCTSVPCGECSRTFATTPRLHTTASPACSAAPYRRSQQWAVSAQQCVRASPTSLAAPSTRASRSHNVARIRRRRKRRPKPLQPARARRRSRQHRPKLRCKKSSDAPTSPTRSDATRSPILPSRPRSRLKAPPPASTPRSRQALRNSWAARAQRERVSVVLEAVKVALDPSPVQERLLLSHAGAARFAFNAGLAHVKDALDAGAKPEWSFYSLVRWWNANKDALAVSDDGVPWWAENSKEAANTGLRSLASALSNWVKSRKGERKGRRMGFPRFKAKDRATPRFAYTTGRFGLIDGDPKALKLPRIGRVHCMEDVAERVDGARVLRMTVSRRAGRWYASLTVEREDREAQRTPKGGAVGIDLGIKTLATLSDGTVIDNPRCLAASERRLKKAQKALSRKAMGSKRRAKARAKVARLHARVANQRGDAIHKATTWLTQTYSEICIEDLNAAGMVKNRRLAKAIMDAAFGEFRRQLEYKTARSGAALHVVDRWYPSSKTCSKCGRVKAKLSLSERVFHCDACGLSMDRDLNAAINIKVAGSAPETINAHRGTVSRGGQHGCATQVPVKCEPSVGGNVVSDLERVPARTPCKLQQSSLQRAKKGEAK

SEQ ID NO: 12537 - protein, 432 aa, unknown
  TnpB Polypeptide
MSSYKAVKVALDPSPAQERLMLSHAGAARFAFNAGLAHVKAGIEAGAKPEWSFYSLVRWWNANKDALAVDADGAPWWRENSKEAANTGLDALAKGLSNWAKSRKGARKGRKVGFPKFKSKDRATPRFAYTTGAFGLIEGDPKALRLPKIGRVHCMEDVAERVGDARVLRMTVSKRAGRWYAALTVERDDKPVTKPPKGGAVGIDLGIKTLATLSDGTVIDNPRCLAASERRLKKAQKALSRKAMGSKRRAKARAKVARIHARVANQRLDAMHKLTTWLASTFSHISVEDLNAAGMARNHRLAKAVSDASFGEFRRQLEYKTAKTGARLHVIDRWYPSSKTCSKCGAVKAKLSLSERVFHCDACGLSIDRDLNAAVNILVAGSAPETINARGGDTSRADTPSGNANPNETRTKQPPTSGMRLGAGLGNETMRF

SEQ ID NO: 12538 - protein, 360 aa, unknown
  TnpB Polypeptide
MEGKTNKQGIRWTGGGLTWGKLHIPGMIDPDNEVMQHGLTSPIKYMRLLWRELNGFRRWYAQLVCEGLPYAKPKNYVSEGTVGLDLNVSNVAFVADEQAGLLPFDEGVSTFEREISALQRQMERSKRANNPDNFEPDFTARRGRKTVKKKGKSKTGKRQWKQSNRYRKLARKKRELERRKVAYAKSQNRKLVNEILRHGNHIKTERVSVKGWQKQYGKAIAAKSPGFFQAELVRKAANAGGSVTQFSTQSTALSQTHLTGERIKKSLSERVHHDQTGIVMHRDLFSAYLARYVVQDKLSLQDAVDQYPGMESTLLGAWEHFQSAKRVGVAESPKSEPPAEQIPGNSEKASQISHSGLKAC

SEQ ID NO: 12539 - protein, 434 aa, unknown
  TnpB Polypeptide
MASFPLYAILQDNVCLTLKPIWEQVLEVPLFVIVEYRVPSSEMISPDKSPICSLSTHEPKSLKILEVDSTSKGKDCVPYWTDFLKGISSQLLLPAKTDCADLDSSLYSIWSSKTVATSWFSTRLYTVLNQSLPKIYSPLSMSSLVGCMDSESTARKSKKIRIYLSPDQRNLVNRWMGVSRFVFNKTVEYLQQPDTKPNWKAIKKGRLDALPEWCKEVPYQIKSIAIKDACTAVRESHKKYKLTGKIQKVKFRSRKNKIQSCYIPKSAVTEQGIYYTILGKIRYTEQLPDNIGDCRLVFHHGQHYICVPHDVPRQASENQGRVVALDPGVRSFLTLFTEDSFGWIGTGDIGRIQRLCYYLDDLISRLTRAKAKQRRRLKKAADRKEKRIRHLIDEMHHKVARFLVDNLVVMDFGWTGTSMALVGFSCGLWEISPL

SEQ ID NO: 12540 - protein, 408 aa, unknown
  TnpB Polypeptide
MKITRSTRCSLKFATAKKQAELKTALSEYGRVVNIFIGHFWKNGSPDKSQLLKPIVDLPQNTWLSARLRKVAAREAIDLVSSAKEAAESNKQQLLLAIKAIESQLKKLKPDGKRNRRKINRLHCLLKSKRMRHNAMKPVMPRHAGKSMTVSCTIAELQEAKEANGFDAWLHLASIGNKISLDLPIKYHKHFTSLAGKGKRLNAYIIHNNTVQFAFEVETGPKKPVETLIGVDTGINSLATLSTGKHCGTDIKTNIERIKRCQYGSNGHKKAIRALKQRIDEVAKEVVQKADLIVVENLKNITFNLKLKGRLSKNIRSAIGIWGVRYWLMRLQQNCEISRALFRSVLAYYTSIMCSVCGHTDRKSRLSQELFQCSACGHAENADSNAAKNILNRFITGPYGACYKAKVA

SEQ ID NO: 12541 - protein, 409 aa, unknown
  TnpB Polypeptide
VKKEVRITVVGKVFRPNRRKVLALNKCLEEYFKLVKWYLGFNSTSKVFLHRNGYEKAKRQFNLNTALIQTARDKAVEILKSFNVKKREGKVKSEKPKLKRISIRFDKRCYSFAKTTNVLTPYWLTLSLNRGTRVSLPIVFGKRQQNFIEEALQGKWRFCTVEMVKRNGEWYAHFVLKKEIELINEPETFIGVDIGEWNVAVAVAISKHNPSKPMKGQFWNGAKIRYVRGKYAHIRRNLQRKKRIDLVKRIGSKEGRIVNQILHTIAKEVVEYAKQFPKPVIVMERLKNIREDMNGSTKLNRRLHSWAFRRLQTYIEYKAILEGIPVVYINPKNSSKTCHRCGHVVRKVEGREFRCPKCGLVYNRDLNSAINLARRIMSPSGWGCREPALNSHMKPSAVKGGWNGRSSAL

SEQ ID NO: 12542 - protein, 388 aa, Nocardiopsis sp.
MKLVVRVKLLPSPEQARALQATLRTCNEAADHASQVAQATGATNKYALQRAVYHELKARFGLSAQPTVRVLGKVCDAYTTRQANLKAGNLGRKGSPRRQRVESTPISFRPDAAQPFDDRCLSWQMDARTVSIWTVAGRMKNLGFVTSPEQLKLLTEYRQGESDLIYRDGQWFLAATCEVPEQEENPEPVGFMGVDLGIVEIATTSAGDRFSGRVLNRYRRKQNRLRAKLQRKNTKSAKRVLKRLRRREARRAREVNHQISKSIVERAERTDHGIVLEDLKGIRGRVRQAKRQRSALHSWSFAQLRDFIGYKARRVGVPVLVVDPAYTSQTCSECDHTSRRNRPTRNRFVCRQCGVVLHADVNASRNLAHRGQAVWTAGRTSTAPTPSR

SEQ ID NO: 12543 - protein, 402 aa, Nitrososphaeria sp.
MAAVKCIQIPIVPLVGRKERTLSELLKAYSDIVQQSIDYTIEMGITSRKRLHEALYEKLRAKYPNLASHYIYTSFTMALGICKSFKKRKKLGLTKRDKPEVSNLNSLMLDDYHLFKIEGKVLRLNIGNGHLYLPLKPTRFQERFLEEIRQGAMLVKRGDRWFLNATIKRDVQPYEPIGIIAYDINEKSVDALLVKEEKTEWIHIDISEAKHIQKRYQEIRERKRRYIKGKARRKANNILHVATKFLVEKALEEKVVIVTEDIKGINKGINRKGKGVRRRLNLWSHGKISFQMNYKADWLGVPRLKDVDAKNNSKTCPVCGDARARKGWVFKCKKCGYETSSHQIACINILKKALPQMSRVGIPFSAKALVGLSPKWLVATVKGTKPVREGLHRQKTINIYGG

SEQ ID NO: 12544 - protein, 114 aa, Vibrio sp.
LLVAKCHEKVANARADFQHKLSRTLVDENQAVIIETLKSTNMMKSRKLAKHIADASWHSFVFKLEYKLKEQGKYLVKLNQWDASSKRAVVAVIKWKKCPYRFASGIVHQAALQT

SEQ ID NO: 12545 - protein, 133 aa, unknown
  TnpB Polypeptide
VLHDKITNQRNDFQNKLSFKIVSENQAIALEILNVKGMVKNHHLAQAISDSAWSSFVTKLEYKAEWYGKTILRIGQFEPSSKLCNVCGYHNNELQLKDREWTCPDCKTVLDRDINAAINIKKFALIDQNLIGL

SEQ ID NO: 12546 - protein, 291 aa, unknown
  TnpB Polypeptide
MKIDYNAKAIRITLKPWEYLTVSWKGAWFDRRVRGWTVGEVVIKDDRVIIPFKNSKVVKVKRIIGWDSNELSLDGYEPGTGFIHIDLRPLQSIKIVYEKKKAIAQSKGKRELYEKYKAREKNRVKDFINKLSAGLVRLLPNSIHVFEALDKENLTSKERVSKGRRKRNARTPWRKIHKRVSEVALTGSASPKYTSRECPKCGFRVKTQVGHTFECPRCGLKMNRHNVAAMNIRRRYLKGKPRMWGFPRSKDPEETMKVELRAGVTLNGRSPMIWAPMKWGSEGNEAKGRGA

SEQ ID NO: 12547 - protein, 401 aa, Acidimicrobiaceae sp.
MAQEESRCRTFRYRLHPTRLQSQALLDQLRHQCELYNAALEERIGAWNWERRSVSYFDQCRTLTGLMDYRPEVVASGITLCRGTLKRLDRAYSAFFRRVKDGKTPEFPRFKPAGRFDSLQWEDSSGWKLKTQHRRLYLKGIGEIKANYHRPLKGQPMAVTVKREGTKWWLCVRCVNVPAMPLTRTYSEIGIDLGVVNQIATSDGELMKGKHFGATAQKKLAQAQRSLATMQRGSKRRRRQVDDVVRLHCKVKNQRLNAAHQLSRQLVNDYDFIAIEDLKITNMVHAPKGKPNPERPGAYLPNGARRKAGVNRSIHDAGWGQLVSLLTYKAESAGRSVVSVNPRHTSQTCAECLYVDAGNRANQKDFRCRNCGHRDFADINAARNILRAGRALQASTCNGSN

SEQ ID NO: 12548 - protein, 230 aa, Microcystis sp.
MFVLRYKLRGKSSQYQAIDEAIRTVQFVRNKCLRYWAENKSVVQKDIYRYTTQLRDEYSFVKELKSTAYQQACERTWTAILRFYSNCKKKIAGTKWYPKYSKRTHSVEFKKSGCKLNRNSKRITFTDGKNIGELKLIGSRDLFYFQEWQIQRVRIVKRADGYYCQLMLKLDIRDITPQSESTGHCLGLDLGLKGSSIWRFLSIVFDLERTNQLNLLPDKDLVDLCHPIEP

SEQ ID NO: 12549 - protein, 772 aa, unknown
  TnpB Polypeptide
MVRTGAEIVIECLKEQGVDVVFGYPGGSILNVYDALYKHSDEIFHVLTSHEQGAAHAADGYARATGKVGVCMATSGPGATNLVTGIATAYMDSVPMVAITCNVTLPLLGKDSFQEVDIAGVTMPITKHGYIVKDVNILADTLRKAFHIAKSGRPGPVLVDITKDVTAASCEYTPKKPESVERAGHYTQEDLDAALEVISKAKKPYIYLGGGAILSGASEEVRAFAKKLDSPVCDTLMGKGAYDGYDPLYTGMIGMHGTKTSNLGVSECDLLVALGARFSDRVIGNASLFAKNAKILHIDIDAAEINKNIHADVSIVGDLKDVLTKLIARMEQMHHPEWTAHILELKEKYHLQSIFALSRAEDIWSAIETILYSSGRKLHFKKRGDLPEIRAKQSTRGLVIDSSQSGLIVKYGKVTIPCKYKAKDLWLWDEEKAILAYLAEPELQDAHAVDQMSKGIITDTYRPCFASLVCKKIRGRLRVYVHITVEGKAISKRRKDNTPRHYYGKGNVGCDIGTQTIAYTSNTEVGLENLAERGNSIQHVERQEALILRAMERSRRAMNPNHYNENGTVKKGHKQWNFSKRYQKLKQRHQELCRIAAENRALAIREQVNHLRSLGDCFITEPPNAKKLQKRANPENPVDTNGQMKRKKRFGRSIKNRCPGYLQAKAKQLFESTGGTYVEVPILYRASQYDHTSDSYIPKKLSQRMYHLTDGTKVQRDWYSSYLLYCINKTYTQINKLKCRSNFATMYQKEKNMIEEIIRSGKKIMNSGIRTV

SEQ ID NO: 12550 - protein, 433 aa, unknown
  TnpB Polypeptide
MPKFYQDNIKIQFRDTHVKFEGFSSSRKANKQKLNWVKLAEHGRIPTDAKYRNPRVSFDGLNWWISVCVEFPDCRDRSNHDGIGIDLGIKDLAICSDGNTYKNINKSQTVKKLEKCKRRLQRSVSRKYEHNKKGGSYCKTNNIVKKEKLLLKVNHRLANIRKDYLNQTTSEIVNRKPRFICIEDLNVSGMMKNRHLSKAVQKQGFFEFRKQLEYKCNNNGIQLIVADRFYPSSKLCSCCGKIKKDLRLSDRTYKCECGNVIDRDFHATKPNQKWLTDITEFSIKAGKIYLSPIIDCLDGMPVSWTIGTSPNAELANTMLRNAIATLKPNEKPIVHSDRGCHYRWPEWIQIMEEANLTRSMSKKGCSPDNSACEGFFGHLKTEMFYGHDWDEYSIEEFIQEINSYMGWYCKDRIKSTLGGLSPLDYRRSIGIAV

SEQ ID NO: 12551 - protein, 334 aa, Tolypothrix sp.
MWGKHLSCAKLQSHVAKLRFRNPFWQSVGSQAVQDICQRIEKAYQLFFKHNQKGVRPPGFKKVKKYKSFTLKQAGYKFLSGNRVKIGKRVYQFWKSREIEGTVKTLTIKRTSLGELFIVVVVDFPVEPQIKFTTGKIAGFDFGLKTFLSCSDGSSIESPQFLKRSLNVIKKASKRHSKKLKGSSNRERARKNLVRKYEDITNSRRDWFWKLAHDLTSRFDVLCFETLNLKGMQRLWGRKISDLAFGEFLQILEWVAKNKGKQVVFIDRWYPSSKTCSHCGHILENLDLSIREWRCPSCQSVNGRDKNAARNICTVGASTVGLDDVRRAMPAIVV

SEQ ID NO: 12552 - protein, 332 aa, Blautia sp.
VRKINRAVKIRIYPNAEQRVQIEKTIGCSRFIYNCMLADKMEHYKKEKKMLRNTPASYKKEYPWLKEVDSLALANVQMHLESAFHKFFREPFAGFPRFKSKKSSRKSYTTNVVNGNIFLEGKYFASLLFCCENQTAEKRPAEKFIGIDFAMQGMCVFSTGKRAEYPMFYRNTEKKLAREQRKLSRCQKGSQNYKKQKKRVALCHEKIRNQRKDFQHKLSASLAESFDAVCVEDLNLKGMAGGLHLGKGVHDNGYGLFLSMLEYKLEERGKYLIKVDRYFASSKICSVCRKKKEELSLSDRIYYCECGNRMDRDVNAAVNIMNEGKRIFAECA

SEQ ID NO: 12553 - protein, 386 aa, unknown
  TnpB Polypeptide
MRKFRLSPSLEVASQLRQWFGSVRVTYNWALSCIKAKPKEFPVNKIWLRKRFVNSCNIPKQKGYLLQVPKHVRDGAIEDLVLAYTTNFAKRRNNPDHKFDIRYRSKKESQSIVIPFDAIKSIDSDDGLKMYPTYLKNRIKFHTRQFRTLPCYDCRLVLDKLGRFTLHVPSVAACENQAGTLDAKTEWCSLDPGIRTMFTVYSPTPGIAYKLADRDISRIYRLCKHLDDLCSLATKRKRCNRSLIRQRERIRHLVDEVHWKIIHFLTTSFSNIILPSFEVSGMVNKCERVLTIKSVRQMLSWRFYEFKTRLIERCKRLPDVNVYIRGEEYTSKTCTNCQTIKEDLKGAKTYKCTHCGLVADRDACGARNIFLKSAVCSADSIATLRP

SEQ ID NO: 12554 - protein, 159 aa, Okeania sp.
MVKNHKLARAISDANWSELVRQLEYKADWYGRELIKIDRYFPSSKRCSSCGHILEKLLLNIREWDCPECSAHHDRDINASINILRMGTRVGVSVSAAPLEEAAPLEEARRKGTPTKKAAGLAVSVCGATLRPEGSQSRKAGAKKQKVPNSDARESRAVS

SEQ ID NO: 12555 - protein, 310 aa, Ruminococcus sp.
LKKEKDFLKEVDSISLQQALRHLDTAFQNFFKNKKTGFPKFKSKKNNNNSYTTVCVNNNIKLENGTVSLPKIGKVKVRQHRNIPENYILKSVTVSQTASGKYYVSILFEYENQVQKTEPENFLGLDFSMHELYVASDGTSANYPRFYRQAFKKFEREQRKLSKMQKGSNNRNKQRIKVARIHEKVANQRKDFLHKQSRQITNAYDCVCIEDLNMKAMSQAMSFGKSVADNGWGMFTTFLQYKLEEVGKQLVRIDKFFVSSQLCSVCGYQNSETKDLSVREWICPCCQTHHNRDINAAVNIRNEGMQIALA

SEQ ID NO: 12556 - protein, 445 aa, unknown
  TnpB Polypeptide
VSIRHNTIFTFYVNIYIVHSANIYNYKNIYNQTFVFVENYIHICNMKVINKTYRFRIYPDNNQIELLAKHFGCTRFVYNYFLHQRQEQYRETGSSDNYYSQSKSLTELKKKEDYSWLKEVNSQTLQFALRNLETAYTNFFQKRAKFPRFHTKRGKNSFIVPQYATIEDGRLWLPKFKSGIPIRLHREIKGEIGKVSITKTPTGKYFVSVFTTEEYQESASTGKSIGVDMGLKSLLVTSNGESFKNNKYIKKYERKLAVAQKHLSRKNKGSSGYEKQRLKVAKIHEKIANCRKDYLHKCSYTLVSNYDIICIEDLNVKGMIKNHSLAKSITDVSWGTFVSFLTYKAEWNGKQVVKIDRFFPSSQICNVCGHRNNDTKNLNIREWECPSCGTYHDRDVNAAINILKIGLKNTSAGTVDYTGGEDRRPNLLKGHSSVKPGTHKPLACG

SEQ ID NO: 12557 - protein, 378 aa, Deinococcus sp.
LACTTPVRDVTPVSHLQSPLTTQGNHTMLLSTDQHHVKVHRKSYSSINALIGKGFFVPVAKDDTIKGICPTATYRLQDKADIALLNDRTLTINGAPVNGCYAHVPSPAHNALVAGSPTYTAYPGLDQLLTSARTPTTYPDYLTALINEIVKEGAQPTRAAPMTTPSQQFRAQWLPDQTLLHLTAGGDYYCTLSFDVRFTRVSRVATPCAVGLDVGLSPIAALHYDDGRPQVFAATPLVRPDMQTLSCKGQALLDDITYASGRQDAEQVVRHLVYSASEVFAEHLRLGDMHRRYVFTSRDRALQDFHQSWLPQYLWAAKIPFFRVASGYTSTECPKCRHTSPNNRCRDHFRCQQCGFGGDAHLVAASNILRRGRRGKRR

SEQ ID NO: 12558 - protein, 398 aa, Cyanothece sp.
MLNLTYNYKLQPTKKQIEIIEHNLDVCRSVWNYGLYERKLWYNSRSCEINKCSLHSEYIVEPFEYPNYHHQSKQLTLAKKTNAFLKSGNAQAMQQTLRKLDRAFNDMKSKGMGFPRYKKKMKSFNLISNKIELNGSYLKLPLLKTIKLKKSRDISKGFKIKQAQIIKKASGYYVNLMIELDVDVPSPMPHGHAVGLDVGIQSMIATSDGLTIPRPLFLDKALRKIELLQRKLRNKIKGSNKWKKLNHRIALLHEAVANRRKNYHFKLAHQLCKEVGMIFVEDINFNSWSKGMFCKQSLDMGLGQFFTRLEYVCSQTDTYFAKVNKDFTSQTCPNCGTHTGKKELDTRVHRCPECSFECDRDVAASMIVKQRGLEQLAVGAPVIKQPSNGDLSGTISVV

SEQ ID NO: 12559 - protein, 520 aa, unknown
  TnpB Polypeptide
MENMRTVAHGEVWFPPEIAQQVIELMRLQCSAVRSAYQAAHKHGLSGNGVRVYVKRNYMAGLNQRYVSDACSVASGIKHDHALFGGREAWEKLQTVALTKAEWQDGRNSRLYSRGDRSRGHERNANIRITGDRLLVNDPSGRGRWIEGRLFVPEKWREGLSKAALYDVRIIRRKNGKFTVAASWEVTPPPVVTDRSRGALGVDSNPDVVAVADVSADGNLLAHRSIGSQRLPFASKAKRDNDVRILAKRVVDEAARLGKPIALEKLKFPAGSRSAGYRKFRRAKANFVWRKILDAVASRAERSGVEVIRVHPAFTSDLGELKYARMYSMNRHAAAALVIGRRGAGFLERQDFTVTPDASGSNRVNLEGRSRSMYLTPKAYSWMQERFLHDRGKLSDPLGLKDCPGSHPKPADLTGPGPAPGLRPGIRPGAISDPAGPESSMALGLTTWDNLSDPSDLKVFPGRSVGVIPAGESGARTGRPRGWVAVDGSGPNSLGFKNRSMPFQSAERHPRKSVNFPRAS

SEQ ID NO: 12560 - protein, 478 aa, unknown
  TnpB Polypeptide
MRTVVHGEVWFPPEAARRVEELMRLQCSATRSAYQAVHKHGLSGNDVCIYVKRNYMAGLNQRYINDACAVASGIRQDHALFGGRRAWERLRTGALSKAEWRDARNASLYSRGDRATSGNPNIRIAGDRLLINDPREYGRWIDGRLFVPEKWREGLSKAPFYDVRIIRRKNGRFTVAASWEAAPPPVVTDRSRGALGVDANPDMVAVADVSADGNPLWHRSIGSQRLPFASAAKRDNDVRLLAKEVVNEAARLGKPIALERLKFPAGSRQAGWRKFRRAKSNFVWRKILDAVTSRAERSGVEVIPVNPAFTSDLGELKYASMYSMNRHAAAALVIGRRGAGFLERQSFTVTPDASESNRVNLEGGSRSLYLTPKAYSWMRERFLHPKPADLTGPGPAPGSRPGIRPGIVSDPSGPKPSLGLGPSAGGTPAGEPGARTGRPRGWVTPFQGAERHPLEPVDFYKLPKPGTTARPRTEQGGD

SEQ ID NO: 12561 - protein, 396 aa, unknown
  TnpB Polypeptide
MLLSHKIALRPNKKQLAYFRKAVGSARFVWNYALAAWEEAYRADGRVDSFKLEREFNARKAEMFPWVSEVSSRIPTRAFANIRKAFKLFFRKKAKHPRFKSKRRCRDSFYVHNSEFKVVGKVLVLCPARGFGPVRMRQELRFSGKIMGATISREADRWSIAIQVDVGEYRKPRTGDGVVGADLGVKHLVALSTGEFIEGLRPLENTLKSLKRLSRRLSRKEKGSSNYGKAVQKLAKLYADVSHIRADLLHRLTTRLCRENQAVAIEDLNVAGMMRNKRLARYVGDAGFGEIRRQFGYKAPIFGTRIKVADRWFPSTQTCSECGAVRGVKLTLADRTFVCEVCGYEADRDFNASRNLRKLIPVNDGESTGKFFASIGCKEFHRCTSVERDAPGRKAG

SEQ ID NO: 12562 - protein, 457 aa, unknown
  TnpB Polypeptide
LCRWRKANPRDLLSIECPVKMVKTVSLFPDLPEDRFLPMLEACAEIFNEHAAFASESRTWNKYRIHEALYRGVRESHPEIPSAIVQATRDCALEASKRCNKGRRGEWKTPVKRTLSVRYNLRTLSVRGGLLTLSCVGRRFRIMLDCGNISDQPRKASPDAMVLQPGKTFRPDGSERLSQVVRVPDHFRDIVMNWRCKAATLKHVRGRFRLNLVYEADAPPKAAGRALAVDVGGRNFAVTSDGDRHPSANPGVLRAVKRRYAHVRDTLQAKGTKSAKRRLRATAGREERFSRDVCHAVSKALAETPGVSTFVLEDLGGMRDGRRGRRRSRRANREVHALPFSRFRFDLTYKAEALGKTVEVVDPAYTSQRCHRCGHTESGNRRRSRFRCRACGFCCHADDNASRNILFVYESGEVLCASPISSSRRKAPGGQAAVNQPTMHGPAPRGNQCASHRAGGS

SEQ ID NO: 12563 - protein, 482 aa, unknown
  TnpB Polypeptide
MRTVAHGEVWFQPEAARRVAELMRLQYSAVRSAYQAVHKRGLSGNDVRVYVKRNYMTGLNQRYISDACAVASGIKQDHAMFGGRRAWERLRTGALTKAEWSDRRNSQLYSRGDRAKSGNANIRIVGDRLLINDPAAHGRWIEGRLFVPEKWRPGLSETPLYDVRIIRRKNGRFTVAASWETAAPPVTTNRSRGTLGVDANPDVVAVADVSVDGNLLGHRSIGAQRLPFALKEKRDNDVRLLAKDVVDEAARLGKPIALEKLGFSAESRRTGFRKFRRTKSNFVWRKILDAVESRAARSGVEVIPVHPAFTSDLGELKYARMYSMNRHAAAALVIGRRGAGFLERQDFTVTPDAPGSNRVNLEGRSRSLYLTPKAYSWMRRRFMRPGRPKPADLTGPGPAPGSRSGIRLGMVSDDGSEAIFGSLVPVRVDPRANRGSELVAPVDGGVDGSGPVGSGDVQRLSGRRKASLEARGFPRIFLNQEG

SEQ ID NO: 12564 - protein, 459 aa, unknown
  TnpB Polypeptide
MRTVAHGEIWFQSEASARVAELMRLQCSAVRSAYQAVHKHGLSDNDVCVYVKRNYMAGLNQRYITNACAVASGVRQDHAIFGGRRAWKRLRTGAMTKAEWLDRRNSQLYSRGDRTHSGNPNIRIAGDWLLVNDPSMYGRWIEGRLFIPEKWREGLSKAPFYDVRIIRRKNGRFTVAASWESAPPPIATDRSRGALGVDANPDVVAAADVSADGNLLSHRSIGAQRLPFASKAKRDNDVRLLAKEVVDEAARLGKPIALEKLGFSAESRRTGWRKFRRTKSNFIWRKILDAVESRAARSGVEVISVHPAFTSVLGELKYAQMYSMNRHAAAALVVGRRGAGFLERQSFAVTREASGSNRVNLEGGSRSLYLTPKAYSWMRERFLHDQGKLSDPTGLKDCPGSHPKPADLTGPGPGPGLIPGIRPEIVSDPAGLKLSLDVGPSAGVIPAGESGARTGRPRE

SEQ ID NO: 12565 - protein, 410 aa, unknown
  TnpB Polypeptide
MALPMLYCWREVTGQVSRAYKTELDLTQAQREACLRHAGAARWAWNWALARKKTSYETEGKVLSVFDLHKELTTVKKTIAPWLYEVSSAAPLQAIWDLGDAFKNFFDKRARYPRFKSRKRSRKSFRMQGDIKVMERGIKLRTFGVLRLKERGYLPVGAHVLSATISERAGRWYVSVCIEDNSTPAPSNGGPVVGVDLGISALATISDGTHIANPRALARYERRLIRQQKQVSRKERDSSNRMKAVERLRRTYARIVTMRTDAIHKATTMLTRTKSVIVVEDLHVESMMRKGPLAKSLADASMREFIRQLQYKAGLYGAKVLVAPEFFPSSKTCSRCGNVKSDLALSERVYVCEICGFEADRDLNAAINLEMVAPSLGETLNAWQRKEVAGRPRRADQCLPMKQETHRSAT

SEQ ID NO: 12566 - protein, 403 aa, Ignisphaera sp.
VSYSVRGEEPVVVETLRMRAVPEGSYDKLLDFLRMYRDAVQMVVNELWSLDGKLSRRKLHEMFYDRLKKLGYRAHHVKEIYAYAQSIVKSARSNGGRKPVLRKLSARIDRYDYRLDLERRVLVLKLHSGYEVKLKLVAPEERIRKFEEWSNYELVVKYDDGELWVSAYFKKAVKPAKPRTVVAIDLNFDNLTLAVLTLNGILIKLKRFKTPLRKVLTHRIWIERIQKRYPKSWRFIKGVRRAIEKHGVRIKNITWDYSHKTGDLIAELAFRHRSVIVLEDLDNLRENAKKGRKLNKKLALWFYRRIQFCVGYEARERGLRVIKVSSRGTSSKCPRCSSKLVDNGYRTLKCRNCGFTGDRDVVATINLYRKYSSNPGCGVSGCPRTPPSPMKPRAGCRGTRMRQ

SEQ ID NO: 12567 - protein, 400 aa, unknown
  TnpB Polypeptide
MLVFEAKLEGEKRQYEKLDEAIRTAGFVRNSCLRYWMDNKDIGRYELSAYCAVLAEQFDFAKRLNSMARQAAAERAWSAIARFFDNCKKKLPGRKGYPRFKKRCIHASVEYKTSGWKLSDCRRYITFSDGFKAGTFKLWGTRNLHFYQLSQYKRVRVVRRADGYYAQFCIDAERKERREPTFKTIGLDVGLSHFYTDSEGETVANPRHLRKSEKALKRLSRRMSKTKKGSKNRAKFRNKLARKHLKVSRQRKDFAVKTARCVVRSNDLVAYEDLKVRNMVRNKHLAKSISDAAWIQFRSWVEYFGKVFGVVTVAVPPHYTSQNCSSCGKQVKKALSVRTHVCTHCGHTQDRDWNAARNILEKALSTAGHVGTYASGETDQYLGEETPSSKSTRGKRKPKQ

SEQ ID NO: 12568 - protein, 470 aa, unknown
  TnpB Polypeptide
MRNKTYRSVSNYLRLSHRQFYLIDRLAWHSKNLYNVALYNIRQHYCEWQENATYLTGVRPDIVSKVDILIGSFLPYTRSKDFPYKDISNYARTRPNENYSLLHSDAAQQTIKSVEEAYHSFFELLQMYHRGELSDCPHPPQYLDKDGRYQLAFPAAHLRMKNGYVTIGVSHQFRRQYGVTKNELRFKIPPQIRRYKITEVTILPINNGMTYKIKFSYIPPKTHADVLPDRYLAIDLGLDNFATCVETTTGTAVILDGTYLKSTNRWYNKENARLQAIKDKQKLPQKLTHRQERLLNWRNNKINEAMNRFARYIVTYAIDRKIGTIILPTWEEIKKKITLGKRTNQNFVQIPYATFRSKLLSYCQRYGIIFDDTHDERYTSQVDALALDPIKKPPYGKKRRIERGLYQSAIGTVINADVNGALNHLRKVAGDSVIPQIISSGRVNRPVRIRLAFEGPDLGLYDKHPSYVLN

SEQ ID NO: 12569 - protein, 410 aa, unknown
  TnpB Polypeptide
VIIKKAFKYRLKVNAEIERQLVNFSGINRYVWNQALGLQSRRMQREKTCRKLLTYNMLAWLLTLWKQSNERSFLNEAPSQTLQQTLKTLDRAFKDCFDKRQPNKRFPVFKKKGMRDSFRYPQGFKLNNNQIFLPKIGWVSFFKSRKIEGEAKNVTVSRRGKHWYISIQTQYEVADPIHPSKETVGIDVGISQFASLSSNEHLQGKNATKKYAKILSKYQRRLARKQKFSSNWKKEKSKIGKIHTKVADTRNDRLHWISNKITTTYETIYLEKLPILNMVRSAKGTVESPGKNVSAKSGLNKAILDQGWGEFARQLEYKNKWKGGNVQYVDPKYTSQECRKCHYTSRENRESQSKFLCKQCGHAENADINASYNVKEKGRSGRPSQPAKRISSRGRQQELVGNCEKVPCLS

SEQ ID NO: 12570 - protein, 405 aa, unknown
  TnpB Polypeptide
VIRSGLVVPVHLTVRQERYAGRCIGISRAVYNIHVAASRMARTQLGRWPSGYELARELNKLKHDTDEFRFIAEVSKFVAEGARDNFRAAMDKWFRGEAGRPGFHARRATGSGSFLAASGVDRIRYDGHRRLRLPYIGSVRLRHGLPGDAVVSKVTLKRLNGRWYASLGLRVPDKARERKRQSCGGLDVGISPLAMESDGTEHENPRALRRSLGKLRRWQRAQSRRKTGSRGWHEAQGRIDSCQRRITGLRNNAHHHVSRAVTRKYRVLAVETLNVSGMDKLRWQAQAIRDAAIGGLLRKVEYKCRWYGTELVQAPAFYPSSKTCYACGEVNAELRREPIWRCGACGVTHDRNLNAARNLQKLALGAVGPDVMRPDLKALVRLTTSETIGDEGRTGPLATVHPAAD

SEQ ID NO: 12571 - protein, 412 aa, Gloeocapsopsis sp.
MITLEFKLKGRETQYRIVDEMIRTFQFVRNKCLRLWIDGRNVKLSEVNAEATKIRHNLEFPWAGKLESSAAQAASERAMSAIRRFYDNCKAKVPGKKGFPKFQKNNRSVEYKVAGWKLSSDRKRITFTDKFKAGTFKLVGSYDLNFYALKAIKRVRIVRRSDGYYCQFCIAVERNISIAPTGKCLGIDLGLSKFYTASDGSTVENPRHLRKAEKALKRAQRRVSSKFRTHKKQGEKVKQSNNYKKACRRLGKRHLTVQRRRKDFVVKTAKALLESSDFIAYEKLNVKNLVKNHKLSKSISDAAWTQFTGWIERYGMLYKRPVVAVLPQYTSSDCSGCGTRVKKSLSVRTHVCPKCSLVIDRDENAALNILVKGLNRAGMALNLSTPGHGGINASGQTNLCLLDENLSDKLTE

SEQ ID NO: 12572 - protein, 378 aa, unknown
  TnpB Polypeptide
MIRTYKYRLRPTKKQGHLLDRLFDQMQTVYNDALHERRQAWQRSRRSVSFVQQWNRMRDERRRLPDEMGMLNATSIQQMLRRLDKAYQSLYKGRGGPPRFKNAQRFKSIEYRHGDGCKLTGDRLYIQHIGQPKIILHRELPPAATIRHLVVKRSLDKWHVCLMLESPDAEPARVERPAVGIDVGVHHLLALSDGTIVDNPRWLRSNLAALRMAQRRFSRRKKGGSNWRKAARQVAVLHERVANLRREFWHQTTCRLVAAYGNIAIEDLSLAFMTRNDSLSLSAHDAALGAFRRMLEYKAEGAGTQVAAVSPARTSQVCSDCGSVVRKGLNARTHTCPDCGLMLDRDVNAARNILALGRSAWALTCPVGESVAQEAPPL

SEQ ID NO: 12573 - protein, 377 aa, unknown
  TnpB Polypeptide
VDIKRAYRFRAYPTQEQAEQLARTFGCARFAYNHMLRLRTDAWFNEQKRVGYHETSALLTALKKSPEHAWLNDVSSVPVQQSLRHLQTAFANFFAKRAKYPTFKRKDGKQAAEYTVSGFKWDGNALTLAKMDAPLAIRFSRTIPRAAKVTTVTVSKDTAGRYFVSMLCSDVVAPKPEAAGKVGIDLGLTHFAILSTGEKIASPKAFRKHENRLATLQRRLAKKQKGSANRRKAKIKVARLHARITDARRDFLHKLSTRLINENQVIAVESLAVSNMQKNHSLAKSISDASWSEFVRQLEYKAHWYGRTLVGIDRWYPSSKRCSDCGHAVSKLPLSAREWACPDCGTIHDRDINAARNVLAAGLAVTAHGEAVSPVCI

SEQ ID NO: 12574 - protein, 371 aa, unknown
  TnpB Polypeptide
MTFCALSEAKGMDIKMIIVHRFHIEPTKEQEQKLFQTLTLCRRLYNAALEQREICYRQKGKSPSCTAQKNELTVLKKELPKYKQVNAQVLQDCLQRLDNAFERFFDSLAGYPHYKSRDYYRSFTYPQADKQDHFKKPGYIYLPKIGCVKMKAHFEFDPAKVSRINVKYHGGKWYVNLTLEIQEAEAVEIVSKVGIDVGLLTFAALSDGTKINNPKYFRKSEKKLAMLQRRLSRKKKGSNNRRKAKAKVTRLHDKIANQRKDFLHKASYGIVQKYDLISVEDLSVKNMIKNHHLSKSIADAGWGKFISYLEYKCQKYGKKFVKVPPSGTSQSCICGAHVPKDLSIRVHKCPECGLVADRDVVSAMVILQRAS

SEQ ID NO: 12575 - protein, 250 aa, unknown
  TnpB Polypeptide
VLHRPIKGTIKTCTVRRSSTGKWYACFSVEYDPSPLPQKETTVGIAVGLESFATLSNGEKIENPRFFRTDEKALAKAQRRLSKAEKGTPGKIVAHIHERIANRRLNFAHPTSHQLMDRFGTIVFEDLNIIKMEKNHHLAKSIADVAWNLFITITESKAEDAGSRVIRVNCQEGSFGTFRAQEHISAMLQMWNDCRKDPLGSCPFLPVLWARHGSRPECGDQYSEIGACNLRGDTPGCPRREEGEQSPSRI

SEQ ID NO: 12576 - protein, 569 aa, Gammaproteobacteria sp.
MTQKTRKNNSGTIDDPISTYQTRLKNLPEAKTAALDDCATLLSQVERHLFAQSQKVDTFKGKVFNQIKSFFLSFFGILSRHFNSINFTLQGKINSYRSNLERYISENQERVEQTKKTIEKLSKKEVEASQRQKHDYKLHQKKRRLARLEKRLEQLKSDKATGRVRICFGSKKLFNAQFNLKANGYKSFEQWKKAWQKARSNQFILIGSKDETAGNQLCVAIPQEDGTLTLQIRMPDALVPKHGKYVSIAGVKFEYGLDIIEAALDENEARRFLKKIKNAQSKHYGRAITYRFLRDKKGWRVFVSTARPLVPIKSLKHIGTIGIDLNANHIALVETDRFGNPIETETIPLNTVGLSKSQTEALIGEAVKVIVERSEKTLKPVVIEDLDFSQKKSVLKENSSKKNARMLNSFAYTKFRQFIEARALKSGVRVYKVNPAFTSVIGRVKYATRYGLTVHHAAALVIARRLCRFSERAPSSCKDEIFIPNNKGGHVTFSLPVRNRKKHVWSFWRRVSRKLKSVVHVARVRAAEITDRSNQTQGPLVGTKGPPLSRTLTGAIPAHEPLGNTARPA

SEQ ID NO: 12577 - protein, 421 aa, Streptomyces sp.
VKRQFGHRARLALDPDQVAVLDAQAHAARTTWNLLHDWWLMLPKAKRTLVAADAVIRQGRKELAWLGVLPAQAAQAVLKSYFQAWKNCWEKRAQAPEFKARLRTRMSIDIPQGRDLQVVRVHRRWGMVNIPKLGRVKFRWTRELPVGKHADTDQRITGARLVKDALGWHIAFRVQTLEAAPAPHPGPAVGIDAGITVPLALSDGNTAEHGPWLSKKEEARLLRYEQQAARRKAHRKKGERTSRRLHHTYNQIARIRATAKRRRDDWQHRTTTALADTYGTVVVEALRITNMTRSAKGTADKPGTKAAQKAGLNRAILGEAWGRTVQLLAYKLTHRGGTLAEVPAPGTSQECSQCHTVTPGSRRSQHEFVCNNPACGWEGNADLNAARTVLHRYRTGHALAPAAGRAVVRRATHGVKPATAR

SEQ ID NO: 12578 - protein, 222 aa, unknown
  TnpB Polypeptide
VNNKYYASLVIDTPIEPLVQTGHNTAIDANVNHFDYTEGQYSINSKRLNALYAQIAFYQKRLARKRQVNGKKASDSKSYTVMRAKLQALYEKATAIQTDLLHKFTTYLYRTYDSIVIEDLDVKSMQMSKKAKNLHRSLFGTFRFQMEYKAIKFNKQLIIADRYYPSTQRCSQCEHVKKGDDKITLQGNAKHGTAHHEYECYNCGYKADRDQNAVNNLLALIK

SEQ ID NO: 12579 - protein, 407 aa, unknown
  TnpB Polypeptide
MLIAKKIRLEVSEQDAATLEFMQGKCRGLYNWWVMKLRNGEKWPGWEKAKKTLQESKQHDPELCFVYGKLLAEVYFRLHEAMKAFFRRVKAGEKPGFPRVRPRHCFFTLIYPAMYLRVEGRHLTLPTGGGGRHGPKRYPDIIATLTEEAPTGYRDVAISRDGQGHYYASFVYEAKEETHEHDGVLAIDLGVKTLATGVNEQGRFYHIGGFKGNRWYNRQLDKIRSKRDKCKKKSRRYKRLSQVYKRVSQQKRNKQQDSLHKASHLIAHKLVERTVVIGDLSQRQMVMKEHRERNKHLNRAVFNDWGLYTFTQMLVYKCMLYGKDLVILDERDTSKTCSGCGHKQNMPLWKRTYRCPECRLVVDRDENSAVNILKRYLARLGPHTGDPVRCADGFTAIDDVLNTFEHI

SEQ ID NO: 12580 - protein, 542 aa, unknown
  TnpB Polypeptide
MIIDSKYTKIFVSNELTRQKYDELYDFAVLIRNHKNEVSKHICSNLLKYLEYNKFQFLKEMRETYKGIIPSSFDAQLYTQILDCYQNKFDAIQKKLKFEKITYLGCEFYKRDTKKHKKGDFKKVNTKHETTPLSTCLTYLARYGRENTIEYIKEHFDLVDDKQKKLYQCVLDCSKKFSFERLYRLSQQRKTRTIEHYAEYSIEFKSLTFSGRCRKTKIIDYNKRFGSIINSFISLSGLGKKSFDIPVKFSMDYHGNIKDYFKKNPDYEYTITFNERKHQVSVCLCKDGERYIPEATDDIIGIDVNCKHNLFSLSNETTYDYDRKLVNDYCKLALSIDKLKENKSYTIGKRKQHKLDTLKSKMIKSEQQLISRMCKDLSEQGYHHIVMEDLDNGFGKCYVKDGDNEDINYNRKVKFLGLSSLKQEVEHIARNYDIAVSTVQSSYTSKMCPVCGCIEDENRPNQETFECIECGHKDNADFNASKNIRNRVILTVLRDELLKQKDNSAYEPKSMKREKVKEVLLSFRRSLQNGDREVNQNNFAFS

SEQ ID NO: 12581 - protein, 502 aa, Chloroflexi sp.
MSHKPERANDQGQKKRKRKKRTKQTITCAVTPIRLIAANPGKLAALDQLLEVYLPLCQQYVALFCTQETLPDKYADPVFATVLSDRLHRVAMQQAAGIAKSWRTNRQAAYDAYLEDLADYAEAKTKATASGMPLDPKRIEPTWKEWNLPELRVPAIQANANVVAVEQSEDSTFDYWLRISTLDKGNPLHIPVKLAPYHKKALQGRTLNTSTTLHKRKGVWWLTLSFDLDVPVETESSAQKVGVDVGIANFITTSTGKKYGSFHGKLARRHTRDREKRRRKARLRACLKKKGVEKLPSTSSASGQRLGRHVRQEINRAVNQMIADHPNARIIYEDLSVASMRFKARSMNAYLYASNLAHIPEQIAWATAKRGMAAHTVKAAYSSQECHRCHYPDRANRPDQQTFKCILCGHRDHADHNAALNLARRFGDTELAACKNKGEVKTRLLWRHEEWKKQYGLAVVQPAVQLGLWDYSEASTDVCDPFRRNRCKSKDDELAKARQLVP

SEQ ID NO: 12582 - protein, 549 aa, unknown
  TnpB Polypeptide
MEYITEDVITMYENNIQLHYVEYVERFVNVVWKKKMIVNKIRKLGKTQKEREIRVRNLCTELRKIKKDLLNVDGKPYQSSSHYHTWIAEQKQHILPSRTKFEKNSVMYDLKCKTMEYFPCMIFMMKQVENDGESVNNVFPLRSEITPKYIRLDTTTLVNLLLRKEHGSKGFFKTKGELKKNEDKIWKFFFRTERKMFHKTGFSFHHMVSTDGIGLSILFLRDDLVGKKLPMMKKGISKELYIDELDDYSALRDKTIVGIDPGKDDLVYCVDDASKDANVFRYSQDQRRKETKMKKYNNIILGMKTNKIEGKTIIEYETELSHFNRKSLQITKYKEYLYEKNRINHILFVFYRKELFRKLKFGKYINIKRNEQKMIRNFRNMYGNPEDVVICIGDWEQRKQMKYKEPTLGKGVRTLFRKNNYKVFLVNEFRTSCKCSKCDGGVCEKFMVRKHPNKKKNKDELRLIHGLLRCKSGCGSWNRDRNGSSNIYKIARNAINNIERPSYLCRETNGGIKPPSLGLSVSRPSRETKDETSNQSTSTSVYNQTILRV

SEQ ID NO: 12583 - protein, 400 aa, Actinomadura sp.
MRTAYKCRAYPDPEQAAIFARTFGCIRLVWNKTLAERRRAWHTDRTPTTYKQTDAALTAWKKTRESAFLSEVSSVPLQQALRHQHAAFVNFFAGRARHPRFKTRTGRQSAHYTRSAFRMRGGELWMAKTTAPFAFVWSFEDVNPAALDPTMVVVSRATDGRWYVTFAVDADTPAPMPAAGHEIGIDLGVKDFAVTSDGTRIANPRHLARKAANLARYQRRMARKRPSSNNRRKAKTKVARSHRKVRNARQDFLHRTSTTLVRQADVIVIEDLAVANMVRNHRLARAISDCGWGEFRRQLEYKAARAGRVLVVVDRWYPSSKTCSACGYLLEKLSLSTRHWTCPGCRTRHDRDVNAAKNILAAGRAVAGAGPGDVCGADVRRQGPSLPQSAAKQKPPRREP

SEQ ID NO: 12584 - protein, 478 aa, Scytonema sp.
VTKSNKQRKTEYIYTQVIPVVSCDDETQVQKIMYLCGIPRALTYNKLGSLKGWGLDWKNADISVRTILKPTDIGLPVKLWEWSVNDTMKAILAQQEAAKTVIIRDIYRRAKDDSQRKRLINLLKTDPTADNWLHRQFRKYYLKGHTFVRNQIVYQGAGYSCKRLTRRLVQLEVAGLIKGKRITLKLRCRHIIKGQIRLICNEQGNLEIHCIRTKTLVLPQRKPTEKLGIDKGYTEGFYTCDGTKIASGLGKLLTAKTNRITRTNRNRYRLFAHAKSNPSKSATILKNNLGDHTKKRRLQREKATIENFLRRDLRRKITTPVEIFCEDLTQRMRGKQQAKSINRKLNQWMKGELQASIEKISLETGSTVSVVNPAYTSQVDHLTGTLLGRREGDCFIRYTGDVIQADLNAAINIRIRGTDNNITRYMKSSDVESELLTRTVRYLASIGKSVTDALNFGWLLPKFKAKALKLEALYHPLG

SEQ ID NO: 12585 - protein, 395 aa, unknown
  TnpB Polypeptide
MQTVLDSLCDYRRYCWNQGLELWNTLYDARLIGLPDELRAKIKASHTDKTIQFSEDEQTVRTRFPAPSHIVVQNELVAQKADWQYELSARALLLAIKDLAAAWNLFFNNPKTANKPGFQSRKKPKQGFKTDRARVINGRLVLDRPHAYKGEWASIHFKGASIPDGHLKLCAVTRTKGKYIATITMDVETVALPKTGKKTAVDANVDHFDTTEGQTSLKPELLDPLYAKVRTYQRRLARKRKVNKNYRNSKGYQATRAKLQATYERIRNVQNDLLHKFTTDLYREFDTVVIEDLDVKGMQMKKKAKNLHRSLFGRFRQFMEYKAEKFGKTLIVADRFYPSTQRCSNCGHVKTGDEKITLSGNAKHGTKHHEYVCYKCGYEDDRDHNAVLNLLAYAK

SEQ ID NO: 12586 - protein, 305 aa, Sphaerospermopsis sp.
MIVLEFKAKGKTTQYAAIDEAIKTAQFVRNKCIRFWMDNRGVGQKDLYRYNTVLRAEYSFVKDLNSHACQVGVERAYSSIARFYDNCKKFIPGKKGYPKFKKNNRSVEYKTSGWKLSQTRKQITFTDKKEIGNLKLKGTWDLNFYPIEQIKRVRLVRRADGYYVQFLISVDNKVETQPTGKTIGLDVGLKEFYTDSNGHSEPNPRFYRTGEKRLKFYQRRVSRQKKGSINRKKAINRLGRVHLKISRQREEHAKRVARCVIQSNDLVAYEDLRIKNLVKNHCLAKSINDAGWYQFRKWLEYFGVK

SEQ ID NO: 12587 - protein, 514 aa, unknown
  TnpB Polypeptide
MTDTFTHENQLKTTPHVEAILDVRMEASRNLCNACLQELLWRFDLMQELKAYRAARILPKGEPRNEAFNACQHDHGFLEYALHFFAAKTCKACWIADHIDSLTIRKTATRAFDAVIQYMFGKRGRTRYKRKGWFTSVEGKSNSAGVRWRDRKVLWSGLTLMPIFDSKDKHGVEAHALSCLVKCRRLVKRTINGKVRWSEQLVLRGMPHQKTKNVTSGNTCGLDIGPSIIAAVSNEGAFLAQFCEEVVHPWKEISREQRAQDRSRRATKPDNYKEDGTIKKGTRKWHRSNRYKKRQKRIAQCQRALAAARKKQHGEMCNNVLSFGKVIKTEKLSYKSFHKNFGHSVTVRAPGMFIKELTRKTENAGRSVEEISTRKTKLPQSCICGSVVKKPLKQRHHACSCCVEAQRDLFLAHLARHSSNNALDISQAKVAWPAAEPLQRRAMSRITETASRGPQPASFSISRRQSCSPVENGSITIKTLELLPKMARAKERWPVLPLEPPGVSPWGGSAGRSS

SEQ ID NO: 12588 - protein, 369 aa, Deltaproteobacteria sp.
MQVVKTYSYRIKDSSCRNHLCRTAGSVNFVWNYLNATSCRAIRERRQWLSEFDLNNLTSGASKELPLLHSQTIQAISKEYVKARGQSNQAKLRWRSAKKKTLGWIPFKASGVKLEEDTIKYRGRVYRFWKSRDFPEGGRVVTGSFNQDAEGRWYVNLQFQMKIEEPEPKGERRLGIDLGLKTQATCSDGEKLKRPNLTKEWEEKLAVAQRAGKKKRVRKIHAKIRDIRQDWNHKESTKLIESCSLIRVGNVSSSGLMKTRMAKSVADAGWFQFKTMLKYKAITHGVDFEETNEAFSTVTCSQCLERTGPSGIRNVGIREWICSSCRASHDRDVNAAKNILIFGLVGRPDAGRFPLSSGNAGTGGSKKNS

SEQ ID NO: 12589 - protein, 396 aa, Trichocoleus sp.
MIVLEFRAYGKSKQFSAIDEALRAVQFIRNKALRFWMDGLGKSQYDLNKYCAVLAKEFPFANELNSMARQAAAERAWSAISRFYDNCKKQIPGKKGFPRFQKDNRSVEYKSSGWKLAENRKSITFTDKKGIGTLKLKGTRDLNFYQPDQIKRIRLVKRADGYYVHLCVSVERREKIEPFGSAIGLDVGLQEFYTDSKGMTVENPRFLRKSERRLKQAQRRVSKRVKGSKNRGKARQILGKRHLKISRQRKDFAVKLARCVVRSNDLIAYEDLRIKNMVRNHCLAKSINDASWYQFRVYLEYFGKVFGKITIAVTPNGTSQECSSCGTVVKKSLSTRTHVCQCGTVLDRDHNAARNILSRGLSTAGHVGTFALDASNAWGEDTATLAGAILPEQVTS

SEQ ID NO: 12590 - protein, 409 aa, Trichocoleus sp.
MRLAYQYRLRLTTQQKTTIDRWLELCRRQYNYRLAERFNWYEKNRCDVNACPLVCHLPELKDRPDFYSQKRDLVNSKKLFPEYKELPSHTLQDVIARVEKAFDRWLSGDSNGRRNGKPRFKGQGRFRSIAFPDPVKPEHIDGRFIQLPKIGKLKMILHRPMPDGFKVKTAAIIKKVDGYYITLSLQDLSVPVLTPDVPTLENTIGIDMGLKAFLVDDSGKDEPIPQHYRKAEKRLKRLQRSLSRKKKGSSRRKKAIKRVSKAHLKVSNQRKDFHYKTAKKLLSQGKHVAHEKLNIKGIARGRLAKSTHDAGWGQFLQILSIKAERAGLMAIAVNPSGTSQNCSGCGTKVPKTLKDRLHACPKCELTIDRDHNAAINIKHLAVGHSVNKAQVTSDAVAGVTEKPTSYTDA

SEQ ID NO: 12591 - protein, 331 aa, unknown
  TnpB Polypeptide
MATVSYGLKITEAYHIFDKTIKIYRNAVHYISDIAIRHYDELKSLESITGDDGKVIISAQQRRQQKMERLIHSTANNDAIYKRFDKEFYKFPSYLRRDAINTAIGLILSYRSQLQKWEDGGKHGRRPYLNRNQNTMPCFYRNNTFLDSEETNIVSLKLYNGKDWIWETFVIRDCDFMYAYNHMKEWKASAPVLVKRNHRYELRISYEMAGSKFPKFKKDKEVETVIGVDLGINTDAVCSVVHKDGTVTGQRFINHPVEKDRMYGLLNSIKKAQQNGNHKTPRLWRLANNYNEAISNIISEEAGAYFSGQKSARDVAGVIQSRVQVYVNENR

SEQ ID NO: 12592 - protein, 355 aa, unknown
  TnpB Polypeptide
VQTVKAIRFRYEASEELAALFEAFRLMCNDAVRITLKEKPRSRFKLIALAYPKSKEFGLHAHYILSACEVAYSACKNRKRRPDPCVKRRFVKIGNQAYTLNRLILRIPTKPRHLIYLALHSSNYHLALVDDPGLKRGSITLTESALAIALSRNTASIDIRGHIGIDVNERNVMWADSSGAVRKENTLVVAELKERYKAVRAKIAERTSEDRRVQRRLLSRYGQREKDRTTQAIHCITKRIVGHAKRNSQAIIMEELKGIRKLYRRGNGQGTSFRGRMNSWTFREIQRQIDYKARWEGIPVHYINPRGTSRKCPNCDSSLVELEGRQLMCPSCKKSEDRDVIAAKNNGLRGSAGSA

SEQ ID NO: 12593 - protein, 212 aa, Streptomyces sp.
VWTPDWVTCSPSPPGEKVANPRHERRDRARLARAQRELSRKAKGDGTNRAKARRRVARVHARIADRRRDTLHKLTTRLVRENQTIVIEDLAVRNLMGNGKLACAISDAAWSRFRGMLEYKAQWYGREVIALDRWFPSSKLCSNCGTVQDAMPLSVRTWTCRCGVTHDRDVNAARNILAAGLAVSACGAGVRPQRSSPGGQSAMKQETPRREP

SEQ ID NO: 12594 - protein, 605 aa, Streptomyces sp.
VWRRAKDAPVSVIRLPLVVANAGVRRRVEQLFSGMWHVKRALQRDARDVVDAYWAGEVRRERDVKAWRAELGLSRTGLERRAYRHLERSGWLSDHVSKALVMHQADEVFTGVARHLHPDASGRRAGRPRTGTWWEYTRIPGRARSHTTDRKWETFRLHGTLAGHLDTFRHPALPLSVTTPAQAAGLPPGMRVLAQPRRMPAPARPTGGIPTGTTDTHRRPRGRAATWFDHTGPLTVVFVGGPTGRGDIVLPVRLPQGAGRWPYLLHYLNDPARWHKIDLVRRRDPAAPGGWAYEAHLMILAPGYASPTTRTRRRQAATGQRVGGVDGNVSNLAVVSLPTTLNPDDGGVCSDRITLTEQEQHALATGRTKARGRQRALDRSRRATNPQQYQRSRRQKARDEHRQAAGLPPKAVTVPTGPRRTTATGKPQQAYRRDTLSTSYRNLRARHSAEAASAAEASHHRAKKTAAALVAAHGPNLTIEDCDIRTWFRLWGRACSATTPGRLITALAAECTATGGRLLRASTFTTALSQHCLCGRRVPKSLRQRTHHCDPAEGGCGLKATVTWSPPPWPPSPPSPTPTTPQPPARTTPTPAPPRSSSPKGCKKP

SEQ ID NO: 12595 - protein, 426 aa, Streptomyces sp.
VSQGTLVKRQFVHRARLALSSAGVLETDGQAHAARTMWNLLHAWWQMMPKEKRTLANADAAIRQAREDIGFLAVLPAQAAQAVLKTYFQAWKNCWDGRAGAPNFKGRFRTVMSVDIPQGRDLNIVRVHRRWGMANIPKVGRVRFRWTKDLPVGKHAGAEKRITGARLIKDALGWHIAFRVQTLQGKPEPHQGPDIGIDVGVSVPIALSDGERYEHSEWLTGNEKGRLLHLEQRAARRKQCRKPGEPTSRRLHHTYGQIAGLRAKAKRRALDWQHQTTTAIARTYGTVVVEALTITNMIKSAKGTVEEPGKNVAQKSGLNRSISGEAWGRTVAMLAYKTAQHGGTLVKVPAPGTSRRCSACGHTTPGSRESQAVFVCKNPDCGWSGNADYNAARNVLHLYRMGRALIPAAGRAVVRRAKRVKPAAAR

SEQ ID NO: 12596 - protein, 737 aa, Streptomyces sp.
MGGLREVAAPFVALGPSGVAVRDRLKRLSVEDERVLRLIGDLLGTLASLDLKARCAAGLVHDTGQWAERKRTLTQGSSSRWAGSITKGTHDQWALARRGQFAHVQSLEAGVRTIAHRLSLPIGEKGGKRAPGGYRSRQEWHAKARRVHVLEDRLQAARADREAGVVRVVRGGKGLLNTRHHLRAAGLTEEQWRTRWQAVRRFLQADGESGKRFGNETIRVTPDGEVSLKLPAPLAHLANAPHGRYVLAARVAFAHRGEQWRDRVTANRAIAYRIHEDTSCGRWYLTASWTVPPVKTVPLAAARTNGLVGIDTNADHLAAWRLDTHGNPVGEPLRFGFDLSGPAPHRDAQVRHALIRLLHWAKRHGLAIAIENLDLTAEKTREKHGRRKKFRNLISGMPVSRLRARLVSMAAELGITVIAVDPAYTSKWGAQHWQKPLTSTNRTTTRHDAAAVAIGRRALGHPIRRRTAPPPHDQSDRVGHRTVQARPGAPRREEPRPRIPGPRTRSMRAGCGANAADQCAQHRSGHATEHDSWQQDSLPLSLQERSTTRPMTGAPASPPISPSPTPAPTPSTAGPSPTLTRATRSWSTAGTAAGRSPAGPSPSPTPGTSEDRGRGQCHHRRPVHLQRHQRRPTSFAVNGVACPGAHQPPIAVLSSPSPGAVFTSGGTVPMTATAAAADGATISKVEFYSDTKLLGTDTTSPYALDYQDVPAGDYSLYAKAYECRRGWTWRRRPGCSA

SEQ ID NO: 12597 - protein, 399 aa, Streptomyces sp.
VTTTCVKRAFKYRFHPTDVQAAELSRTFGCVRKVYNLALAARTEAWARQERVNYNATSAMLTAWKKTGELAYLNEVSSVPLQQTLRHLQGAFTNFFAKRAKYPRFKSRKTSRKSAEYTTSGFRFRDGKLTLAKMDQPLHIVWSRPLPEGARPSTVTVSQDAAGRWFVSLLCDDPGVRPLAPTGAVVGIDVGLDHLLTLSTGEKITNPRHERADRARLAKAQRELSRKARGEGANRAKARRKAARIHARIADRRRDLLHKLTTRLVRENQTLVVEDLTVRNMVRNHTLARAISDASWSEFRSLLEYKAAWYGRDVVVVDRFFPSTRLCSNCGTLAQRMPLNVRIWTCEGCGATHDRDVNAARNLLAAGLAVTVCGAGVRPQRSTPGGQSAVKQKTPRREP

SEQ ID NO: 12598 - protein, 438 aa, Streptomyces sp.
MRTYVLLVADRDEGAGRLACLSHGRTIVWVMKLVVQVKLLPTPVQAAALEATLCACNRAADQASRVAYETGVTSRNDLQKAVYADLKTRYALSAQPVVRVVKKVVDAYATLRANLKTGRLGPADSKRYRKATGSPIAFRPQAAQPFDDRCLSWQMDARTVSVWTVHGRLKNVGFAASPDQLKTLVAYRKGESDLIFRDGKWFLAATCEIPDPEVFEPVDWIGVDRGIVNLATTSDNTNYQGRRLSRYRRWQARKRAELQARKTRSATRRLARRAKREHRHATHMNHVISKEIVSVAQRTGRGMAVEELGGPGPGTATPGPARHALCLAFPPVGTAPRLQGPPGRGAVPRSGSGLYLAALSALWAHRSGQPARPGPFPLSSVRARWPRRPRRRGQRARSRTLGVGIRHHARRSRAHPGLKRDATRDRPVVGGSRERDKA

SEQ ID NO: 12599 - protein, 449 aa, Streptomyces sp.
MQLRYNYRAYPDAAQRRALASAFGCARVVWNDCLRDRKEAHAAGLPYVKSAELSRLRITQAKRTEERAWLAEVSAVVLQQSLRDLDTAYSNFFNSLKGKRRGRKVGPPRYKSKKDTRQSIRLNTNAFCLQDDGRVYVAKVGNLKVTWSRRLPAAPTSLTVTQDSSGRYFLSFVVDTEPDTLPQVEAESGIDLGLSAFAVLSDGTKISAPRFLRRAEKKLRRLQRELSRKARGSRNRAKARIKVARQHARVADRRRDFHHKASTQIIRDNQAVYVEDLAVSGLGRTRLAKSVHDAGWSAFVGMLEYKAVKHGRTFAKVDRAFPSSQVCSACGYRDGPKPLHVREWTCRACGTVHDRDHNAARNVLFEGGRIVAAGRVETLNACGAPVRRAHVPAQRVEAGSPRKGQTTQAGIPGLQAREHVKEGCNTDIRRAGRSSRVLSRTLVPLRCGR

SEQ ID NO: 12600 - protein, 298 aa, Streptomyces sp.
VKTTHVKRAFKFRFHPTDAQAAELSRTFGCVRKVYNLALAARTQAWALRQERVNNNATSAMLTAWKKTEELASLNEVSSVPLQQALRHLQAAFTHFFAQRARYPRLKSRKKSRKSAEYTTSAFRFQDGKLTLAKMTEPLAIVWSRPLPEGAAPSTVTVSQDAAGRWFVSLLCEDPGVRPLPTTDAAVGVDAGLDHLLTLSTGEKITNPRHERHDRARLAKAQRELARKAKREGANRAKARRKVARVHARIADRRRDTLHKITTRLVRAVSACGAGVRPQRSSPGGQSATKQEPLRREP

SEQ ID NO: 12601 - protein, 436 aa, Streptomyces sp.
MAAPFVVSGPAGVAIRDRLKGLTVEDEEVLRLVGGHLGSLASRDLKARCADGLEHGSERWAVRKRALTGESSSRWAGSITKATHDQWGLARRGQAAHLHGLEAGIDTVRHRLSLPLVERGPKRAAGGYFSQKEWFAKPRRLHVLEDRLAAVRAGQEAGRVHVVRGGKRLLNTRHHLETAQLDEAQWRTRWEASRRFLQADGESGKRCGNETIRVSPDGEVSIRLPVPLAHLANAAHGRYVLAARVAFPHRGETWRDRITANRAVAYRIHEDTDRGRWYLTASWTVPPVKTVPFSTARASGLIGVDTNADHLAAWRLDAHGNPVGAPRRFDYDLSGTAAHRDAQVRHALIRLLHWAKRYHLAVAVEDLDFTAETTREKHGRRKRFRKLISGMPVARLRARLLAMAAGLGIPLVAVDPAYTSHMGRPALEKTSHQQQT

SEQ ID NO: 12602 - protein, 459 aa, Mycobacterium sp.
MPKFEVPDGWTVQAFRFTLDPTEDQAKALARHFGARRKAYNWTVATLKADIQASHASGTVTAKPSLRVLRKRWNTVKDDVCVNTETGVAWWPECSKEAYADGIAGAVEAYWNWQTSRAGKRAGKRVRFPRFKRKGRDQDRVSFTTGAMRVEPDRRHLTLPVIGTVRTHENTRRIERLIKAGRARVLAISVRRNGTRLDASVRVLVQRPQQPKVVHPGSRVGVDVGVRRLATVATADGTAIEQVENPRPLGAALRELRHVCRARSRCTKGSRRYRERTTQISRLHRRVNDVRTHHLHVLTTRLAQTHGRIVVEGLDATEMLRQKGLPGARARRRGLSDAALGTPRRHLSYKTVWYGSALVVADRWFPSSKTCHACRHVQDIGWDEQWQCDRCSVVHQRDDCAAINLARYEETSSIVGPVGAAVKRGADRKTGPRPAGGCEARKGSSPKAAEQPRDGVQVA

SEQ ID NO: 12603 - protein, 296 aa, Bacillus sp.
MHKAYRFRIYPNRTQRDLIHKTFGCCRYVFNHFLARRKEVYEAEGKTLGYNACSALLTRLKRELDWLKEPDATALQTELRHLDDAFKRFFREKKGYPRFKSRKNPVQSYTSKNNKGTIAIQGNRIRLPKLGWVRFARSREVKGRIISATIRRNPTGKYFVSVLVETEIQPLPACDSKVGIDLGVKDFAVLSTGESIANPKHLYKHERRLIRWQRILSRRTQGGRRWEKARLKVACLHEKVSNCRRDFLHKLSTRLIRENQVICLEDLQVQHMQKNHRLAKPISDASWATFRSMLKY

SEQ ID NO: 12604 - protein, 383 aa, Bacillus sp.
MLLVKETRVNDVHKAYSFRFYPTKEQEQQIRQTIGCCRFVYNLFLARLKEAYERDGTTLNQYACMRELPVLKQQYPWLREVDSTALQRTVEELDDAFQRFFREKKGYPHFKCKKHPKQSYTSKRNGREDTKATIRIESNRIRLPKVGWVKFAKSREVQGRILSATVRLTPSGKFFVSVLVDTEIQPLEPKTNAIGVDLGLTHFAVLNTGERIPNHRHLRKLEEKLKHWQRILSRRKPGGRNREKARLKVARLHEKVRNARLDFLHKLSTRLIRENQVICLEGLRVQNMQQNHRLAGSIADASWSEFRRQLAYKAKWYGRQVVIVSPVFPSSQLCSCCGHRNTGTKDLSVRQWTCPVCGETHDRDVNAARNILREGLLLLGLSA

SEQ ID NO: 12605 - protein, 393 aa, unknown
  TnpB Polypeptide
MEKIGYRTLVLRYELSRLPPEVVSRIPELLLVQEEFRQWVSLWLRDPKKTPRPAENPLKYFVMEFLHAGALKWLVGVKKSGVEVQKAKMPLFFSAQLRLSNERDVSRGVFVDLTEKLIRIRRWSGRRGNTIVLPISEGAVRWILERVSEGGRLVLTAVWVGRSRRRRTAKLYVALVFRREVAAMQPKRLLVVDLNALHNGLVWAVVEGERMLKKGVLRPDISKVLHLQKIASRLDKLCAKEDRACSEAVAVKSRIWRLLKTWEEKAVKELILTARKQKAAIVVDVPNDNSVRELKEGSYASKKKIFLNFGRLRRRLKEAAAWHGIPYYEKRLYSTLCPKCGGKMKELPSRRVRCICGFEAYRDEVPVFWATKLYPQLISFSSPFQQRGETLHI

SEQ ID NO: 12606 - protein, 320 aa, unknown
  TnpB Polypeptide
MTEYISAVNDLVSYYLGQGHLVKMTSKDYAAKLPSALKAQVLRDAKSVYQKCRKSHLLHILKKPVSIWNNQNYKVKEQLISFPVWTNQTQRLSVSAKIPKELMDTLSSSKLGTLRITKRNGKYIAQIAYERQELPPATQSDAIGVDLGIKCPAVAVSSGGKVQFFGNGRQNKFIRRRFRAKRRMLQKKKKVKAIKKIGRKEHRWMQDQDHKISRQIIQFAIQQGAGMIKLENLGGICRTARTSRKNNHSLHSWTFYRLAHYIEYKANLVGIQVVYVDPRYTSQTCPHCGQHNKARDRTYRCSCGYQAHRDLVGARNILAA

SEQ ID NO: 12607 - protein, 379 aa, unknown
  TnpB Polypeptide
MLRAIKVRLYPNKQQGQALNKVLGCYRFVYNHMLALKQESYKSDKTNLSLNELSKYFHHELLNDDQYNWLKEQNTKVMGQSIRQMLTAYDKFFKYQNGFPKFKSKKDKQTALFPIGAISKRNTFETRHITLVKSLKNIKFRCSDLYNKRLQKYKDNIRSATLSKTKSGNFFLSILMEIPQNEIVKFKKTNKEVGIDLGVKDFVITSDGKKFENKHFFKTDEQKLKKLQRQLSKKCNGSNNFHKQCKRIANAFEHITNKKEKYIHYVLNELLSSYDTIYMEDLSVSGMLKNHHLAKAIQEVGFYKFKEILKGKAIVNGKKVVLIDKFYPSSKTCSRCGYKNQDLKLSDRHWRCPECGENHDRDLNAAINILREGQRISAA

SEQ ID NO: 12608 - protein, 394 aa, unknown
  TnpB Polypeptide
MDVAWKKTAAEDGKTVQYTTLKVRLYPSEAQVELFENTFGCCRWIWNHMLADQQRFYLETDKHFIPTPAKYKKEAPFLKEVDNQVLIQEHNRLSQAFRVFFKDPSHFGQPNFKKKKTDRDSFTACNHVFESGPTIYTTRDGIRMTKAGIVRAKFSRRPQAWWKLRRVTVEKTRSGKFYCYILYEYEVKTPEPVIPTQETALGLKYSMGHFYVADSGEMADPPCWLKQSQEKLAKIQKRLNRMEPGSKNYQEAVQKYRELHEHIANQRRDFIHKESSRIANGWDAVCMRAASIQDVSTKKVLPGNALDAGFGMFRECLRYKLARQGKPLILVDRYALTTRTCSACGHTRPDRPHRGAWICPKCGARHDREVNAAKNIKAQGLAQYFNSQDLRESA

SEQ ID NO: 12609 - protein, 1428 aa, Streptomyces sp.
LDRAYENFWNPRHPAGFPARRRRGHRLSVPFPGQAVQIRKLNRKWAEVRLPKLGSLRFRLSRAIEGTIRDATVSRDGNGWHISFGVHTGHKPAAPNGKPACGVDFGVAASAFVSTETTPRLMPTSLTVNEKKRLNALEQRKARQIAYAKKHQGGKYSRRLRTTIAHIAKLATRRANRRADFTHKLTTDLAKNHGLIGIEDLRVKKMTASVKGITETPGKNVRQKAGLNRSILDNAPGERRRQLEYKTRMHGSVLVAVPPFHTSQTCAKCGQVDPESRQGCGRLFACTRCGHEDDADHNASVEIEARARRTGGSDINSTRSIPARCGLDPATGGRVVGSGHGEQRERAAAGRPRHRRGNRDRAGDRAGLRGRRGAGGGRRAARRGARRDRRGVSRDPAARSRRERPRRARADRGAGADRARSARRAREQRRDRARRSPRRGGRRRRRRPAGHQPRRPGAAHPGRPAGPGGRRGGGRRQRQHRRGSAGLARRLRLRRHQGRPRHPHPQLGRGARPAGRPGRRGGARRGGHTDRRAPGARPRAGRPGAGLAGGAYPDGAGRAAGGGRLGGVPARGPGRLVPDRGRGPGGRGRGGGLRAWPDADRGTRRGHRDDRPRPAPLRAGGADLLRAGAERLPGLRGAGRRTGPQHPGAPGRGAHPGRRTGVRAVSGRGRGRRAAVGQGAGGGPGAAGRPGGPDRRADGGPGPAAPGVGAGGSDRRRVDDEAVADVARQDALVGGVDVLGADHLDVRAQAVLRAEVQHLLRLGDAADHRPGEGLVAADDGEQVQLHRLLRGAHVHERTADPQQRQVPVQAQRRGHGRQDQVEAALQLLEGGLVARRVVVGGAQPQAVVLLAQRLRQHRHLGAERGGDLHADVAEPAEADDRDLLARARLPVPERRVQGDAGAQQRRGDVEGQAVGDADGVVLVDDEVRGVTAVRGLAVTADGVVGAGHPLDAVLLLPGQAVLALAAGVDHAADADPVADREPRDARADFGDDTGDLVAGDHREDALAPAVAGLVDVGVADAGELDLDQYVVLADRAARDRGALQRGLGGGGGVGGSLGDGHGVLSPRTRTPGGPYRGVLRAGRGVRSATSPTMPFPARPTQPPAEPRTGGPTPDGVRLSPAPGAPAGDTCGMDQLDQRAELGDFLRSCRARLRPADVGLPDHGRRRRVPGLRREELAQLAGVSVAYYTRLEQGHGQNVSAEVLDAIARALRLSGTESAHLNHLASPRTRRSGGRTARPQQVRPALRTLLAAMEGVPAYLVGRRQDVIGWNPLAAAVFGDFGALPPAERNLVRLVFLDPATAELYADWECRACEVVSNLRLYAGQHPDDERLSALVGELSVKNEEFRRLWAAHTVADKTHGVKRLRHPIVGELELVFETLTLPDDPAQCLVTYHAEPGSPSADALRLLSSWTAPPVAPAAPQRPAEEPA

SEQ ID NO: 12610 - protein, 408 aa, unknown
  TnpB Polypeptide
MHYAYRFRLNPTPEQRERLDYHRDTCRQLYNHALNEFERIPESAGTLNQRVRQVRDQLTDLKDWWDDLNDLYSTVAQAAVMRIKDSIKALSGLKQQGYNVGSLNWKAPQEFRSFTYVQSGFEFDRKNGQPVLSLSKLADIPIVKHREILDDVNLKEVTIKKEKTGEWYACFVVDGKETPEKPTDPERCVGIDVGILKYAHDTDGNAIESLDLSNERKRLKRVQRDLSRKEHGSNNWEQQRKIVAQRHTDLKRKRRDFLHKLSNYYATEYDLVAVEDLDAKGLVELPGNSRNRASAAWGTFKQMLEYKCEREGTHFVAVDPKDTTKECASCGVKTEKPLWVREHSCPSCGFKADRDANAAINILDRGLKQLGVGHSEGTPAETALSADTSVSAKRVVETGSPTLKERTA

SEQ ID NO: 12611 - protein, 472 aa, unknown
  TnpB Polypeptide
MISSKTFTIETRLNQRDNAEILEYAKEYNVLYGKMLRFTWHRYNNGGTFNMKKSRFNTILQQTFGVSKRLASSVISEVEGLYKALYQLKRYEYEQLKGRINRKRKKVKKLSEKVYAIQKKAKENGFSKASLPYYRKLKADIFYIHQQINRMEQKRKNLLKEILNKNLHICFGSKKLFYAQFHLKENNFTSHKIWLEHFRRARDNRSLYIGSKDESCCNQILQLAPMVNTSKGNSFVIQLRKNTKTREYVREVCVFKYMGGLLTKSLIKQDHGISYRIIFRRNKCYLQAMVIMDKDSNKCKTRNSYGTIGLDYNNGFIELAETNETGNLVGLKHFNLRFHGTGRKAENEIRETVSEIVHYALFAGKDIVIEDLDFRKTKSETETAKSDKGKNYNKMIHAFDYSRYKKSFETCCFRRDVNLIEVNPAYTSKIAAQKYCKRKKLVIHQGASYVIARRGQGYVDKYIEPKKTNKSA

SEQ ID NO: 12612 - protein, 398 aa, unknown
  TnpB Polypeptide
MRKAYKFRLYPNKQQEVKLFWTLNRCRELYNAALSERKDAYRMAGKSISYYEQKRDLPEIKEIRPEYHDIYSQVLQDVLLRLKRAFDNFFERVKNGQTPGYPRFQGRNRYDSFCYPQAGFTLEEKHITLAKIGTLRVKVHRNVEGTIKTCTIKHEAGHWYVIFSCEREQPEPLPLSYEDVGIDLGITHFAALSDGEFIESPRPYRKAEKKLKKLQEALSRKKRGSHRRKRTVQTVAKAHRKVRNQRRDFAHKASRKLVNRYQVIVLEELQTKNLVRRPKPKQDEETRQYLPNGAAAKGGLNKSISDAGWGMFTDLLQVKAAWAGRVLAFVDPKYTSQLCSNCGVVIPKTLEERWHSCECGCELDRDTNAAKNILKKYAGAGSAPQMNPRGESVEAPPF

SEQ ID NO: 12613 - protein, 485 aa, Bacillus sp.
  misc_feature (272)..(402): Xaa can be any naturally occurring amino acid
MCYGGFNEVRIIMKFLRVSQVSELTGLHPSSLRRMLVEHATIQKNKSFIKRSYILMILAKKVRLIPTPEQEKVLRNHAGAARFAYNYCKRMSDRYYKLFGKSVSQLALQKRFTKIKKRKKYDWLKDINAQVPKQASKDFDTARKHSFKKYKNGSHTSYKSKKDVIQGFYANYERLIIGKKVVHIQSVGKVKTSQQLPRNKKPFNPRVTFDGRHWWISVGFQEDFESQELTNESIGVDVRLKELFVASNGMKERNINKDAKVKKLLKRKKSAXXXXXXXXXXXXXXXXXXXXXXXXXXXXXXXXXXXXXXXXXXXXXXXXXXXXXXXXXXXXXXXXXXXXXXXXXXXXXXXXXXXXXXXXXXXXXXXXXXXXXXXXXXXXXXXXXXXXXXXXXXXXXXXXXXXFQKLNFFFQCLSYKCEKYGIEYVKADKWFASSKICSCCGVKYDHSVQPEGQSSLKIREWCCASCNSHHDRDLNASINLSRWVK

SEQ ID NO: 12614 - protein, 459 aa, unknown
  TnpB Polypeptide
VDKITFASVIGAASRVQMCRWQVVGQLQGWLSNRANEFRDTVTRSTLPPDVKRMLHVVNLRGAWFARGDVVMRDTGETIPPEVRRLARAIMRHVMSRHRRPDLSRISMRLDYRAASLAAPTKATQGGKVGWWVNLATMEKGRKIAVPLLTYDYHARRPGRVTNGVQVNLNREGKLTFGIVTDMGEAFAKSRADYDGHGVLALDFGLSTLFATSEGQLLGQAWLKRLKRYDALISMIAARQQRAGRKPRDSRRYRALVEDVRGFLRTEVGRVLNRLVEQGKPRELALERLDFRHSDLSKRLNAILRNCGRSIIQDKLRDLEKRFGITSTEVNAAYTSQTCSCCGYVDNRNRRDQKTFVCLWCGHRMHADLNAAANIEARRARPNGWLFQGKAAVLAELVREFGERRVRALRLGRTGSRGAPADPRLTNPYFGGMPLAVVRSSERREASVKSPKTQALVAA

SEQ ID NO: 12615 - protein, 374 aa, Bacterium sp.
MLVNKAYKFRIYPNKKQVELINKTIGCARFVFNFFLGKQKDKDAYWYIVEEMVQNGQLQSNNWKGEYLNKYQTVKELPNLKKQYTFLKEVDSIALQKSVENLADSFDRYYKKQNKYPCFKSKKNPVQSYTTKHTNGNIAIEGNYVKLPKLGLVRFAKSREVEGKILNATIRRNPSGKYFVSIGTEVEVSQLPKTNSAIGIDVGLKDFAILSDGTTYSNPKFFRSLEKKLAKAQRIMSRRTIGGSNWYKAKIKVARIHEKITNARKDHLDKISTEIVKNHDIIGMEDLSVSNMLKNHNLAKAISEVSWSQFKTMIEYKAKWYGKQVVTVAKNFPSSQLCSCCGYQHKDVKNLGLREWECPKCRTHHNRVIFVIRG

SEQ ID NO: 12616 - protein, 372 aa, Clostridium sp.
MILGNKVRLYPTKEHEQKLRQSVGTARFIYNWALARQEENYKNGGKFISDNDLRKELTILKNTELKWLNEVSNNIAKQAVKDACNAYKTFFKGIADKPRFKSRRKSKPSFYNDTSKLKVKENTVLIEKVGWINIKKNSIPMNCKYTNPRISFDGKYWFIAVGIEKEQPVMALTDESIGIDVGVKDLAICSNGMTFKNINKTKKVKNLEKKLRRLQRKVSKKYELNKEGSKFAKTSNIIKIEKQIKLLHRKLANIRSNHSHQATNKIVKTKPSRVVMESLNIKGMMKNKHLSKAIAQQCLYEFKRQMKYKCEFNGIEFVEADKWYPSSKLCSCCGIVKKDLKLSDRVYKCECGNIMDRDFQASLNLSRYKLVV

SEQ ID NO: 12617 - protein, 427 aa, Helicobacter sp.
MTISHKIELNPNNKHITHFKKAFGCSRLAYNWGLAKWQEYYRQGIKKTYLDLKKEFNSIKKEQFPFVYEVSKYATQQPFLNLSLAFKKFFSDLKQSKVSYPKFKKKRENEGSYYIGGDQVIIRTKDNSNKTYLKIPNLGLVKMREKLRFNGKINSVTISQKANKFYASFSVEMNENEFNKTHKSSMQTKQGLGIDIGLKSCVCLSNGLSVKAPKPLAKLTRKLKRVSRQLSKKQHPKTKGEALAGIKKSNNYLKQSLKLSKLHRQITNVRSDFLHKLTTSLVRHYAYFGIENLNVSGMLKNHKLAKAISDVSFYEFKKQLQYKSNYYKREVIEVDRFYPSSKTCFNCGSIKENLTLKDRIYICNSCGISLDRDYNASLNLLNYAKNKIGLVQAEFTPEDLTALQCNLAINNIVTSKVETGIQQKSYL

SEQ ID NO: 12618 - protein, 473 aa, Planktothrix sp.
MLVVETKLKNGTPEQYQKLDEAIRTAQFVRNKCVKYWMENKGTTRNNLQKLCAVLAKDSTTPWVNKLNSQARQSSADRAWQAISRFYANCRDSSIRKKGFPKFKKYSRSVEYKTTGYSLSDDRKQITFTDGFKAGTFDLWCSQKNLVYYSSQQIRRVRVVKRADGYYCQFLINYDREEKHEFTGSVVGIDLGLKEFYTDSNGNTVENSRFLRKSERRLKKAQRRLSKRHRKGFRERQPNGQKQSNNYHKQRQKVAKLHLKVSRQRKDRAIKDALALVQSNDLVVYEALKVSNLVKNHKLAKSISDASWYQFTQWVNYFAKIHKITCIAVPPQFTTIDCSVCGAKVYKTLSTRTHQCPDCQTVLDRDWNAAINILKKGLKYLGADLNGTVGQTETDPNDWGESGLWVFNRDVEDLSRLVEPVISRSDSGRIPRRARSLTAGVCQFFILYFHCSFDNISHNNPDLGGNFIKILVK

SEQ ID NO: 12619 - protein, 308 aa, Escherichia sp.
MLRATKIRIYPTPEQAAFLNAQFGAVRFAYNKALHIKKHAYQRHGVNLSPRKDLKPLLSVAKKSRRYAWLKEFDSMALQQAVINLDVAFSNFFNPKLKARFPTFKRKHGKQSSYHCVGIKVQDNAIKIPKLAPIEARLHRELHGKLKSITVTRSATGKYYASILCDDGASAPEKPTYLKEEKITGLDMGLEHYAITSDAVKVPNPRHLINAGRNLRRKQKALSRKQKGSANRKKARIRLAALHERVANARADFQHKLSRAIVDENQAVIVETLKTANMMKNHNLARAIGDAAGTKGGGTRRLCPWRPA

SEQ ID NO: 12620 - protein, 369 aa, unknown
  TnpB Polypeptide
LATGILPHHHWPSEHRRADGVRGGAVACPRPSRRRCRRRSHPTAHKQSKLNDLLETYRDGLQEAFDAGASTMSSVSDIVTPYDLPYQAKAALCNYVPKLRKTYNAQDLDDEHPIRLTNQAAKFDHSEERDYEFTWWVPRPGRGTNFWMPLRINPEQEDLWHDLVSEDAKAGEIRLQQHRKNWVLHVTVEYPVEEPAADGDATHIGLDIGETALITGCALKDGSPTDPFVCSGSRAKHLRKEMHTTLKRLQERDASEWRTDERFDHYQNALTDIVEKASREAVEYAKQFENPVLVMEDLTYIRERLDYGKYEPSASLVGVRPTPRAHRGQGDGSRYSGRVRESGVHLADVPLVPPHRSAGLAGRVPVSER

SEQ ID NO: 12621 - protein, 402 aa, unknown
  TnpB Polypeptide
MKILLKAFKTEIAPSKEQKKKIIRSIGIARFLYNQYIAYNKKLYKMYQRGLLDSRQKHFVTARDFDKYVNHNLKIKLPWIDECGSKARKKALVNAEIAFKRFFDGLAGFPRFKKKSNQGMKLYFPKNNKGDWRIWRHKLMIPTLKQVRLKESGYLPVGAKVINGTVSCKAGRFYVSVVIDIDEKSKYNKDLEASYHITTDGIGIDLGVKDLAIVSNGNTFKNINKSSKVKRLEKRLRREQRRLSRKYEFRKKKGGMTATASANIDKQKLKVQKIHHRIDTIREGYENKVVHEIVKQKPRFITMEDLNVRGMMKNKHLAKVVAAQRFNLILTKLKRKAQIIGIEFRTVDRFYPSSKNCHTCGHTNKGLKLKDRVYICPKCGYTEDRDFNAALNLRDAKEYRVA

SEQ ID NO: 12622 - protein, 387 aa, unknown
  TnpB Polypeptide
MIKAHKIRLHPTSEQATYFEKAAGTARFVWNWGLAEWNRQYEAGEKPTAFKLKKQFNAIRREHFPWTWDVTKNASDQPFFELGKAFTAFVEGKARRPKFKRKKQCRPSFYLANDQLELGDHRIWVPKLGWVNMAENLRFEGRILGARLTKTADWWFVSLQVELPEALPEKKTVAVGIDVGLNRLATLSTGEGVENQAFLKTNLKKLRQANKRLHRRKRGSKNREKARRQVARLHYRITCMRDDVLHKMTTRLANCYGLIGIEDLNLRGLLKNRSLSRSFSDAALGKLCDLLTSKVEQRCGHVIKIGRFFPSSRTCHCCGWKWEGMTLKDRVFLCENPACPYNRFPQDRDHNAAQNILWEALHVIGLSDHVVIGTGSDEDGNLPADAG

SEQ ID NO: 12623 - protein, 543 aa, Salmonella sp.
  misc_feature (345)..(433): Xaa can be any naturally occurring amino acid
MKQQVSFKFRLRPDGQQEREMRRFAGACRFVFNRALALQNENHEAGKKYIPYTKMASWLVEWKKDTETEWLKDSPSQPLQQSLKDLERAYKNFFQNRAAFPRFKKRGQNDAFRYPQGVKLDQENSRIFLPKLGWMRYRNSRQVTGVVKNVTVSQSCGKWYISIQTEREVSTPVHPSVSMVGLDAGVAKLATLSDGTVFEPVNSFQKNQKKLARLQRQLSRKVRFSNNWQKQKRKIQQLHSRIANIRRDYLHKVTTIISKNHAMIVIEDLKVKHMSKSAAGTISQPGRNVRAKSGLNRSILDQGWYEMRRQLEYKQLWHGGQVLAVPPAYTSQRCACCGHTAKENXXXXXXXXXXXXXXXXXXXXXXXXXXXXXXXXXXXXXXXXXXXXXXXXXXXXXXXXXXXXXXXXXXXXXXXXXXXXXXXXXXXXXXXXXFNVGGYPCRRVLFNLVQVDVCANILTQILQGTDKCIGALIDEFISQEISNQFWHTIMFRRLFFLATTTAGRAVPHLLHDLVNFIADIQQLHATRGRRFGHQSIQLIAEIH

SEQ ID NO: 12624 - protein, 426 aa, Salinigranum sp.
MAKKVVTRTYTASIRNKPQVQDDLDALGFAASKLWNVGRWVCDRVWSEIGHIPGHNELTAYLKSHERYDDLHSQSSQRVLQELAEAFNGWYGKRRNGDKKANPPKYRKHNDLHPRSTVTFKQKGFKLDTEYNRVRLSKGANLKDYWSDFILCEYQTRPDIDLSTVESVQQVRIVWTGDEWELHFVCKVEIGVSEVPSEKTVGIDLGISNFAALAYESGHAELYPLHCLKQDDYYFSKRIAKCNDSDSAKANRWNQKKSARRTHYLHTLSKHIVRRCLDEKVGTIVVGDLSGIRLDTGNGGPKHWGPHGNLTLHSWAFDRFTELLTYKAEAEGIAVKQVSERDTSASCSCCGRKRKANRVERGLYVCDECGTTANADVNGAENIRQKVSPSSPSLSVDRSNGWLAQPSTYLFDQESGCFAPREQATS

SEQ ID NO: 12625 - protein, 387 aa, unknown
  TnpB Polypeptide
LKDCFLFKSFSYRLYPSKSQRSRLEAVKETCRHFWNDCLRERKDAYELRGETITKAMQLRKVKVEKDTSPYAEGIHSHVLQVVVADLDKAFQAFFRRLKAGQNPGYPRFKGRHRFHGFGLKELNNGFKIDRRRLKLTGIGRIAVRWHREIQGKIKTCRITCKANKWYVSFACEVEKPEPLPKTGVEVGVDVGLMRLATLSNGEKVENPRWYRRIAKHLRVIQRKVSRRKLGGANRRKAVLHLQRLMVKLANSRKDFLEKLSTDWIRRFDRIALETLNVAGMVHGRFAKSILDAGWSYLATRLTHKAENAGREIVFVVAAYTSQDCRECGMRHSLSLKDRWFSCGCGNGRDRDENAAINILNRSNGPGHGLRASSSALAGLVREAAGL

SEQ ID NO: 12626 - protein, 393 aa, Clostridium sp.
MIFGYNNVIDIKSEVINTMIKALNIRLYPTEDQVHLMYKHIGCMRFVYNWALARQIENYKGNNKKLSVSELGKELTLLKNTEGYEWLYEVSNATLKESIRDLDKAYKSFFNGSGFPKFKSKKKSKPKFYSRYDKVYFKEDFVNLEKIGKVKCRVDYDMDLTTIKKFSNPRIYFNSRVWVLLVGIETPVEKTKLNDFSLGIDLGIMQLAITNIDDLYVKNINKTYTVKKLNKKLKRLQRQCSRKYEENRKGGGYQKTKNIAKLEKKIKKLHSRIKNIRLNHIHQSTSKMVKTKPFRVVMEDLKVSNMMQNRHLSKAIAEQGFDIFINKMKYKCQQYGIEFIQVPTFYPSSKTCSNCGCIKKDLKISDRIYKCSCGFICDRDKNASYNLANYGLV

SEQ ID NO: 12627 - protein, 398 aa, unknown
  TnpB Polypeptide
MKLVEKHKIYKSHPSYSKLNEMSRKANNLYNQCMYFAKHSDNLLEDLKNLDKAMKSFPDEHDNYRSFGHAKSAQQVLRLFQQNLRSYFAAIDDYKKNPTKYTGRPCFPKFRKSGERFQVIFTNQSAKLDDRVVNIAPRAFENKLFINLRTRSAKKLCQVVFAPRNGYFLVYVIYEVDDPTISQHSSKVAAIDIGLSNLATVTFSEENEPILYRSDLTKITHDFNRITSNYASILKKTQNKDTSKRRKRYSEKYSGLVEDRLHKISRAIINDLSHRGVSTVIVGKNTGQKIGNKLKNFVQVPLFRLIEMIKYKAELAGITFIQVNESYTSGTSFLDNELPTKEYYDKSRRKYRGLFLSNNSKRINADVNASFQIMKKIYAELACNDSIRYANPIVKTIC

SEQ ID NO: 12628 - protein, 445 aa, unknown
  TnpB Polypeptide
MLWQITLIIKEKSLKINCGYKYRIYPTKEQIKLLNHYFFVSNQAYNVCLDYQKETWERNRELPKKDRTYPKAAEIDAVVKNALNNRGISYKTVIIQQARIHAGEALMRAITKKEFGFPKFKNSKLDSQSFSWNNQACTLIDKDNTKFKTLKFMKQEFRLRYHRDLPEKYKLCGLTISRKAGRYYASFNIEYEKDVVLISKDNLDIKRAVGIDINVENIAFSNGFKLMTKSKLIAKTKYDKKIKRLKGKQSRRILRSKSTKTPLGKNFKKCQKKVSRIYDRASSIKRDSLHKISNAIVNNFDAIAVEDLAVKDMTVKKQEGITTRQAKAYNRVVRDASFYCLLSFIEYKAQRNGKILIKIDPAYTSKTCHRCDHINYNFTVNNRIFNCPSCGLIMDRDDQSSINIHNIGMKSLGLGISLQTINVKPFKIVKLSSLQLGSSCLFRCE

SEQ ID NO: 12629 - protein, 383 aa, Nocardia sp.
VQLRYQYRAYPTPGQQESLARAFGCARVVFNDALAARRAAFEAKRPYISNGELSKRLTAAKATPEREWLGEVSAVVLQQALADLNTAYRNFFQSVTGKRKGPKVAAPRFRSRKDNRQSVRFTRNARFAITEGRKLRLPKIGDVKIAWSRELPSDPSSVTVIKDAAGRYFVSFVVEVDASPLPVVDAEVGIDLGLTTFAVLSDGKRIESPRFLRQAERKLRRAQRSLSRKQKGSANRAKARVKVAAAHAKVADIRRDWAHKQSTAIVRENQAIYVEDLCVKGLVRTRLAKSVHDAGWAIFTNMLEEKAARRGRHFAKVDRFFPSSQICSPCGHRDGPKPLHVRMWTCPACGAVLDRDLNASNNILAAGRAERLNACGETVSPAA

SEQ ID NO: 12630 - protein, 260 aa, Cyanobacteria sp.
IVRKASGYFVQLTLECDISVPDIMPDGHPVGIDLGLDKFVATSDGDVIDRPRFLNSLHRKLKLLQRRLKHKKKGSNNRHQLNRKIARLHQRISDTRKDWHFKLAHKLCDGAGMIFVEDIDFRVWAKGMFSKHTLDAGFGQFLSILKFVCGKRGVYFDKVDKNYTSQVCPQCDAYTGKKELKDRVHVCPECGYTTHRDVAAAQIVRNRGLSGVGRILDNKEIACGDGLAGTGNRLVKNPRSRKKGGEVRIYPAFLRNATRT

SEQ ID NO: 12631 - protein, 210 aa, Mycobacterium sp.
MTPSFPRTGVSGHAGAVQKGSRRYCERTTELSRLHRRVNDVRTHHLHVLTTRLAKTHGRIVVEGLDAAGMLRQKGLPGARARRRALSDAALATPRRHLSYKTGWYGSSLVVADRWFPSSKTCHACRHVQDIGWDEKWQCDGCSITHQRDDNAAINLARYEEPPSVVGPVGAAVKRGADRKTGPGPAGGREARKATGHPAGEQPRDGVQVK

SEQ ID NO: 12632 - protein, 382 aa, unknown
  TnpB Polypeptide
VIQSKDILPNKKQGGEIIQITVKIKLLLNKNQSELLSETMKTYINLVNRIVSDYVSADSNLKYTSKDVFADLPSAVKNQAIRDATSVFVKYKKNIRANARLEPEKQKEVKVPILKKPVAIWNNQNYSLKDDILSCPIIIEGKSKRMELSTILTKYQQDRLVGKFGSLRITYSSGKYIAQIAVDIPVPEVNTGNTMGVDLGLKIPAVAVLENGKTRFFGNGRQNKYLKRKHRSVRRKLGKLKKLAAIRKRHHKEQRWMKDQDHKVSRKIVNFAQENNVAVIRMEQLSGIRQTARTSRKNEKNLHSWSFYRLAQYIEYKATLLGVRVEYVNPKHTSQKCPICGKLNKAKDRKYQCGCGYKTHRDRLGAMNIISATVIDGNSLSA

SEQ ID NO: 12633 - protein, 412 aa, unknown
  TnpB Polypeptide
MLLCKKIKTEVSDQGAEALEFMQEKSRGLYNWWVMRLRNGERWNLERAKKSLRESKQYDPELRHVYGKLLAEVYFRLDKAMQAFFQRLAEGEKKPGFPRVKPRHQFFTLCYPAVYLEVQGRTITLPTGGGGNWGPKRYPNIVAHLTEDPPAHFHEVAVSRDARGNYYCSFVYDDAVQENHDDEHKPGKRRKQRKRRPIREDGIAAFDLGIKTLATGFNDQGRFYHIGGFKGYRWYNKQLDKIRSKRDKCKKKSRRYIHLSKVYKRVSERKRRKQHDCLHKASHLIAGKLAERAVVIGDLSQRQMVIPKQEHETRQERNKRRIRNRLVYNDWGLYGFVQMLTYKCLRFGKELYIISERDTTKMCHVCKHKQDMPLWKRTYRCEHENCGLVMDRDENSAVNLYQRFVAGLPPHR

SEQ ID NO: 12634 - protein, 276 aa, unknown
  TnpB Polypeptide
MQIISSYGVELRKQNIPIRQTLEIYRSAVSYLIGIYVQVWEELAEIPDAKRRFNAAEHLVHTTKKNHACFDFDIRFPKMPSYLRRSAIQHALGTVSSYKTRLDLWEKTDGKSGKPKLVYENHAMPVFYRDVMYREGAEGKDEAYLKLYDGHDWKWSCVRLDHTDMEYLRKCWSGKKASAPTLEKRHRKYFLRFSYKEEVTLTKTPVKEQIICSVDLGINTDAVCTIMRADGTVLGRRFIDHPVKKTGYTAHWDGSADSRGNMALRRHREDGHIRNV

SEQ ID NO: 12635 - protein, 281 aa, unknown
  TnpB Polypeptide
MEETYQIHENFLYLENKIFRGMDQIKQLRIYPPEKGSCKIIVVYEVPDQEELPQNGHELSVDLGLHNLMTCYDSGNGKTFILGRKYLELERYFHKEIARVQAQWYGQQSGKGVKHPVTSKHIRKLYKRKQDSVTDYLHKITRYLAEYCREQGITCVVAGDIRNIRREKDLGHRTNQKFHSLPYNRIYIMLEYKLKRYGIRFTKQEESYTSQCSPLSPEVGKRYAEPSKRKERGLYRDGNKTYNADAVGAYNILRKYHSVSGVKRELSVTGLKTPEIIKVAV

SEQ ID NO: 12636 - protein, 390 aa, unknown
  TnpB Polypeptide
MIKVIKVRLKPNNKQLTKLFQYAGCARFAYNWAVAREEENYKQGNKFLTDNELRKEFTQLKKQEEYKWLNEVSCNVTKQAIKDVCNNYKRFFKGQCKYPKFKSKKHSTPSFYQDNVKIRFTDTHVKVEGFAKSKKQNKQQLNWIKLCEKGRIPTNCKYMNPRFTYDGLYWYVSVGIEIDDNTNLSLNDGIGIDLGIKNLAICSDGNTYKNINKMQRVKKLERRKRRLQRSISRRYEKNKKGKNYCKTSNIIKREKELLKVTKRLTNIRHNYLHQITSEIIKRKPSFICMEDLNVSGMMKNRHLSKAVQQQGFYEFRRQIEYKSGWSNIPVIIADRFFPSSKLCSCCGVIKKDLKLSDRTYKCECGNIIDRDFQASLNLKVYGENVLKNNL

SEQ ID NO: 12637 - protein, 423 aa, unknown
  TnpB Polypeptide
MIQTTIVTNCLLYKDKNESLYRYFDEITPKFSFLVRRTYHHLSKDLNGEEFLKYRTRLKNDYGLTNRFAKAVVLTAKNLLKLLVASNEYLYSTYDKKLERVEIKILKVKAILNNSKIDKRRRKRLKTKLFWLEMKKNRLKQLKDNGPRRLVTLGSKSLLHKDKERFIKKRDNQIVYIGDKSENLGNQQFKLFYDVKHNKFTYKIRLEDQYIKGSKYIYGEFIMHDKNAKKEVLRTLNTPKSNPLSFRLIKQGDILHLQIMYRICTELKTRNSNGVIGVDFNKGFIAISEIDEKGKLLNVDRIKYIHKGKVGVTKNSMLHLVKDLVDLAVISGKDIVIEDLKSLNKNKQEKTERKQYNRMINTLKFGKFRDLLQMKCDKCGVTLVTVNPYNTSKIAKEKYCYDMKLNIHSGASYVIARRFYNLD

SEQ ID NO: 12638 - protein, 407 aa, unknown
  TnpB Polypeptide
MKIHKSHKIRLYPNDVQKTYFKKACGVSRFAYNWALSRSIETYEKEGKSLSGYDLSKRFNAIKHVEYPWVTEITKWASQKALYNLHAAYKNFFKNIKQGKKLGYPKFKKKNFSKESFYLGLNCVKLKDNRIKIPKLGWVKMAQRLRFTQCKIMSATISCTAGMWFVSITVEQHVPNVKPASSFPIVGVDVGIKSLAVTSDGKVYNNPKALLRNERKLKRLQRLVSRKQKGSSSRKKAVSKLSKHHYKISCIRKDSIHKATTAITKSSSVIVIEDLSLRSMLKNRKLSRLLSDASLSEFHRQIVYKSYWNGVEVIKADRYFPSSKTCSVCGNIKNDLILSDRIYICNHCGAVIDRDINAAINLKQLAVRYTESINACGERGSGFNCSNATKTKPFSLKQEKGNCVGAV

SEQ ID NO: 12639 - protein, 553 aa, unknown
  TnpB Polypeptide
MTAALKASAAAGAAGSRRKLAATTRKKRTKPAPKPAVVRAYRVQHHGNARKVAAVAAVLRPYQDTMGSSQSGQWRAWLSGERFWNRRDPAGVDSVLSERFKRSAQNQVVAALDSWLALAQDAVSGLIRSSSLPGELKADLHWLNRSAAHHRTPQTASVPVWVYTDGVRSDSGERKPADAQTLRLLQNMLRHTRRHLVSVPNLRRVRTMTLDGTVAQVEHSQPKMGPQPSPRPRGRGSMFPLWLRVSTTEAGQVMRLPLASNHFFDQADGELSNFAQVTVTRDQHVKITLTKRTHPAAARDAGMDVALDWGMRSLLATQFGDQLGTRLYPWLTAVDAQLTALTKDLQRQGIKPGSNRRYRNMQRRIGEHVRNEVGRIINRLLEVHDVRSFTVEKLDFRGGGLSRRMNRILTRAGRGAVSKKLNSIGETHGITTVEVNPAHTSRECAGCHYVDPKSRQGPRFRCRFCGKRSHADTNGARVISHRRSVGAADALSSKGTVLRRADARFEAAWGLRPGSAEKLRRRPKERPASPTPKNRRAKPASARAGEETNSRSS

SEQ ID NO: 12640 - protein, 489 aa, Eubacterium sp.
MVKEKEPDDKNYRVFRCIIKPTHTFYEPFLLVTHLAKNLYNIGMFYIRNAYSGAIKSPQDRFLNEANVINDLNGVIDQLNEIRLYDKKTKQKKKKPGKMFSKINEENRFVSYELLDGLFKVMNQVDYRALHSHVAQQVLRMLMRDWDSFFKILKKYRNDPTSLKAAPHIPNYADKNGYKTATFTNLSCDIRKDKKGGYVQFPKIVKKHGFPSDRFYIGKLDMMDKDFKQIRLVPEEDHIVMEIVYEIKAVEDTVDVETTERIAGIDIGVNNLASIAFTTGHQPVIVKGRKAKSVNQRYNKVMAHLQSEHLKGKKQETHIRTKRMKRETRRRNNQMDDFMHKKLRKIVDTCMEENVEVIVIGNNKDWKQNINLGKKNNQNFVQMPFQKFIKMIKYKAEAAGIKVMITEESYTSKASSIDEDQIPCYGEEEKEYTFSGKRIKRGLYRSKEGILINADINGASNIIRKVYPCKPKLKERWYRGTVNVPVMCI

SEQ ID NO: 12641 - protein, 342 aa, Eubacterium sp.
MYLTIKTNLKITPWAMDVIQRYGIIYHKEFERLIHLYQQAGKIIFIGYREINSEIAFHSKEQLIRLAQTFYEIRKKHATAQYHRLFVLSARSFQLKDDEVLMEFGRGFMKYPLRCTILLNDHQKQMLRQHEVLRMDVCKENKYYVVRFILKTESILSQHTQENEISMGIDLGMKCPAVCYTSDGKIKFVGNGRQMKYEFRRINLRYRKLQKSNNPVKLKNYGHKLHNYKKHIDHCISKDIVMYAKQQNVTVIRLEKLLNLQQKFHRHDMICWSYQRLANYIEYKANLEGIRVEYVNPYLTTKRCPKCGKINNVKGRDYICNCGFHKHRDLVGAMNILHAPKA

SEQ ID NO: 12642 - protein, 415 aa, Lachnospiraceae sp.
  misc_feature (303)..(387): Xaa can be any naturally occurring amino acid
MVKAIKVMLIPNNVQQTKLFQYAGASRFAYNWALAREKENYEKGGRFIPDTELRKEFTRLRNSDEYAWLLNVSNNVTKQAIKDACSAYKNFFKGLQRYPRFKAKKKSMPKFYQDNIKIQFRDTHVKFEGFSFSRKANKQKLNWVKLAEHGRIPTDAKYRNPRVSFDGLNWWISVCVEFPDCRDRSNHDGIGIDLGIKDLAICSDGNTYKNINKSQTVKKLEKCKRRLQRSVSRKYEHNKKGGSYCKTNNIVKKEKLLLKVNHRLANIRKDYLNQTTSEIVNRKPRFICIEDLNVSGMIKNRHXXXXXXXXXXXXXXXXXXXXXXXXXXXXXXXXXXXXXXXXXXXXXXXXXXXXXXXXXXXXXXXXXXXXXXXXXXXXXXXXXXXXXYKCECGNVIDRDFQASLNLKAYGEQFAS

SEQ ID NO: 12643 - protein, 442 aa, unknown
  TnpB Polypeptide
MILTENHRIKRNKNKELFKKIDAYCYSSKNLSNSVQYLICQCYRIHQKFKNREALEPWEQEMVDGINDAITDYNAGRDEKKKLKHISADNGFITDAYFLSWHLKTHEVYKAMPYATCSQICIQEKCRQWKSFYQAKKEYLRNPDKFLGAPRKPGYLDSGKGREAIVITSQNFSVAEDGRIRMPGFLKEIEIKAKHSSVRQIRIRTDRNGIRIMLMYEQESEKIKADGNIMGIDLGVDNLITAGLSSGTPIILNGRPLKSINRYYNKRKAILQEAAKKSNRLDNTNRMERVTEKRNNKVKDYLHKASRKIIELAKSNNVCHIIIGNNKGWKQKVELGKRTNQTFVSIPYRMLIDMICYKAQLEGIRVSVVRESYTSGTSYLDGEKPEKILYDATRRIKRGMFKSNRGILINADVNAAYQIIKAGGYQELPIKEKEKVIRLNVA

SEQ ID NO: 12644 - protein, 292 aa, unknown
  TnpB Polypeptide
MARKKGFKYRFYPTEEQEAVLAQVFGHTRYVWNWALEIRTDAYYEEGESLSYTDTSRRLTNLKKEKTWLCDVSSVALQQKLRDLDQAFQNFFDGRCGYPNFKSKHDKQAARLASNAFTLHGKELSVAKVPGSLNVRWSRDLPDEAKPTSVALTKDPADRYFVSITCTMPDAEPKPTVTDEDDNQKSVGIDLGVADVVVTSDGFKSGNPKYLEDDLYRLRKAQRRLSRKEKGSRNWKKQKKRVARIHAEIKDKREDFLHKLSRKIVDENQVIALESLSARGNATEQKSGAVDQ

SEQ ID NO: 12645 - protein, 459 aa, Verrucosispora sp.
VKAVQAYRFALDLTPGQERAVLAHAGAARVAHNWALARVKAVMDQRVAERSYGVADELLTPSVGWSLPALRKAWNAAKGEVAPWWRECSKEAFNTGLDALARGLKNWSDSRTGKREGRPVGFPRFKSRRRTIPSVRFTTGAIHVEPDRKHVVLPRLGRLKLHESARKLARRLDNGTARIMSATVRLDGGRWHVSFCVEVDRAQQRPARSGSVVGVDIGITHLAVLSTGELVDNPRHLGAAQTRLRRLGRAVSRKIGPDRRTGQRPSQRWVRASARLGRAHARVSNLRRDGLHKLTTRLAREHGTIVVEDLHVAGMLRNRRLARHIADAGFAEVRRQLAYKTEWNGGRLVTADRWFPSSKTCSGCGAVKAKLALSERTYTCTTCGLILDRDLNAARNLAALAAQVDSAGSGPVAGRGADRKTRPGGLVAEKRQPGTAPADQTGTVPPQGRTTNHALVRAH

SEQ ID NO: 12646 - protein, 311 aa, unknown
  TnpB Polypeptide
LKQEPDKTWLGDVSNIVLQQSLKHLSQAFQNFFSGRGRYPSFKSKHERQAVTLMRHGFRVKDGQLFLARFDGPVQVRWSRALPSAPSQAVVSRDSAGRYFVSFLCEEAVAPLPQVEAVKAIDLGLQSYIVDQHGEKLSPPKFLVKLLDRVKRAAQALSRKVKGSKNRAKARRRLARLHARVGDARQNFTHQLSASLIRENQAVFAEQLNIKGLIRTRLARSISDAAWGELLRQLAYKASWYGRTFWQAPKNFASSKLCHACGAKNAELTLSQRRWRCVCGVEHDRDTNAARNLLLAGLAATQFGTAGLAGR

SEQ ID NO: 12647 - protein, 345 aa, unknown
  TnpB Polypeptide
MLIYEYKLDGNQQQYAAIEEAIRIVQFIRNKCLRKWMDGYSVTKNDLQCYCAVLAQNYSFAACLNSQARQTSADRAWAAISRFYKNCKEKKPGKKGYPRFQHNNRSVEYKTTGWKIEPDGKHITFTDGCGIGTLRLVGNKKQSVETFPVKQIKRVRIVQRADGYYAQFVVQAQRRVEHTPTGKPVGIDLGLKVYSADSDGNTLENPRYYRKAEKRLKRLHRHLSKKQKGSANRRRVRKQLAKAYLKVQRQREDFARKQANALVSSSDFIAYEDLKIRNMVRNRHLSKSISDASWGTFLQWVNYYGTVHDIPVIAVPHSGLFRLWDTRQKEALSTYPHLSCMWPDH

SEQ ID NO: 12648 - protein, 435 aa, Anabaena sp.
MQLVERHIIQRNHPHYQEIDQLCFAAKNLYNYANFHIRQSFIFAQKYLDYNCLAKQLKSTEPYLALPAKVAQQVLLGIHRNWLSFFAAIKAYTEDKSKFLGRPKLPKYKHKEKGRHLLVYTAQAVSKPKMKAGLIHLSQTQTHIPTKVDYRNLNQVRIVPKIDHYVVEVVYEKEEIDNCLDPNSIAAIDLGIDNLATLTSNQPGFLPVLVSGRIVKSINRYYNHRKANLQSLLPAHQKTSKRLQSLTRKRNFRVDDYLHKASRLIIDHLVKCGIGTLVIGQNLFWKQNANLGSRNNQNFVCIPHSRFVQQLSYKAKLVGIKVLVSEESYTSVASFLDQDPVPTYGEAASKEVNTSTTLSVKFSGRRIRTKLYQAGNGLLIHADVNGSLNILRKVVPTAFSLGIGEPLRWAGFPTCSKWRGVVFRPVGVIPGKQMA

SEQ ID NO: 12649 - protein, 402 aa, Escherichia sp.
VKRLQAFKFQLRPGGQQECEMRRFAGACRFVFNRALARQNENHEAGNKYIPYGKMASWLVEWKNATETQWLKDSPSQPLQQSLKDLERAYKNFFRKRAAFPRFKKRGQNDAFRYPQGVKLDQENSRIFLPKLGWMRYRNSRQVTGVVKNVTVSQSCGKWYISIQTESEVSTPVHPSASMVGLDAGVAKLATLSDGTVFEPVNSFQKNQKKLARLQRQLSRKVKFSNNWQKQKRKIQRLHSCIANIRRDYLHKVTTAVSKNHAMIVIEDLKVSNMSKSAAGTVSQPGRNVRAKSGLNRSILDQGWYEMRRQLAYKQIWRGGQVLAVPPAYTSQRCAYCGHTAKENRLSQSKFRCQVCGYTANADVNGARNILAAGHAVLACGEMVQSGRPLKQEPTEMIQATA

SEQ ID NO: 12650 - protein, 384 aa, unknown
  TnpB Polypeptide
MKVVATAKVKLAEVSEVLNDTMRVYAQAVQFCIDTAWRHHITSKAQLQQWCYAEVKERFGLQAQLVINALTQAVEMVKKAQSKPEVSPELSIRYNFPRCASISKDWTRLSLSTIKGRVKFNILIPEVFEPYLESKLGESTLIKDYKGRFFFCFTFSKRIDIQPNTSNHCKIRGVDLGVNTLAVTSDGNFFGSIKQQRILWERLVAELQSKGTRAARRKLQRASGTWKRFMTWVNHNVSKRIVEPLFEGDVLVMEDLSYIRQTAKYNRWVHKWAFRELQRFIEYKATLKGVRVVYVRPHYTSQECSRCHTRNTRRHRGFFECFTCGYTLNSDLNGARNIAQRYRRIIGLGFSKHAHDLAYDDVETLLLHRRGLRPSTAISLTSLA

SEQ ID NO: 12651 - protein, 297 aa, Okeania sp.
MVKTRGNYQLSINELSFCYPQINQDCIEGNKINLPKIGKVKFIQHRPIPEGFQIKTVTISRKADGYYVTLSLEYKSIPQFTSDIKPTSENTLGIDMGLKDFLVTSNGESVPIPQYYRSSQKRLKTLQKRLSRKKKGSKRQLKAVKAVAKQHKKVADKRKDFHFKTANELLSKAEVIAHENLNIKGLAKTRLSKSINDAGWGQFLSILTVKAGNAGQKTIAVNPKNTSQDCSNCGEKVPKELDIRTHSCPHCGIVIDRDLNAAINIKNRAVGHSVLKARGARRDTGARKREVHTIASA

SEQ ID NO: 12652 - protein, 391 aa, Crocosphaera sp.
MKERAYKFRFYPTTDQENLLRRTMGCVRLVYNKALGLRTKGWYERQERIGYSQTSSLLTEWKKEEDLDFLNEVSCVPLQQCLRHLQTAFTNFWAKRAKYPNFKKKRNGGSAEFTKSAFKWRDGKLFLAKCKEPLNIVWSRFLPQDSTPSTVTIKLDPSGRWFVSILVKDPTVKPLPKTDKKVGIDVGITSLITTSNGEKVGNPKQFNRLYKKLRRKQKALSRKTKGSNNRYKASLEVAKVHAQIKDARKDLLHKLTTKLVRDNDLIAIEDLAIRNMLKNHKLARSISDASWGEFNRQLEYKCEWYGKELVKIDRYFPSSKRCGNCGYIVDKLPLNIREWECPECGTNHDRDINASQNILAAGLAVSVCGASIRPEESKSRKATALKQKSKS

SEQ ID NO: 12653 - protein, 442 aa, unknown
  TnpB Polypeptide
MKIISSYGVELRKQNIPICQTLEIYRSAVRYLVEVYESVWEELVKIEESKKRFNAAEHLVHTTKRNPARFDFDFCFPKMPSYFRRAAVQHALGSVSSYRTRLEQWKAEGQKTGKPYLKSEQYAMPVFYHDVMYRENTEEKDAAFLKLYDGHDWKWFAVRLKHTDMEYLRKHWSGKKASAPTLEKKHDKYFLRFTYAEEVSLNRTPVKEQTICSVDLGINTDAVCTIMRPDGTILGRKFIDFPSEKDRMYRVLGRISRFQRKHGSAQVKSRWAYAKRLNTELGRKIAGAVTGYAEENHVDVIVFEYLEIKGKISGRKKQKLHLWRKRDIQKRCEHQAHRRGMRISRICAWNTSRLAYDGSGTVVRDPGNHSLCTFQNGKRYNCDLSASYNIGARYFIRELLKPLPATERSLLEAKVPSVKRRISCVYADLRELFSEMELLRAA

SEQ ID NO: 12654 - protein, 400 aa, Streptomyces sp.
VKIVVQVRLMPTPEVVSALESTLRACNEAANWLSGEAYERGEMSRKALQGFAYRDLKDRGLAAQPALHVLRKVADAYTTLKASIRNGNLGRPGSERRRKAESKPVGFRPGAAQPYDDRCLSWQADAQTVSIWTTSGRLRGVRFACSEQSRKILAEHRKGETDLVHRDGMWFLIATCEVPEAARFEPDGFIGVDLGITNIATTSTGYRAAGRGLNRYRKRQLALRAKLQKKRTKSAKRRLKERSRREQRHVRNTNHIISKKIVTEAERTSRGIALEDLGGIRQRARLRKPQRVTFHAWAFAQLGRFLEYKARRAGVPLVYVDPAFTSQECAECHHIEKANRVDQARFVCRGCGVVAHADRNASRAIAHRGENAWTAGRESRVPAAGPPAERLSRGRPPHSQ

SEQ ID NO: 12655 - protein, 408 aa, unknown
  TnpB Polypeptide
MSDLTKTIKLRINVSKEQEMLFRQMTEQYRQACNFVSKHIFDNQFNLAYQSLNKELYSDLRGRFGLKSQLAQSSIKTAVARYKTVKRQLVQNPYKYKDEKGSWKYIPKTLEWLWKPVFFSRPQADLVRNRDYSFVDDGQTLSINTLGKRIKCTFEGKHFTEYLDGSWNLGTAKLVEFKGLWYLHIPVTKAVEDFQKGNVRHVVGIDRGLRFLTVSYDEQGKTEFISGRKIATKRHKFQEVRRQLQSKGTKSAKRRLKAISGRENRWMSDVNHQISKTLVQKYGKDTLFVLEDLTGVSFEESNLSRTARQKYDLRSWSFYPLEQFLTYKAHENCSEVLKVSARYTSQRCPKCGTIHKGNRDHHEHMYSCQCGYKSNDDRIGAMNIQLLGTMWISGDNNPRYERITTASE

SEQ ID NO: 12656 - protein, 362 aa, Bacillus sp.
VKLVPQTITVKVKLLPTKQQIMLLEQSSQEYIKVINALVSEMVESKKSTKKSTKDIEANIPSAVKNQAIKDAKSVFSTKVKKSKYKIVPILKRPVCVWNNQNYSFDFTHISIPFMVNGKSTRLKVRALLIDKYNRNFELLKHKLGTLRITKKSAKWIAQISVTIPTNEKTGTKILGVDLGLKVPAVAITDDDKVRFFGNGRQNKFMKRKFRSVRKKLGEAKKLNALRQLDDKEQRWMQDQDHKVSRVIVDFATDNNISVIRLEQLTNIRQTARTSRKNEKNLHTWSFHRLAQFIEYKATLVGIKVEYVNPSYTSQTCPKCSEKNKAQDRKYKCQCGFEKHRDIVGAMNIRYATVVGGNSQSA

SEQ ID NO: 12657 - protein, 400 aa, Methanomicrobia sp.
MIVHKCRLYPTAEQEEKLLFVLEQCRWLYNRLLEEVNKAMEEGRKINQRDTQALIVLLKEERPELKEVNSKVLQMVNHRLWSNMRALHELKKRGKKVGKLRYKKYGKYKSFVLNQSGFRIIKTGKRLDRLYISKVEEVPIRIHRPIEGKIKQVIVKRYSSGEWYAFICVEEACERKQEREKRNEVRAVGIDLGVRNFLTDSDGREVENPRFYERELERLRVEHRKLSRKKKGSKNWEKQLRRLCKVYERIERKRNDFLHKLSRFYVDNYDLIVVEDLEIENMKRNHNLSSEISDASWGKFLCYLSYKAERAGKTVVKVPPRGTSRGLSMDDPLRDYISARRILKKGLEKLGLGRPSEPAERRPLLRITAFAVITGQVASVKQEPPLTAGCPSVRRGGHKV

SEQ ID NO: 12658 - protein, 668 aa, Streptomyces sp.
MRTAQPQRKFRGKNKAPKWTKPDDGTVSVMVLPLAVTDPADLARVEKPFGAMGSMKRAVQRDARARVDAYWSAFHERNEQGAKAVRQRLGLSREALERSAYKHLEGSGHLKHHASKALAMHMADEVWNGVQRHLFADATGKRFGRPKTGRWHDFTRIPGRARSHTTVNKWETFRLVGSLRGHVMAYTDDGRHELMQPRRMPKPTLPDAKVPTGKTTTSGKPATRKATWWDHTGPLTVVFAGGPGSSRGDLVLPVRIPQQPGQWSRVEHFLANPGRWHKVDLVRRRKASAPGGWVYEAHLMILGPGYTSPAVRQMRQQAAGLDRIGGVDGNVSNLSIVSFPAGLDPKDGPPASSEIVLTDEEKTRLEKAAKKNRGRARALERSRRATNTAQYGLSKKQQARAARRTTKGLPEKQVTTPGGTRAARPDGVPKQAYRRDRLSAGYREQRARQAETSASAAEHRRHRARTVARQIIAAHGPLLVVEDCDIRTWYRLWGKRLSRTTPGMLISALDRECQAAGGRLVRASTWSTALSQHCLCGERVNKTLRDREHKCVACGLTGKRDLVSAALAAFVRLTDVDDPRTAYLDTAASRHAQITYAEALEEALAESTTPRQNTPRGAGRVAVPRQRGTSAHRTAGTRDRATPDETPQGDHAGAPEPRTACSPQLTLR

SEQ ID NO: 12659 - protein, 370 aa, unknown
  TnpB Polypeptide
MKLTAKVKLQPTHEQFNALKQTLETANAACNYISEQAWENKRFSRVPLHKLIYYVVREQFNLTAQVVVRCISKVVDSYKVDRKTKRTFKPHGAIAFDSRILRWYVDLYEVSIWTIEGRQRIPYVCGKRQKELLQGQRGESDLALINGDFYLLATCEVETPEPQDIHDVLGCDLGIVNLAVDSDGEQFSGEAVDDNRRKFEHRRKNLQKKQTKSAKRKLKKISGKQARFQSNTNHAISKRLVTKAQDTGRAIALEALKGIRNRTTFRRKQRSKHANWSFYQLQSYIAYKAELAGIPVIFVDPRYTSQTCPICGCVDKTNRPNQSTFSCVRCSYSANADATAAINIARAACKPANGLDPSGQGQMLPASAGT

SEQ ID NO: 12660 - protein, 449 aa, Pandoraea sp.
MGAPLPLPAKQDSDHSASPKSEKTPCLPGRISLWAVIAQRMIEAMKRLQVFKYALMPNGEQARDMRRFAGSCRYVFNKALAMQKANHEAGHKFIGYVAMAKHLTGWRNGPDTPWLKQAPCHPLQHALKDLEKAYKNFFAKRADFPRFKRKGSGDAFRYPDPKQIKLDQANNRLFLPKLGWLRYRNSREVLGELRNVTVSQSGGKWFVSIQTQREIEQALPTTRTAIGIDVGIARFATLSDASFIAPLNSFRKHQQRLARYQRRMSRKVKFSNNWKTAKARVQRIYTRIANARKDFLHKTTTTISQNHALVCIEDLQVRKLSRSSRGNSEQHGKRVRWKSGLNRAMLDQGWGEFRRQLDYKMLWNGGMLLAVPPHHTSQTCPCCGHIAKDNRQTQAQFQCVDCGYENHADVVGAINVLARGHRVLACGESAHSGRSMKQEPTEATTQITA

SEQ ID NO: 12661 - protein, 409 aa, Pandoraea sp.
MIDVTKRLQAFKYELMPTGEQQRDMRRFAGACRFVFNQALSLQKARYAQGEKKLGYAGLCRLLTQWRNGTETPWLKDAPTHPLQQTLKDLERAYTNFFAKRADFPRFKKKGLRDSLRYPDPKQIKLDQGNRRIFLPKLGWLRYRNSRDAPGAVRNATVSLSGGKWFVSIQTEREVEQPVPQATSAIGIDVGVARFATFSDSTFLAPLNSFKNHEVRLRRYQRAMSRKIRFSNNWKKAKARVQRIHARIGNARRDYLHKATTTISNNHAMVCIEDLQVRNMVRSAAGSIDAPGKHVRAKSGLNKSILDQGWFEFRRQLAYKLAWRGGSLIAVQPQNTSRECPACGHVAAVNRQTRARFKCVACGYENHADVVGAINVLAPGHRVVACGDSAQSGRLAKQEPTEETAQIIA

SEQ ID NO: 12662 - protein, 258 aa, Salmonella sp.
VRDFFFRQADFPRFRKKGQSDNFCYPDPKQIKPDQGNCRIFLPKPGWIRCRNSRQVTGIVKNVTVSQSCGKWYISIQTESEVSTPVHSSASMVGLDVGVAKLATLSDGTVFEPVNSFQKNQKKLAVLQRQLSRRVKFSNNWQKQKHKIQRLHSRIANIRRDYLHKVTTTISKNHAMIVIEDLKVSNMSRSAAGTVSQPGHNVRAKSGLNRSILDQGWYEMRRQLEYKQFWRGGQVLAVPQPALRELWSYREIKSPVTK

SEQ ID NO: 12663 - protein, 227 aa, unknown
  TnpB Polypeptide
LEDKKVKEIRIIPKNNARFFEIQYTYESTVKIKELDKSKALAIDLGVNNLATCVTSEGDSFIIDGRRLKSINQWYNKQNARLQSIKDKQKFGKGRTEQQKRILRKRNNRVNDYISKAAKMIVEYCLAHNIGNLVCGYNVTFQQESNLGKVNNQNFVNLPFGQFRDKLTYLCELNEIIYTEQEESYTSKASFWDEDKIPVYNADNPQHHTFSVSGFNVVCIARQRARY

SEQ ID NO: 12664 - protein, 459 aa, Mycobacterium sp.
MAKFEIPEGWMVQAFRFTLDPTAEQARALARHFGARRKAYNWTVATLKADIDAWQATGIQTAKPSLRVLRKRWNTVKNDVCVNIETGVVWWPECSKEAYADGIDGAVEAYWNWQNSRSGKRDGKRMGFPRFKKKGRDPDRVTFTTGAMRVEPDRSHLTLPVIGTVRTHENTRRVERLIAKGRSRVLAITVRRNGTRIDASVRVLVQRPQQPKVTDPGSRVGVDVGVRRLATVATADGAVLERVPNPRPLDAALNELRHVCRARSRCTKGSRRYRERTTEISRLHRRVNDVRTHHLHCLTTHLAKTHGRIVVEGLDATGMLRQQGLSGARARRRGLSDAALGTPRRHLSYKTVWYGSQLVVADRWFPSSKTCHACRHVQEIGWDEQWQCDRCSVVHQRDDCAAINLARYEETSSIVGPVGAAVKRGADRKTRPGRAGGREARKGSSPKAAEQPRDGVQVA

SEQ ID NO: 12665 - protein, 456 aa, Moorea sp.
VKTPTKVIRTDKWRLNPTTEQKILFGETVKVYRHACQYLVGIIYTHWSKLGCLTADQLTPAVERLMHQTAKHPNIKYPQFNQAFYKFPSYYRRAAFAKRRLRRIAFAAGQVSSFVTRYREWQAGTRKRRSASPPKLNADTGCYPALYKGQCYKLHGFNQVEIKVFNGNNWVWTTVQITGLRERHACANNKMLSPSLIFNERVCHLSVPFSCKPEKRKPEANVTAVDLGINTTATISVVTHSGTVIHREFIHPGRDIDRRDKRLKSVSIRASKTMGKGGKLHKGFCSVTYQKCRRINSQISHVVSKRIVEIAKEFNSEAIVFENLKGWKPKGGRKRSNLRQKFHGWLKAKIRDFTEMKWAELGGKVIEVVAAYTSKLAFDGSGKVKRDSNNYALATFSSGKRFNADLNGAYNIGARGVFKLTHRNGSEGRSSKSSGRSPRSWACLCDLWARDSLRLA

SEQ ID NO: 12666 - protein, 404 aa, Moorea sp.
MRVAYQYKLRLTKSQVINIERWLDMLRCQYNYLLADRFDWYERNRCSINACPIVCHLPELRTNPDYYSQKRTLPNLKKNKPWYKDIHANVLQDCVKRVDLAFKRYLKGDYKGNRSGKPRFKAKERYRSLTFSAFSKNPIKGNWLNLPKFGWVKMIYHRPIPDGFKIKTAIVTRKADGYYVTLSLQDDSVTTVILSEEVSNPVGIDMGLKSFLIKSDGTDIPIPQYYRKAQKRLKKIQKAVSRSKKGSNNRKKVVSKLGKAHKKVTDTRKDFHFKTVKGLLDNHDLVAHEKLNIKGLAKTKMAKSVLDAGWGQFLSILSTKAENAGLITVGVNPRNTSQNCSNCGKKVPKKLKDRTHYCPHCGYVADRDVNAARNILKLAVGHPVCNKAYRVSEPIGGVGKKPTL

SEQ ID NO: 12667 - protein, 414 aa, Moorea sp.
MRSAYQYRLRLTKSQVTKIEKWLDMLRHQYNYLLADRFNWYEQNRCSVNSCLLVCHLPELRNNPDYFSQKRTLPQLKKDRPWYKEIHAHVLQDCVKRVDLAIAQFLKGDNNGKKSGRPRFKSKNRYKSFTFPSLSKTPINGNILTLPKFGQVKMIYHRPIPDGFKIKTATITRKADGYYVTLSIQDDSVPDVIPVDKVTNPIGIDMGVKSFLVKSDRTEVPIPQYYRKAQKQLKKIQKAVSRSKKGSNNRKKAVIKLGKAHKKVADTRKDFHFKAAKELLDNHDLVAHEKLNIKGLAKTKMAKSVLDAGWGQFLSILSVKAVRVAWPTALNAGLITKAVNPRNTSQNCSNCGKKVPKKLKDRIHCCPHCGYVTDRDVNAAINILNLAVGHPVSNKAYRVTELLGGFGKKPALSR

SEQ ID NO: 12668 - protein, 410 aa, Moorea sp.
MITLTYEYKLIPSQEQIAIIQDMLTVCRKVWNYALRERKDWYKSRKCLVNCCSLQQEYIIPVDAPYPSYKLQAGNLTKAKKNNPQLKKTNAQVLQQVLKTLERAFNNMKLRGYGFPRFKNNRMRSFVFPQFKANPVVNDWIKLPQIGLVRMRLSRPIPEGFKIKQVRIVRRASGYFAMLSLQSEVSIPDTPAWGHPLGIDVGLDKFLATSDNELIERPRFLSELHSKLKLLQRRLKFKKKGSANKHKLNHKIARLHQKISDTRKDFHFKLAHHLCDQAGMIFVEDLDFRTWAKGMLGKHTLDASFGQFFNILAWVCWKRGVYLDKVDYRFASQICPNCGTHTGKKNLSERIHKCPECQYEINRNVAAAKVICQRGITAVGQIVEKIDCVGGLSGVGNNLDKCLRSSKPRS

SEQ ID NO: 12669 - protein, 486 aa, Moorea sp.
LLESVKTPTKVIRTDKWQLNVTLDQRILFGETIKVYRQACRYLVGIIYTHWSELGGLTADQLTPAVEQLMHQTAKRPNIKYPQFNKTFYKFPSYYRRAAFAKRRLRRIAFAAGLVSSFVTRYREWQSGIRKRRDSKPPKLNADTGCYPALYKGQCYKLHGFDQVEIKVFNGSDWVWTVVQITGLRERHQVATNKMMSPSLVFNERVCHLSVPFTCKPEKRKPEANVTAVDLGINTTATIAVVTHDGTVIHREFIHPGRDIDRRDKRLKSVSVRASKTMGKGGKLHKGFCSKTYQKCRRINNQIGHTVSKRIVEIAEKFNSLAIVFENLKGWKPKGGRKRSNLRQRFHGWLKAKIRDFTEMKWAELGGKIVEVVAAYTSKLAYDGSGTVKRNSQKYSLATFSSGKRFNADLNGAYNIGARGVFKLTRRNDGEGRSSKNSGRPPRSWACLCDLWATVSPRARIRHHHLAIATLRERSGGGSFMIIPGS

SEQ ID NO: 12670 - protein, 375 aa, unknown
  TnpB Polypeptide
MEQTITAKLQILVNPSDKQILCDTMKAYSDACNYVSEFIYKTHNLSRYSVQEDTYHQVREIYGLRSQMAVSCVRTVIAKYKTIIKNQKEWIKPTFRLPQLDLVWNRDYSLNTKNNIFSVNTLSGRIKVSFYKNGFERYFADDCKFGTAKLVNKHGMFFLHIPVTYEISMLNKSEVSNVVGVDRGIRFLAATYDSKGKSVFYDGNIIKQKRAHYKALRKHLQQVGTPSSRRRIKAIGQRENRWMQDVNHCISKALVESNPDGTMFVIEDLTGIRSDTERVKVKNRCISVSWSYYDLEQKLSYKALRHHQLVEKVNPAYTSQACPKCGHTEKANRNKKIHFFCCKNCGYKSNDDRIGAMNLHRMGIELLVPDAVATE

SEQ ID NO: 12671 - protein, 367 aa, unknown
  TnpB Polypeptide
MLKAYKYRIYPNTVQKIQIAKTFGCCRFVYNQTLAYRKEAYEKGKKSVSKTDCNNYCNRQLKKEYEWLKEVDKFALTNAIYHMDAAYQKFFKEHAGYPKFKSKHDNHKSYTTNFTNGNIRVDFECNRVKLPKLKDVKAKLHRIFSGQIKSATISQVPSGKYYVSILVETEHMELLHTNQNTGIDLGIKDLCITSEGKKYENPKIIRKYEKKLAKLQRQLVHKEKRSQNYYKVKKKIALCHEKITNTRKDYLHKMSHEIISENQVIVSEDLQIKNMVKNHHLAKSIGDVSWYELTRQLEYKAKWNGRKYVKIDTFYASSQLCSACGYQNTETKNLSVREWVCPVCGTTHDRDINAAKNILEEGLRQIA

SEQ ID NO: 12672 - protein, 401 aa, unknown
  TnpB Polypeptide
MIITHKYRIYPTKAQITRLENQFSMCRYLYNWALADRIWLYENHGVSISRYEQINELVLLKEERPWFASIHSQVLQNVLVRLDLAYQSFFERVKKGGEAVGFPKFKKFKDWDSITYPQFQNRPIDGVLKISKIGNVKVRYHREIPETGKVKTLIVSKEAGKWFVCFSFENNLEVEIKQNPTTFLGIDLGLNDFYYDSDGNSVKPPKSFRANEKRFAKLQKKLSKTTKRTKKYLRLLKAIRKCHYRIKCQRNDFLHKTANKLLSMADVIVFEKLNIKNMTKRAKPKKDPDSDGYLPNGASAKSGLNKSIADASWSKFILFLQYKARMLGKQVIPVNPAYTSQMCSNPDCGKIVKKSLSVRTHRCLHCGLVLNRDHNAAINILRLGLQSPELILQEASSIASA

SEQ ID NO: 12673 - protein, 236 aa, Bacillus sp.
MTKQNKAYKFHLYPTEEQAHLMRKTFGCVHFVYNRMLAERKEVYEKYKDDKKQLKKQKLPTPAKYKTEFQWLKEVDSLALANAQLNLQTAYKNFFRGQNDFPTFKSKKDRKSYSTNVVNGNIMLFNSHIKLPKLKMVRIKQHKEIPQDHVIKSCTISMTPTGKYYVSILTKYEKEIVQKEVETVVELDFAMDRLYVSSEDERANYPKFYLEMLERLAKAQRVLSRRTKGSIRWKSV

SEQ ID NO: 12674 - protein, 423 aa, unknown
  TnpB Polypeptide
MNYGIRNMELSRAYKFRLYPDAKRQREIDERLILAQQFYNKILEKSIASYKNGETKVSMAQFNRFVREIIKEDKRYLKLYSQTRCEIEFRLLKAYQNFFRRIKEGNKKAGFPRFKSIDRYKSLTYPQDNGSFSIKKDRLRVSRIGTMRIDLHRNIKGTIKTLAIKREGKNYHAIFTTINDVKVPEVEDTNPVGIDLGLNNFIALSYGKTIQKPKFFKKKAKRIAKWQRIVARRTKWQGRKKAEKQSKRREDAKAHLSQEWTNVTNQSNDFAHKLADHLINSGYTSFVVEKLNIKNMVKNHNLAQAIHNAAWSKTISFLSYKAESAGMKVMKINPDNTTQECSSCHNVKRGKEKLTLKDRVYNCFVCGLVMDRDVNASINILNRATLGQRGSYAQGESVRPQREAVLEELRTDKTHPLRDAVIA

SEQ ID NO: 12675 - protein, 218 aa, Blautia sp.
MDPSGKYFASLLYEGYSCENQAADKDYSNAKILGIDYAMQGMAVFSEEIEMEEAGFFRKNEKRLAREQRKLSRCVKGSRNYLRQKKKVARCHEKIRSQRRDYLHKLSRRIADQYDIVAVEDIDMKAMSQCLHFGKSVQDNGYGMFRNMLDYKLAWKGKELVKVDRFFPSSKKCSKCGKIKKELKLSERVYRCTCGNEMDRDRNAAINIREEARRMLAA

SEQ ID NO: 12676 - protein, 397 aa, Peribacillus sp.
MLVNKAYKFRIYPNKDQAIRINKTIGCSRFVYNFFLGKQKEEDLYWYVVEEMKQNGQLPSNDWKGTYLNKYETVTFLPELKKQYTFLKEVDSIALQKAVENLSDSYNRYYKKQNKQPRFKFKKNPVQSYTTKHTNGNIAVIENKIKLPKLGLVRFAKSREVEGRILSATIRRNPSDKYFVSIATESEVSELPKTESAVGIDLGIKDFAILSDGTIYSNPKFFRSLEEKVAKAQRIMSRRTIGGSNWYKAKIKVARIYEKMSNSRKGYLDKISTKIVKNHDMIGMEDLSVSNLLQNHNLAKAISEVSWSQFKRMIEYKAKWYGKQVIMVAKNFPSSQLCSCCGYQNEDVKHLGLREWDCPECHTYHDRDINAGINLKKEAVRLLTVGTTGIAYPITDR

SEQ ID NO: 12677 - protein, 391 aa, Peribacillus sp.
MLVNKSYKFRIYPNQKQTNLIHKTIGCSRFVFNFFLTKQREKDAYWSITEEMRQNGQLTANNWKGNRLNQYETVKSLPELKKHYPFLKEVDSIALQKSVENLSDAYDRYYIKQNKQPRFKTKKNPLQSYTTKRTNGNIAALDKHMKLPKLGLVRYAKSREVEGRILSATIRRTPSGKYFVSLATETDVLEIPKTGSAIGIDVGIKDFAILSDGTVYSNPKFFRTLEEKLAKAQRILTRRTMGGSNWNKQRIKVARIHEQMTHARKDYLDKISTKIVKNHDIIGMEELSVKNLVQNHNVAKAIHEVSWSTFKSMVAYKAKWYGKQVVTVAKNFASSQLCSCCGYKNKDVKNLGLREWDCPSCRTHHHRDINAGINLKNEAIRRLTVGTTEIA

SEQ ID NO: 12678 - protein, 458 aa, Peribacillus sp.
MTKKEQELQLDGQSKMCNWLYNQLFEFVEEDYINGNSRKLLNGRNLRNEVPKIKQESPFLYKVHSSPLKNAAIRLKDAYDRFFDKKLDNQKPHYRSWKKKWFSLYYDEPNKGFKLLEDRKLSISFGKLSDAEYTEMKKKDKKTKKQISIVVSLSEPFVPRENEVIKTLQITKDIGGYYAVFTVENRKEERKVDEQSFIVLDPNHKNLAVGIDHVGRSYELKSLSSKLKYWDKRIDQIKSKRDKCQKLSRLIVTPNTEYWKPSKRWNDLNRALEKAELTRREQMKQELYSFAHYLSHKYDHILIGDYVPTPDLAEYGSMRRAMLNQTPVGQFRKILEWVQEKNHKYYTKVDETNTTKECCICGHMKKKEPDVRIFMCEKCNTTMYRDLNSAVNMAKKERKLLPCLGYVGVEHPTYTVWWDWKRQKIVRGKFRQLAGVNKSPGQNKENSSPQEEFLLNLI

SEQ ID NO: 12679 - protein, 328 aa, Peribacillus sp.
MEISNEAIKIKKVEYELRLSTLLTKKKNWNEKVLKKNKFATIPNLSKEDWKNCNYAEIVWRNGVYWFCYSISVPEKYISSYAFKAAGGELGEIHSATVATEDQALLISGRAMRSMSHFRAKVLADLSKKMSRCKKGSRQWEKYRQARVRIRQKTKNQLEELRHKTTKEVVSFLEEEKVTTFVIGNVSGMEKYTKKNRKKKRKNNQKRQQQLPLWNQGEIKQKLKYKAHPHGRNRRKLYRLRLSVLWGRHQANGRHFICSVHQTEIHRDVNGAQNIVRKKYPMEMKPLLSVLYKQPIWYKRFLSMEERQKAKHPKDQPKKEKSIAGRTV

SEQ ID NO: 12680 - protein, 409 aa, unknown
  TnpB Polypeptide
MLKGIKIRLYPNKTQTNYINRLLGCYRLVYNKCLANKINSYKENQTNLGLAQLGNFFHQELTKSQELSFLQEHNTKVLKQAIRNMLVAYANFFQQNNHFGFPKFKSKKDNISSCIFPLEAISKRNNYLSGKLTLTKEVKGIHFRCSDKYKNYLNKYKDGIRSATLSKNASGQYFLSILVDSDEVLLKPKTDKVIGLDLGIKDFIVTSDNTKFSNLKSIRSNEVKLKKLHKSLSRKKVGSSNRNKARLKLAKFHQRINNIKNNYLHCIVNQLVNEKQVICIEDLNVSGMLKNHHLSKSLQELSLNEFKRILDYKCDWFGRYLIKVDRYYPSSKLCSCCGFKNEELTLKDREWKCPHCGQVHDRDFNASLNILHEGMRLYDELLGCRTAELTLVESSSLEHSLNQEELNLD

SEQ ID NO: 12681 - protein, 232 aa, Lentibacillus sp.
MFGIKCHRQIEGTIKTCTIRRQNNKWYACFSCEIDVEPAPSTGEEIGIDLGILNLATASNGDLYDNHRFLKQSEKKIRYWNKILSRRKKGSRRWHKAKQQLTKAYEQLANRRRDRAHKVSRQVVDQYDLIAFEDLNIQDMVKHKTLSKWILDASWRSLVVYTTYKAEEAGKCVIQVNPQNTSQECSNCRQMVRKTLDERTHCCPNCGYTVDRDVNAAGNILNRAKEQLETAS

SEQ ID NO: 12682 - protein, 388 aa, Lentibacillus sp.
MLVRMNYKYEMFPNEEQMQTLDSWLSICRQQYNSALLDKQRFYQKNQTGLSRTQLQKQQKADKQKIPFLKTIPSQPLQEVFFRLDERTRTSLKGVHVIQKIKKHKDYNSLTFTQFGGEKRHVKSKTTGEVKRRDVRYAASLDENNHLLISKLGAVYVNFHRPLEGKVKQVTIKRQGSRWFAIFSVERHVNEMAEFPVQSTGVDVGIQKFAVLSDGTTVENPKFLLKEEKKLRRAQKKLSRMKKGSSNWKKQLQKVQQLHIKIANQRRDFLHKLSFRLSKTYKFVFVEDLTIRNIVKNRHLAKSIHDAGWGTFCHMLKYKCKNNGGELISVKPHYTTQDCSGCETRVKKSLSVRTHVCKSCGIVLDRDHNAAINIEKGGLALLNLSPTA

SEQ ID NO: 12683 - protein, 358 aa, Lentibacillus sp.
MSQTITVKIKLLPTKEQASILYEMSQTYISVINTLVSEMVAEKKSTKKSSKDIPVHLPSAVKNQAIKDAKSVFKKTRKNQFTSVPVLKKPVCIWNNQNYSFDYTHISMPIMVNGKATKIPICALLADKDNRNFDLLTYKLGTLRITKKSNKWIAQISVTIPTTRGTGLKIMGVDLGLKVPAVAVTDDEKVCFFGNGRQNKFKKRKFRSDRKALGKKKKLNAIRRSKDKEQRWMKDQDHKTSRAIVNFAKGNKISVIRLEQLAKIRQTTRTSRKNEKNLHTWSFYRLSQFIEYKANLEGINVEYVNPAYTSQTCPKCSEKNKAQGRKYKCKCGFEKHRDIIGAMNIRYAPVVDGKSQSA

SEQ ID NO: 12684 - protein, 515 aa, Lentibacillus sp.
VLTLELDHHPKMFSVISDELEIWRVIYNTVLGEYLKREKQMKREKAYKRLIRQLHGVNKKLAKDDHDASLIHEKKIINQKLHLLRKKYELTEFASHVWVKPIRQHFHNKVNAAVAQKTASRAWLAFSKKLFGKAKHVRFVRKEKMESFEGKTNTTGWRFRDGLIVYKDLTTPLKIKKNDAYTSEILHHLDKQTPFSYTIISDGKEKTVHDRYRVKFVRIVQKEIKGCIRYFADLVISGYPPSKNRKLGKGNVGLDIGTSTLAVSSLTNAALFNLAEQVQEISRDIRLIQRKMDRSKRATNPQNFNRDGTIKQGKKTWVFSNHYRKHRIRLKELHRKQAVIRKLSHRALANELLTFGDHFYTETMHFKALQKRKQKTEISGKTGKYIRKKRFGKTLGNRAPAMFIAILREKVTRLGGTFAEVHTQKFKASQYCHVKNIYRKKPLSQRWHVIDDNTKVQRDLYSAFLLMNANKSGTRPNRSKCEAAFPLFKKLHDQVIRAIVNGKRMILNSGISVKN

SEQ ID NO: 12685 - protein, 290 aa, Lentibacillus sp.
MCRQLYTPCLSSESLYKTRGVAIHYYGQKKELPLLKQEVPEYKQIQSQVLQDVAGLLDKAFQAFFRRLKAKQKAGFPRFQGDNRYHSFTYPQSGFALNGKCLKLSKIGNVRIKCHRQIEGTIKTCTIRRQNNKWYACFSCEIDVEPAPSTGGEIGIDLGILNLATASNGDLYDNHRFLKQSEKKIRYWNKILSRRKKGSRRWHKAKQQLAKAYEQLTNRRHDRAHKVSRQLADQYDLIAFEDLNIQDMVKHKTLSKWILDASWRSLVVYTTYKAEEAGKCVIQVNPQNTS

SEQ ID NO: 12686 - protein, 299 aa, Lentibacillus sp.
VRIVQKEVRGRIRYFADLVISGYPPSKNRKLGKGDVGLDIGTSSLAVSSLTKAALFNLAEQVQEISRDIRLIQRKMDRSKRATNPQNFNRDGTIKQGKKTWVFSNHYRKYRVRLKELHRKQAVIRKLSHRTLANELLTLGDHFCTETMHFKALQKRKQNTETSGKTGKYIRKKRFGKTLGHRAPAMFITILREKVIRLGGTFAEVNTQKFKASQYCHVKNIYSKKPLSQRWHVIDDNTKLQRDLYSAFLLMNANRSGTKPNRSQCEAAFPLFKKLHDQVIRAIVNSKRMILNSGIIVKN

SEQ ID NO: 12687 - protein, 493 aa, Acidilobales sp.
MSSGGNPRGVSARDPDPLQSFRELIEKRKKNNKRAVRLRLLPEEHEEKILFDISLTAVRLWNELNYEKRQLFFRDDLTLEKRIEINRKYYHKYKNFLGVNAGQIINKNEETWDSFFELLKMKKQGKLPPNISKISPPGYWKDKITGKKKIHILIRNDRYYLEPTNKGEGRLILKDFKLNIRYVGRIRWEGKQGRLEIIYETSRWFAYIPIEVGEKPSKSNPQGYIRSNYRDEKDKIFNPRSIKQRDPVGDKKAFIDVGLNNLFAVVVSDGSALLVKGGSIKSEYYWWKREISTYQSIRDLLRNAGFLTWIKYHEKYLKALYKRNERLRHLYRTAIRFLAEMLWSRGVMKIYIGYPIMLSQNNGNEYNTSIWWYRKIILWMIDVFIEYGIDIEIVPENYTSMECSICGEIHRDGRIYRGLYICRKTGKKINADINASLNIARRLGYKITITRKIESYSITHNGVKPLIPHQRANTRDPEIRNPAIKGGEGSWRD

SEQ ID NO: 12688 - protein, 447 aa, Bacillus sp.
MTRKKAIKVLRKKKKTDNIQRFTQIQNLGGNSLTAKEFKILIRMTHGTKALRNVGLYVIKKSYRENNKMATTKKIDDAMKADVNYWGAQSNSVQAIRRSLMEEVNGFFKALQSWKENPEKFTGRPKFPKYLKKEEKRIIEIYQIPKVDKNGYWTLPMNNQFRSKFGSIKIRMPKNLLHKKITYIEIKPKQKGRFFEVHYTYEVQVSQMKKQPTTTKNALSIDLGVDNLMSCATNNGDTFLIDGSALKSLNRYFNKELNKLQKKNLENGISKRIVTNKQAKLWMKRERQINGYIGKAVGLLFKKAKELHIDTFVVGYNAGWKQHSDMGKKNNQQFVQIPFNRLISAIENKCLKEGIRFVKQEESYTSKASFLDRDEIPVWSKEDKKTYMFSGRRITRGLYLSKTGACLHADLNGSLNILIKSNVIELTNLLKIKEPIRLEVLKRKAVV

SEQ ID NO: 12689 - protein, 576 aa, unknown
  TnpB Polypeptide
MNYNGFQLNKEDDKEDTVYKYVKNRYPMFDSYTIINVIGDATAILKSQMETFELNKQTKESKLDATMEKQSDLQIQLKRFLTIKEQLIDRSKKIKNNVSLIGVKFQTYQGAHHGLKDTNKNIFYINNKEVSLVEYETFIDSRIKKIKTTLGLLKMSIDRRKNQLEHMDKPQKICFGSRKLFKSQHTKYHNHNLWKRELYFHKYHSVKMTGRADLYYGNATVKYNKTGNHVLDVSYIDKNGKSKEVHIPDVVFPYGQDIIDEYIKTQNLAVKDKTKDRFPICYTFSIKCDEQWRPYIIVSVSVPLPKKKYVNYDVSTGVVSIDINVDHIALTELDKNGNLIYQRVIPFHIYHKNKGTVDHELSKITNEIIQYCMKKKKCLVVEKLDLEQKKRKLKYENKKYKVLLTGFAYAKIINFLKSKAYKNDIYIYFVNPAYTSQIGKWKYMKKLGVSIHIAAAYVIGRRGMGFIDKIPRYLNPVLTNYEYKTDIEIEQELRNKNKRKRQPKEEKDLLKEIVEKQKAMHEKHAKQYDTKWEKYKSLMNKITILKKHHFYQTYKSYEIMDLIKMEKQKERLKYTK

SEQ ID NO: 12690 - protein, 510 aa, unknown
  TnpB Polypeptide
MLQTYQTKIKDCNTEYLDEMAVFTGHIEKKLFVESFIKGKSRTECKKEYIRRYGITSRQFNAIYIQLQGKVDSVLELNNLHAEELESKIKSLEKYIDKNTQKKSKLHQKLLNLEKFNPHSKKFKKTAKQYKNIKFKLHHKKRKLSNSKWKLSKIQDDILNNEIRICFGSKALFKKQFHLEENKYRSHDEWKDDWIRERNSQFFCIGSKDESSGNQTCTCSSKGQLRLRVADNFINTYGKYIVFENIKFPYGQEVIDNAIKTYIGETKGRKPVKYCNSAISYRFIKNEHGWYINATAETDVPDIITSKEIGCIGVDMNADFISCCGVDRFGNPIEEEKVTLNMYNCSTGQVTSYMGEAVKYIVNKAIQTQMPIAIEKLDFSKKKSLLGEESKKYSRMISGFSYSKFKQMLRSRASKNGVQIIEVNPSYTSVIGQIKFMKRYGLSSHGSAACVIARRGLGFNIEKPKYDSILGDFSKFNNSKPLKSRWSSISYSIKKRYTFDDRIELLKLEV

SEQ ID NO: 12691 - protein, 406 aa, unknown
  TnpB Polypeptide
MLVRGITFRVAADLPSDVNFLLKDFRLAVNAAVRAGLQSRTTSRNALSKLAYKDFRKEHPMMYSQHLVSSLEVAASVLKNHRRRMRGGTARAPFVKRLMMKAENQAYRLDRETGIIDLPIRAGLHVQLKLIVSQYHRRYLDDKSLSLGSLTLLPDRAIITFRKESVKTFTPESALSLDTNEQSLDGIIVGIGSVSSVKAEFPDIATIQQRHHDRRRRLQKRKAHDRRTSRRLCAREGKREHNRIQYRLHQVADSILFFAERKKSAIVLEDLTGIKHKKNKDLNRRLSMWPRRKLHQIVEYKAEWRGIPVIKVDPRYSSRTCPICGRIQDSRMGAEFRCECGWHMDRHINASLNLLQTAISKGLKVAGGLRFDPGAFQHDVMMILYEPAMAARSEPNGTSCGGAVVS

SEQ ID NO: 12692 - protein, 343 aa, unknown
  TnpB Polypeptide
VPATCLTQCLRDQDRAFTNFFAFRARYPRFKRKSVSGSVRFQDVGAAWAGGIVSLPKLGRLKLAEPLPKVERPDLVTLSRDAAGRYHASFSAEVEPSWLPIVQRAVGVDLGLTHLATLSTGEKISNPKRYQAHLRYLRQQQRCLARRQKDSRRREKQRLRIARAHARVRQQRHYALHALTSRLVQEFDLIAIEDLNVQGLARGRHARAMHDVAFSEVRRQLTYKSDWYGRVLVEVDRWYPSSKTCSQCRHTLDELRLLERRWCCPRCGYDHDRDVNAGRNLLAEGLRQLAGRDDRDLRVDARDACPEEELLAQVLAEEARSGHGNAVRIDRAGLSIAAQSRIR

SEQ ID NO: 12693 - protein, 394 aa, Actinomadura sp.
VRRSFKFLLRPTARQAGSLAACLEDHRNLYNAALEHRRTAYRMAGVTVRYGDQSGDLKHIRADDADGQGRWSFCSQQATLRRLDKAFTAFFRRVKAGRRAGFPRFKGRGWFDTIEWPRDGDGCRWNSQPEHPAATFVRLQGIGHVRVHQHRPIAGTVKTISVKREGRRWLLILSCDDVPAAPLPQTGAVAGIDLGVASLVTTSDGAHLANPRHLRSAADRLAAAQRDLARRKRGSNRRRKTARRVAVLHGKVRRQRLDTAHKAALSLVRDYDLIVCEDLRIGNMTRSASGTVEAPGRNVAAKSGLNRSILDAGWGVFLRILAHKAESAGRELIAVDPRNTSRKCAACGHCAAGNRTTQAEFHCLACGHTAHADVNAAVNILRAGLALRDAAEAA

SEQ ID NO: 12694 - protein, 337 aa, Escherichia sp.
MRRFAGACCFVFNRALARQNENHEAGNKYIPYGKMASWLVEWKNATETQWLKDSPSQPLQQSLKDLERAYKNFFRKRAAFPRFKKRGQNDAFRYPQGVKLDQENSRIFLPKLGWMRYRNSRQVTGVVKNVTVSQSCGKWYISIQTESEVSTPVHPSASMIGLDAGVAKLATLSDGTVFGPVNSFQKNQKTLARLQRQLSRRVKFSNNWQKQKRKIQRLHSRIANIRRDYLHKVTTTVSKNHAMIVIEDLKVSNMSKSAAGTVSQPGRNVRAKSGLNRSILDQGWYEMRRQLEYKQLWSGGQVLAVPPAYTSQRCACCGHTAKENRLSQSQFRCQVCG

SEQ ID NO: 12695 - protein, 330 aa, Actinomadura sp.
MARQVRRAFKYRFHPTGEQAAELSRTFGCVRLVYNKALEERTRAWNVERRRISYAQSSALLTQWKKTEELAFLAEVSCVPLQQALRHLQTAFTNFFAKRARYPRYKSRKRSRASADAGITSLVTLSTGEKVANPRQERRDRARLAKAQRELARKAPGSANRDKARRKVARVHARIADRRRDLLHKLSTRLVRENQTVVIEDLTVGNLLKNRTLARAISDAAWRELRSMLEYKCAWYGRELVVVDRWFPSSKLCAACGTICTKLPLDVREWTCECGAMHDRDVNAARNILAAGLAVTACGDGVRPQRDTSRTGHSSAKQETQRATAGIPHP

SEQ ID NO: 12696 - protein, 385 aa, Bacillus sp.
MKRAYLIEIHPTKEQITQINQTIGVCRYVYNLYISKNKELYEAEGKFLGGYDFSKWLNNVYTKECDQWIKEVSSKAVKQAIMNGDKAFKRFFKGLSKFPRYKKKKKQDVKCYFPKNNKTDWTVERHRVKIPTIGWVRLKEYGYIPENATVKSGTVYQRAGSYFVSVLCEIEEVRVKTIPNKIGLGIDLGVKDFAVRSDGKTHKNINKTVKVKKIEKRLKREQRSLSRKYENIKKRGGKSATNKRANINKNILKVQKLHARLANIRLAYVKSVVNAVVKTKPTFITVEDLNVKGMMKNKHLSKAVAQQCFYTFKIWLEAKCKEYGIELRQVDKFYPSSKLCSCCSQKKADLKLSDRVYECECGNVIDRDLNASINLLQAKEYTILT

SEQ ID NO: 12697 - protein, 412 aa, unknown
  TnpB Polypeptide
MGKKQGYIITTKCLRLRCRHPEWLSETQDFYNQIQKFYYDLFLEHSELREENSQVCLREMERLSIRGRDGKEVPSPLPWEKVPLYFRRAAANAGIAAAKSHLSRLENGYAGKAESFHSAVTYYKGMYRDFESGEITLRIWNGSEWRWMRCRLYGKAFPEGAQLMSPSVVLDRKYEMLHVPVKEIVQDASTVKERIAEGRKCVWDSILQMEMHLTVASVMNCEGKELAVRYFKGGKEYTHRCGKVLEKIDKSRKSRGENAGGRVNQKYWMHLKHLGEQYAHQVSLDIVRFCKEQDISLIAFPKYDEEYRRYVLKGAGNFGTLHLSTRIREYLTYKAWKEGILVLDVNAKEMHRICAICGSEITQQNKESKRFICKEGHQGDAYLNVARNAAKRCLEQFRKKAGKGKNVSAKKS

SEQ ID NO: 12698 - protein, 320 aa, unknown
  TnpB Polypeptide
MGKLSELLTEIFLERTYLLDRWIFCLQRRKCIRRNAKKVYRRPRLRRWQQMLKAYKYRIYPNNEQKTQMAKTFGCCRFVYNQTLAYRKEVYEKEKKSVSKTDCNNYCNRQLKKEYEWLKEVDKFALTNAIYNMDAAYQKFFKEHAGYPKFKSKHDNHKSYTTNFTNGNITVDFGCNRVKLPKLKDVKAKLHRNFSGQIKSATISQVPSGKYYVSILVETEHVELPHINQNTGIDLGIKELCITSAGKKYENPKIIRKYEKKLVKLQRQLAHKEKRSQNYYKTKKKIALCHEKITNTRKDYLHKMSHEIISENQVIVSEDK

SEQ ID NO: 12699 - protein, 367 aa, unknown
  TnpB Polypeptide
MLKAYKYRIYPNHEQKVQIAKTFGCCRFVYNQTLAYRKERYEKGKKTASKTDCNNYCNRELKKEYEWLKEADKFALTNAIYNMDAAYQKFFKEQAGYPKFKSKHDSHKSYTTNFTNGNIAADFENGKVKLPKLKEVKARLHRDFDGQIKSVTVSQVPSGKYYASILVETEHEELPHTRNTAGLDLGIKDLCIASDGKKYENPKIIRKYEKKLGRLQRQLAHKERRSHNYYRTKKKIALCHEKITNTRKDYLHKISHEIISENQVIVSENLQIKNMVKNHHLAKSISDVSWYELTRQLEYKAKWNGREYIRIDTFYASSQQCSACGYQNTEMKDLSIREWLCPVCGAKHDRDINAAKNILAEGLRHIA

SEQ ID NO: 12700 - protein, 423 aa, unknown
  TnpB Polypeptide
MQLTERHLIKPSHELYKTLDDLTFKAKNLYNHGLFLYRQSYFEHKKNPDVPVLSWVDIDKSLRKQGHDDMRALPSKVANAVLKNLGENITSFWKLVRLKNKGELAREPKPPYYLHKTEGRFPLSFNYQTFGAKRGANMELFLCPKGINLPIPTRVANPKLVRIVPDRNNFIIEVIYNVDERAPKSTSKYAGIDLGVDNFATITFSTQNKPLIIKGLELKSVNQGYNRLIAKALSLLPAPQKTSKPIHRLWSRRSWILKTKIHQMTAFLATLFDEMQIEKVFVGKNTGWKQNLPFGKKVKQRFAYLPYETFIEQLQYKCKLRGITVTTQEESYTSKASFLDGDDIPVYGETENPQFSGRRIKRGLYKSGNGQLINSDVNGSYNILRKGLMSDSQSLQVKNPLIHPLVVKGIGEEPNEKLVQLYM

SEQ ID NO: 12701 - protein, 413 aa, Fusobacterium sp.
  misc_feature (354)..(392): Xaa can be any naturally occurring amino acid
MKIIKKAYKFRIYPTLEQIIFFSKNFGCVRKVHNLMLDDRKKDYEEYKSTGIKTKYPTPAKYKEEYPYLKEVDSLALANAQLNLEKAFKNFLKNKDFGFPKYKCKSNPVQSYTTNNQNTIYIKDSYIKLPKLKSLVKIRLHRKIEGIIKSVTISKNSLDHYFVSILCEEEIEELQKTNKNIGIDLGIKKFAIMSDCTKVENLKLSKEYEKKLKREQKKLSKRCKLAKDSNKKLSDSKNYQKQKKKVAKIHNKIRNKRKDFVNKLSTKIINNHDIICIEDLNIKGMLKNHKLAKSISDVSWSEFVRQLEYKANWYGRKIIKIPTFYPSSKTCSSCGNIKETLTLSERIYHCECLXXXXXXXXXXXXXXXXXXXXXXXXXXXXXXXXXXXXXXXKYKGNVKKSQISKKYIRCKLE

SEQ ID NO: 12702 - protein, 411 aa, Tolypothrix sp.
MATKRITFRLYPSKVQANKMHYWRRLHKDLYNACVEHRRTSYKKFGKSIDYFAQQNCLPDFKEEWEEYQELGSHALQDTVKRVDFAFKRFFKLKSGYPKYKSSRYYKGWTYPCNSGWKACTNGKNGYLKISNLGNIPMRGQARDWGKTKTCTIIFKQGKWYASITVDCIPTRPQTDTSAIGLDFGTYHAIADSNGNVVENPRFIKTAQIKINKIAKTSRRKRPPTKGVKASRCWRKANKAVAKIQFIVARQRQDWQHKVSTQIVSCNSLVATEKLNLKGMTRKSKGKRKRQKSGLNRSLLDVGIGNLKDLIKYKVTEAGGFYIEIPTTKVKPSQTCPNCGHQKKKTLADRVHHCEKCDYQCDRDVAAAIVMLQVARGMERASTGADESTSTWCGSFKQVTQAKRQKRASQA

SEQ ID NO: 12703 - protein, 531 aa, Tolypothrix sp.
  misc_feature (375)..(490): Xaa can be any naturally occurring amino acid
MQVSYQYKLRPRENQSKVMDSWLDMQRSLFNWFLADRIDGYYQTFVMGEYCDIRTRTEQCPLTCSLSKNSNLHNPWKNPDKNGVVKKRSASLMQDAYLAEMKQARPWYKTIHSNVLQMLVKRLECSMEGFFKHGRGFPSFKNRSNFRSFQYKPGDVKLDGNKIYLPLIGWMRFYNSRPIPQGFEIRTVTLRKKADGWYTSILIRDDSVPDYPTPKEVNTIVGVDMGLTKLVHCSDGSEFDNPRPSTSKKGKRTLKIRQRRLSRKKKGSANRKKEAQKLARLHKKRADKRSAYQWLVASKIVRKADAISVEDLNIKGMKARCKPKPDDVKQGRFLKNGQSAKRGLNRSISDASWGTLIEKIQYAAAKSGKSFFKVXXXXXXXXXXXXXXXXXXXXXXXXXXXXXXXXXXXXXXXXXXXXXXXXXXXXXXXXXXXXXXXXXXXXXXXXXXXXXXXXXXXXXXXXXXXXXXXXXXXXXXXXXXXXXXXXXXXXIKRRHRASNGKRGVPGNPPTSVLLSLWDNAEMAYSRESHPF

SEQ ID NO: 12704 - protein, 477 aa, Tolypothrix sp.
LYKTLPVKARFTDIEEAFWLDQCQHANSLINCALYHVRQTHYARLEESGNAFTTYWRGDDLRHGWKTYKCFTTYPELDKIFKDNPHYKALAAQAAQQTLKSVGESITSYNGLVNAYYRGEVDRPSLPQYRKSGGLAAVTFPRQALTYKDGCFYPSISRETKPHLLTEIALPLPEFIDSDWVKEVTVRPCYGQLWIDWVIDDGKQIVEINPNLDYTQAWSFDHGGNNWLTGVSTLGQSLIIDGRKLRSMNQGYCRLVAKCKQGKSEFYWDANLDRIQRKRNNQMRDAINKAARFIINRCLADAVGNLIIGWNEGQKIGSDMGKRNNQNFVPIPTGRLIERLKQLVPEYGIVLTITEEAYTSKASFLDGDSLPKYGEKPEGWKASGERIERGTYKTKKGFLINSDCNGAANIMRKVATQLGLVLVKVGRAALSLPHRYDLFCDLKNSFRNTLRSAALGGTALGGSADLKQVPSHGVTSM

SEQ ID NO: 12705 - protein, 490 aa, Tolypothrix sp.
MQVSYQYKLRPNQSQSKVMDSWLDMQRSLYNWFLADRIDGYYQTFVMGEYCDIRTKTERYPLSCSLSKNSHLHNPWKNPDKDGLIKKRSASLMQDAYLTELKQARPWYKTIHSNVLQMLIKRLDAAMAGFFQHGRGFPSFKNKSNFRSFQYKPGDVKLNKNKIYLPSIGWMRFFNSRTIPTGFEIRTVTMRKKADGWYGSILIENKEIPNFPNPREINTLISLDMGITKLVHCSDGTDFVNPRPSTSKKSKRTLKIRQRRLSRKKKGSANRKKEAQKVGRLHKKHADKRNAYQWFVANKIVRKADAVSVEDLNIKGMKAKCKPQPDDVKQGRFLKNGQSQKRGLNRSISDASWGTLIEKIQYTAAKSGKSFFKVDPKNTSRTCSKCGVIDALSRFGEKFTCVACGYETHADKQAAVNIKNRTIQQNGLNIKKLKKVRRDSAEPKQLKLFETPTVESTMVKRKQYRASDGKRGVPGNSPTQLSLWDIGDLA

SEQ ID NO: 12706 - protein, 408 aa, Streptomyces sp.
MLLHCAHARYVWNLAVEQHSHWCRWRKSAPGFAEQCRQLTEARRENEWLGAGNADVQQQALKDFAKAKNARFTSGFGEPTWRKKFRHEGFRVIGTDRVPEFNEDGTAKLNAKTGKQVVGRSVIVQKLNRRWAQVRVPGCGWVRFRLTRSVLPRAKTFRITFRNGQWHIAFAVIPEPVDAPGTGEVIGIDRGVTITAALSDGRKLNCPQLTVKERAQIRKHQRRAARAPKGSEKKAAEYAKVARLKAREADRRKDWCEKTSTMLARTYDLVRFEKLNIKNMTASVKPKPDPEQPGQFLKNGRAAKAGLNRGILAQGWGRLRQRTEHKAPGRVEDVPAPYTSLRCSACGWIEKELAQEPSRVRLRILRLHLQRGHQRSNQRRGRTGRDSPPPAISRCRRDDTAQSAVERP

SEQ ID NO: 12707 - protein, 377 aa, unknown
  TnpB Polypeptide
MLVNKTYKYRIYPNKDQIVLLLKHFGATRFVWNYFLDLRKISYLENKKSLNFYDNSKQLTLLKQNKNFKWLNEVNSQALQATLKDLDTAYGRFFKKQSMFPKFKAKYKHIDSFRCPQNIKTQHKKLFIPKFTEGIQIIIDREITGRMLFVTISKTSTNKFFAAITCEAEHIPLQSTTNKVGIDLGIKNLAVCSNGEKFSNPKIINKYAKQLAYEQKQLAKKQKGSGKRLKQKKKVAIVYETIKNIRKDNLHKITHSIIKQNNIIVVENLNIQGMIKNHYLAKAISDVSWCMFTKQLEYKSQWNERNFVKIDRWFPSSKTCNNCNFINQNLKLQDREWICPKCNIILDRDLNAAKNILNQGLKILSDSEIKSDIKENT

SEQ ID NO: 12708 - protein, 400 aa, Chloroflexi sp.
MQTVRIYQLKGLDRRTRARLRAAQLEAARVWRYCLERHQVARAERSRWPDRDDLQRETKGGQFALHSQSIQLVCQQFLANVETIKQLRQGNPRHRYPYHPKKYRTVQWPAQAVSRQGKRLILPMGRGRKSFSFHLPDLPEQIGAVSLVWNGGYELHLVVPAASENEVSALADKPVQAAVDLGEIHQAAVTTNTGKGLIVTGRGMRSLKRHANMTLGRLSRLQSRCQKGSKRWRRLQYAKERASGKNKRRVRDLRHKGTRLAVDFCHAQGVQTLYVGDPQGVRNENKGRHHNQRMSQWEYGQDKQYLQEKCQQVGIACFSGSERGTSSRCPRCDWKKKPRGRTWACRRCGFVGHRDIVGSMNMHPLAFGSRISYPSSLTYRRPGPLRDRRQNKELLPSGTS

SEQ ID NO: 12709 - protein, 399 aa, Methylococcaceae sp.
MVNNLAHTIRLYPNKAQETFFRKACGCARVAYNYGLAEYKKQLDAGQKPKVLDIKKQFNQDKKVLYPWMSETNKDANQQPFTNLQSAFNRFFKRQTKFPVFKKKGIRDSFYISNDKFGVEEKKFWIPKLGWVKGAEALRFKGKITSATVKRKANYWFVVVSVETENTHTACENQTVVGVDLGIKTLATLSDGKVIESVNPFRKCLGRLKLLQRWLSRKTKGSSNRKKAIQRVSKVHYEVACMRKDVLDKLTTHLCENYQVICVEDLNVSGMLKNHKLALSISDLGFGEFRRQLEYKSLLNGNTLIVADRWFPSSKTCSGCGHVKAALLLSEREYICEYCGLVIDRDLNAAINLRNYGLEQLRAVSPEVTPVEMGALACRAASETAVNEAGISKCSVMNT

SEQ ID NO: 12710 - protein, 485 aa, unknown
  TnpB Polypeptide
VVILAVELHQFRSKVITDAGEYWAQVIKNLFCEYAPAVFCHEDQMHVHIKNAVPTSPNIAVAFTHRPKYDQIMQRLQAFKYELMPNGEQQRDMRRFAGSCRFVYNKALALQKENHEAGNKFIGYVPMAANLPIWKREAGTAWLKETPSQALQHALKDLEKAYKNFFAKRADFPRFKKKSHSDSFRYPDQKQIKLDQPNSRLFLPKLGWLRYRNSREVLGEVRNVTVSQSGGKWFASIQTQREVDQSLPIATTAIGIDVGIARFATMSDESCIAPLNSFKKHQQRLARYQRRMSRKVKFSNNWKKAKAKVQKIHASIANARKDFLHKATTTTSQNHALVCIEDLQVRNMSSSSKGNSEQPGRKVKQKSGLNRSILDQGWGEFRRQLAYKVQWRGGILLAVAPHHTSQTCPACSHVSKDNRQTQAKFLCVDCGYENHADVVGAINVLERGYRLLACGEPAQSGRSVKQEPTEATRKSTRSAVGILVL

SEQ ID NO: 12711 - protein, 384 aa, unknown
  TnpB Polypeptide
LSTSTQRIEEGFRVLTLRYPISEDVKEFIEEYRVIASHLYWCKRLGLEPDKKVVDKLWERVPSYWRWHLVDPKDPMYLFKGVEKTPMPYRTILRLPLVDALHERKGAYIKDGKLVLRLNKKLELDIPERALKWLEKRLAEKPDKKYVRVFKRDGKLIVQIVLHKINRVEIPRDPLLIVVDVNSSYGIVVNFWDKKLIKTIKFRPPNRGNRWSHVRELMSRRDLLYNQGCLTQKQINVYSSLIRLTLKGSAKGWVQQAVAKIVKRVRRMAKRHGKEPMVLIDAPDYSSLHGTPLQRTLYSFIKYLENQLSWYGVYWEEKKLYSTICPICGGKLIVEEKTRRTRIMKCTNCGFKEDRDNIPLYWTIKHLPALKGEASICEDKKAEL

SEQ ID NO: 12712 - protein, 516 aa, unknown
  TnpB Polypeptide
VWSCSLASPPLGADAPRRPLSIRMERGQAERSEAGGEVNAPRHVSAVNLCTHPDGHRNCARGHRALARWGMALASFRWLHLERMCGILMLLRHDMDDRLVSRAPCRVRVPQQHTSLGGVFCFEAAMIRTHKYRLYPTNAQTRALDFLLWQGRMLYNAALEQRVTVYKETGKGVSYYQQWAYFRDLRNASPDTLGQLNATSVQQMLRRLDKAFVAFFRRLKAGETPGFPRFKGRDRFHSLEYRHGNGCKLRAGKRMMLYVQNVGEIKVKYHRPLPDDATIKHVVIKRRAYRWYVCLMLDLPDPVIPEHPGPAVGIDMGLSHLLAFSDGALVENPRWLRRGLAQLRVAQRRLSRRQKGSARRRKAAAQVARLHERIANQRRDFWHKLTRQLADTYSLIALEDLTLAFMTANHHLALSAHDAGLAEFQQLLAYKAEEAGTQVVTVNPAYTSQACSACGVVVKKDLSVRVHVCPDCGYTADRDVNAARNILMCAVNSARTGPPERNVAHLRERALGSSTL

SEQ ID NO: 12713 - protein, 365 aa, Lachnospiraceae sp.
MTMQKGVKFRAYPNKEQKDLINRTLGCCRLVYNKGLDMRNTAYAAGEKPSYGRTSAMLTGLKKTEAFSFLKEVDSIALQQSLRDLDRAFVNMFQKRAKHPVFKSKHDTRQSYRTLNQGDNIRIVGKYLKLPKLGYVRVKQSMEVGHIHNVTVERTPTGKYFVVLNVDFEPEPRPNAGHTIGIDVGIREFFTDSNGRSVQNPKYLEQSQRKLAREQRKLSHRQKGSNNRNRQRIRVARIHEKVVNQRNDFLQKQSTMLVSENQTVCIEDLHVKGMTRNHRLAKSITSVSWSKFFAMLEYKASWYGCRIIRVPTMYPSSQTCSCCGYRNPLVKNLAVRTWECPVCHAIHDRNENAAVNILRKGLATA

SEQ ID NO: 12714 - protein, 454 aa, unknown
  TnpB Polypeptide
MPRRYCPPEGQIIQAFTFALDPTDEQSVQIARFFGARRKAFNWTLDQIKADLEHYRETGESSTPPSFYSLRKRWNAEKDTVCVNDTTGEVWWPEVSKEVFADGVRGATDAYWRWQKSRAGTIKGSKVGFPRFKKRGKDRDRFSFSTGVMRLEADRRHLTLPVLGTLRTHENTRRIERLIAMNRATILGVTVSRQGERIIAAVRVSVARPQQSGVAQPDSTVGIDVGVRRLATVATTSEVIGELANPHALEHRLSELRRLQRQRCRRTRGSSQYQETATKITRLHAEVANLRRHTIHVFTTNLAKTHGVVVVEGLDAASLLQQKGLSGAKSRRRGLSDAALGEIRRQLRYKCPWYGSTLIEADRFFPSSKTCHACGHVQSIGWHEHWTCEECNSSHQRDDNAAINLARWASLGSVGAPVKRGAEHQTESRSAAGEDTRKGSPALVEPNNSVRSAA

SEQ ID NO: 12715 - protein, 369 aa, unknown
  TnpB Polypeptide
MQKTICCKLIISSEIEHLLEEISQSFADACNFALQEAIEAKTSDALKLHKLCYSKIREQFGLSANLTIRAMRRVCANLTHLKKKRKRPKNYRPKSIDYDQRIFYYIEKEHCISVRTKQKRIKIALQLGDYQKKWLCGQNPTFATLLKKGKDWYVHMVVETKEALFCGDAVLGVDLGIVNIVTASTGMQAKGSPRREYKEKRATVTASLQSKGTSGAKRVLKRKAGEEKRRIRHENHVLSKQLVEEAKRHNCGLIRMEQLKGIRDKTKTWNKHRNRMMASWSFYQLQQFIKYKAAEAGIAIELVNPAYTSQTCHHCLKLGSRQGEQFNCLACGEIDADLNAAIMISKGGAVCKPARISSACSLAKSLRPL

SEQ ID NO: 12716 - protein, 391 aa, Bacillus sp.
MLVNKAYKFRIYPNKKQIEQINKTIGCSRFVFNFFLGKQKEKDAYWYIVEEMRQNGQLTANNWKGKFLNKFETVKSLPELKKQYSFLKEVDSIALQKSVENLADSYDRYYKKQNKQPRFKSKKNPVQSYSTKYTNGNIAIIDNHIKLPKLGYVRFAKSREVEGRIISATIRRNPSGKYFVSLATESEVIALLKTNSAIGIDVGLKDFAILSDGTIYPNPKFFRSLEEKLVHAQRVMSRRKIGGANWYKAKRKVACIHEKIVNVRKDYLDKISSKIVKNHDIIGMEDLSVSNMLKNHHLAKAISEVSWSQFKCMIEYKAKWSSRQVVTVSKNFASSQLCSGCGYKNKEVKNLGLREWECPKCHTYHNRDINAGINLKNEALRLLTAGTAGIA

SEQ ID NO: 12717 - protein, 201 aa, Bacillus sp.
LPKTNSAIGIDVGLKDFAILSDGTIYPNPKFFRSLEEKLVHAQRVTSRRKIGGANWYKAKRKVARIHEKIVNARKDYLDKISSKIVKNHDIIGMEDLSVSNMLKNHHLAKAISEVSWSQFKCMIEYKAKWSSRQVVTVSKNFASSQLCSGCGYKNKDVKNLGLREWECPQCHTHHNRDINAGINLKNEALRLLTAGTAGIA

SEQ ID NO: 12718 - protein, 561 aa, Bacillus sp.
MSIKTYFSNRIYKHRLSEEFVTMIEHALFLFNQAKHTAFNTLVKEKRSGKSKRTRSLHLTVKEQFKLDDYYANSVVQEAKAVQSSLIELNKLYIKNKAEQINSIKKKLKKVKSHLTTLQKIKKSFVKGKPSFPKNAKEQKEGNFFVVHYKMKTDLYYHAYEFEHQYLDVQMKKLKSKIGFLICKLNRKEDEVKQLKTKISSVTFGSKKRFKSQFTVDRYANNHEIWKNEWEKSRYHQMKISGRKDSHSGNFVFHYDLDCQRLRFKTPSGVVVFVENLHFPYGQDKIETAILTQKNCKNKKKFGKPIAWSVEDHGDFYIFKCMINEEENPSINYSKLAGIIGVDCNVNHFAISNANSKGQLLSSWSLPFDIKGKSSNQVTKILEAEAIEVVNIAYQANKPIAVEDLDTTLSKVSHPYGNKKANQVMSMFAYSKMIASIKARAEKMNVAVFEVNPAYTSQIGKMKYMKRFGISIHEAASFVIARRAMGFKEKLPPTLGALLPEKIIGAHHWRQWGYVSKCLKGIRTCAFYQSELFDGDKFRLTNELFSSGALTDLEKKGLSIF

SEQ ID NO: 12719 - protein, 370 aa, Bacillus sp.
MTKQNKAFKFRLLPNKKQEELLAKTFGCVRFVYNKMLTERKETYEKFKDDKEKQKEQKFPTPAKYKDEFPFLKEVDSLALANAQINLQNAYKNFFEGNAEYPKFKNRKSKQSYTTNRVNGNIGLHEGHIKLPKLKLVKIKQHREIPDNYKLKSCTISKTKSGKYYVSVLTEYEKEIKPKAIEYVVGLDFAMSELFVSSENEKANYPRYYRVMSGKLAKAQRILSKRKKGSARWNKQRIAVAKLHEKVANQRMNFLHHKSKELASNFDAVVIEDLNMKGMSKALHFGKSVHDNGWGMFTTFLEYKLKEQGKQLVKIDRWFPSTKKCSCCGSEKPMTLSERIYRCFCGYVADRDYNSAINIKNEGIRLLALS

SEQ ID NO: 12720 - protein, 228 aa, Bacillus sp.
LNATIRRNPSGKYFVSLGTEIEVAELSKSNSVVGVDLGIKNFAILSDGTIYSNPKFFRTLEEKLVKAQQTMSRRTIGGANWYKAKRKVARIHERITNARKDYLDKISTQIVKNHDIIGMEDLSVSNMLKNHHLAKAISEVSWSQFKSMIEYKAKWYGRQVITVAKNFASSQLCSCCGYQNKDVKNLGLREWECPKCHTYHENRDINASINLKNEAIRLLTAGTAGLAY

SEQ ID NO: 12721 - protein, 447 aa, Bacillus sp.
MARKKAIKVLRKQKKTEHIQRFTQKQNIGSGVLTSKEFRLLQRMSHSSKALRNVGLYTIKQSYLNTNKIATVKEIDTAIQADMNYWGVQSNSAQAIRRTLYAEAKSFFKALEKWKKNPEKFTGRPKFPKYSRATEKRVIEIYQVPKVDKEGYWSIPMNVEFRKRYGSIKIRMPKNLLHKKISYIEIVPKQKGRFFEVHYTYEMHVSQMKKQPTTTNNALSCDLGVDRLLSCATNKGDTFLIDGKKLKSINQYFNKMISNLQQKNIENGLSKRVVTNQLAELWNKRESQINGYFSQAVGLLFQKIKEGKIDTVIVGYNAGWKQECEMGKKNNQAFVQIPFHKLISAFENKCVKEGIRFLKQEESYTSKASFLDKDFIPVWSKDNKTTYRFSGKRITRGLYRSKNGRCIQADINGALNILRKSEVVELDDNMILINPILLEVQKRKVVA

SEQ ID NO: 12722 - protein, 402 aa, Nitrosospira sp.
MQRLQAYKFELKPNGEQQRLMRCFAGSCRFVYNKALALQQERYEAGEKKLGYASLCKSLTEWKVQPKTLWLSETPSQALQQALKNLERAYKNFFDKRADFPKFKRKGQSDSFRYPQGIKLDQGNSRVFLPKLGWIRYRNSRDVLGEVKNATVSQSCGKWFVSIQTEREVVQPLLHGEAVGIDVGITRFATLSDGSYLEPLNSLKKHQQRLARYQRRMSRKVKFSNNWRRAKARVQHIHSRIANARNDFLHKASYQISQNHAMIVIEDLQVRTMSKSAKGNSEQHGKQVKQKSGLNRSILDQGWGEFRRQLEYKAAWNGGFVVAVPPHHTSQTCPCCGHVSKDNRQMQAKFACVECGFEENADLVGAINILAAGHAVLACGELVLLGRSLKQEPTEATQALAA

SEQ ID NO: 12723 - protein, 194 aa, unknown
  TnpB Polypeptide
MDTAPPPKPSLEDIDTEEMVGIDVGILKHAHDTDCTAVESLDLSEERDRLEQYQRKLSRKEYESNSWKNQRRRVAECHLQIKRKRRDFLHKLSNYYAREYELVAVKDIDVKGMMESPRNSRNTASAAWSTSPIYSKRRVTAKVRTSWKLNPKEPPKSTLSVASKLTSRCGCVNTPVRPVVSRRTETQMRSSDYV

SEQ ID NO: 12724 - protein, 590 aa, unknown
  TnpB Polypeptide
MLKPFWNKKCETFSEDLWKPDNKDLKKSKEDTPYWNCDNKNISFTHYLPKKEIDINIDFDFKPIPTINNIANKRKMFYGSFNVEIKRLETKIKKNKIKHNDIIKYMNIIKKTQIDAEKNDNPIKKHKEFIIKIRKELAFFKNKSSKIDTKNKCDPIMTQHFEQVDKIFEKMSRLDDVVYCKKVKILPDSDQQDIFISWVWNTIEIYNNLAEEFNNIQDEILEKYEETDKRIYYSKFLIAELKNYPNFPIGGKNLRNVKIHSLTEEYSDIPFCVISDTIMEFASNLKGNLTKLGKGQIDNFYFKPRKFGKKNKTIPIQQNYTSDRGFYPSIFGEIETDDADFDWKSICSDYKVVYDKYKHTFNLHIPSYKKVHIVEHDRHPIGIADPGMRTFQQLYGLDHIIAIGEKMYKPIMEKINKIESMERRIKDNSKARKNKRTRNKDSKRISNSTKKNLRRAISRTHSKIKDVVSEMHNKTSIFLCKTYDRIMVTDFSSKKVNGKEKGLQKNHKKVLGKLSHYRFRQRLAQKCLEYRCHYIEVTEEYTSKTCCNCGNQKNDLGTKKHYDCDKCNMSIDRDTNGAINIFIKNRSEVI

SEQ ID NO: 12725 - protein, 236 aa, Acinetobacter sp.
MKTLKLRIKDKHCKVLDQLASEVNFVWNYVNDLCFKHLQRKQQFFSAYDIAKYTKGASKECNLHSQTIQAVTEELVTRRKQFTKSKLRWRVSNKKSARRSLGWIPFKKVAIKYADGYVQYGKHQFKLWDSYGLSKYSIKTGSFVEDSRGRWYVCLVVDSPKQNKPTATKAVGIDLGLKDIATCSDGTVISNPKFYRKYEQKLGIAQRARNKKRVRAYTPRLQTVVKTICTRLAPSW

SEQ ID NO: 12726 - protein, 358 aa, unknown
  TnpB Polypeptide
MLLSIKTKLKLNKSQATVMSKHAGIARFTYNWGLATWSYLYKDGVAPNKYLLKKFFNNHVKPEFTWIKETRICQKITQYAFDNLGDSFSRFFSKKGGYPNFKKKGHHDSFTIDAGGKPIPVGGTSIKLPTIGRVKTYEGLPHTTCKSITISRTADSWFIAFAYEQSHEPTVKCHEVVGVDLGIKTLATLSTGVVFSNPKYYKTHLSKLCRLSKELSRKENGSSNRFKAKHKLAKHHAKIANLRKNTLHQITTYLCKNHATIVVEDLNVSGMLKNHKLAQVIADCGFYEFKRQLEYKAKKFGCEIIIADRWFPSNKTCSNCGHIQDMPLKERTYNCGGCGHSMDRDLNAAINLSRLAKA

SEQ ID NO: 12727 - protein, 319 aa, Micromonosporaceae sp.
VVVYRTARVGLRVTEGQRRRCFGLLRSAGDVWACVLEVNAWRRRRQDSPLAGYQELCRQLAASGPGTFGDLDSVGARSVLRRFSDAWFAAAKRRKAGDATARFPRRRRALVPVRWYQGTFTIIGRRVRIPTAKGSPALWVRLARDLPYPVEHIRSITLGHEGGRLFLDVTAEVPVAAYPPGEGPDPGRVAGVDLGIIHPYAVAGPDGQGLLVSGRAIRAEHRMHLADTKGRRRAVARRAPKPGQKGSRRWRHYRRRTRQVEGRHRRRVRQAHHEAAKTVITWAVQQRVGVLRVGDPRGVLDVPAGRRHTCGCGSGRSAG

SEQ ID NO: 12728 - protein, 384 aa, Micromonosporaceae sp.
VDVKLVVQVRLYPDAVQEAALRATLDLCNEAANLASVEAFQRRIFAKQALQRLTYGRLKALGLSAQPAIHVARKVAGAYATLRANIRAGNLGKAGSKRRRKVEAKPIGFRRNAAQPFDDRCLSWQLAARTVSIWAVGGRLNRVRFGCSKQQYATLVAHRRGESDLVHRDGKWFLYATCDIPDVDVTEPDGFLGVDVGIANIATTNDGTRHCGKGLNRVRHRNQRLRAKLQRIGTKSAKRLLKARRRKEARFAADTNHRIAKQIVTEAERTGRGIALENLTGIRDRVRLRRPQRVTLHTWAFHQLGQFIAYKAARAGLALVHVDPAYTSQGCSACGHVAKANRPNQSTFRCTSCGFAEHADVNAARNIATRGATDWAAVSLPNAA

SEQ ID NO: 12729 - protein, 404 aa, Mycobacterium sp.
MQMRYRYRIEPTPAQQAVLARVFGCARVVFNDALRVRGEAYRAGVQLSDSEIQRRVITAAKTTQERAWLSEVPSVALVQSVNDSRRAWRNFFDSGSGKRKGRRVGHPRYKSRKDHRQSFRLTRNGFSLKANGRLFVAKVGQVRARWSRELPSEPSSVTIIREPDGQFYASFVVEVPGCPLPVVGREAGVDVGIARLATIATSDGGRSEIDNPKHLGRKLGKLRRLEREKSRRQKGSTNREKSRRKVAVAHNEVARARRDYHHKQALALVRDNQAIHVEDLNIVGMVKNRRLARAISDAGWGQFVRIIGEKADRYGRTVHRVSRWLASSKTCSAPGCGYVLDELPLQVRTWTCPDCGAVHDRDHNAAKNILAAGRAERLNACGVPVSPPTRKARDDETGSTPTAA

SEQ ID NO: 12730 - protein, 417 aa, unknown
  TnpB Polypeptide
MIRSWSIVTEANNTIHGMMSEALSIYDKALYFQRQKYFETKKQGDIKTYDYNDLYELVKETDVFKNSKLDYVLRQNQIREVIANWNKYIKAVIRYKEHPELFDKKPRIPNYLYKRKNYTSVYVDSSRFRKGKKKIEHSITLPCTTECIVIPRQIDIKSIHQLIMKPYYGKVKICIVFNEKTKKIKIDSDKRSAIGIDIGLNNFCAITSNDKSISCVVKGDSLKSINQYYNKKRAELYSELAKCNKNQESSHALDRLSMKRKHKMYNFIHAVANRIIRLCIENRISTIYIGHNKGWKQNANLGRRNNQNFVSVPFNELINTLQDKAKRYENLKVVVVEESYTSKCDHLAYETMEHHDTYLGKRIKRGLFKSSTGKELNADINGAIGILRKGNAISDVQLKNLRDRGDVVSPKVLRINP

SEQ ID NO: 12731 - protein, 383 aa, Nitrospiraceae sp.
  misc_feature (57)..(58): Xaa can be any naturally occurring amino acid
MRSRKGGLTSTRPSSSNVRNTAVSPIRSTGLRPRSKTASCICLDSESSDCLTTVRSXXTVKFKQGRWHCIVTAEAQEKDILDLIRPDDPRQDAGFDTGLTALLTDSEGNEYDPPRAWYDYRARLRSAQKKMSRQFEARGKQYEILAAHAKAEGRPVSPIKDIPYSNRLKAQIKVVAKLHTKVDNIRDHHHKKNASVVESRYRKSAVEEHGVQFMIRNRRLAKVATDRAIHRQKLLLKSKLGKRYIATPNQTENGGNSQTCTCGAPVPKELKDRIHHCPVCGLTAGRDHVAANIVSIIAFGIASLTLGAGSHSPEAGQVFVRRGEDKALCGESRLCESECIPASESSGKRQPSQALRRGTTGAEATVGGKTRSSRIADRYGIAT

SEQ ID NO: 12732 - protein, 392 aa, unknown
  TnpB Polypeptide
MLYVYRFRLYPTKGQVEFLNRQIGHCRFVYNKLLEIAKESYEKEGKKWNYYEYKKLLPRLKEKFPFLKEANSQSLQEAVKWLDRAFKNFFKGLGRFPKFKSKKRVNSLSIPQHFFIEGERVKIPKLKTPIKFKKHREIEGKIRRISITKLPSGKFYLNVLVDRKIEPLPETDKVVAIDVGLTHFCTLSTGEKIENPKYLLRTEKRLKKLQRELSRKEKGSNRYRKLQRKIAKLHEKVVNQRNDFLHKLSKKIIGDNQAVIVEDINTKGLLKNSNLSKHIADASWRRFISYLEYKARLYGRKLIKVNPFYPSSKLCSVCGYKNESLKLSDRKWKCPKCGTGHDRDYNATLNLLKEGLKLIKGSLTLRAVGLGRSELTPVESAVALVEAGSSSF

SEQ ID NO: 12733 - protein, 112 aa, unknown
  TnpB Polypeptide
MLIRENQTICIEDLKVKNMMRNHKLAQHIGSASWSKFFDMLSYKSIWYGNDIVKVPAMYPSSQTCSCCGFKNPLVKNLAIRKWECPECHTKHDRDTNASINILNKGLQMQSA

SEQ ID NO: 12734 - protein, 369 aa, unknown
  TnpB Polypeptide
VLLEETSRLFTAAFNQFVRFGWDAKVGNATKLHYLAYYAVRERLPTLNSNLINTARAKASEALRSAFALQEQERKVGMPHADACPPRYNVHTYRVDWESQTVRLSMVGARQTIRFVVSAYCAHYTGYPVDTADLINQNGIWWLHVVVTVPAPVVEPTDEVVGVDLGLAQPAVTSNNQFLGKRVWKDVEGRLFHLKRQLQRKGSKSAKRHLRKVRRKQAHFRRDCDHVLVKQIVQSAQPGATIVLENLKDIRKRSTIRKRTKTSRWVHSWSFAQVKGFVAYKAEGRGCTVAGVDPRHTSQTCSCCGHVARNNRRSRGRFVCRVCGFELHADLNAARNIAAKYHASGGRPPTGGLPVNQPIVSVPVPRHQE

SEQ ID NO: 12735 - protein, 363 aa, Cylindrospermopsis sp.
MLLSFKTELKPNNKQVTLFRQHCGVARHAYNFGNAVIMEAWKARQTDKSIKIPTAIDLHKRLVAEVKPNNPWYYESSKATPQQALAEVRTAWERYFKKVSMEPHFKKKGKSHDSFYLEQGTKAKPGIRNDGKRVKLPKIGWVRLHEALPVRAFHNCVISRQADRWFIAFKCEIEKPAVPLDHPLVGVDIGIKELAVTSDGKVYSNPKAHRKMNKKLKRQQRSVSRKVKGSKNRAKAISKLAKTHAKVSNIRKDAIHKLTYDLAKNHSVIKIEELSIKAFLKNHKLAGAIADCGMYEFKRQLEYKTEKFSSQLVLVDRMFPSSQICSNCGKHRHKMPLKERVYVCPECGHTQDRDRGKKSRAMV

SEQ ID NO: 12736 - protein, 452 aa, Lactobacillus sp.
MAESWVQEKRSRSKTFAFTEKLKVTLSCEQILQHERARAVQDQLFNYSLNYMYKTYGRKHIDRNIPTGINRHKLINLLIKLFLDEKYQLNRWSHKILFLSSHNAQLFLQTLIINFTEYQKVLRAGFKWSDRIKFQYKQNIIKDKHGKHKNPHHNSWYKRGHLRFNLKSRTRAVEIQTNTPIQVLSARVIKVPNFGILHLHKGAGEYDFSDVKIIKLKRKGDSTYQLQIVRVQPKDRSNVKAEPAIGIDWNMTNNVAYHDSNNKQYPLPLQVIAKADFYERQINKFKRQRSLKHGSLKKVTKKIQKLSAKRAHLLTEAYRQLAIEIVDPVKVLIMEKLGSKDMRKSTGKAKNRKLALLKPYEAKQVIQNRAFKRGVTVVEVDAYKTSQVEYGTEFVDKHPLTQREWVSPLTGKTIDRDHNSSQNILDWGLHPSHHIKVKQFPKVTAAMVSSII

SEQ ID NO: 12737 - protein, 277 aa, Okeania sp.
MKSIRTKLKLNNKQKTLLAQHAGYSRWVYNWGLSLWNAAYRDGYKPNPRKLREVFTNHTKPLYPWMKNLSSKVYQYAFIHLGEAFKRFFQGLGKRPRFKKKGKHDSFTIDNCGKLIELNGWSHKLPFIGIVKTYEPIEATTKKITISRQAGDWYLSCSYEFHAISTAKKTDVIGVDLGVKTLATLSDGQVFESVKSYQRFEDKLSRLQYLNRHKELGSANWRAAQLKIAKLHRKIANIRHNALHKLTTYLAKNHGTVSIEDLNVSGMLRNHKLAKIS

SEQ ID NO: 12738 - protein, 321 aa, Coleofasciculaceae sp.
LKAYRSDATKFLGKPKLPRYKDKESGRNILTFNYQAVSKTWLAKGFAVLSGLQLKLKTKISTLKEVRLIPKGQFYVAEIVYEQELPKIEINDRVAAVDIGLNNLATVGSNCPNFPPFIVCGKALKACNQQYNKVISLLQSQLPNDRFFSRKIAALTNKRNAKMDYYLHTSSRFIIEQLVKQDVTHLIIGKNDNWKQNLNLGKRTNQSFTSIPHARFIQQLEYKAQLAGIKVTVTEESYTSKCSFLDFEPIKKQVVYLGKRVKRGLFIASHGKKYNADLNGSLNILRKVVGNSVFDGKLIERLVVSPVRVKPYKASCVDICP

SEQ ID NO: 12739 - protein, 454 aa, unknown
  TnpB Polypeptide
MRGGYLSMKVYSSYKVKIKNYNKIFNDTVKIYREAVSFFINICDKEWVILKDIKNLERCREIERLSLSTKKNPNPNPKYDFNAMFYKMPSYLRRSAINIATGCYSSYYSNFQNWKENPTGKKPILQLDRSVMPVLYKDNMYIRTDETHAQIKIFHKNDWVWLNVELKNQDVKYIQKHCKLKKEYVPTLKKQGKCWYLVFPFSDDAKFQKVDIQDQIICAVDLGLNNNATCSIMQSDGTVVGRKFINLATEKDHLYKALNRVKKAQQNGTRKCPTLWKHVNDLNTDISRKAAKGIIDFAVLYNADVIVFEFLDTQGKKSGKGKQKLALWRKKEIQRIVEHHAHILGIRISRICAWNTSRLAFDGSGRVERGTYIQNGKEKYNYSICTFQNGKQYHCDLNATYNIGARYFIRELLKSDSVMRRLPSQTKDSDYGTGATRTLSTLIRLNADLCGIAA

SEQ ID NO: 12740 - protein, 526 aa, unknown
  TnpB Polypeptide
MPRPRRRKDSSFEASVTKSVFLYGRPNKDKLALLKQMQAVFTALVNEDIQILNTREDLMMQLVKNDKKDSTMRTLEKTIRRKGLSSAFSQNAFDMAVTHLSNRLDEIRLDLLAEGMDSFARSKALFAMSIMQKSRMEMISTMEKLEKDFYLECAKKLQDMTEEEFTITQRIFQDLYAMKCLEYRIPQLQSVSVPLDSRLMRIEASDHVKTPYVICMTDPFRKNHRIQIPINASAHSLHKIQSRKMAGTVTMQIRKGKLRIGWAYSKHMKQPKTDNMIGVDIGITDALYTSDDRQIGSMKEALNFYHDTVEPAFAELSGLRNKIRSISFYLRTHDLPDDVRRSLIEKMDRLSTMMQTMDAPYRKKRHYYDMLNTAIAAAVKEYIGSLLPEILTVLEKLDIREFTKSKTSNGRFSMFARGKLQHRLMEELNWYGFDFLEVVPDYTSQVCPVCHNLDSNNRNGKDFTCTCCGHHDDADHVGSLNIKARASDKEIKDICEKHKYDHKNLQTALRILYATRHQEYINTESA

SEQ ID NO: 12741 - protein, 392 aa, Halomonas sp.
MLKATKIRLYPTAEQAECLNRQFGSVRFVYNMGLRIMSHRYKCHGQSLSAKHDIKKLLPVAKKSRKYGWLKEADSIALQQACLNLDHAFQRFFDPKQKAGYPRFKSKRGKQSSYHCVGVKAGEDWIKIPKLGPIKARVHRQVAGKLKSITLTRTTTGKYYASLLVETEEALPAPLSSLDGEAVVGLDAGLTHLLIDSRGRKTANPRFLRQAAANLRRKQKALSRCQKGSRRRAKARLLVARAHERLANARNDFQHKLSRQIVDDNQAVIVETLKVRNMMKNARLAKHIGDASWHALITKLDYKAREQGKHLVKIDPWFASSKTCHVCQHKMMDAMTLSIRSWECPACHAIHDRDINAALNIKHQGIINLKAEGLSVSAHRGLRKSDTSSAAA

SEQ ID NO: 12742 - protein, 369 aa, Lihuaxuella sp.
MANKAYQFRLYPTKEQEQLLAKTFGCVRFVYNQMLAERKETYEKFKDDKEALKKRKFPTPAKYKKEFPWLREVDSLALANAQLNLKQAFKNFFSGHAGFPRFKSRKAKQSYTTNVVNGNIKLSDGYIQLPKLKWVKIKEHREIPPHHVIKSCTITKTKTGKYLISILTEYAHQPVQKEVKNVVGLDFSMNTLYVDSEGKRANYPRFYRQALKKLAKAQRVLSRRKEGSNRWHKQRLKVAKLHEKIANQRKDFLHQASRQLANRYDGVVIEDLNMKGMSQALHFGQSVHDNGWGMFTTFLQCKLEEQGKKLIKIDQWFPLSKTCSCCGRVKSSLSLAERLFRCDCGFVADRDTNAAINIKKEGMKQLGVA

SEQ ID NO: 12743 - protein, 287 aa, unknown
  TnpB Polypeptide
MRGAVLRLAKMGAALRYVWTWPDIDPADLDPTSVTVVKDRAGRWFVSFQVDVSDPAPLPATGERVGVDLGLTDLAVFSTGEKIPHPRDWERHERRLKRYQRRLARCQKGSANRKKAGLKVARAHARVADGRRDFLHKLSTRVIRDNDVVAIEDLNVSGMVSNRHLARAISCTGWAEFRSMLDYKAHRHGRRVIAVGRWYPSSKTCSACGHLLAALALGTRTWQCPSCGTRHDRDINAAKNILAAGLAAGAVDGADACGGDARRTGATRALSPAKQESLGASPGIPVL

SEQ ID NO: 12744 - protein, 395 aa, Streptomyces sp.
VLEARHAGVAEDWRAGRVRVVRGGRRLLNTRHHLEAAQLTEAEWRRRWEAERWFLAADGESGKRFGNETIRLSPDGEVSVKLPAPLAHLANARHGRYILACAVEFRHRAGEWRDRVESNRAVAYCIHLDVARGRWYLTASWQRPVVKTLPLATARAQGMVGVDTNADHFAAYRLDPHGNPIGDPHRFFYDLSGTTGHRDAQIRHALTRLLHWTRRCGVTAIGIEDLDFATEKTREKHGRHKRFRQLISGMPTGKLKARIISMAAELGLAIVAVDPAYTSMWGDEHWRKPLTSTKRQMTRHDAASVAIGRRALGHPIRRRTAPPHDDRSDRRGHRTVQATSDGRGREETRPRIPGPRTRCASPDRGTKAGDQCAQHRSEHTAEQQSWQQDSLPLSL

SEQ ID NO: 12745 - protein, 169 aa, Caballeronia sp.
MPSCSSLNRIIAYSKRRLPGRSGRRSRSSCAHSARKPRTVARISITSTPQRSCASTTRFFVGHVNSLALAKTRMAQSVLDAGWGMLRTMLRYKCDDAGVWFEQVNEAYSTQTCSCCQSRTGPKGVAGLGIREWACAVCGAYHHRDINAAINILAVGRGRLAGGIPALSA

SEQ ID NO: 12746 - protein, 543 aa, unknown
  TnpB Polypeptide
MKTIVGITNNLTENELSQLDNFVSLYNKISHKLYVDLFIKKLPIKELCPLYQAKYLISKRHFDSIRKTLEGKVSSILSLNKNYIIDTRDKIKSIEKDLAKQTKTYNSYKDKITKEGKLSLIEHNLKKNLQQKIQYNLQRLLKLNNKLKDLEEIKNTGNVRLCFGSNKLFRQQFLINTSNNLTEFKSHEQWYEEFNYQRNKQFTFVGSRTDACGNYNAQITHIKDNLFNLKLNIHPHTDKLTDKYINLTFIINYEINSLLNVLNKNNQINDKEIRQPLTVTLIKQPSKSHNKDKYVVSISFEKHLIKKTYTSKDKGCLGVDINQDHLAISNLDNKGNLLNIDTFNYDLNGTKHQNNNSISLAVKELIKLGLELNKPIVIEQLNFNAKKKSLKSSNNQYVKNKQLSSFAYSKIIELIKARAEDNFIEIREVNSAYTSIIGSIKYSVRSRIDVHHAAAICIGRKGLFNKPNKEYKEKRISSRNRQIKNLVLPVRNGLSSVVYWKELKENMVKDKQHEKESSSNVASKSTSLGNSNEPVMKFNVISV

SEQ ID NO: 12747 - protein, 372 aa, unknown
  TnpB Polypeptide
MKIDTETEQKLTQHTGSCRYFWNKILADNEHRYISNTPRISFADACKLVTLWRESDEYSFLADVHSQALQQALRDLDRAYINCFEGRAEPPNFRKKFLDDTFRFPQGYQVDGSRVYLPKIGWVWLWKSRDIAGTIKNVTVSRRVEHWYVTFQTEIDIEAPLHLSEAAVGIDMGVVCFATLSDGQLTQPLDSFRKYEERLAKEQRQLSIKVKFSNNWIKQKRVVNQIHQKIAHCRHDFLHKHSTTISKNHAIIVVEDLQVSNMTRSAKGTVEAPGKNVAQKSGLNKAILDQGWGMFHTFLEYKQVWRGGEVIAVAPPYTSQKGAECGHVSPENRPSQAVFSCVACGHTDHADVNAARNILAAGLVERLNACGP

SEQ ID NO: 12748 - protein, 418 aa, Calothrix sp.
MKNVAKVRIYPTIEQKQLLSKAFGCARWYWNNSLNATNEIYKQTGKGLSQIGMNNRLPILKKEFEWLGETYSQVLQSVSLNLSRAFVNFFEGRASFPKFKSKHDKQSIQYPQNVKIVDNKSLKFPGKLGVVPAKIHRMFDGKIKTVTVSMNSAGKYYASLLFDDGLPDVEVRSEGKVIGIDVGLTHFAITSDGSKFDNPKHLKKRTKNLKRKQQKLCRKQKGSNRRYKARRIVARIHERIANSRKDFQHKLSRKLVNENQVIIVENLAVKNMVSQRVAGVPPVVATGEPVRVKNHCLAKSISDCGWSKFTRQLKYKAERDGKIYLEISRFFPSSKTCHVCLNQVGSLHLDVRSWTCTNCGTKHDRDVNAAINIRDEGLRLLALGTSATANGRDVSPRVGRKSSVSKAAPVEIGSPIPL

SEQ ID NO: 12749 - protein, 450 aa, Lonepinella sp.
MNKLLSIGQASKVLSVTIQTLRNWDKKGLLKPDELTKGGDRRYKLETLKAINHNIVFNRDDLKTIAYARVSSHDQKEDLVRQVQILELYCSKQGFNYEVIQDLAFQKFFRDLKQGKVSYPQFKKKRDNAGSYYIGGDQVVLSDTNKNSKKYKKIITECNAQYLKVPNLGYVKLSERLRFSGKINSVTISQNGDKYYASFSVSIAEENYQPQPKTKLGLGIDVGLKSFVSLSNGLEIKSPKPLAKLARKLKTKSRQLSKKQHPKTKGEKTKKSANYLKASLKLAKLHRRIANIRNNFSHKLSSSIIKQADYICLEDLNVKGMMKNHQLAKSIADVSFYEFRRQLEYKAKYNGKQIIFADRFYPSSKTCSQCGSIKKELKLSERIYCCEHCGAKINRDYNASINLLRLMEKQIGQVLPEFTPMDLTAIQSDLAINRIVTSKVEVGIQQRSNL

SEQ ID NO: 12750 - protein, 398 aa, Mycobacterium sp.
MLAGRRFRLELTEEQDRLAQQTADVCRAVWNIGLEQRREYRRRGAWMNYVPQAAELVDAKVEHPWLRQVPGHCLQQTLMDLDKACRRHGTFGVHWRSSRRWVPSFRFPEGNKMELQKLNCNKSRLKLPKLGWVKFRSSRSLDGEAIRSATLTKEGRHWYVSVLVDDGVVAPEDHGAPDAEVGVDRGVVVAVATSDGDLLDQVFSTAAEQRRAVRLQRKLSRAAKRSANRNKTRQRYAGLRAKEARRRQDFCVKTARVLAEKNAVVVLEKLPAKNMTLRAKPVADPNNPGCYLPNGAAGKSGLNKAILSKGWYRFELALKSVSRYTGTKVVKVPAAFTSQRCSVCKHVDPKSRESQAVFRCTHCSHGEHADINAAKVILAAGRALGLKADSQNACGDDP

SEQ ID NO: 12751 - protein, 374 aa, Halomonas sp.
MTKRAYKERFYPTPEQAELLAQSFGCARFVWNNTLAYRTEAYQIHGQSISHSAAEKRLVALKAEYLWLKDVSSVILQQTLRDQKAAFDNFFNSKLNARYPRFKRKDRRQSIRLTRAAFRYRDGEITIAKATEPLPIRWSRPLPCAPSSITLSRDRAGRYFISCLCEFTPETLPVSPKTVGIDLGLTDLFITSDGHKSGNPRHLKRYEAKLAYHQRRLVRKQKGSKNRTKARHKVARLHAKIADCRRDAIHKATRTLVNENQVLCVESLNTAGMVKNRLLAKAISDAGWGEFVRQLEYKAEWAGRQLVKVSRWLPSSKVCHGCGHRVEKLPLSQRRWHCAGCGGAIDRDINAANNIRTAGLAGLACGATGAGTAA

SEQ ID NO: 12752 - protein, 366 aa, Psychrobacter sp.
  misc_feature (277)..(343): Xaa can be any naturally occurring amino acid
MKTLKLRIKDKHAKQLNILAGSVNFVWNYVNELSFKHLQRTGKFFSAYDLAAYTKGAGEYLNLHSQTLQAISEVYAKSRKQFKKAKLNWRTNNPQAKRKSLGWIPFKKTAIKHLATRQSGKKSLKSTIQLSLAKGKKLTIDLWDSYNLSLYRINTCELVQDARGHWYACVTVKEFPKTKCGTGQVGIDLGCKDSAVSSNGDVLTTKLTQQYAEKLAIAQRAKNKKRVRAIHAKIKNTRQDLIHKFTNKLVKANSLIVVGKIKSTSFTSSKLAKSVYXXXXXXXXXXXXXXXXXXXXXXXXXXXXXXXXXXXXXXXXXXXXXXXXXXXXXXXXXXXXXXXXXXXLVGIPSLTLGRGGSQNRVCNRLN

SEQ ID NO: 12753 - protein, 276 aa, Psychrobacter sp.
MKTLKLRIKDKHAKQLNILAGSVNFVWNYVNELSFKHLQRTGKFFSAYDLAAYTKGAGEYLNLHSQTLQAISEVYAKSRKQFKKAKLNWRTNNPQAKRKSLGWIPFKKTAIKHLATRQSGKKSLKSTIQLSLAKGKKLTIDLWDSYNLSLYRINTCELVQDARGHWYACVTVKEFPKTKCGTGQVGIDLGCKDSAVSSNGDVLTTKLTQQYAEKLAIAQRAKNKKRVRAIHAKIKNTRQDLIHKFTNKLVKANSLIVVGKIKSTSFTSSKLAKSVY

SEQ ID NO: 12754 - protein, 385 aa, Micromonospora sp.
MLLRYNFRVYPTPGQRTALARTFGCARTVYNDGLRAREEAHASGQPFPKSGDLSKRLITQAKKTPERAWLSNAPVGVMQQALRDLDAAYRNYFDSLSGKRKGPKVGAPRFRSRKDNRQTAKYTKSDCFSITKGGKLRLPKVGEISVRWSRALPSTPSSVTVVKDTAGRYFASFMVATAEDETLPPVGSEVGIDLGLTHFAVLSDGTKVAAPKFLRRAARKLRRLQQDLSRKQRGSNNRKKAVVKVARAHARVADTRRDWQHKLSTAIIRDNQAVYVEDLCVSGLARTRLAKSVHDAGWSQFVGMLEYKAARYGRTFARVDRFFPSSQLCSACGFKDGPKPLVIREWKCVNCETAHDRDINAARNIRTEGHKVAVGRAETANACGG

SEQ ID NO: 12755 - protein, 274 aa, unknown
  TnpB Polypeptide
MLVFEFKAYGEKQQFAAVNEAIRTVQFIRNKALRLWTDNEKIGKNDLSKYCAILAKEFPFCDELNSMARQASAERAWSAISRFYDNCKKKVPGKKGFPQFQHDNRSVEYKTSGWRLAADRKSITFTDKQGIGKLKLKGTRDLNFYQITQIKRVRLVKRADGYYVQFCIQVDRSEVLEITGNAIGLDVGLKEFYTDSNGIAVENPCFLRKGERRLKKAQRRVSKRVKGSQNRRKARVILGKRHLKISRQRKDFAVKLAKCVIQSNDCVAVRRFED

SEQ ID NO: 12756 - protein, 656 aa, unknown
  TnpB Polypeptide
MVTAIDTRTFGLKDLDIDPEIRTGYIDTVNYYIKEGILLDYHFFERDSLKSVKTFFDQIEKCQCELKDRIHRCAAQTAYFAIQGYRRNQQNLILMIDDIRTHGWFNSELKTKLAGVIPYYEIDNKLGFLKNQFLPHLQDLQFDLNKFNKNKTEQKKYESLINKTFKKTMIKLEKSFIRREIIAMNRRFKELLNGNTSHPSNEDKTILGILGLKTIKDVRYVGDKQWNNAKIAWKQSIGKFSKNICDVTNWGTKFASKRIINQLIKDKEPKIWTNGATFKDYMNFVKLEFDNLLFLQQCDFFKKELEQSINSELSKLRLDLERDLPDCLKIPKTTKFAIPLGIGEDVVAKLTEMEKEEGQKYADIEFQFSARSHKFLTTKLKDPDRYWDLINMGYIAKRGVLSQTQNGQCVLHIPFAIKVSDWRDNDITASGDLGLKTYNTIVINNKKKEIARAFLNQKQFDGKKDKWFLNPTSLKTVNLKGKLRQHRWIARKEQSMKMQSHRRSKQRFIHRRNEKDKWRKIKNIHKEMIRQIATRTVAMLDYYEVSLFVMEDLRWSHHTPKSVGGYYLATWQIHWFFAQVQEMIEAMCTKIGIKVQKVNPRDSSKLCHKCGERGVRSGKTFTCKSESCKLYQIDSDLNAARNLIQRSRKYKKFPDC

SEQ ID NO: 12757 - protein, 589 aa, Bacteroidales sp.
MNMLTLKKQKNSFKLPLKLLESGIKKVKYVLLELHPDKEDIILRIYKTLWVGILLMIKNKKSVTVESLPPSKWMTLVDKQLFSNPNSLITSWLQMSVQELIGTGKVLKPFWTKQCTELSRKLWLPRETDSVVSHSNFWNGSSNKMELNSWFSMKKMENPVIKNSHTTFSPLFMSTPVDKWENDVIRTRKLRLYPTPDQKKIMKNWMSTRRYVYNKVLEKIKKENEKINFFDLRNKYVTSKDNPLVEEWETETPKDIRAGAVNDVVNNYKTSFSLLKNRQISGFNMSYQSKKKKEPSIEIPLSAIKATPEKVNRTEEEKEIVKSKIAEKKKVSDTKIKVKITKKDGGVFLYKNIMKTKIKISKRQLREDIIIESDCRLQIKNNNWYLIVPIKKKETKIDQKDEYCALDPGVRSFQTIYSEKSVEQIKINKEVIKNLQVKLDHFKSLRDKKMIRKSSFKKRERRIYNKVNNLIDELHHKTINYLTKQYKHIIIPSFESQDMVKSSKNRFLNRSLLQLKHYQFQQRLKSKCEIRRCHMEICTEEFTSKTCGSCGILNDVKDKDVYVCKCGIVIDRDVNGARNIFIKVLNKRK

SEQ ID NO: 12758 - protein, 166 aa, Parageobacillus sp.
TLFFKGNQCAYIRRRYAAKRRKLGKTKKLNAIRKFKDKEARWMKDHNHKISRQIVNFAVSNGVGLIRMEDLTDIRNRANSKKEAGRNLHSWAFYQLKEMIRYKAEMAGIWVEIVNPEYTSQTCRCGHREKANRSGIRFKCKQCGYTIHADLNGAINIAKAISGLVA

SEQ ID NO: 12759 - protein, 441 aa, unknown
  TnpB Polypeptide
MQIVSSYGVEIKQKNIPLCSTLDIFRKAVSYLIPVYAETWEELSEIRNPQKRFNEAEHLVHETKKNHARFPFDRHFPKMPSYLRRAAIQHALGAVSSYQTRLSLWEKGELRGKPKLVCENHAMPVFYRDVMYKEAEPGEDVAHVKLFDGREWKWFQVKLLHTDMEYLRKKWSGKKASAPTLEKKHHKYFLRFSYTEEVSLSKTDVKEQVICSVDLGINTDAVCSIMRADGTILGRKFINFPSDKDHLYHVLGRIRRFQREHSSRQVQSRWDYAKRLNMELSRKIAAEITKYAAEYQADVIVFEYLEMQGKISGKKKQKLHLWRKRDIQKLCEHQAHRNGIRVSRVSARNTSRLACDGSGVVVRNPENYSLCTFRTGKQYNCDLSASYNIGARYFIRELLKPLPETERSSLEAKVPAVKRRTSCVYADLRKLYVEVNNLKAA

SEQ ID NO: 12760 - protein, 574 aa, unknown
  TnpB Polypeptide
MLSLKLPIIHNSDASFVEDKMKQHGYAFREVLKRLDESSNQGFEDEIKDKFNLTDIEYRSVKSNAETFFKQCETNRKKLLKRIETKQEELDELLKKRNDKKELTKKEKYSVHKLQTLLPRLRSSLNNKPVFGGRKNLQHLTHLHNQYNKLLINLSSSVDEIDILHLESELTGLFDRITKQKEKYVNQRLRSFFIIGEKNYKGNRFFDFSKLNEGLLVYKPKYGTKVNLTVSVPKNKKWLIDKLVELTQTKSIPLSVYISNKSVSISYDDEKLYGWKLDETEKKQQIKEIKQKYNNKEVQTTLIKGVCHKHHLKERELKLANKIEGRCISIDMNPSYIGVSILERDFENEDIERGKHAVKVIHKFCYDLSFFTKKLPKEATKEERLYHKNKQQYEIKEMTIQLFNIANHYKCSSFVMEDLDFKEDKEVNKKGKEANRQTKVVWNRGLLEEMITKLTNQYGIELIKVQPSYSSFIGNMMYNYFDPINSAIEIGRRGLYKFIKNCTGYPLISESTLNTVVRVLEENKKDVSNVNDINMTWTSLFNLGKKCRWRGSLSRVTKRRSMSTKRSCIKVLYC

SEQ ID NO: 12761 - protein, 229 aa, Lactobacillus sp.
LAYDLSARYLQLAIKDLANAWKNFFDKSQPDWGKPKFKSKKAPRQGFKTDRAKIINGKLRLDKPINISKDNWFDLASYAALKINQVKVISIFKENETYYAALSYEEEVTAKTKTHQKTAVDVNVGHFNYTEDQINVLPAKLQKLYKRIKHYQRMLARKREINGKLAIKSNNYLAVRIKLQRDYRKIANIQNDLLQKFTTKLVNNYDRRFSSQRNDDEACGFKRHAEIAF

SEQ ID NO: 12762 - protein, 428 aa, unknown
  TnpB Polypeptide
MSKLKAYKYRLYPNKQQAEKLQWTLDRARQLYNAALQERRESYEMAVKRHPNYYDEVTRTYLTTQHALHYNQQATQLPEIKEIRPEYNEIHSQVLQDVLRRVDKAYKAFFRRIKKGQTPGYPRFHGYGRYESFTFPQSGFSLTGDNRVCLSKIGTIKVKMPKGKKANPLVGEIKTCTIKRETNHWYVIFTCEVKQEVVYHPSEEAVGIDLGLLHFATLSDSSTIENPRHLRRAEQKLKKLQEALARKKRGSKRRRKAAQRVGKAHRHIRNQRKDFHHKQARKLVTMYQVIVFEKLQPANMSKRPKPKQDEVTGHYLPNGASAKAGLNTSILDAGWGQFQQICKNKAECAGSYILFVSPKYTSQICSGCGAIIQKELEERWHECSCGCSLDRDHNAAKNILRLGLQAIETESRARTERSEDAPLRSRRL

SEQ ID NO: 12763 - protein, 211 aa, unknown
  TnpB Polypeptide
VEVKEETIELTGESVGIDLGIKDLAICSNKEEPYKNINKTKRVRKQEKKLRRLQCKISRKYEKNKEGRSYVKTSNIIKLEKRIRKTHKRLDNIRTDYRHKVTTEIVKTKPSRVVMEDLNISGMMKNKHLSKAIAQQGLYEFKSMMKYKCEKYGINFIEADKWYPSSKTCSECGYIKTKLALSERKFECECCGAVIDRDKNASINLSRYKAS

SEQ ID NO: 12764 - protein, 523 aa, unknown
  TnpB Polypeptide
MAINANSWIPTINSPYNSVNSHSWFDIHKIKNFDANDPITYNINNNDEFIRSYTIQLFPNANQINKLNDWFILFIIMYNTTIEFLRPHIAPNGYFINDDVMIDHCTNFKIVRNYLLEESHHAMMDFVHRRGWFTPALWAGERDIIAGNSRIPKHTPLRGICPPEQNKTSFCFVLSGHTLDEAIKHAVAKFVSKKTFINNYINKQRFIYQQRGLNFENFVEPDFLRRFDIQPWDTDDVNQNKIIIFESLAFSKTQNSIQQSALGIMNSDSSICKMPVTCTLIYDTKKKSYKLHVPITFNDKKGRNMISSFNDFDPIYQRIKYAQDGLINISKRRASVGIDPGVRTFMTTYSRYEVYEYCNKPNKILEKYYKKIDSAKRKYGAGLIGIKRMKKYTENGEKKIKNYIKDMHYKIAKHLVTKYDKIYLGKFNSRSAAQGRLRRRTKRIMNSLGHYKFRNILINQGKKYGSKVTLVSEYRTSKTCSSCRELNEIGGSRIYNCQNCGMIAGRDINAAKNIYKRGKGESP

SEQ ID NO: 12765 - protein, 440 aa, Okeania sp.
MYSCQQVLVGKNPELIAILKFLCEQSHKLTNMGIYYARQLYFKSQKGIGKYDLEKVYKKNNHYKVLHSQAAQQILRTVAESFRSYYGLIKAYNEGKIEHRPRIPNYRKKGGMATVSYPKQALKLKDNQIRVPLGNTCKRWFGLDCFYIPMPSNLEFLSLKELRILPRNRCFYWEFIYEKEEVVKPQLNQDNVLGIDHGVNNWLTCVSNVGTSLIVDGKHPPLSPPGRGTKGVGWYNKQVSTIKENQPTGFWSNKLASITEIRNRQIRDGINKAARIVINHCLKNSIGTIVFGWNKGQKNQIELGKKSNSEFVPIPTARLKERIAQLCYEYGIIFIETEESYTSVASFLDGDDLPIYGEKPNDWKPSGKRIKRGLYKSSNNWLINADCNGAANIITKVSRKLRLNLSRLCRGTLTCPQRVYLWSAKNRRSNTDLSCCVVSA

SEQ ID NO: 12766 - protein, 253 aa, unknown
  TnpB Polypeptide
VYLAKCSQPLDIRWSRELPVGAQASTITVKLSPSGRWTVSLLVDIEIAALPESPNQIGLDLGITTLMALSNGEKIANPKAFKAKRRKLRKTQKALSKKKKGSNNRHKARLKVAKVHAEISDARNDFLHKLTTRLVRENQVIAVEDLSVKNMVKNRKLALSISDASWGEIVRQLEYKCNWYGRTFVKIDRWFPSSKRCGHCGHIVNKLPLNIREWDCPKCGTHHDRDVNAAKNILATGLAVRVNASSLGRIISG

SEQ ID NO: 12767 - protein, 377 aa, unknown
  TnpB Polypeptide
MLKAYKYCLLPTDEQKLQLAKFFGSCRFVYNLGLETKMQAWASARKHLTCIDLANQMKELKDTEAEWLQECPSQTLQMALRNLDNAYSAFFRGGGFPKFKSKHRRQSIQFPQGVKTDFENGTIFLPKLKNVTCIFHRKFKGDIKTVTVSRTPTGKFFVSILVENQKELPKKKPIKERTAVGIDMGVKTFATLSDGTTFDNPKYLRNNIRRLQVEQRKLSRRLKKGAKEQSKSYQKQRLIVAKLHEHIKNQRADYLHKASTQIIRSFDTICLEDLNIKGMMQNEKLALAIGEVGWHKFKTMLEYKAEWYGKNIQYIGRFEPSSKLCSHCGAIFKELSLKDRLWTCLSCGTHHERDANAAQNIKTFGLRIKPATVNVSH

SEQ ID NO: 12768 - protein, 394 aa, Streptomyces sp.
MASRTRLFYEKIVAQVKMLPASAHDADALAATLRACNRAANAASEVAFAKDLKRRNVLQDAVYHRIKADFDLGAQAAVRTVKKVCDAYATLKANLRAGNYGPDGSKRRAGVESKPIVFRETSAQPYDDRILTWNLDRRTVSIWTVAGRLKGIPFVCSPEAMKLLASRRGESDLVMRDGMFFLIATIDIPEPEVFEPDGFLGVDLGIVNIATTSDGRIMSGRQVNRYRRRKRDLRSKLQKKRTKSAARVLKRQRRKEARYATQRNHIIAKKLVHTAERTSRGIGLEDLTGIRQRVTAKKDQRARLHSWAFAQLGSFVEYKARRAGVPVVHVDPRNTSRQCSECWHTHRSNRISQARFVCKSCGTVLHADHNGSRNIAHRADAAWQRGAVNRPSTA

SEQ ID NO: 12769 - protein, 324 aa, unknown
  TnpB Polypeptide
MRVIQAFRFELDPSREAQIALEKHVGAARFAYNWGLARCLEAKERDKQMPSAVDLHKDWNKWKRENAPWWVEVSKYTPQEAFRDLERAVRNWRKGRANFPRFKRKKALADNKARLTGHIRVTPRHVQIPRIGKVRTKERTDKLLELLQSKKARILSATISRDADRWFVSLNCEVERPNPEPRKVQGPEDVVGIDVGLKAFAVLSDGTRIETPKPLEKALRLLKRRSKQLSRKQRKTIVEWNPETGEERKRTVFSRNYEKAVLRFASPHPQHSPGLPAQGHHRAGESQASSGGGGPKRAGPGAERESLAGHSGCGMGDLPADAGV

SEQ ID NO: 12770 - protein, 433 aa, Thermoprotei sp.
VGEVARTVIVRSARLSRKLFRVFAELEGMYRNMVEQLTMFAVRSNTTSFTRLKALKYRELRAPYPQLPSHYAYTACQDASTRAKSFLRLKKKSLTSREHPEIRSVSIWLDDHLWKLSSLTSVEVATHKGWVRVELEPHKQYWRYVNASWRVASEAKVKLDRKSRRLVIYLTFKKSVEAYEPRGFVAVDVNENHVAVLAGGSVYLFETGFRDIILGYYYRYRRKRVQEKYDKLYGANCRVKRSVFRKLKERRRKSDLKWKLANIIVRVAKEKQYAIVLEKLGKNPAKEMINHVRDDQLRHRIYQASFRGVQRTIEEKTREHGVPIVYVDPRNTSKLCPVHGAPIVYSNDSRIGRCSIGGELWHRDVVACVNLLVRARLGNGSHAPSLGGLGVDGSPVPLGSTAIHDPTPIPKSLWARWKPLDATNKHKSMRMNI

SEQ ID NO: 12771 - protein, 304 aa, Deinococcus sp.
VACPHAGGRAAGRRRPAAEPESDSCGFTERLRGSPCLQASKVRKQYFLLVPLSMELPDPEPTAHKQVVGVDVGMRYFAVASSTSNKTLFKSGKAPLRKAERYANARKSLQQKGTRSAVRRLVALSGRERRFIAETNHAIAAEILSRFPNAFIGVEELTGVRDRTERRSRKGSSEKTRKANRRRSRWSYAELLSFLAYKAPLRGSMVVKVDAHYTSQTCPRCGHCSRDNRPQKGLMFVCESCGYQLHADLVGSRNVGLRALVVRQDWAATGCLSCTPDVSDAETKAERLKRYSELRWSPDTSPRL

SEQ ID NO: 12772 - protein, 536 aa, unknown
  TnpB Polypeptide
MNDEEYKKLLKKHHRLSDRHILVVETDMLYPDVLKIVTLSDKIRKAGNELVSLMKKNYEQLMRTKKYRKLLKLYGSTKDKKKRKELANQLNDMQKSYNVTWDFCRRSMIHIGEKYNIGSVFALTKAEDVWQGMEKCLYANGKTIHFSKRGELPCIRSKQINRGIPAFIDGDKLRFKLRKMQFGIQVNDRFQSDEVNAVLSYLKDPVKIDADAVNTLVEKGCYIDTYRPCYATLVPKLIRGKYRIYLHLVIEGKAKPKYDRFGNPRHKYGKGMIGADIGTQTVAYTSDTEVGLKNLSERGNSIQTSERKERLYYRAMDRSRRATNPQNYNTNGTIKKGKKTWKYSKHYKKIKAKHAELCRINAVNRQLAINEDANYLRSLGDVFVTEPKNASKLMRRAKETTVNNKGKFNKKKRFGKSIQNRCPSGFQIAVENKFKVTGGTYIEVPNNYRASQYDHTTDDYIKKKLSDRLYKLRDGTLVQRDWYSSFLLYCYDYKTQGIDKNKCITNFKQQHIKEKALIEWIKKNNIKILNSGIKVA

SEQ ID NO: 12773 - protein, 416 aa, unknown
  TnpB Polypeptide
MYLTIKQQVKHLSKEDYRTLKELCHIAKNLTNEAIYNVRQYYFTEGEFLKYEKNYALLKNSPNYKALNSNMSQQILKEVDGSFKSFFGLLKLAKKGKYVFKDCKLPHYLPKDGYTTLVIGFVRLNGNKLILPFSNSFKKTHKPVEITIPSVLLDKKVKEIRIIPKANARFFEIQYIYEAECVQRNLNTNNALALDLGINNLITAVSNDGKSFIIDGKRLKSINQWFNKENARLQSIKDKQHFGRKTTNRQKNIARDRNNKVNDYMNKAARKVLDYCIANDIGTLVVGYNETFQRSSNIGKRNNQNFVNIPYGQLRDKLKYLCELNCIVFVKQEESYTSKASFWDKDDIPVYNADNPKEYQFSGNRVHRGLYRTASGKTFNADVNGALNILRKSNVVDMSILYCRGEVDTPVRIRIA

SEQ ID NO: 12774 - protein, 393 aa, unknown
  TnpB Polypeptide
MWKRKGKGKDKEEKENVTQRTQKVRIVSINKQEEVLWVLSEICRLIYNFGLAKRKEAFKNGKNISYIDQQNDLPEIKKKYPEYRWVYSKVLQGVLQKLDADYRSFFALRKNGDQNAEPPGFKGKKHFTTMDFNQSGFKIKDGKIKLSHSYNNIPLEKEYIDNGLYQAFDLGIGKQTAVNIDGKFFEVKNRRPEKYWEKKIEKAQSRLDHCKKGSGRWNRLKKSIRTMQKKAANQRKDFQHKLSGKIVENTKANTIIVGDLDVKEMAQEKENDKDKSKSPLQKTRKRGLNRGTQNTGLLSRFTKFLTYKAEEIGKKVIRIDEKYTTKTCCVCGKKHKMNIWDRTFKCPYCGFEIDRDRNSAINIMLRFLIQNAKWTSYRLFVGNLRKTGILIRE

SEQ ID NO: 12775 - protein, 416 aa, unknown
  TnpB Polypeptide
VLRRQAYQFELRPNGEQLRNLRQFAGSCRFVYNKALALNTERYNQKEKHLGHAGLCALLPNWKREHHFLSEVPAQALQQALKNLERAYSNFFQKRAEFPKFKKKGQRESFRVPQGFAVDNGNGRIKLPKIGWLRYRKSQEVLGEAKNVTIRESCGKWFIAVQTEREVATPLHESTSMVGLDWGIVRFYTLSNGEYQEPCQPLKKCLPKLAKWQRRMGRKKKFSSNWKKVKAGIAKLHQRIANIRKDFLHQSSNDISKNHAVVFVEDLQVKNMSKSSKGRRDQPGKQVAQKSGLNRAILDGSPFELRRQLEYKTEWRGGRLYPLPPQNTSRTCPVSLGGCGLVSADNRKTQAKFACVQCGLSANADFISAVNIREAGFASLACSQPSHAVSASWQEPTEGIHARGTGPAHGRLNDTS

SEQ ID NO: 12776 - protein, 554 aa, Endozoicomonas sp.
MSEEAAMSEKGSFMTDSLSLTFQTRLNISAAQNAALSAIAGLMSSIERGLYVQWRKGQSLASLKNKTIARNRIPARYFNAAKASLEGKIRSVISNLANSEDSYQRRIKAKHRHIKKQAKALNKEENPQKRAQLRFGLHQSKRRLSTLKAHLLRIRQRLENNDPAICFGSKALFKKQFHLEKNGYCGHNEWQQDWQDARQSQFFIIGSKDESHGCQLCALTQAKDGTLSARLRVPDALVGEHGQYLELTNIHFAHGGDAINAALEKNQRRKSLSLKAGRDQFGDLYKHYGQALSFRFARDKKGWRLLVTTAAIRGRPCTCPEAGAMGLDINADHLALALIDRHGNPLNKWTIPCHTFGKTSEQRRAVIGDACKQVVKLAKQAGVPLVMEHLSFRKKKDELEKSHSARYARMLSGLAYDQIHKTLVSRAYREGVGLTRVNPAYTSVIGRTKFSGQYGLSVHHGAAVAIARRYFRFSERLPRGATARLWDDRAGHVALRLPEDNGKHVWTRWAILRGKLGTAFSERPKRSKHPPAFSATAGLCEGDSGVVFDTVPPF

SEQ ID NO: 12777 - protein, 456 aa, unknown
  TnpB Polypeptide
MILIMPNKFVICGETQHRALKLRIYTSQEQEVLINKTFGCCRQIYNNRLFERNQFYENVIKPANPEDHKALWKTAHFSSEKEMKVKFPYLAEVSSQALCSATMFAEATYKNFFASVKGTRAGSQVGKPKFKSKKSHDFSYRECMNVGLIWNERKIKVPKLGLVKFRHSGNKKGKLDFFLRDGANLKSITIRKNPAGEYYAVLLFEREYCHKQKVYEGDESQAIGLDFSPEEFYINSDGSSGKDFGYVAQKQKNLKKLTKLQRRLARKQVGSNNREKARVKVARMEHYIAECRNDWIEKETKRLVSTYQVIGIEDLNLKGMMKFSKNTKNYGDASWGNFVNKLLWKSSLNENNCQVIKADRFFASSQICHCCGFKNPITKNLKVRSWTCPECGAEHNRDVNAAINLKMNAIKQVRQGMSKFRSVEDVESLATQALQIGASEEAENLTGDGQNVLTLL

SEQ ID NO: 12778 - protein, 293 aa, unknown
  TnpB Polypeptide
MKKGLYPLKKPGFIKLSKTSIEIPYEFDTSLVKQVRLIPCTGYYKIEILYEKNLQEKPHMVKPERIASIDLGVNNLATITSNVFSPVIINGRPLKSINQFSNKEIAKAKRLLPKDIYTSKRIAFLYGKRYLKIQDYLHKAGKQLVNYLVSQTIDMLIIGKNSGWKQNTNLSKVSNQNFIQIPFNRFTQILEYLCEEHGIDVVYQEESYTSKASFLNNDTIPVYGEQNNAIVFSGTRIQRGLYQTDDGRLINADVNGSYNIMKKYLETQATWNNQTWLDCVEVCSTPRVMLVLD

SEQ ID NO: 12779 - protein, 394 aa, unknown
  TnpB Polypeptide
MFRAYKYRISPTNSQKELIAKHIGSSRFVYNLALETKNTAYLGSKHNFSPFDLIKQLPELKKECEWLKEVNSQSLQQSIQNMDIAFKKFFKGAGFPKFKSKHKGKQSFSIPQNVIVENNLLIIPKFKEGIDIVLHREIKGIIKSATISVTPTGKYFVSILVDTNVEMPIKVPIKEKTTIGVDLGIKTFLVTSDGLEIENPKNLRKAQSKLKYVQRKYSKNKGKRTKHRLALLHEKVVNKRKDFLHKTSTKLIRENQTICLEDLAVSNMVKNHNLAQAINDVSWSTFVTMLEYKADWYGKNILRIGRFAPSSKTCNCCGYINKELTLKDRSWTCQKCNSVLDRDVNAAINIKSFALKNNLSGEHTLKNQDELPTLVRVLTPEAHPISFCCGWVVH

SEQ ID NO: 12780 - protein, 416 aa, unknown
  TnpB Polypeptide
MYLTVKQQVKHLSKEDYRSIKELCHIAKNLTNQAIYNIRQHYFAEGKYLKFELNYALLKSSDNYRTLNSNMAQQILKEVDGSFKSFFGLLKKAKQGKHALKDCRLPRYLPSDGYTTLVIGFVRLKGNKLILPYSNSFRKTHKAVEITVPPILLDKKVKEIRIIPKADARFFEIQYIYEAECIQRNLNTTNALALDLGINNLVTGVSSTGETFIIDGRRLKSINQWFNKKNARLQSIKDKQHFGRKPTNRQKALARRRNNRINDYMNKTARRVIDYCIDHDIGTLVVGYNETFKKGSNIGKRNNQIFINIPYGKLIDKLKYLCELNDIILVMQEESYTSKASFWDKDVIPVYKSDDTEEYHFSGKRIHRGQYRTASGQVLNADVNGALNILRKSSVVDVNILYSRGEVDTPIRIRIA

SEQ ID NO: 12781 - protein, 396 aa, unknown
  TnpB Polypeptide
MGYKPKKEPAKNGQILQYNTIKARLYPTPEQAKLFEKTFGCCRFIWNQMLSDHERFYIETGKHFIPTPAKYKKAFPFLTEVDHQALTQEYQKLSQAFRVFFKNQEAFGYPKFKRKKEDRNTYSACNQFWNDGASSTIYITKNAIRMTKVGFIKASFSRRPRSGWRLTRITIERTKGGKYYGYLLYECPAKVPESVIPIDEMTIGLKYSISHFYVADNGEMADPPHWLERSQEKLAEIQRKLRRMQPGSKNYQEMVRKYRLMHEHIANQRYDFIHKESRRIANEWDAVCVREDSLAVISEALGGKYILSSGYGMFREMLRYKLERQGKQLIIVDRFCPTTKTCSVCGLINETLDPRALSWTCGGCGTRHKREVNAAANVKAQGLSRFRSMQEDAQSA

SEQ ID NO: 12782 - protein, 256 aa, Acinetobacter sp.
MKTLKLRIKDKHCKVLDQLASEVNFVWNYVNDLSFKHLKRTGHFFSAFDMAKYTKGTSKLCGLHSQTIDAIREEFVTRRIQYKKAKLKWRVSNKKSARRSLGWIPFKKSGLKYADGWVEYGKTKFGLWDSYGLSKYSVRTGSFVEDSRGRWYVCLVVDSPKLDKPTATKAIGIDLGLKDIATCSDGTVISNPKLYRKYEQKLGIAQRAKNKKRIRALHAKIANCRKDHLHKASTMLVKENALIIVRRPECKKTCKN

SEQ ID NO: 12783 - protein, 390 aa, unknown
  TnpB Polypeptide
MKQAFRYRFYPTPEQESLLRRTIGCCRFVFNRALALRTEAWTQRKQKTSGFDLIKKITVWKREPDTVWLQEVSNVPLQQSINNLEVAFQNFFAKRARYPRFKKKDSGGSCQFTTSGFRIKNGQVWLAKTKAPLDIRWSRPLPKGVAPSQCTVRLLPSGEWYVSLLCDVVIKKLPAVKKRIGLDMGITSLVTTSDGDKITNPKVLNRHHQKLAHLQRHLARKAKGSQNRQKAKIKVARIHRKILDVRKDLLHKLSTRLVRENQSIVIEDLNVRGLLKNHCLAGAISDACWQQLGSMLEYKCSWYGRELVKVDRWFPSSKTCHCCGHVVEKLPLSVRSWVCPKCNTTHDRDVNAAKNILAAGTAVHACGGAVTPKRAKLVDAGLREAGISGL

SEQ ID NO: 12784 - protein, 449 aa, unknown
  TnpB Polypeptide
MLKRKYTTVTQLHEVNNKDIIEYFENASVYFCKLQRKAFHIFKSENIKGNKVEYNKLRQDFMKKHNISKRSADSILKDIQGRIKALAELKKYEVSQKEQKIKKLKEEIEKLDSKISEFQKKMKNKIKLNHFKYWNLKKSRAFKKMKLNKFQMRLEQLKWEIETGHYKLCFGTKELLQSNKTEFYLQRDSQITYIGSKDETGRNSMFQLSYNNINNQFEIKIRKDFGFDKEEKYVFGKCYFNNHKNKLIEALANKNSTPLTYSIIRKNGRYYLHCTFEYRIENKGLFLTRKSYGTIGIDFNKGFLTVSEIDKNGNLLDTKKLYYRFGQGSKTKSDLEKIILYIVRKCIETGKDVCFEDLNFKDIKSKTTKGKTDKGKKYNNMLHTLAYSLYDKLITNMAFRNNIGIIKVNPAWTSWIAKNKFCNRMKLNIHIGAAFVIARRGLGIKDIVK

SEQ ID NO: 12785 - protein, 530 aa, unknown
  TnpB Polypeptide
  misc_feature (407)..(407): Xaa can be any naturally occurring amino acid
  misc_feature (420)..(420): Xaa can be any naturally occurring amino acid
LPSSSSTSKTKSTSSKKERTPSFVCEIPLRVTPADEHALNVRLNAARQVYNACLGEALRRAQLLRERRAYQKARRLPKGDERSATFRQARQAVAFSDAALQRYAVRLRQQAFTDHLDVHTTQKLASRAYASANEWLLGHRGRPRFKAYRQLDTVEGKSNHAGIRWRDDHVEWFGLSLPAIIDPCDPVIAHGLTSRVKYVRLVRRKVRARDRFYVQLVCEGLPYRKPEHQVGTAVVGLDIGPSTIAVVGEGGALLDPFCEEVVRKHRQLRRLQRTLDRQRRANNPDNYLPDGRVKPGPKKWVKSTRQRKTQHELAELHRREAAHRKTLHGQLANRVLAMGKQVRTEKLSYRAFQRQYGSSVRVRAPGMFLSILRRKAESAGGSVVEFPTRTTKLSQVCHGCETYQKKXLSQRLHQCACGVXMQRDLYSAFLARCVGEDNLLHVDTARERWSGAEPLLRAAWSNATQPANGRLQPSSFGVMPRSQSGSSAELGTAHAEARDAVAAAQAAGESPGAVAVVRSEPPGFSRGEAQ

SEQ ID NO: 12786 - protein, 390 aa, Deinococcus sp.
MENTTLRAYKYRLRPTRAQEDALSLTLTLCQRLYNAMLEERRGAYKKAGKSLTAYDQMKSLPEVKAALPEYQGVNAQVLQDVAKRLDKSFQGFFRRVKAGQKAGYPRFRGRDRYDSFTYPQPSQHSVSGDGKHVYLPKIGNVRIRLHRPFAGKLKTLTVKREGREWYAVLTCELPRAGPLPPTGSAVGIDVGTTWFYVTSDGEFCENHRFFQRSSKRLRVAQRALARKPNKRSNRRKKAKERVAKLYRKAARSRLQLHHEEAKKLVAAHDLICHEDLNVKGMTQGNLGKQIHDVGWGQFFSILSSKAAEAGRRVVAVDPRYTSQRCRLCGHTERGNRVGQANFRCLSCGHAENADVNAAQNILAQGLRFVAERGSMERACHEKPRPLGLG

SEQ ID NO: 12787 - protein, 231 aa, Spirulina sp.
VLNLNYCYRIYPDASQEQELLDWLEICRGVYNYALAVRVREALRSKGKSLGIDLGLEKFMATSQGELMARPKFFLELQSQLKWLQRRLSKKQKGSKNWHKAREKVAKLHEHIYNTRKNFHYQVAHHLCDQANIIFAEDLNVKAMSRGMLCKHTLDAGFGGFLEVLKHVAWKRDVYFEKVDANFTSQICPNCGVVTGKKDLSQRVHVHFVTLCYATLCVREASRSERERGCP

SEQ ID NO: 12788 - protein, 429 aa, Spirulina sp.
VLLSFKTALIPNNKQETLFRKASGVARHAYNWANATIQNVLEQRKTDKNVKVPSAIDLHKKLVAEVKSQHDWYYEVNKNVPQKALADCRVAWDRCFKKTSKQPRFKKKGQRDSFYLESGTKASPKIQNDGKRVKLPSIGWVRLAEPLPVTAVHNCVISRQADRWFIAIKYEIEKPHVAIDRPSVGVDIGIKELAVCSNGKAFSNPKAYRRLSKRLKRSQRRFSKRVKGSKNRAKAIKKLSKLQARISNIRKDAIHKLTNYLAKNHSEIKIEDLSIKAFLKNHKLAGAIADCGMYEFRRQLEYKTEKFDSKLILVDRMFPSSQICSNCGNHRHKMPLKNRVYICPECGHTEDRDLNAAKNIERWFERIFIPSRSDLAVSSTVSACGVDKPLRSHSETTMNQEINTKDDTWFWSAEETDALWFWSASSIIV

SEQ ID NO: 12789 - protein, 373 aa, Spirulina sp.
MLANMKRTVSIPVNLPRERFLPLMGFCADIFNQHVDWALKTRTYNKTKAHRALYADLRGQYPDVPSALVQTMRDNALEAVKATKFQRTPRKKPTSGLRYDKRTMTLRGHQLTLSCIGKREKLILNVPEHFREIVETWEFCAATVTYSKQSQQFWVRLVFEAQTPPTVTQGKVLGIDRGLYHIAVTSDGQFFSSSQVRATQRRYLHNRKTLQQKGTRSAKRRLRAMSGREKRFMRDVNHCVTKKLANLTGVAVFVLEDLSGIRQKRRGKKMNKWLGSWSFHQQDLFLAYKAEALGKRVVFGDPRYTSQKCNVCKHIRKTNRTKSRFYCRNCGHRDHSDLNAAKNHRDDYILSTTSMGTVEQAAVNLPDVTALVG

SEQ ID NO: 12790 - protein, 402 aa, Spirulina sp.
MIVLEMKAVLKPDQALAIDEAVRTVQFIRNKALKLWMDAKREDKVDKYSLNKYCAVLAKQFKFVDTLNSTARQASAERAWSAIARFYDNCKKKVKGKKGYPKFQKNNRSVEYKHSGWKLSEDQKKITFTDKKNIGTVKLKGTRDLNFYPLDQIKRVRIIKRADGYYVQFCLNVDIREYAKPLEPTKRCVGLDVGLKVFYGNSDGETVEIPQYYRQAEKRLNRLNRQKSKKFKKGQPQSNNYQKARKRYARKHLRISRQRRGFAEKEALRVIKSNDFIAYENLNVKGMVKNSRLAKSINDAAWSTFRQWLEYFGFKYGKATVAVPPHNTSQNCSNCGQKVSKFLSTRTHVCPHCGYTEDRDVNAAINILKRGLSTVGHTETYTLGERFPLAWLDTSCQVKETR

SEQ ID NO: 12791 - protein, 241 aa, Spirulina sp.
MTVKMPLAHRLRGKAIGIDVGLTHFAITSDGSKYDNPRHFAKHQNNLKRKQKKLSRKQKGSKNRAKAKQKVAKVHSKIARCREDFLHKISRKIVNENQVIAVENLNVKGMVKNPKLAKKISDVGWGMFTTMLKYKAEWEGKTYIEVDRFFASSKTCHVCLNRVDSLPLEVRQWECQNCGTHHDRDINAAQNIKNEALRILSLGTSDTAWGGNVRQPGKISVLLDAVPIESGSPILANGRVG

SEQ ID NO: 12792 - protein, 355 aa, Spirulina sp.
LSILYLRINFPDYYKQKKALTQAKQQYPELKRVQSQVLQEVMGRLDKAFNFFWKRSFGFPRFKKYGQFRSINFPQFKENPVTGYQLRLPKLGSVVINLHRPIPDGFVVKQVQIVKKASGWYAVIYIQSDVNIPSPKPEGKSLGIDLGLEKFIATSQGELIARPKFFLELQSQLKWLQRRLSKKQKGSKNWHKAREKVAKLHEHIYNTRKNFHYQVAHHLCDQANIIFAEDLNVKAMSRGMLCKHTLDAGFGGFLEVLKHVAWKRDVYFQKVDANFTSQICPNCGVVTGKKDLSQRVHECSHCGFVTDRGVAAAMVVEQRGLAALGLGVKLPGSEEVIGDVPKKTSRASRRSRKAS

SEQ ID NO: 12793 - protein, 416 aa, Spirulina sp.
MYKAYKYRIYPTDEQKVSLAKAFGCCRWYWNFALDLCQKTYIETGKGLSRGYIQSLLPKLKKEYPWLTDAYSQSLQVVALNLSTAYKNFFEKRAQLPRFKSKHGRQSLSYPANVKLEGDYIKIPGKIGLVYCRRHRELEGTIKTVTLSKNPDGKYYASVLVDDGKDAISPSVEGKVIGIDVGLTHFAITSDGSKYDNPRHFAKHQNNLKRKQQKLSRKQKGSQNRIKAKQKVAKVHSKIARCREDFLHKLSRTAVATTGGTPATRCLKIVNENQVIAVENLNVKGMVKNPKLAKEISDVGWGMFTTMLKYKAEWEGKTYIEVDRFFASSKTCHVCLNRVDSLPLEVRQWECQNCGTHHDRDINAAQNIKNEALRILSLGTSDTAWGGNVRQPGKTSVLLDVPLNQEAPSSRLGRVG

SEQ ID NO: 12794 - protein, 398 aa, unknown
  TnpB Polypeptide
VTILGQRIRLDPNNVQTSTLERFAGTARFVWNWGLVRWQGMYAAGEKPSWRALNMELNARKVTEFPWMAEFPWAITNRALADLGAAFGHFFRRVKTGGGKPGYPRFKSKKRSTPSFTIEARALTFDGQRVKLPKLGWVRTSEALRFPGKPLSARFTKRAGHWYISVQVEVDDSRWSYPHRCETQAAVGIDLGLRDLAVLSTGERFPAPRSLRRHASKLRRLSKELSRRHKGGANWRRTKAKLGRLHERIANVRKDVTHKLTADVVRRFRVIGIEDLAVGGMGRTRLAKSVSDAGLAEVRRQLAYKAPLAGCGLVVADRFYPSSKACSACGLVRKSLPLKVRRWTCECGAEHDRDENAARNLMKLAAAHAVTACRPGSAGVFRDVELLVGQEAGGLAVN

SEQ ID NO: 12795 - protein, 535 aa, Plantactinospora sp.
MVSTPTDSLRVVVSAARATLLRCERSHSRRTARPVVEVGIRRRPRHRCRIVVRVRLALLVPRRRDPTAPAVVHRTARVGLRLTPAQRRRCFGLLRSAGDVWACILEINNWRQARGAAPLAGYQELCRELTRAGSGTFADLDTTGARSVLRRFSDAWFAAAKRRAGGDDRGRFPRRRRLLVPLRWYHGTFTLHGRRVRIPTAQGAPPLWLRLARDPPYPAGQIRSITLIYDAGRIFLDVTAELPVAASEPGTAVDPDRIAGVDLGVIHPYAVSGPDGQALLVSGRALRAEHRQHLTDTKRRSRAVARRAPGRGEQGSRRWRRYRRRARRVEGRHRRRIRQAQHEAAKAVVGWAVEQRVSTLRVGDPRGVLRIDAGRRHNLRLRQWQLGRLIRILADKAAAAGIKMQLVDERGSSSTCPSCLRRVSKPRGRVFACAHCRHLGHRDLIAAAIIATRTPGGGPTAPRPAVPGGAVTHRRVGRHLPGAGRSRRDPRRCGGAGRLASGGPPCQPAGSRSLDKGEDPHNTTGGSGERLWTPH

SEQ ID NO: 12796 - protein, 460 aa, Lactobacillus sp.
  misc_feature (367)..(454): Xaa can be any naturally occurring amino acid
MNAAMPFADWQCSFLRFSCSYDTFINIIISHFAVNTVCSYAMLPSSKRRWRLMAKTMAQLPYHYGVKVRVLPSTEQKRLIKRNSDASRFIYNQMNGMNNDLFWLKQVKIPITIVLDRIADLTERLRKPSTAISNIHGWLNHPDFDSLMKANAIKNYKTAWKLFHQVHQAGTPKFHKRGYTQNYQTSCLYSAKVTVPTMRNGSVRLKDTHHLQLPKLGRLHFKGFPSKILDQADDIRIGTTTISMDAVGHYFVSLQMGSEHPFVSKQPVIKSKVGIDLNLDNFLTDSNGQVIDNPRYYRIIKGKLAKAQRKLSRRSRRAKKNQRRLSESKNYQKQRLLVAKLQLKVANQRKNFLHHVSTALIKNHDLXXXXXXXXXXXXXXXXXXXXXXXXXXXXXXXXXXXXXXXXXXXXXXXXXXXXXXXXXXXXXXXXXXXXXXXXXXXXXXXXXXXXXXXXYAVLQS

SEQ ID NO: 12797 - protein, 313 aa, unknown
  TnpB Polypeptide
VTRNPSGCFAECLHITRENVNFDVLTGFRTCLNDAFSNNILTATVPSFKAKNNRGAVAITGKSIRLPKIGHVDCRISKQVKGEILSATVQQAKSGKYYVAINCKNVDLPSMPATGSVVGIDLGLKDLAITSDGEKFDNPHTYAKNQKKLARLQRQLSRKTKGSHNREKAKLRVARLHEKIANQRNDALHKMTTKLVRENDVICMENLSVKNLVKNRKLAKSIMDASWGEVRRQLAYKTVWYGKELVIVDKFFPSSQICHCCGAKNPATKDLGIRYWVCPNCRAAHDRDINAAENILTEGLGKIGLPAQRAISW

SEQ ID NO: 12798 - protein, 465 aa, Lactobacillus sp.
  misc_feature (315)..(464): Xaa can be any naturally occurring amino acid
MIRVQKVRLYPDQTMKNVLDDLCDYRRYCWNQGLALWNDMYDSSLILGDKKVKPSERRVRDELVANKADWQYQLSARCLQLAISDLGKAWKNFFDKAQPDWGKPKFKSKKASRQGFKTDRAKIVNGKLRLDKPLEIKTWYDIRFKGAKSLEGDLKVVSIYRENDKYWASLPFEVEITKKDETGNKTAVDINVGHINYTEGKVNTLPDHLKKLYKRIKHYQRQLARKRVVNGNKATKTNNYVKTRAKLQRDYRKVANIQHNIIHKFTTKLVSDYDKIVIEDLDVKKMQMTHVASKGLQRSLFGYFRQVLTYKAGWXXXXXXXXXXXXXXXXXXXXXXXXXXXXXXXXXXXXXXXXXXXXXXXXXXXXXXXXXXXXXXXXXXXXXXXXXXXXXXXXXXXXXXXXXXXXXXXXXXXXXXXXXXXXXXXXXXXXXXXXXXXXXXXXXXXXXXXXXXXXXXXXXXXXXXS

SEQ ID NO: 12799 - protein, 423 aa, Moorea sp.
MTLTMNYCYRLYPDAIQEQTMLHWLEISRKVYNYALREIKDWVNSRKCSLDYCSLEREYIIPADKPFPTYYNQQNALPQAKKEFPLLAEAPSQVLQTTIRRLHDAWNYFQHRGFGFPRFKKFGQMKSMLFPQFKTNPITGWQIALPKVGKMPINLHRPIPEGFVVKQVRVLRKADRWEVVLTIKSEVSIPIAQPHGEAIGIDLGLEKFLTTSDREFIARPRFLTSLYRELELLQRKYARTKKGSKNRQKVRKQVARFHNHIANVRKDWQFKLANHLCTKEGIGIVLVEDLNLKAMSRGMLRKHTQDAAFGQFLNLLEWVAKKHQVYFARVNPDRTSQTCPKCGTHTGKKELSERMHRCGECGYETDRDHAASEVIRLRGLEQLSTQGLWGIENAYAVGLPGTEETPSRSEAKPRKRKTRNAKL

SEQ ID NO: 12800 - protein, 496 aa, Thermocrinis sp.
MVEGIFGTYEFKHHANKGKVKKVLSVLREYRETAKAIADFLWREFFEKGYFPHKKSIKKEQMQHIQSKLSERYKYVCLWQVYGVLEGYIANLQNQFARIVWRSTLSREDKLILLALNNIKGWLRYEKESITIYDNGEQREVEVKAWHKHLAKKIFKHLLGKNRRPRFEGISLHLDGKVAKLEPRRENKAKAFDYWLKLSTLDKGKPVLIPLEKNPYAESLEGEFRNFYQLLEEDGDIKVKVVKELKKRNYVPATDTIAIDLGLNPLIATNNGDLMGRRFLDFLKKMDERIVKRMAQVQKNGGLPSKDNKYREYVKRLREFLKNEINRVLNRLTNLYKPMKIIVEKLDFRSPELSKRMNRLIQNFGKRYVKEKLQRLRQLYGIEIAEVNPAYSSQECSSCGYVDGENRKSTQEFECKCCGNKINAQVNSAKNLLERSSLREFHPHLPKKQVLKVLIKKHLERLKGCKSPPLDILKGNPYYREFLESILNPRQGLTLS

SEQ ID NO: 12801 - protein, 402 aa, Escherichia sp.
VKRLQAFKFQLRPGGQQECEMRRFAGACRFVFNRALARQNENHEAGNKYIPYGKMASWLVEWKNATETQWLKDSPSQPLQQSLKDLERAYKNFFRKRAAFPRFKKRGQNDAFRYPQGVKLDQENSRIFLPKLGWMRYRNSRQVTGVVKNVTVSQSCSKWYISIQTESEVSTPAHPSASMVGLDAGVAKLATLSDGTVFEPVNSFQKNQKTLARLQRQLSRKVKFSNNWQKQKRKIQRLHSCIANIRRDYLHKVTTTVSKNHAMIVIEDLKVSNMSKSAAGTVSQPGRNVRAKSGLNRSILDQGWYEMHRQLEYKQLWRGGQVLAVPPAYTSQRCAYCGHTAKENRLSQSKFRCQVCGYTANADVNGARNILAAGHAVLACGEMVQSGRPLKQEPTEMIQATA

SEQ ID NO: 12802 - protein, 373 aa, Alicyclobacillus sp.; identical to SEQ ID NO: 9

SEQ ID NO: 12803 - protein, 405 aa, unknown
  TnpB Polypeptide
MIYLIESHTIKPTNPHYKELDNICFLSKNLYNAANYIIKQHYLETKTFLNKFELINKFTREYQPDYKSLPAKIAQLTIYQLYQNWSSFFGLLKAKKDKTYTHKVKTPNYLEKNGRNICTFNNQSYSKKFIKVGLVVLSGLPNFKLKTLIENPLENIVEIKIIPRGNHIKVNIAYKIQEKQVKETSEKIAGLDLGLNNLATIGSNCSLPIIINGRPLKSINQFYNKKLAKLKSEKDISKNKKYNTKKIRNLIFKRNNKVNNYLHKASRLITNYLVSNSIDTLVIGLNKGWKQGIEIGHRNNQKFVEIPHSRLIELIKYKCILEGIKVIIREESYTSKCSFIDNEEIKKHKTYVGQRIKRGLFKCSSGRLINADLNGALNIARKEFPNAFIGYGIEVCSTPKVINLL

SEQ ID NO: 12804 - protein, 490 aa, unknown
  TnpB Polypeptide
MGQATRTTKLEIDLGKRRQGGTNQHKRTYLDATTALLNRARAFYIEFFLTHAEKLSERVCYFSEQHQEQRERRISADELLTWAEFQTVATKDHPEPLPDWNFSQAFPDMPFIYRRSIIKDAIGKVKSYLSNLQNWQASGKKKGKPGKPGASDHPTLYKETFVLDAEQLDQQGVFVKLKIYTGTEWRWVNFPVKYSRFHQTRLQEAGWEQQSPSLILRPKYAALHIPQVKAIKAQKVQASKMDPHLVTVAVDVNVKNLAVITVRQDGAIIETVFVRDHGLDQHRYGHLKRIAQKQWQSGKPVKGEHSNQQLWGHIDHLNEDAAHQVARSIANVCAKYAGCVLLFERLRKITANGGSKSRRMNRKRANQLRGKINRFSREKAFAQGTVTVEVNPHGTSQYCSRCGAKGERFSNLGGKRIQAKWGKLFRCPVCHYEAHADFNASVNVHRSFYREWHWQPRKNPPPKVALRSVGGDPLSPATGRGEEACGGTPR

SEQ ID NO: 12805 - protein, 420 aa, Fervidicola sp.
MKRCNVVRVLSSKEQVKVLETLGDRCAALWNAANFRCRQAFMNGEPVPSYATLCAEFQGDPAYKALPSDIAQEILKKLRKAWNSFFACLRLWKKGELEKRPGLPRYWKDRRTGKRLVRLIPVKSPRSYSMDARTLSLTLPADLRDGNGRLVLRTKGVLRFSGTPKTLELRYDRVKKRWYAHQVVEVPEPARKARPEKRAALDLGARTLAALAIESLERQIIFSGREVWKDFLYWNKRIAGEQSKLNQAGRKTSRQLRRLYRVRTRRLKHAYLALAAEIARILKRHQVTTLFLEDLTGIRVDMEFGPGNLLVHNFWAFRMLRNLIEAACARAGVKVVFVEPNGTSSKCAVCSSPVKRPVRHKAVCENCGYVWHADANAALNILLLGSSKGHGAEATPLKPLALRWNRHRWVSRFESTAGTP

SEQ ID NO: 12806 - protein, 428 aa, unknown
  TnpB Polypeptide
VKVELFHPTIIQTTIDNHKIITIFSSGMRKINRTYRFRLYPNRGQTELLAKHFGCSRFVYNYFLNQRKEQYRLTGKSDNFYAQCKTLTALKKQEETAWLKEVNSQTLQFAIRSLESAYTNFFKKRAKFPNFKSKHSKNTFTVPQYASIAGGRLFIRKFTEGIKCRVHREIKGKIGKVTITKTPSRKYFVSVFTEEDYITPLEKTSKSVGVDMGLKDLLVTSDGETFKNNRYTRKYECKLAKAQQHLSRKVKGSRGFENQRLKVARLHEKIANSRADYLHKCSISLVRRYDIICIEDLNVKGMVKNHHLAKSITDASWGSFVSMLTYKVEWNDKKVVKVDRYFPSSQTCNVCGYVNKQIKELSVREWECPNCHTRHDRDINAAINILHFGLNNISAGTVDYTGGEEVRAILLESHSSVKPEANEFLVHW

SEQ ID NO: 12807 - protein, 405 aa, Granulicella sp.
MQRLQAFKYELMPDGNQQRDMRRFAGSCRFVYNKALALQNANHEAGNKFIRYEAMAKHLTGWRNGEGMAWLKDAPCHPLQHALKDMEKAYKNFFAKRADFPRFKRKGRCDAFRYPDPKQIKLDQSNDRLFLPKLGWLRYRNSRDVLGELRNVTVSQSSGKWFVSIQTQREVEQPVPTATSAIGIDVGIARFATMSDASFIAPLNSFKKHQQRLARYQRRMNRKIKFSSNWKKAKAKVQKIHTGIANARKDFLHKTTTTVSQNHALVCIEDLQVRNMSRSSKGNSEQHGKMVKQKSGLNRSILDQGWGEFRRQLDYKLLWNGGMLLAVPPHNTSRTCPCCGHVSKDNRPTQARFLCVDCGYENNADVVGAINVLERGYRLLACGEPAQSGRSAKQEPTEATQTVFA

SEQ ID NO: 12808 - protein, 376 aa, Chloroflexi sp.
MNTTLMVKLAPTTEQHALLLATMERFNEACNWIADVAFEHHTASKYKLQKMIYHDVRERFGLSAQMTVRAISKVTEAYKRDKRIRPTFDLHGAMIYDERILSWKGIDRVSLLTLEGREIIPVIMGGYQSDRIAAYGKRGQADLIYRAGTFYLAVVVDIPEPPPSQASGVLGVDLGIANLATDSDGETYGGEQVDATRRHYERMRSGLQRVGTKSSRRKLKRIKRRERRFKKNTNHLISKHLVAKASDTGRALAIEDLGGIRERTTVRKAQRSRHAKWAFGELRQFLTYKAVLAGVRLHLVDPRNTSRTCPVCGHCDKRNRPDQATFRCASCGYAGHADVVAAVNIAARAAVSQPMVSDATLVAAPGTSPRASAVGN

SEQ ID NO: 12809 - protein, 258 aa, Ktedonobacter sp.
  misc_feature (258)..(258): Xaa can be any naturally occurring amino acid
MGWDTPMPNDTCLNACYNGRMKQTMLLKLTPTTEQSQALLDTMHAFNAACNYVAQVAFAEKTANKFELQKQVYGELRTTYKLAAQLAIRAISKASEAYKRDKSIQPALKPEGALVYDERVMSFKGLLTVSLLTLSGRVLVPFQVGAYQESRMGSIKGQADLLYRHGTFSLAVTLDVPTPTPDEVTDTLGVDLGIINLATDSEGETFSGEQVERVRTRHQALRQRLQKRGTKSAKRHLKKLSGKERRFRKNTNHVISKX

SEQ ID NO: 12810 - protein, 360 aa, Ktedonobacter sp.
  misc_feature (258)..(357): Xaa can be any naturally occurring amino acid
MGWDTPMPNDTCLNACYNGRMKQTMLLKLTPTTEQSQALLDTMHAFNAACNYVAQVAFAEKTANKFELQKQVYGELRTTYKLAAQLAIRAISKASEAYKRDKSIQPALKPEGALVYDERVMSFKGLLTVSLLTLSGRVLVPFQVGAYQESRMGSIKGQADLLYRHGTFSLAVTLDVPTPTPDEVTDTLGVDLGIINLATDSEGETFSGEQVERVRTRHQALRQRLQKRGTKSAKRHLKKLSGKERRFRKNTNHVISKXXXXXXXXXXXXXXXXXXXXXXXXXXXXXXXXXXXXXXXXXXXXXXXXXXXXXXXXXXXXXXXXXXXXXXXXXXXXXXXXXXXXXXXXXXXXXXXXXXXXLKS

SEQ ID NO: 12811 - protein, 341 aa, Rhodococcus sp.
MEIGAPPTDPAKYEALADLNSAYRNFFASITGTRKGPRLGSPRYRSRHDHRQSIRFTKNARFQITDGRALRLPKIGDVEVRWSRELPSEPSSVTVIKDASGRYFASFVVAVDDEPMPEMDTEVGIDLGLATFVVLSNGKSVDSPKFFRRAERRLRKAQQHLSRKQKGSKNRAKARIKVARAHAKIRAARLDFAHKQSTAIIRENQAVYVEDLCVKGLAQTRLAKSVHDAGWSIFTRLLEEKATRYGRHFSKVDRWFPSSQLCSACGRIDGLKPLSVRSWTCPCGAEHDRDLNAARNILAAGRAERLNACGAQVRPERVPAQRGEAGTHRERQSALVGIPGL

SEQ ID NO: 12812 - protein, 378 aa, Bacillus sp.
VKLVRKAYKFRMYPNQKQKVFIAKTIGCSRFVFNHFLGQWNDTYKQTGKGLTYNSCSAELPKLKKEFVWLKEVDSIALQSTLKNLADSFTRFFKKQTSAPRFKCKKNRVQSYTTKETNENIAIVGNKIKLPKLGLVRFAKSREVKGRILNATVRRNPSGKYFVSVLAEVEVKPLEKTGASVGVDLGITDFAILSDGRKVDNNKFTAEMEQRLKREQRKLSRRALNAKKNGVDLFEAKNYQKQKRKVARLHERVANQRDDFLNKLSTAIIKNHDCVCIEDLNAKGMLRNHKLAKSISDVSWSSFVTKLTYKAKWYGRAVIKVGRWYPSSQTCSTCGHKGGKKSLDVRMWICQMCHTHHDRDINASVNILTEGLRLQALA

SEQ ID NO: 12813 - protein, 391 aa, unknown
  TnpB Polypeptide
MLRAFKYRISPNEEQKVLLDKHFGCVRFLYNLALETKSTAYAGNKISLSYNDLSAQLTDLKKECDWLREVNSQCLQMALRNLDNSFQNFFKGRASFPNFKKKNNKQSFQLPQSVKVDFKNSCIDLPKFKQPIKAILHRKFEGEIKTVTISKTPTGKYFVSILVDNHKELPKPIKSNNAVGIDVGIKTFAVCSDGTEYANPKHLRNAMVKLKWMQRQLSKKVKGSNRRNVWKFRIAKQHERVSNQRKDFLHKATNEITNRFDLVILEDLNIKSMVKNHKLAGAISDCGWNMFETMLKYKSEWKGKKVEYIGRFEPSSKICSNCGFKNNELTLADREWTCEKCNTTHNRDRNAANNILSFGLRNSAMEHSLEYVEQPSLDGALKRKKRLSSVI

SEQ ID NO: 12814 - protein, 402 aa, Proteus sp.
VTKTKWTCIRNIQCLPRQILVSFFIDQSIIDNMKRLQAFKFQLRPNGQQEREMRRFAGACRFVFNRALARQNENYEAGNKYIPYTKMASWLIEWKSDTETQWLKEAPSQPLQQSLKDLERAYKNFFQKRTAFPRFKKRGKNEAFRYPQGVKLDQSNSRISLPKLGWMRYRNSREVVGEVRNVTVSQSCGKWYVSIQTEYEATEPQHESTSIVGLDAGVTKLATLSDGTVYPPVSSFKVNQRKLARLQRKLSRKIKFSANWQKQKRKIQRLHTHIANIRKDYLHKVTSEISKNHAMIVIEDLKVSNMSKSAKGTTERHGRNVKAKSGLNRAILEQGWYEMRRQLEYKQLWRGGQVLAIPQPTPVRSALAVVIQQRKTASHKVNSSALNVDIQRMLISTGHVTF

SEQ ID NO: 12815 - protein, 402 aa, Proteus sp.
MKRLQAFKFQLRPNGQQEREMRRFAGACRFVFNRALARQNENYEAGNKYIPYTKMASWLIEWKSDTETQWLKEAPSQPLQQSLKDLERAYKNFFQKRTAFPRFKKRGKNEAFRYPQGVKLDQSNSRISLPKLGWMRYRNSREVVGEVRNVTVSQSCGKWYVSIQTEYEATEAQHESTSIVGLDAGVTKLATLSDGTVYPPVSSFKVNQRKLARLQRKLSRKITFSANWQKQKRKIQRLHSHIANIRKDYLHKVTSEISKNHAMIVIEDLKVSNMSKSAKGTTERHGRNVKAKSGLNRAILEQGWYEMRRQLEYKQLWRGGQVLAIPPAYTSQKCAYCGHTAKENRPSQSQFECLECGYTANADINGARNILAAGHAVLACGGRVQSDRPLKQEPAEVIQTSV

SEQ ID NO: 12816 - protein, 254 aa, unknown
  TnpB Polypeptide
VIGVDVGQRYLAVIATLSRESQFFSGTAVRDKADHYARLRKRLQRKGTRSATRRLLVLSGRERRFKLNTNHVIAKTIVCTHPNTLIGLEDLIGIRERTKRPKRRRKGKQVLPLTAKQHRANRHASTWAFAELHAFITYKAALSKSSFVVKVDADYTSKACPMCGSIDKRNRPGNGLLFVCQNTACSYKVRTGHAYTLHSDVVGARNIAMRTRLIRQDWVRMGQLSVAPDASDHEAKAARLRRYAELRWSPETSL

SEQ ID NO: 12817 - protein, 408 aa, unknown
  TnpB Polypeptide
MNKGDDNVKIKRVEQQFIKKNNPIFNIVDQYCLYSKNVYNEANYIMRQEYIKNNKILNSYTIQKLMQPMECYKECGSQAAQKTIQLVDKNWKSFLVAIKDWSRNPSKYLGKPKLPKYLKKDGKQVFMLKNIQCSLKDGLFRISFKPFKGYTVKTHANGKLMQCRFVPKGLYYVMEIVYEIEVPDISEIYERIAAIDIGVDNFITMVNNIGENPIAVKGGVIKSINQFYNKRKAAIQSELKKANGKDWSKKLQKLTDKRYEMIKYQMHCISKYVVDWCVLYGIDTLIVGHNNNWKQENKGMQNFTYIPYELFIQMLAYKCENNGIKFIENEEAYTSGTSFLDNEDPVKENYKKERRVYRGLFVSNGGKKINADVNGAYQIMKKVIPDAFSKGIEGAGLHPTIINLDCSR

SEQ ID NO: 12818 - protein, 407 aa, Nocardia sp.
MLVRYRYRAYPDGDQQKMLSRSFGCARTVFNDAVRARQVAHTAGVKISDTDVQRRVVTIAKSTPERAWLAEVSSVVLVQACQDARRAYRNFFDSLSGKRRGRKIGAPRFRSRKNNRQSIRFTRTGFGVTDRGVRLAKIGDVKLAWSRELPSEPTSVTVLREPDGRFYVSFVVEVEQTPLPASPTVAGIDLGLTDLATIARSDGTREKIPNPRHLGAKQRRLSRAQKALSRKRKGSANRAKARVRVAVLHRKVRETRLDHHHKLALRLIRENQTVAVEDLAVAGMARTRLAKSVHDAGWSTLVRLLEEKAARYGRTVATIDRWFPSTRTCCVCGVVGDRQPLCVRQWVCVCGVVLDRDYNAAVNIIDAAGLAESLNACGGDVRLRLAGAVAGEAGTPRTDPTGHGEAA

SEQ ID NO: 12819 - protein, 256 aa, Pseudoalteromonas sp.
VDHFCIAGNTDGQLFMAKSKQPINVRWSRELPSEPTTITISKDSAGRYFVSCLCRFEPKPLSISKNTVGIDLGLTDLVIASNGFKSGNPRHTKRYASKLAKTQRVLSKKKKGSSNFHKARKKVARVQAKIADCRHDFTHKLTSQLINDNQVISCESLSVKNMVKNRKLAKAISDANWGEFVRQLTYKAEWYGRTVVKIDKWYPSSKRCNCCGYVVDPLPLHIRKWSCPQCSSELDRDINAALNIKAVGQTVLACGA

SEQ ID NO: 12820 - protein, 254 aa, Haloarcula sp.
LENIQQVRAVYNSAKRRWELHVVCETEITAESPGEKTAGVDLGICNPAAVAFPDDALLYPGDTLREDKHYFQQEEYQTEGPHGPSQKAQWAREKLSRRKDHFLHALSKDIVERCVDHDVGTIVVGDPSGVDEDDWGRHGNKRLDNWAYKRLMNLIDYKARERGIEVEMPDERGTSSTCSVCGHEDDDSRVERGLWKCGRCGVVAHGDVNGADNIRQKTLPVTPPLGDSGNGCLAQPRVIQFSRTRGFQPRATAE

SEQ ID NO: 12821 - protein, 216 aa, Haloarcula sp.
MYESIVEYRRTAVIKLDTPEGADEHLWETVEEFKYCSNTASEWCWHGDDGYHVTSKAKAEDALYDQLREDTELTANLVQKGIHRAVEAIKSGVERLKNDQDTSRPTFSADTAIYDKRSATFHRDHVSLSTPDGRIECDYILPENPETPPTKYVANENYEFRRATLHRRDGDWYLHASMLKEDDDTDTTTGHRTVLGVNQLAVASTGRFWSADEFNH

SEQ ID NO: 12822 - protein, 424 aa, Haloarcula sp.
MTDSQALVKTLDFQLDIQSDNESLLYDATREARSVYNETIRLAKQGVDWDAIPDRVADDANLVKNTTQRVVAKALGAMENYYEYDDFGQPSHTKDGAYPLRGNYEEGYNLSITDDGDVAFRISAKPYKHVTGVLEGDDAHLNVLKTALESDEWKIGTAEALFHNDDAELHVNVTNTEQTVRDKQDSRTVVGVDVNEDNVALTALSEDGIEDSLVIDFPEIKFERHRYFTMRKRVQNAGKDSIHDTLEGREERFVRDRLHKVSRHIVEWSRQFEKPCIVFEDLKEMRDSIDYGTRMNRRLHHLPFRALQFYTSYKASFEGIPTAWINPEYTSQRCPMCGHTERANRNKKRFNCWDCGHQDHSDRGASVNIAVKGVKKLDWNVPALNSLPVVRKVRRRASGAVDAPTVTQPTVRGYQADGRMGVSD

SEQ ID NO: 12823 - protein, 303 aa, Haloarcula sp.
VTYNQSGFDLDEKRGQDGFAYVRFSKVGWVKIRYSRPIPADSLIKEATFKKETTGEWFVSFGLEIDDANLPEKPDVDSLNPSNSVGIDLGILNYIHTSDGKTVDWLDLEGEYERLRRAHRKLSRKEHGSNNYENQRVEVAKAKRDIHRKVLDYQHKITTWLVKECDAVFVEDLNVQSMLRADGNGRNKQDAAWRQFITLLEYKGDVYGTHVVQVEAAGTTKECAVCGVESSKSIWVREHSCPSCGFETDRDANAAMNVLQRGFSELGLGWPESTPVETVTATDTADLQRMSASHVTETGSLST

SEQ ID NO: 12824 - protein, 373 aa, unknown
  TnpB Polypeptide
MVNDSIRIGLVNDASSLRKLSLLSYNQLAHYDSPSRYKLCAISRAAGILAARNKSARRGFPTRTPYAVRQQLVSCYGFKVRNGWLEIPVARGKRFSIPLTKHVLEVISQPGVKVRSFTLTRNRLSLCIAREVATVECTSTVGVDRNLRNLTVGNDHQTRHYDLSKCVKIANATVRIVASFTRDDTRIRTGLASMYGQRRTARTGHLLHNATKTIVAIAVQRRTAIVLENIEGIRSLYQKGNGQGRKYRGRMNGWSFGEAQRQIEYKARWVGLPVIRLSRRETRGSSVTCPRCGERLQSDKKLKRKLWCSGCRIVMDRDQVAAVNLARRGRVRFARSRPLIEAQGGAVEAVKGNPTPTVIPGVDAPKLTQPTKS

SEQ ID NO: 12825 - protein, 391 aa, unknown
  TnpB Polypeptide
MIKNYKCIKIEIKPTEEQIEKINKTIGTGRFLYNLYIAYNKEIYKKEKRFITAFEFSKYINNKYIKDNPDKLWIKDVSSKANKQSIMNAEKAFKRFFKKLSGFPKFKKKNYSKESCYFLKNNKTDFQFYRHKIKIPTLKFVRVKEYGYITKNANIKSGTISKIADRYFLSLVIEVEDAIKGSNTNTSTKGLGVDLGIKDTAICSNGMVFKNINKTKKVKKIKKKIKREQRKMSRSVEYSKYNKIKLKECKNFNKKKLRVQRLFYRLNCIRNDYNNKIVNEITKTKLKYITIEDLKISNIMKNRHLSKAIQEQNFFSIRTKLINKCKERNIELRLVDTFYPSSKTCSCCGNIKNDLKLNDRIYKCCECGLKLDRDYNASINLEKAKIYKVIA

SEQ ID NO: 12826 - protein, 392 aa, unknown
  TnpB Polypeptide
MVIMGGYDFGQSDKTLLPTISKSIYIEKTNKYIGQSEMIKSYQLKIYPNEGKKKELNRPISFWTDKVNHFIKLFWVFEELPGGYPPKEYTRGGRLIRDAAVKAWQIVKGAKRAEQKKRPYYNGNEIDLNEFSAYIISELQTKEFDLWLNIISLEKRKRLKLPCKKHREFNKALERGKLRKSIKISREGKDYYATFFFEFTEKKSYNSKVVGIDVGMNHPAVTSDGHRFGDELRNLRIRTKWRKYKGLSAYKQGLNRIAKEIVEAYQGCDFAMEQLLFKGKRGRSRRFRRLNNNWAYAHLTHKLEAMGKVGGFRLWEVNPAFSSVECPKCGFTNRANRRDDEAFSCISCGFTEAADTVGALNIGERVARSNPSLRLIASEDIIPYLSINVGGD

SEQ ID NO: 12827 - protein, 413 aa, unknown
  TnpB Polypeptide
MLFKGVAFRLASDLPPEAASLLQDFRLAVNKAVRASLDARVSSRNGITKLLYRTFREEHPGMYAKHIGSSFEVAAGILKNHRRRVRHGAHCGAPFVKRLMMKAENQAYRLDRTEGTIDLPVRAGCHVKLGLVVSQYHRRYLNDETLSLGSLTVLPDRVIVAFRKEVPKPIAASSVLSLDTNERSLDGIFVEGGKRGNGRCVQVEAVFPDVAKIQQRHHERRRRLQRKKAHDRRSTRVLCRREGAREHRRVDYRLHHVASAVIEFAEGHESAIVLEDLRGVRPNKSKALNQRLSLWPRRKLHQIIEYKAAWKGIPVIKVDPRYSSRRCPICGRIPDSRMGTRTEFVCECGWHLNRHINASMNLLQTAISKGLKVAGGLRFSPGAFQHDVMMILYEPAMAARSEPNGTSHIGVTP

SEQ ID NO: 12828 - protein, 450 aa, Thioploca sp.
MRATRIVTSKNLNPAKYQQLSIQAQRLGKIRKEVWHSFGSIKGVLTKSDRKIRDHWLKEQRQFNVSANAWKETLRDSFGDIKANRESAKEKVRKVLYKQVSNEKERTQLYKELKSDSWTSNNYLRRLMRKYWKHGRSHTNNQMRVHSDNYTTFQLGGRTWLKIPRLTIGKRMAIPLNTTIKPTGSLRLILIDGEVEVHYTIARAETTHCGKATLGIGKGYTEVLVDSDGEPYGEGLGSLLTQHSDKLKKKYIVRNKLRAILTKKPHKKKNIILNNLGRKKRNHQQKQIQSQVKDIIYRSTPKLVDKAEVIAAEDLTSPILSKKFGKNVSRRLSAWTKGVIANALDTVSRRRGSSVILVNSAYTSQMDSRFGILLGKRRGDSFYCFDGVVLPADENAARNVLARLYDSEIDRWTPYQKVKSILLERTERLRLGLLNQDSSYNSHELSTESE

SEQ ID NO: 12829 - protein, 402 aa, unknown
  TnpB Polypeptide
MAQSFWYNDNMAIAHVIYQERAYLRRNGHQALDEAFRECTRLYNAALEHWQTAWKHGHSVSLYEQYGELTAIRQDDEYWSSVSIGIGRGVLRRLDRARQAFYRRCKSGEKAGYPRFRASRRWKTIEIEQPTTSMVTDKRGKWVVKVKGLPILVIKPRRELPDSTHLKTLTITRKPTGVYVSLGYEVEREVLPKVGRSVGLDMGVRSRITLSDGSFAVRRHSENDKVATLQRRIARCRRGSRSQRKLYRQLARLRHRDSVRNRNECHRITTQIVRSHDLIAVEDLCITYMTRSARGTAERPGRNVSAKSRLNRDVLEQSWGIIISQLDYKSLWYGREFTRVDPKHTSQTCSGCGVVASENRQGKTYNCGSCGLRIDADTNAAINILRRGLSATGVGISPGLAA

SEQ ID NO: 12830 - protein, 401 aa, Pelotomaculum sp.
MIRVLKTTFRTSKHEMDRLFACNRESAKAWNDCLNYAREYHKTNGKWIGKSDLQKLTKGRYHMHSQSIQAVQERYLDARTNANRAKQAGHGHVRYPWRQKKNYPTRWKKDGFTIQPNGKIELSMGIHNGKREKPIIVHVHRIPPRKVKEIELVWDRKLILAISYDDGTQPRENLNRGIAAIDMGEIHGIAAVADTGEALVVTSRKLRSVKRLRNKKFKEIYQKRSRCKKGSRKWKKYTCAIARIGSKTDNQQRDILHKMSHKFVAWANDQGVKTVVVGDVEGVQRNTSRRNKKNLKQKRHSRGLNQKMSQWPFGLLQAYLTYKLAALGIDLIKIDESYTTQTWPVCGRKKKPSGRTYQCHCGYISHRDVHGARNIYAKHKYGEIRTLDWSVENIKYLRPAS

SEQ ID NO: 12831 - protein, 385 aa, Pelotomaculum sp.
MYPAIRSNGILQSKRQGGDKLQITVKVKLQPTKEQSKLLIATTKNYIYLVNQIVSDYAVADRNLKYSSKDVIADLPSAVKNQAIRDAKSVFVKYKKKVRANARLKPDEQREVKLPVLKKPVAIWNNQNYSVKEDVLSFPVFVEGKSKRVEMKAILTGYQKNLLNNKPGSLRIIQKSGKYIAQIAVQVAENTAAGSQIMGVDLGLKVPAVAVLENGKTKFFGNGRQNKFIKRKHRSVRRKLGKLKKLKAIKKLHDKEQRWMTDQDHKISRQVVRFAQENNVTTIRLEQLSGIRQTARTSRKNEKNLHTWSFYRLAQYVEYKAVLAGIKVEYVNPQHTSQKCPVSGELNKAIDRKYECGCGYKTHRDRLGAINIISATVADGNSLSA

SEQ ID NO: 12832 - protein, 417 aa, unknown
  TnpB Polypeptide
MAQVLTISCKLKVSASQAAKLDATLDAFAKALLAPAGRRPYWVNENTPEKTVNAVKLQSLCYREIRTRFGLSSNLAQQVCRRLAGARKVAQQKNRPVKAFKSGFVTYDARIFSFREKDWTVSLTTVEGRERFELDIGHYQRGMLAGSHPKSATLVKRQGGSYYVQICVESEVPEPEHAVRAIGVDLGRRDIDHTSEGDNWNGQQLNQVRDHYSRLRRVLQRKASRGTRSTRRRCRQLLQRLSGRERRFQSWVNHCISKSIVARAKATCSLIALEDLTGMRPPARWRERERVNQQPRSKRERRRANSEAYGPLARGAFYQLRQFVHYKAMRAGVKVVLVPPAYSSQTCHQCLWIGQREGKHFRCVNPACGWEGDADLNGANVIALLGVAVNRPRGPWLACQLQGYRKPAPYRLAVGAG

SEQ ID NO: 12833 - protein, 353 aa, unknown
  TnpB Polypeptide
MSEECKTLEAYLAPPTQHKQRKLHDEHERYESLLRCSFNDGCDTMTAVNEIVSGENLNWHSKNALKKYVPNLLDEDTYDAKQLADTHPIRYANTAAVFDVDEDRYHEICWEAPLPGRGTSFWIPLQLNPEQEDWWYSLIDNEDDSVWAGELRLQRDGSRWVLHVTANYEVEPDHSCSCESDDVTPVGFDVGESKLLVGCALRDDTPVDPLFVDGGRVQHLRQKQPSAEDRLKPRYASNLLDDLVWGRWQDAIEDEIEKASHRAVEYASQFENPAIVLEYLDGITDEDIGKYWNRRLGKWLFSRLQSRIEDKAAEHGIPVEYVHPHHTSKTCNACQHVGYRPHQGTFKCTNDSC

SEQ ID NO: 12834 - protein, 438 aa, Acidimicrobiaceae sp.
VVQVVFLRIGWLCLGEHRAPLHRTPMGRRGMRRAYKFRLRPTAKQHVALNRCLASHRELYNAALRERRDAYEVVVRNDPGYFGPTRATCPVRYGTQSAQLKGIREVRPEVAEWSFSSQQATLRRLNKAFEAFFRRVKNGETPGYPRFKSAHRFDSVEWPSNGDGCRWHPEAGRVYLQGIGHVKATVPRSVEGKVKTVSVKREGNKWYLVLSCDEVPAKLLEPTGQTAGIDVGIASFLVTSEGVHVENPRHAKVAAESLGNAQQVLAAKLRGSNNRKVARATVASRHRKVANARRDFHHKTALALVRSFDVLFLEDLKVTNMVRRAKPVHDQDNPGQFLPNGGSAQTGLNRSISDAGWAQFRSILCAKAEDAGRQVVSVDPRHTSTTCHRCGHVEKANRVTQAVFTCRSCGFSAHADENAAWNIQRAGLALLAASQQAA

SEQ ID NO: 12835 - protein, 319 aa, Oscillatoriales sp.
LDFKQVDSTILQDVSKRVDKAFERFIVGDSKGGRSGKPRFKTEADYRTMTFCTANSDWIKLIRKNWFYIRLPKLGIIKIRMHRPIPDGFNVKQISVTRKADGWFVQIMIEDASVPQFIPDKVAPNWDNSIGLDAVLHEDVYLATSSGEKLPSLKPLRKNQAKLDRISKKRNKRKLGSKCRRKLAKNEARQHQKIARYRQDFHYKTAHKLVRSGAKFFFHEDLNLKGLTKRNKVKQDDEGNYLPNGQSAKSGLNKSWLDAAFGQFFKTLEYIAEKAGAVVVPQKPAYTSMVLCYRNEIIFTDCGIRNYWDEQHSLMVDRE

SEQ ID NO: 12836 - protein, 318 aa, Aneurinibacillus sp.
LNYKACSALLTKLKKEVSWLKAPDSTALQHALKDLDSAYQKFFNEKKGYPKFKSRKNRRQSYHTTNNKDAIRIQGTSIRLPKLGLVRFAKSREIEGRILSATVRRNPSGKYFVSVLCEVEMKPLPKVENQVGVDVGLKQFAILSTGERFDNPKYLRKYERKLTKLQRVMSRRTKGGSNWNKARLKVARLYEKIANCRTDFLQKLSTKLIRENQTICVEDLQVSNMQKNHKLAKSISDASWSEFRRMLEYKAKWYGRTLSFVGKTFPSSQLCSACGYRNRDVKNLNLRKWDCPECHTYHDRDVNAAVNILQEGLRLLEL

SEQ ID NO: 12837 - protein, 416 aa, unknown
  TnpB Polypeptide
MYLTVKQQVKHLSKEDYKSIRELCHIAKNLTNQAIYNVRQYYFDEGKYLSYEKNYALLKSSENYKLLNSNMAQQILKEVDGSFKSFFGLLKLAQNGKYTFKDCKLPRYLPKDGYTTLVIGFVRLNENKLRLPFSNTYKKTHKSVEITIPPVLLDKKVKEIRIIPKANARFFEIQYIYEAENIQRNLNQNNTLALDLGINNLVTAVSSEGKSFIIDGRRLKAINQWYNKRNAYLQSIKDKQHLGYKPTNRQKANTRDRNNKVNDYMNKASRKIIDYCISNDIGTLVAGYNETFQHSSNIGKVNNQTFVNIPYGQLQSKLEYLCELNGIVFVKQEESYTSKSSFWDRDELPVYNDDNIETYSFSGIRIHRGMYQCKNGKCLNADVNGALNILRKSNVVSLEGLYTRGEVDTPVRIRIA

SEQ ID NO: 12838 - protein, 337 aa, Epsilonproteobacteria sp.
MILTYKIRHSRNFTHELKLAKKIANFAIKTKSRSSADVKHIGLKSAISNQILKKYSSSKTAKQVKSVKLTVPSQSIKIRDGQVCIPCLKLQLPIYFPDNFRKINQVEVGGMFAYISVSYDEPTPITPESVYGVDRNTTGHCLVAANPTTGKVLKLGKAAHHIHQKYKHTRKNLQKQGKYGLVKRIKNRESRVVRNLNHHISKKLVGECIKQKAGIVLEGLKDIRKTAKSRKKQRYSLNSWSFYQLRQMVEYKAKKQGIPVFYIEPQYTSQRCSRCGHIEQANRKGKLFQCKSCGKVENADVNAGFNIAFAYQNGISRFVKDRDLAKGSTDTPGEALA

SEQ ID NO: 12839 - protein, 380 aa, unknown
  TnpB Polypeptide
LEQCGHARYVWNLGLEQRLMWARWKGPTPGFNAQAAQLTAARTAEPWLACGSQTVQQQALRDLDQAWQRFFAGTHRRPTWRKAGEHEGLRIVGPQALRVRQDNRARSSVLVPKVGWVSFKRSRDLADWRSYRITRDRAGRWHIAFAVIPEPIAAPGTGEVVGVDRGVTVAVALSTGEMTSPAGLSPKEAERLLRLQRRLARARRGSNRRRKAKTLIGQLKARDGDRRKDWVEKTSTDLATGFDVIRVENLNVKSMTRTARGTIEKPGRNVAQKAGLNRGILKSGWGLLVTRLEQKAPGRVEKVKAAYTSQTCNACKHIASESRKSQAIFVCVACRHQANADVNAARNIAAGHAVTARGDLRVLARSVKREPQHVRPPKVA

SEQ ID NO: 12840 - protein, 382 aa, Ignavibacteria sp.
MLKAYKYRIFPTEEQQGLLANIFGQTRFVYNLGLETKISAYAGNKTNIDCFDLIKQVKELKDTECPWLKEAPSQALQMALRNLDNAYTNFFKGKGFPKFKNKHGKQSFQLPQGVFLSEDNKQIFIPKLKFVGIDLHREFKGDIKTVTVSRTVTNKYFVSILVDNKQELPKKKPITEQSAVGIDLGIKDFAITSDGKKFENKDFFKSTMQKLRVAQRSLARKQKGSNYYKQQKLVVALLHEKVKNQRQDYLHKISKYLVDNYDTICLEDLSVKNMVKNHCLARAISDMGWREFRTMLEYKAEWQGKNLSVIGRFEPSSKTCNCCGYINKELTLNDREWTCKGCNTKHDRDVNASINIKNFGLRNKSSVAQSDGIPCACNVEAH

SEQ ID NO: 12841 - protein, 373 aa, unknown
  TnpB Polypeptide
MLYVYRQDFFKPKEERVSITFKDLYYTGKSTEHWSNLPSKCSGCVWVQLTSNINSFLAAMKEYNKNPEKFKKRPNVPNFNKGLNITIFNVQSLLTFGLMRRHIRLMRTNIVLDLSKYEGEVREVKIIPKKDYFIIKATFNVETNQEDLNNDKIASIDIGVNNLAAITTNQAEIQHILINGRPLKSINQYYNKTNAKLKSKLSKGTYKSKRLNNLTDKRTNKIDDYLHKASRYIVNWLIDNKIGTLVIGKNKEWKQEINIGSRNNQSFTMIPHARFINLIKYKYESVGGKVILVGEAYTSKCSALDIEPIKKHEVYKGKRIKRGLFKTSNGTLINADINGSLNILRKVVEKEEYSDLIDSQQWAKYSPIKIKIT

SEQ ID NO: 12842 - protein, 371 aa, unknown
  TnpB Polypeptide
MKTYKYRLYPTKYQAEKLASALECCRLLYNCALEQRKVAYRQFGVSVRRLDQQAELLEIKKSFPEYKGIHSQVLQEVILRVDKSFQNFFRRLKNNEKPGYPRYKGYGWYDSFTYPQSGFSLFDNSKGYQRLKLSKIGNIKVKLHRCIKGTIKTCTIKREVDKWYVCFACEVEPEILPKTNKSVGIDVGLEKFATLSDGVIIENPRFLRESEAKLKHEQRKLSRKKKGSNSRKKQKHRLAKIHRKIKNQRNDFLHKESCKLVKTYDTIVFEDLKIKNMVKNHKLAKSISDASWSKFIEYTSYKAESAGKQVILVNPRNTSQICSSCGNTVKKSLSVRTHKCSCGLVLDRDINAAINILRAGTAPGGATAIAG

SEQ ID NO: 12843 - protein, 428 aa, Halorubrum sp.
MEYSHRYHAYPTQEVAERLEHHIDVHRQAYNSTRYEYTNRKDTDNVGSAYKHHDRLTDWKDEYPVFKEAHSKALQRTVTRFYQNLSNLSQKKKSGRKVGMLKWKSPVEYQSMTYSQSGFELKNTSGRRATLELSKIGDIRIRYHRKIPDKAEIKEVTVKKETTGEWFVSFGLETDDANLPEKPDVDALDTSNSVGIDLGILNYIHTSDGTTVDWLDLEDEYDRLKREQRKLSRKQKGSNNYENQRREVAKVKRHIRRKVLDYQHKITTWLVKEYDAVFVEDLNVAGMLQGDGNARNKQDAAWRQFTTLLEYKGELYGTHVVQVDPRGTTKECVSCGADTAKPLWIREHSCPSCGFVCDRDANAALNVLQRGLSELGLGWPESTSSESQGDSDVRTRAALSSTPVETALPADTHSVSAKRVIEAGSLGA

SEQ ID NO: 12844 - protein, 377 aa, Glycomyces sp.
LYPTAPQRDALARAFGCARVVYNDAVAARKHAHREGLRYPSAGALSKALITEAKRHPDRAWLAEVSFTVLQQSLRDVDRAYNNFFASLSGKRQGARVGPPRFKRRSGTQSIRFTRGAAFRILDNGRLRLPKIGALKVAWSRDMPSDPSSVTVLKTPTGKYYASFVIAVADGAQKLEPLDDSDTETGVDHGLAHFAVLRGGRVVESPRFLRTLERKLKRAQRALAGKTKGSANRVKARVKVAKIHEDIKYARSDWINKQVIGILRENQAVYVEDLHVKGLARGRSAKSVHDASFGMFLARLESKAQRTGRTFARVDRCFPSTRLCSECGALTGPRGLEGLNIRMWECECGAVHDRDRNAEINIRREGQRLVAAGQADT

SEQ ID NO: 12845 - protein, 268 aa, unknown
  TnpB Polypeptide
MQIISSYGVEIRKQNIPIRQTLKIYRQAVSYLTEIYEQVWAELKMIPEAKKRFNAAEHLVHTTKKNHAHFGFDIRFPKMPSYLRRAAIQHALGSVSSYESRMEQWEAAGELSGKPNFTCENHAMPVFYRDVMYREGTEGKDEAYLKLYDGHDWRWFRVCLSHTDMEYLRRNWYGKKASAPTLEKRHHKYFLRFSYIEEVTLTQTPVKEQIICSVDLGINTDAVCTIMRADGTVLGRKTVCTAHWDESGDSRGNMDLRRQGKGGHTPDV

SEQ ID NO: 12846 - protein, 318 aa, Limnoraphis sp.
MVEDIRAILHCFSNRLYGLRKYKTQALERPRTIMQRAFKTKLKLNNKQKTLMAQHAGYSRWVWNWALAMWNEAYKQGLKPSTNKLKKFYTNHIKPQYSWQSTLSSRVYQFAFMHLGEAFSRFFQGVAEHPKFKKKGRNDSFTLDNCGQVMRFSGRRLKLPFIGWVFTYEPLPEIQTKRVTISRVADSWYLSVAYEFEPEQTVKSRVYLGVDVGVKALATCSDGTVFANPAAHKKAQKNLAKLQRELSRKQKGSNNRNKAKLKLAKAYQRVTNIRKDGIHKLTSWLCKNHAVIGLEDLNVSGMLKNHKARGCYCRFCFL

SEQ ID NO: 12847 - protein, 324 aa, Okeania sp.
LVATWRGYFQAIKEWSKRPEKFLGKPKIPKYKDKTKGRNVVIYSKESVYKAPLKNGICHLSMSQIKIPVVVDTVIEVRIVPATACYIIEVVYEKTLQPQINSRSVAGIDLGIDRLVALSTNKPGVKPLLINGKPLKSVNQLYNKRKAKYQSNLKGNRKTSRKIEALSYHRNRFVENYLHNTSKLVVEYLTTNNIGTVVIGQNDNWKQGANIGKKNNQNFTQIPHSKLVQQITYKCELAGIQVMETEESYTSKTSAIDLELPFAQENYVGKRVKRGLFRSGTGKVINADINGSLQIIRKKFPEAFSAEGIVSCAVQPVLVNPISR

SEQ ID NO: 12848 - protein, 143 aa, Gallibacterium sp.
LHHKIANCRKDFLHKISTQISKKHAMIYIEDLQVSNMSKSAKGTVEAHGKNVKQKSGLNRSILDQSWFEFRRQLSYKTQWRGGFLVAVPPQNSSRTCPCCGHIAKENRQTQVHFECVECGYTENADVVGAMNVLARGREIVQV

SEQ ID NO: 12849 - protein, 380 aa, unknown
  TnpB Polypeptide
MRPRSSDCRCFPGHKGGVTTVLAITRPALFHGPASILAARKKSLTRGFPTKNPYCLKPQVTAYQGFKISKGALRVPIGRRRFQYFPLTKHTLFVISCPGLTVWSFALTDTSLSLCVSKEVPMIECTSTIGVDRNLRNLTVGDENRTVQDDVSRAVRTAETTTRIIRSFKRDDARIRKRIASKYGRRRSNRTQQLLHTVTKRVVADALERRQAIVLENLKDIRKSYLRGNGQARRYRRRLNGWRFGEAQRQIEYKARWVGLPIIRLSRSETRGSSVVCPQCGERLQEDGRLRRKLWCQHCRCMMDRDVVAAINLSQRGRLRFDRSRARVRLQGGAGEAVKGNPTPTVIPGVDAPKSSQEVQYLTIQNLTEPPRSLKPVHKS

SEQ ID NO: 12850 - protein, 374 aa, unknown
  TnpB Polypeptide
MSPTVRQRAALEELLSLQCELYNAALEERRGAWRWEHRSVSYVDQCRTLTALRESRPEVLACGVVVCRGTLRRLDWAFKAFYRRCQEGQRPGYPRFRSRQRWDSLQWEDRNGWRLAEAQRRLHLHGIGALKLRMHRPLRGTAKAITVRREGRRWWVSVRCVDVPAEPLAPTGRQVGLDLGVTVLVATSDGDLVTNDRFTQRAAGRLAAAQRAVQTKQRGSKRRRHAGERVGAAHRHIRNCRQNRAHQLSRQLVNDYDLIVHEDLAIENLVRRPRPRPDGHGGHQPNQAAAKAGLNRGIHDAGWGALLAMISYIPEGAGPVKGFGCQWGSVPGWSMSGAGRARLPYIPSPRRGRHGTVRPRTTGSIKASTAPSQG

SEQ ID NO: 12851 - protein, 221 aa, Okeania sp.
MKSIRTKLKLNNQQKTLLAQHAGYSRWVYNWGLSLWNAAYIDGYKPNARKLREVFTNHTKPLYPWMKNLSSKVYQYAFPTECCANINLGEAFKRFFSFGMLPYGMLRKRKQGLGKHPKFKKKGRSDSFTIDNSGKPIELNGWNHKLPFIGWIKTYEPIEATTKKITISRHAGDWYLSFSYEFTPTPTPKTTEVVGVDLGIKTLATLSDGKVFAHRQVIPPV

SEQ ID NO: 12852 - protein, 402 aa, Escherichia sp.
VKRLQAFKFQLRPAGQQEREMRRFAGACRFVFNRALARQNENHEAGNKYIPYGKMASWLVEWKNATETQWLKDSPSQPLQQSLKDLERAYKNFFRKRAAFPRFKKRGQNDAFRYPQGVKLDQENSRIFLPKLGWMRYRNSRQVTGVVKNVTVSQSCGKWYISIQTESEVSTPVHPSASMIGLDAGVAKLATLSDGTVFEPVNSFQKNQKTLARLQRQLSRKVKFSNNWQKQKRKIQRLHSCTANIRRDYLHKVTTTVSKKHAMIVIEDLKVSNMSKSAAGTVSQPGRNVRAKSGLNRSILDQGWYEMRRQLAYKQLWRGGQVLAVPPAYTSQRCACCGHTAKENRLSQSKFRCQVCGYTANADVNGARNILAAGHAVLACGGMVQSGRSLKQEPTEMIQATA

SEQ ID NO: 12853 - protein, 425 aa, unknown
  TnpB Polypeptide
MSRTETTIVTNCVLYEGLNKDLYKYFEEVTPFFAFLVRRTIHHLTNKLNDEKEIKYRTRLKQKYNITNRFAKTVMRTAKNQLKLSKEAGKYLHSTYNKKIKNVTVKIIKTKATLNNPNTKKDRIKNLKIKLFWLEMKKNKLIQLKNNGPKPMLTFGTKKLLKSNKLKFLEKRDNQIIYLGDKNDYKGNQQFQLFYNKKYNNFTYKIRLENQYIKGSKYIYGGFIIKDKNAKREILKILNNPKSNSLTFRIIKKNNMLHLQIMYKTGATFKTRSSNGVLGIDFNKGFITISEINETGKLLNNDIINYIHKGKSGVTKNSMHHLVKELVDLAINSGKDIVIEDLKSLNKNKQEKTERKHYNRMINTLKFGKFRRFLETRCDKLGVGLSLINPYNTSKIAASKYCYNMKLNIHSAASYVIAKRFYNLD

SEQ ID NO: 12854 - protein, 658 aa, unknown
  TnpB Polypeptide
MSIKEKPPEFFKSVKTSLKSILKHPEINTPKINEAVIKANKIVIHTLQFLKLYLLHHYETTNTLPTINAELVNNSMKVICGEKEEKRGKPPKKETIEIKDKLNQIYKQHYLPYAQNEPIDYSGLNTILDYLTIDILTMYENNIQLHYVEYVERYVNVMWKKKFITEKIRKLGKTKAERETRIRNLCSELRKIKNDLLSVDKKEYTSKLYYHKWITEQRNHVFPNKKKFEKDSIYYDLKCNPMDYLPSMIYMMKQVENEKENNSISNVFPMRSEITPKYIRLDTTTLVNLLFRKQHGSKALYKTNGNLKKNEDKIWKFFFRIERKLFTKPNYSFHHMISTDGISVSVLLMRKDLVGKKLPMMKTKMARELYIDELEDYSELQNKKIVGIDPGKEDLIYCVDGATKDANHFRYSQNQRRKETKMKKYNNIILAMKSNKIQGKTIIEYETELSSYNRKTLNIVKFKEYLQAKNRINHILFGFYHRELFRKLKFGRYINTKRNEQKMISNFRKIFGTPEDVVDCIGDWQQKKQMKFKEPTLGIGMRSLFRKNKYKVYLVDEFRTSCKCSKCDGGACEKFLVRKNPKPTKDDMRLVHGLLRCKSGCGLWNRDRNGSSNIYKIAYQAIHKLERPSYLCREIKSNQAVLSNCYNQTIHENEKSQP

SEQ ID NO: 12855 - protein, 379 aa, Streptosporangium sp.
MCARAQRVKRAFVYRFYPTPEQAEQLARTFGCVRLVYNKALEERSRAHTLHGRNVSYGESSAMLTAWKRTQELAFLGEVSSVPLQQALCHLQAAFTNFFAKRAAYPRFKSRKRSRLSAEYTRSAFSWRDGQLTLAKTGAPLRIVWSRPLPEGAEPSTVTVSRDAAGRWSVSILCEDTVRPLERVEGAVGIDAGIASLLTLSRPIRGVSDAAGKVANPRHERADRARLARAQRALARKDKGSSNRARAKVRVARVHARIADRRRDHLHKLTTSIVRENQVIAIEDLTVRNLVKNHRLARAIGDASWRQLRAMLEYKARWYGRELVVIDRWFPSSKLCSVCGTIAAAMPLEVREWVCACGAAHDRDVNAARNILAAGPAER

SEQ ID NO: 12856 - protein, 396 aa, unknown
  TnpB Polypeptide
VRRAYVFRLRPTARQHVALAACIDAHRELYNAALQERRDGWSHTTKTRISYGDQSAQLTEMRMVRPDQAVWSFSSQQATLRRLNKSFAGFFRRVKAAKPGVKPGYPRFKGAGRFDSVEWPKDGDGARWLPEQRRVYLQGVGQVKVYVHRELAGRVKTIQIKRQGRRWMLVLSCDDIPTNPLPATGRQAGIDVGVVSFATTSDGEHVDNPRWARAAADRLAAAQQRLQRSRRGGKNRAAKRETVAARHRKIANQRKDFHHKRAREFVARYDLIVVEDLKIANMLRRAKPVPDPDHPGEFLPNGARAKTGLNRSISDAGWGQFVSILRAKAEDAGRAWIEVDPRHTSDGCERCGHAARDNRVTQAEFACQHCGHTAPADQHAARNILRAGLAHHAHAA

SEQ ID NO: 12857 - protein, 244 aa, Firmicutes sp.
MKEKGYIPTTKDGWKIKSGTVSIKADRYYVSVLVEIPDAKIANNSNDGIGIDLGLKDLAIVSNGKTYKNINKSARVKKLEKKLRREQRCLSRKYENLKKGESTQKNIQKQKLKVQRLHHKIDNIRTDYINKSIAEIVKTKPSYITIEDLNVSGMMKNRHLSKAVASQKFYEFRTKLKAKCDENGIELRVADRWYPSSKICHCCGAIKKDLKLSDRIYRCDCGYVEDRDFNAALNLRDALTYEVA

SEQ ID NO: 12858 - protein, 423 aa, Deinococcus sp.
VFDFRQDHRLIRLSTPVYPTSDQALRFSHWAQVVRDAQCRATSAVITPQSGPSTGMVTLPSLSRAEVTDALLRTCPELTESLPPGAWRGVASQVYALWRPLMGQAVSTAQLPQLVGAAVPLDESVQASGLFGVQIDGIPEPVVADLWRLPCDLTDALLRSAVDHRQSVQGDVQRWRAADRAGDPAALARLHELACRHGVLLDAPDVGPGVERDRPHRARHATLRHGRQPDGQRGWMIDWSLRLPPAWLPAAWRDDVVGVDLGIRAPITWVSGTAHGQLRRSSLPTGGWMPGSTGTALADAVVRHTQFARMRDDLNATLTHLLSYRHVAIEDTNWSNLTPGVRDAMDCTGVTSVLEWLTSLGRVSGTRVVPVAPAGTSQHCAQCGRAGRLDGVLFLCPGAACRPVDRDLNAAGYIRWLGRRSGQ

SEQ ID NO: 12859 - protein, 359 aa, Deinococcus sp.
MTHPDLDQYVVRVDSSSFPALRALVAGGQLQRVLTGVPGWPRAAVYQPLVRVTIHSDACLRLGRTELSAQLHALPSAAYEALLRRSDAYWQPAGLAELRTLFDTPGVPSATFRAALRTTLARPLTQDHTPHLAAPQHGCHADWRPDGTLLLEQGGTWSLLLAFHLRSLVPRAQERRVFGIDLNDDPALCLVDAARTVQMIGGPHLLLETLRREHVTGESGAALSPTEIQLVRTLGYAAGRAPLEAALCHLLGEAQAVGVERLDLRTLQPRFLARSRERATLDWAMAWLPQALYRAGVKLYRVPAAHTTRACHRHPTQTGTVHGRVFHCPRCGEAQHRDVNAALNVLARTLHARHLEALA

SEQ ID NO: 12860 - protein, 414 aa, unknown
  TnpB Polypeptide
MVNKIGFQTITYRFHLYCDRMDWLELTKELYNKTLTFYYDVLLKEPELSEVPKLKRLRAIELLTIGTKEEAAEDVKYPIPFEKLPLYFRRSAINQAIRMYEIYRSREGDGVEPTTKFDASPIYYKGMYKEFTSTSIMLKLFNGDRWVWTDCSIDTCGRAMPEEDKIQSPVIVLENGRAMLHVPVRETVEDARPLKERLQNCDKICAVYFPSSDTMATLVVISTDGTFMESKFIYGGKELLHRKNILLRRIEANRASMGGDISKLPEDENKRLWEKLHHLTDDKAHKVSREIVEFCKTRDIDIIVVPNYGQFNTFMRKGYLTTPNYDWIGRRIISFLRYKAFGEGIVVASASTKDIASTCYICKKPVKKYNKNARPGKYYYGGKNFICLNGHCGNSYFNSAMNVSKNFLENYGIM

SEQ ID NO: 12861 - protein, 436 aa, Desulfovirgula sp.
MAWSDKSHPHRLLLTKQFPLGLETLPVFQPVMQAANRIWNSCVWHSREIFRQKDRWPTEAELKAKFKSFAVWRELHSQSAQAVVEEYFEAVSAYRKHRENGHLEMNPPNFKPKNHLRTVTWKRQGFDVEDNTLVLKLSRKKEPIKVALPEGWNVVTLPDGTGVRGIPVEVKVKAVVRRRKVENLVLHVTFDLGVVPVYRAGAVSAYDYNSGLVARATSNGQLDLFICREILSQVQYRNKVLAEFQEKMSRLKEGSRRWRRCLSAKARKLKKLDRRIRQMEHALTKLFAELDGAEGVAFSVVGDLTDLRRSARTGMKGKKANQKVNQMAYERLQSEQRYKNLMRGIEIDPWTEKNTSSTCCLCGTRNSAWRKHRGLWVCGKCKLILQADLNGAANLLKQYLFGSCTGRELPFAFRGVRVWRWDGRHNRFVQVSPRAA

SEQ ID NO: 12862 - protein, 289 aa, unknown
  TnpB Polypeptide
MLTIYYYIIDSEIARKGGLTMAQMSITAKIQVVASDEDKTLLDETMSVYREACNYVSDYVFRAHDLKQFSLNKALYPTLRAEFGLKSQMTQSVFKTVIARYKTILENQKEWIKPSFKKPQYDLVWNRDYSLTQDRFSINTLGGRVKLPYFAEWMSKYFDRSIYRFGTAKLVNKHGKYFLHIPVTYDVEESDLSDICNVVGIDRGINFVVATYDSKHKSGFVRGRSIKQKRAHYSALRKELQMRHTPSSRRRLKRIGQRENRWMQDMNHQVSKALVENNPKHTLWSYVKI

SEQ ID NO: 12863 - protein, 412 aa, unknown
  TnpB Polypeptide
MDVTLTEQIKLTFPSDGQRKEAERAFSAVTKRYAEACTYVSCYYFEHNCTGSVIDLHKVLYTDVRASYGLKSQMAISVFKTVLARYKTVGELMKQETVTYTVDGRHDTFRKSLDWLQKPVVFRRPQADLVRGRDWGFTAGMEMVSVNTLGKRIKCTYQCRPDSRLFDPAWKHGGAKLVFHDADRNWYLHISVTKAFPDTGRSRITEIYGHDRGLVNLVTSCGDNGETVFQDGQDVRRIKERYARTRASLQAKGTKGARRVLKRISGRENRMMSDVNHRISKTLVSGCRAGVLHVFEDLSGVSFQNLEDRNTSGRYELRSWTFYSLEMKTAYKAAMRRGAILKVDPRYTSQKCPGCGTIDKTARNHSQRRYTCKHCGRVYNDDEVAAKNLHQLGIWYISGVDNPHFSKKVSGY

SEQ ID NO: 12864 - protein, 483 aa, Acidimicrobiaceae sp.
MEQPYRTRALVVSLDPTPAQAQLLRSYCGASRYAYNWTIGLVKENLDVRSQERKDGVTDSDFTKSISWHPYSMTPLWNSVKDDVAPWHRDVTKHAFRSGVTNASNALKNFDESKKGVRQGRPVGFPRFKNRHSKLSVTFTEPRTQAGWFSEDSRHVRLVLPAYAADPRIARRREHLQWLHTTESLRRLKKKVASGEWTVQAVTISFTGGRWQASFSVRQLVVAALSAARLLGPLVGMDLGVKHLATVSVPVSGLSDANGHVANPRHLDAELVRLAKLNRQLARAIKGSKNRAKILKRRQLLFGRITRTRELYLHRLTTTLAGSFETVVLEDLHVAGMVKQKSNTTTKGLSRSILDAGFHELRRQLTYKAEDRGHRVVVVGRLYPSSKMCSHCGVTKAKLALSDRVFECSTCGISLDRDVNAARNIHREGLRLLGNEASSVAGHQPETLNADLRDRETEPPRWGRGDRYQSRTTQPPRELTLSA

SEQ ID NO: 12865 - protein, 446 aa, unknown
  TnpB Polypeptide
VQLTQKLRIHPTTEQESVLWALSEKCRLIYNFALAERIDTWEKNKEKPDEKREFMTYIKQQNDLPAIKKLYPEYKWVYSKVLQGTLRKLDEAYKSFFVLWKNGAKEARPPRFKGKAYFTTLRYNQSGFKMDGNTITFSHKHPSKTKLAFRISDNRPLFSKVKQVELYRDRKERWFVSITCDVEAPRYIDNDLFQAFDLGIANIASGVNVHGETLRFENKRPDKYWKPRIEEVQSKRDHCKKYSRRWHRYNKKLGKMKSKLAKQMKDYQHWVSRWIIDHTKANTIIIGNLNVKEMARRKPDTGNPRKNKANKTLDHSLQNTGSMGRFATFLAYKARLAGKRVVKIDESLTTQVCCCCGRMKKRGLFERIIDCNCGNRMDRDLNSAINIMIVFLLKAENGDYDFLLPNPSVNGESFLDRFPKAVERFATIHGLARGRSSDALVGSPSL

SEQ ID NO: 12866 - protein, 187 aa, unknown
  TnpB Polypeptide
MSELYVDSHGAHADYPHFSEIPGNLQGAAQAESLRKGERPLHETEKKIARLHAHIARQRKDYLHKESRKITNFYDLVCIESLNMKEMSQDSRFGTSVHDNGWGMFTEFLSYKLERAGKKLVRIDKWYPSSKICSCCGKLKKELKLEDRIYSCTCGNQMNRDENAAINICREGLRILGVELETERKIS

SEQ ID NO: 12867 - protein, 381 aa, Nitrososphaerales sp.
MTVATNCAKLWNEITFRRRQSFFKHRMNWNTKDIYMKYSKLIGSASTQQIIRKNDEAWRSFFALLKKQGEGKLPDHLQGKVRPVGYWKDRRNGKYRLVLIVRNDCYKMESGILKLPKGLHLKIRGAPKWKGEQGRMEIHYTENKWRVYQAVSRLQPSQEPKGSKTAYIDLGVVNLATVYVDGMRQPIAYSGRSVLNRWWYDTNRIARYQSVLNNNGVKRSKKLSRMYLKRKRHFRHAVNAMMRNMVEQLYDTGVSAINLGNLTGIRDDNNTTHRINSMIHNFWSFEYIVRRIKEVAEEYCIQVKEVSEYNTSSICQRCMSKNITKHKRLFKCLGCGLEAHRDAVGVINIASLQGEKVNRVMIHPLLSRWSGSVWRTRISSL

SEQ ID NO: 12868 - protein, 448 aa, Natronococcus sp.
MQYNYKYRLNPPEALTETLLHHVDTCRQLYNHVLYLLNEADDIPARYEVQGRLPDLKTWWDDLSNVHSKVLQMVVKRVYDNLSTLKAQKENGRAVGMLKWKPPREYRSLTYNQSGFKLKNTSGRPVLWVSKIGEIPIYLHRDIPENATIKQVTVKQEPTGEWYATFGIDVEEATPEKPETPEKVVGIDVGILKYAHDTDGYAIESPDFSEERERLERAQRDLSKKEHGSNNWEKQRKVVAERHAELKRKRRDFLHKLSSYYAREYDLVAVEDLDAKGLVELPGNSRNRAGASWGTFLRMLEYKCKREGTHFVAVDPRGTTKECASCGTETDKPLWVREHSCPSCGFEADRDANASWNILSRGLNKVGVGHSKSTSSESLHDSDGLRKSRSDFRTPVETALPTGTHSVPAKRVLEAGSPICSRARSARSHGQRDRRSRATLKREPSGER

SEQ ID NO: 12869 - protein, 543 aa, unknown
  TnpB Polypeptide
MMLLVNLSRGGEPVKFYDTVTRYGFTTENKVDAEKVSADLAQMIFWMAEAEREVLASQKFHDLAVEVLKGDRPTGSLNSWGRKRLTQYPFPFQKYNMNEILASNIVSVLEAYAVSVGLFQVMSTHPKESKPEKILSYYRNTYPKAPHPTSGMVRAHLIRYHKKGERKASLPGVSAKLNLAVCDIHFASKTSRDDNDPLNVTVQVKTPSCGLTKICLRLPDDNERFGKDKVCRPTIHLNNKGQVVFDIAIEHDIDERQTNRVVGVDLGKIEPFVATVIDPETKYRSAPYHARYKGRLGSLVEAEKRRRELASYLYDRADLCERYDRTDHADTLRTEAKRVSAKATRIKHEISQCIASQVVSIADQNDAHVSLENLSWLDAKGGRWPHAEIQSRIDNTAKRYGLKVVKVNAKDTSRTCSRCGSKVSNNSKTRVGTCSTCGFSLDRDVSASREIALRATSPSSRSRERMHSLLRQRAQKRSSAAARQSKPVTALGGIQGHTGTSERDPEATLMMVRETLDSRGSPTQSASVDLLWAEDGEVVVQED

SEQ ID NO: 12870 - protein, 460 aa, unknown
  TnpB Polypeptide
LKRSKDTFKLNYQYRIVPDNQQTYQLNEWLCKLCWIHNLMLEERFNWWECNRHPVNTCPIFITHLPELKDQPTYYSQKRAAHWSREAYKHLYEGVHSQVIQEAIKRVEDTFNRFIKGDLNGKRSGKPRFKSVRRYRTFSIPQLKPDCLAVTPNPHRRQNGDTRRDIAYINLPKVGQVKLIYHRPIPEGFTIKAALVSHRADGWYICLTLEDKSVPSLKLPKIEATQENSVGLDVGLEKFWTASDGEIEPIQQHYRRSESKLAKLANRKDSKPHKSASRRKLAKKISKHHQRLQRKRKQFHYESATKLVSRNEKVFFVEDIKPGNLSRKSKPKQDESGKYIPNGQSAKSGLNKSINDAGWGQFLSILTYKAAKAGKSVVKVKPHNTSQVCSCCNRLVKKDLSIRIHECLCGLILDRDWNAAINIKRVGLGIFPTIKRPKRSPERSRRATTKEAYTVIFDSV

SEQ ID NO: 12871 - protein, 407 aa, unknown
  TnpB Polypeptide
LCIHARKIRNSILYITRQAFLEDGHISPPESDKILKSESPEIYFAISAASSQRIGQIVGDSWKSYFELRKMWYDGELEKRPSLPGYSKSATTFSVGRNGFRISDGRLHISGGNKIGYSPIQVTCCENQPFNSKASQTVVRDVRIVPLGTSFVIELVYDREEDDEIELDKTRVASLDPGVNNLLAIITNQPGISPVLVSGRSLKALNAQFNRDKAALAKMGKARHIGSKVVKRKNAIDDYFHKTSRWLIDWCIENRIGTLVIGKNIGWKDGINIGRRNNQTFTSLPHAQLIDMITYKAGAKGIDVITREESYTSKASALDLDPVPDFDKACKVKHAFSGRRIKRGLYRTSTGRLINADINGALNILRKEIGDGWVSSIADKGRVDRPVRIKHIDSWLGVGHRAVETTV

SEQ ID NO: 12872 - protein, 368 aa, unknown
  TnpB Polypeptide
LLNYKFRLYPTAQQELVLEQTLDGCRWVYNYFLDKNMSEYDMNYAITELKEQHPWLRNYNSKMLQMVAKQIAAARKSSTGRLRYRKNDDYNSLTYNQTGFRIEEATHTLSLSKIDKIKIVLHRKPVNVKQVTICRKNGKWYAVAACQVLRKQYSTTRYFKPVGIDVGITKFAHDSDNNTIDNPQFLTRMLKPVRRAHRRLSRRQLGSNNHRKAKHMLAKLYDRIRNRRKDFLHKVSAYYSKHYDLIFLEKLRVLYMTKNHRLARKILDSSWSTFKTMLQYKANRVVEVEPAYSSINCSRCNNPVPKSLAVRTHVCPECGAVLDRDYNAALNILQRGLKSLLPMEHREVTPVEIAMRSGKQEAHGIRPG

SEQ ID NO: 12873 - protein, 180 aa, unknown
  TnpB Polypeptide
VVKRAYKYRFYPTPEFAKAQRALSRKAKGSANRARARVTVARVHAGITDRRRDYLHKLSTRIIRENQTVIIEDLPVRNMVRNHTLARAISDAAWAELRRQLEYKADWYGRTVIAVDRFYPSSKTCSACGVITAKMPLSVREWVCAACGVRHDRDVNAAKVIRAEGLSVQACGDGVRPSRT

SEQ ID NO: 12874 - protein, 404 aa, unknown
  TnpB Polypeptide
MKVARVEKHIIYPKNPYYKLLDEYCFKAKNLYNFANYQIRQKFCSEGKYISYYEMDKLLKQEGMNFDYKNMPIAQSAQQILRLLDKNWKSFFKAIKDWSKHKDKYTGKPKLPNYLPKNGRYQLILTNCNCKLKEGAIYFPKCFNGFTLNTKVNNLQQVRILPRYNHIVIEVVYKIEVPEVKEDNGRYISIDLGLDNFATIGNNIGAIPIILNGKGLKSINQYYNKKISHYREIAKRKNNLDYTKRMNKLTMKRNNKVNDFIHKASKWIIDYALSLDVNTIVIGNNKDWKRESELSKRINQSFIGIPHQEFINKIIYKAENVGIKVILTEESYTSGTSFLDDELPIKENYNKTRRIYRGLFKSNEGKLINADLNGAYQIMRKVFPKAFAEGIQGVGLHPVRVNII

SEQ ID NO: 12875 - protein, 576 aa, unknown
  TnpB Polypeptide
MATRVMRSHKFRLDPTAEQVETLEAFGDARRKAYNWALGMLKEIFEQNCSADGVGDVLVEVSSSIWEHSPKQILGVITRSGDRTDYRFASKQELIGILTRCKKTLDWSEICPSRAVEMALGDAAQAVSAFWKRRKTDPKVGYPRFLAQREHKEDTFTVIESISILSGKKRDAVKLPKLPPIKICGSTRHLEREIIRYHGLIKEATVSVRRGHWWVSLMIERDAKSEGPEVFKEVDGVGDDLGLKTLHTLSNGQIVENPRFLRASSKKRQEYSRSVARKTKAREQSVVLEKIEAHQKALTEWSSGEQSTTKPEFLQVPLPSKSNRLLRAEDRLRRLDNHIANGRHTFHRQIAAKLIPAYPILGVEDLAIANMVQNHHLAKSIMDAGWRDQLNCLETRATDHGTLVIAAKTFFASSQLCSVCGYKNPLVKDLKVREWTCPDCCAHHLRDLNAAQNLRPTQAQIDQALADRQRAREKYEKHKQQISERAIRNGAIHKAKNAARKAKTMSRAASSIVTNHLIPRSVASMPEETLTRAWSHYQTDGLPSGGAEDIVFLDKRIPAHVGEAESTDSNGLAPPT

SEQ ID NO: 12876 - protein, 576 aa, unknown; identical to SEQ ID NO: 12875
  TnpB Polypeptide

SEQ ID NO: 12877 - protein, 382 aa, Escherichia sp.
MRRFAGACRFVFNRALALQNENHEAGNKYIPYGKMASWLVEWKNATETQWLKDSPSQPLQQSLKGLERAYKNFFQKRAAFPRFKKRGQNDAFRYPQGVKLDQENSRIFLPKLGWMRYRNSRQVTGVVKNVTVSQSCGKWYISIQTESEVSTPAHPSASMVGLDAGVAKLATLSDGTVFEPVNSFQKNQKTPARLQRQLSRKVKFSNNWQKQKRKIQRLHSCIANIRRDYLHKVTTTVSKNHAMIVIEDLKVSNMSKSAAGTVSQPGRNVRAKSGLNRSILDQGWYEMRRQLAYKQLWRGGQVLAVPPAYTSQRCAYCGHTAKENRLSQSKFRCQVCGYTANADVNGARNILAAGHAVLACGEMVQSGRPLKQEPTEMIQATA

SEQ ID NO: 12878 - protein, 425 aa, Moorea sp.
MGIYFARQLYFKANRYISKFELEKEYKPNRHYQALHSQAAQQILRSVYESFKSYKRLQDAYREGKIEKRPRLPKYRKKGGLALVSYPKQALRLIDGTIRIPLGRQVKSWFGIDSFRLPMASNLEFDDIKELRILPRNKFFYVEFVYKKEIETPSGEPENVLGIDPGLDNWLTCVSNVGTSFIVDGKHIKSMNRWYNKQISTIKESKPQGFWSNKLATITEKRNRQMRDGINKAARLVIKHCLENKIGRVVFGWNKGNKNSIGLGKKTNSEFVPIPTARLKARIAGLCEQYGIEFIETEESYTSKASFLDGDYLPKYAEKPNDWKPFLMQSLMGETPKTALHRSGRRTKRGLYRTAMNWYVNADCNGSANIIRKVSRTLGISLDRLGRGVLTRPHRVFLWSANKKIVWSDADSSHHETSLLESPVF

SEQ ID NO: 12879 - protein, 482 aa, Streptomyces sp.
MKKFQAQPGFVVQAFRFALDPNAAQEHALRSHCGAARAAYNWAVGWVEASWWQRRAEESYGIPEADLTPWRPWSLPALRKAFNEAKHTDPRFCGWWEDNSKEAYSTGLANASAAFDNYAKSKRGKRKGRAVGMPRFKAKRKARLACRFTTGTIRVEAGGRHVTLPRLGAIRVHESTVKLLVRVQSGTARILSATVRHERGRWFVSFQTEVKRDLVRVARPDTAVGIDLGIKTLAVMADSAGEIREVPNPRHLATALTELRRASRVVSRRRGSDRRTGQKPSRRWEKANAARNRVHHRVANLREDALHQLTTSVAAEYGTVVIEDLNVAGMVKNRRLARHITDAGFGEIRRRLDYKVKRNGCRIVAADRWYPSSKTCSGCGVVKAKLPLHIRTFHCDVCGLVIDRDANAALNLAALSAAAVAGTAVGGDQGAQAPKPRGADRKTRTTRPRLTAGTGRAGGATLPHQRQQETRDRTQAEALTLW

SEQ ID NO: 12880 - protein, 282 aa, Lactobacillus sp.
LQRGRDWSYLSSAQQLSLNTLQGRKKVSFVCKGFDQYLDADKWKFGSIKLLQSKQNWYVHISATTSLPEYSPEEAEHVVGIDRGLHFLAACYDEAGKTLLYSGEKVLRTRRKYKKLRAELQSKGTKSAKRRLKQIGQRENRWMSDVNHCLTKTLIDHYGANTVFALEDLTDVRFATEQTAKDKRYEMVSWAFYQFEQFLTYKANLNSSIVVKVPAKYTSQRCPKCGRIRKENRDHKQHLYVCDRCGYKSNDDRLGAMNIQLLGTLYRSGEEAPQFNKQASAE

SEQ ID NO: 12881 - protein, 239 aa, Escherichia sp.
  misc_feature (147)..(202): Xaa can be any naturally occurring amino acid
MHQENTMLPRRISVSLFIDQSIIWPVKRLQAFKFQLRPGGQQEREMRRFAGACRFVFNRALALQNENHEAGNKYIPYGKMASWLVEWKNATETQWLKDSPSQPLQQSLKGLERAYKNFFQKRAAFPRFKKRGQNDAFRYPQGVKLDXXXXXXXXXXXXXXXXXXXXXXXXXXXXXXXXXXXXXXXXXXXXXXXXXXXXXXXXTPVHPSASMIGLDAGVAKLATLSDGTVFEPVNSFQKN

SEQ ID NO: 12882 - protein, 284 aa, Blautia sp.
  misc_feature (29)..(29): Xaa can be any naturally occurring amino acid
MRDILSLVRSRFLETCWHLQSYRHSKACXQLRIYPPEKGNCKIIVVYEVPDQEELPQNGHELAIDLGLHNLMTCYDPGNGKTFILGRKYLALERYFHKEIARVQAQWYGQQSGKGVKHPVTSKHIRKLYKRKQDSVTDYLHKVTRYLAEYCRERGITCVVAGDIRNIRREKDLGHRTNQKFHSLPYNRIYIMLEYKLKRYGIRFIKQEESYTSQCSPLSPEVGKRYAEPSKRKERGLYRDGNRTYNADAVGAYNILRKYHSVSGVKRELSVTGLKTPEIIKVAV

SEQ ID NO: 12883 - protein, 403 aa, unknown
  TnpB Polypeptide
MKTLKVRIEPNSAQRKVIDHMIDANRLVYNGLLVACKQVFGKERKLLSVFDLNKVATRMRHNSPYVAEAYSLTLNETAKRVHNALKKTLGTHKKEFGELLLETYEFVMAGDHFPRFKPKGQFNSFTYPTARDYSIEYVNKNGKKRRMLRLGKVPGLLRCYNQDTVIEGKLKTCTIKRKNLGSHFEYYAFIVIDDEPKQYPESTKGPVGVDIGISNIAALSDGTVFPNDRIFAKMKKRLAKLQRQLSRALFGSEKYRKLLTGINHLYEKINNHRKNNTENISAYIVKNHDIIGMEDLSVMALRKKSKTRTMTNGYNDASLGTLVRRIKDKASSAGRIVILVDPKDTSQLCSQCGSIVKKDLGVRVHSCPFCGFTADRDVNGAKNILRRTLAKISGMDRPSRSPS

SEQ ID NO: 12884 - protein, 226 aa, Microcoleus sp.
LAKIGIVNPIWSRELPSEPSSVTVIKDCANRYFLSFVVEVEPVKSEAKNSSIGIDLGIKTFAVMSNGETAESPSYKKLDRKVRKLQRKGARQPKDSKRRNATRIRIAKLHNQIADTRKDFLHKLSTKIVNENQVIVLEDLNVSGMVKNRKLSRAISQQGWHEFRILCQAKSEKFGREFKVISRWEPTSQVCSDCGFKWGKIDLSIRSVLCLSCGTEKIETRMLLEI

SEQ ID NO: 12885 - protein, 408 aa, unknown
  TnpB Polypeptide
MLIRKAYKYRLNTNTETEQLMFQYAGNCRFLWNKALALNLYYLANRHPLLWYQELDWFSKLWKKSVEYEFLKLSPAQTLQQTLKQLERAFKDAFDKKQPLKKIPTFKKRGDRDSFSFPQGFKLNGKRIFLPKIGWVNFRKSRDIEGTAKNVTVSRQGKHWFVSIQVEMELPEPLHPSTTMIGVDMGVKRLFTLSDGVNDEDIDGQAINVDFFKQSIKRLQKRLAKKVKFSSNWRKLKDKINRLHTKIANIRHNALHKATSKLSKSHAMIILEDLQIKNMTKSAKGNPEEPGRMVKQKSGLNRVILEQGWGMFKTFLEYKQLWSGGQVLFVDPKYTSQTCPVCQHKNKLSRKSQAEFDCVLCGHKDHADVVGAKNVLSRGHRHLAYGENWVTKLCEVGTDQFSDKLIPV

SEQ ID NO: 12886 - protein, 343 aa, unknown
  TnpB Polypeptide
MVWASSRVAVNCYRDALANANAWRNNPRRSRRPRVKKLSMLLHQGSGYRIKEGYVEIIGGIRLKIIGWDRRYDEYENGEARLVYRGGEMVLWISKRIPKPQPYKPRDVIAIDINERKIVYGDSEINKDIDTAVDRAYKWKILAESLQRKYSSSRYPAWRRRGILNRIRSYHRKARNILEDWARKAPLKIVRLALKLQHAVAREDLTGLINSLRKIRNKDHRTKLIIMGYSRLGRWIDWQAMKHGVPLAIVNPNGTSSECPKCDSKLEENGYRRLKCPRCGFEADRDVIGKLNIRKRALKILGIKIDFGGVLATPTAPQMTDVNPNRWGEPMIRLKGMTIKMTT

SEQ ID NO: 12887 - protein, 490 aa, Moorea sp.
MSKKVGYSKKLSTQIVPVLGMSKSVELELLSTMKKLGVVRAESYNKLGSINHWGLDWKKAIPEVKSFRTPDTLGLPAKLMDWTINDVAKAITAQQAACIDAVIKKIYNRFTGIENQKTRKELCKQIKTLAFLDNPLLHRLIRKEFQRGHSWVKNQIVYQQVGYSCKRLSRNTYQLELAGLRRGKRNKIIVKSNREIKGQIRLTYNQLLQKFEVHFLVDHGKVEIPAERRNIGLDKGYTEAFYDSDGQVHGKDLGKVTTKKSNRICAKNQNRGKLWALHRKLEKIDPAKSARILKNNLTRKTENKRYRQDQSEIKAIIGAASKSVFNGKSLKVFAEDLTKPIKNKRQSKAMSRKLNSWMKGELRDSLQKWANWTSSVVTEVQPSYTSQVDSRNGTLLGKRTGDNFTGFDGVVLQADHNAAKNILARGTDHEITRYTSKTEVQAVLLRRTARFLKGMGLSLLDAVELGWLDCKHSKTKAFKQLLVGMPGTSK

SEQ ID NO: 12888 - protein, 254 aa, Streptomyces sp.
VQFRLDVIFRRERARSVHTVIRMQLRYHYRAYPDAAQCRAPARAFGCARVVWNDCLRDRTQAHAAGLPYVKSAELSRLRITQAKRTEERAWLADVSAVVLQQSLRDLDTAYKNFFDSLSGKRQGRKVCPPRYKSKKDTRQSIRLTTNAFSLRDDGTVYVAKVGNLKVKWSRRLPAAPTSLTVTKDSCGRYFPSFVVDTEPDILPELETDTGIDLGLSAFAALSDGRCTWKTSQCPVSAAPGSPSPCATRDGPRS

SEQ ID NO: 12889 - protein, 453 aa, unknown
  TnpB Polypeptide
MQQIITAKLKLTTTKEQFEALRQTQLAYRDALNAVSRYAFSQGKTSNVTRLHKGMYAELRVRYHLPSQLACSVERQVASTYKGLWTKLKKNVEHRRAKITKKRFKGLDKPPKYSSPTVQYTYERDYTFQCDSQVSVGTLNGRISIPYQGYDKHIARIQQGATIGDAKLWYDRQKKTFYLLVSLSIDVSEPTYEQFKEVVGVDVGIRYLAVTSTETGNASFHPGKRTRHKANHDARLRKRLQHKGTRGAKRRLRRIEQRERRLKAQANHCIAKQIVTQHPHALIGLENLTDIRERTKRKKRKRKKDGKGTEHVSPKARKANRVYSQWSFAELQALISYKATLAGSLVIKVDADYTSKACPMCGHTTDANRPRKGLLFVCQNPKCGYTLHADLIGARTVTMRTLLVRQDWIRTGCLSLIPDASDKEAKAARLQRYAELRWSPDVNTSLRSETGGS

SEQ ID NO: 12890 - protein, 239 aa, unknown
  TnpB Polypeptide
VSKLSFIGLLKELLRHALLNDLLLESGILLFPAILTWRLLNSRLNLQSVLIWALSLLLLFPTVKKSRILVFSSKSKKLLPRLKENLPGRPRAPSSKAKTRKVVARIHERTGWKRSDFAHQQSRKIIDKFNTVAVEDLSINYMKKNNFHCINRSIGDVAWGQFLNFLAYKAEWAGKQVVKINPAYTSQTCSHCGNRQKLKLSDRMYHCPCCGLSMCRDQNAALNILALGMQGLDRALPIS

SEQ ID NO: 12891 - protein, 405 aa, Mastigocladopsis sp.
VFSLTYEFRLQPTKQQIETFQDWLEINRKVYNYALAERKDWYKSRSCQVNACSLRSEYIISADTPRPTFATQCKSLTAAKEQYPDLKRVQSQVLQQTLKRLENAFTFMWERNFGFPRFKKVGQLRSFVFPQLGKEPFKRGFVKLPVIGWVRFRQSRDIPTDAVVKQARIVKRSSGWYVMLTLQWNVSVPQPVPHTQALGVDVGLMSFIAASNGLCVKCPKFFVDLQCKLRLLQQRVSRKKLGSNNWRKAQGKVQKLHEHIANTRKDFHWKVAHLLCNQAKTIFVEDLNLVGLSRGMLGKHCLDAGWGQFFQILKQCCFKRGVYFQKVDSRKTSQICPNCGTQTGKKDLSERVHVCKNCGYTTDRDVAAAQVVLNRGCAPVGQTVKMLDEGKFTRTPMSQESHGFL

SEQ ID NO: 12892 - protein, 454 aa, unknown
  TnpB Polypeptide
LTFNKKSFIINILNRKEVKTLNTKNIESNESNKLLKTQPTLTKTLKVKVDVPKEKVEAFRELTARYKETVNYVAEWVFENGFPMNYAVISREIYYELRTLFGLKSQLAQSTMRTVTGAYKTVQTQLARKPYRYKDENGIWQKIPRTLEWLQKPIRFRNPFADLVRNRDYSFVESGELVSINTLSGRVRCTYDKSRVDEILAKGATLGGAKLLERRGKWYLHIAYEIPVPEELEASEVVHVVGIDRGIRNLAVAYDERGKTTFFDGKAIRAKREQFARLREKLQKKNTKSTKRLLKHLEQRENRWMTDVNHVLTRALVDRYGVNTVFVLEDLEGVSFAEEVLGKRTKSGKRQVHSWAFYQFEQFLEYKAREVGSKVLKVPALYTSQRCPRCGKIEKNQRDLDNHEYRCTCGFRSNDDRSAAINIQLLGTLWVSGESAPRFDKPKGIVGGKIDQNG

SEQ ID NO: 12893 - protein, 446 aa, unknown
  TnpB Polypeptide
LDKPKEEKLERRLTFLILTTSLKLELNSSNELLLRAEMEKYIACVNSLVALHLSGVSIQKFSSKDVVAELPAAVKNQAIRDAKSVLQRYAKKQRKVERKRAWFAEHGKTPKHPIRDAKVPILRRPVLFVNNQNFKIDLDAKTVSFPFFRKGKTKRNSVQKEIRIATVTPRHREILTTTPHLATLRIVRRGDTLLAQVGYTVEEPETASLDDLLVDPNTLVMGVDLGIKCPAVSYSTDRKIRFYGNGRENRFKRRKCYAKRKKLQKAKKLRAIKRVSDKEERFMKERDHQVSRAIVNEAIRQGAKVIALETLDGIREGCTQSTPTRKSRKNVDKPKVDSVVEDTKNATDATNTGEPVQLDLFSETEMLTKKERRKKRKLSKKQVAARRKNNRSLNSWSFYRLAKFIEYKAALAGLLVIRVDPYKTSQRCPHCGETHKAKDRHYECEC

SEQ ID NO: 12894 - protein, 204 aa, Anoxybacillus sp.
MAQVAVKVVEKQNNDENIMGVDLGLKVPVVAVTSNSKTRFFGNGRQNKYIRRKYKVLRQQLGKAKQLKKIKQIGNKEQRWMKDQDHKISRQIVNFAKENHVSVIRLEKLTNIRNTARTSRKNEKNLHTWSFYRLSKYIEYKANLEGIKVEYVNPKYTSQKCPKCQTLNKANDRKYVCKCCGYRTHRDRVGALNIMKAPMADGVA

SEQ ID NO: 12895 - protein, 434 aa, unknown
  TnpB Polypeptide
MFDAVKVALDPSPAQEKLLASHAGGARFAYNAMLARVKAAFDAGESIDQSFYALRKQWNMDKDALAVGEDGVIWWAENSKEAYSYGLESLAKGLSNWSKSRKGNRKGRKVGFPKFKTKNKTTPRFAYTAGGFGLIDGDPKALRLPKIGRVHCMEDVAKRVNCAKVLRMTISQRAGRWYASLTVERDDASVTRKAPRGGAVGVDLGVKALATLSDGTVVENPRYLKKSERKLKQAQQALSRKTKGSNRRAKAKAKVARLHAHVANQRLDGLHKLTTWLTNKYSDISIEDLHVAGMVKNRHLAKSISDAAFGEFRRQLEYKTARSGATLRVVDRWYRSSKTCSKCGSVKAKLSLSERTYKCDNCGLTMDRDLNAAINICVAGSAPETLNARGEDVRRNQHTVGNADLCEARTKRARQSAVRLGAGDRKGVLQAIVR

SEQ ID NO: 12896 - protein, 269 aa, unknown
  TnpB Polypeptide
LKSVAGIDQNLDQLAVGIVTPEETLTFNYDIKYLKSINHHWNKQKARLQEEISKQEKLLDDLKDSLELKLINGDSSKSKLVESINNKKILIKRLKNKIKRITTKRNRKIDNYVHQLSRKLINHLSQLGVKNIIYGKNVNFKQEINLGKVTNQNFVNIPFNLIIERLRYKAALAGINFMTVEESYTSKTSFLDREKLHSYKSDKAPKKYEFLGNRFTRSLFKSKDGYIIHADTNASFNIIRKVTGDSIYNFVEMASIKGSSPKRVKISIQ

SEQ ID NO: 12897 - protein, 363 aa, unknown
  TnpB Polypeptide
MRTVEKAYKYRIYPNKEQKILIAKTFGSCRYVYNYYLEKRIKAYETNKETFSYVQCASDMTQLKSELKWLREVDSKALQSALKDLDTAYQMFFKEHSGFPKFKSKRTHRFSYRTREHIHYCGKYIKLPKLGMVKTKTKLIPQGRILNATVSQEPSGKYYVSLCCTDVEVEPLERTGNAVGLDLGIKDFCVTSDGEVVENPKYLKKSLKKLAKLQKRLSRKPKDSFNHNKARIKVARLQEYIANQRKDFLQKLSTTLIRENDIICIETLNVENMLKNHNLARSISDASWSEFVGMLEYKARWYGRTIVKVDTFFASSQTCSVCGYKNEEVKNLSVREWTCPNCGTRHDRDINAAINILNEGLKL

SEQ ID NO: 12898 - protein, 435 aa, unknown
  TnpB Polypeptide
MSLTLNQDFTFSGKSLNITKEKNKLLEPYNKQIWNYGIVLALIPTETQKENLNQQIGNARFVANQYLAKRKEIYNNEKRTLSVNEYSKNYLQNLKEEYPFLKLSDKFALASAMEHIDTAYKNFFENLKKGRKAGFPKFVSRFKPNGNSYTTKFTNNNIEVLEIDGLPYVKIPKVGKIRFVMPKGYNLQMIQPEFTRILSACIKHQRDSYTVSLQMETVIDKIIPIQTVERSKIYSIDMGIKDFGIYGNSEFTEKVANPRFIKNNSKKLRRLQKSLNRKVFNSKKHCGSKNYRKAKLKIAELHNRIKNQRKDFHHKLSRKIVNECDVFICEDLNIKGMVKNHKLAKEISSCGWGQFLTFVKYKLEKKGGIFLKVDKFFASSKLCSCCGYKKIDLTLKDRKWECPICHTIHDRDVNAKMNLLKEGVRLLTLSNIAIA

SEQ ID NO: 12899 - protein, 396 aa, unknown
  TnpB Polypeptide
MCYNILWKGGQYMLKGIKIRIYPDKEQEELLLSYCKDYHNMKNFLVAKFKDNLPNVGNNNIIGYKDQDLLQDYESEYNCQTELLMRSVRGAIVDYVSGVKRFYQKLSSRPPKFHKYDPNKQSFYIIDCKYLIKNFVIQVPMRKELGQKYKSTISKKIPINKKYAIKENITYLKDIRFKYEKGKWYISGCYDVPNVDIDEEKEFLGLDWGIKNFMTTSESTLINYPKEIVREYYRIRKLSHYLDKKVKNSNNYKRLKKKFDKAYKRMNGLKKNFIHQETTKLARKYHIVIEDISWNQISKGKKRKFIRRMSVLAPKYMFEEQLEWKCKKFGSYFIKVNPKNTSKTCSVCGQIHDMTLNDRMMICSCGNKMDRDINAAINIKNAGMNKILAEGICCTR

SEQ ID NO: 12900 - protein, 426 aa, Symploca sp.
MLHKVKTMLLSFKTRLEPTNKQVTQFRKACGVSRHAYNWGNALILGILKEQETNKSVKVPSAIDLHKRLVAEVKSANPWYYQTSKNVPQQALANLRKAWDRCFKKTSKQPRFKKKGQRDSFYLEGGTKAKPKIVNDGKRVKLPTIGWVRLSEPLPVTAVHNCVISRQADEWFVAIKVEIEKPAVAENRPVVGIDIGIKELAVTSDGQIFANPKAYRRLSKQMKRLQRSVSRKVKGSSNRIKAVRKLAKIHQRISNIRKDAIHKLTTYLAKNHSEVKIEDLHVKAFLKNHKLAGAIADCGMHEFRRQLEYKTEKFSSRLTLVDRMFPSSQICSNCGNHRHKMPLKNRVYHCPDCGYKADRDLNAARNIERWFDGIFVPKRSEKAVSSTVSACGLDKPSSRQTGATVKQEVSTKVNYVQLCLDFDSFG

SEQ ID NO: 12901 - protein, 377 aa, unknown
  TnpB Polypeptide
MQHLDGFFKLRDQIDYRALPAQANQNVLHMLYRDWKSFFAALADYKAHPDKYEAIPHIPRYADKDGYKPLIFTNQICKLRKDKHGWYVKFPKAVLQAGWVRDRYDLGKMDLHEQKLKEVRLIPNGDTIKLEIVCEIEIMEPTITIHEATRVAGIDIGVDNLTAIAFTSGHRPVLIKGNEIKAVNQFYNKQIAHYRSLLRTGKKDSKGIHQTKRMKRISEKRNRRVKDILHKASRKIIDLCVEEGIEVIVVGNNAGWKKRIHMGKKNNQTFVQIPFHTLIEMIKYKGEAAGIRVVVCEEAIQSKASSIDEDQIPVYGNDVTHTFTGKRIKRGLYRSKNGILMNADINGASNIIRKVYPCMPKRERWSRGTVNVPVTCI

SEQ ID NO: 12902 - protein, 380 aa, unknown
  TnpB Polypeptide
MQCNKYSAIIWNNCVKADQEYYKENKKYLTQSQLQFMMKKSVPIILANSINIVIIKYITARNAMWNSIKIKHENSKKVKLPYKEKKYFNTGWTYQNIKINKEEKYLTLAKPVLADSEGVLRKQKPLKCNVKSIPNNIVEIELVYRNKLYLLIKTKQENDNVLIQSDNESAIDLGEIHSITSIDNNENAIIITGRKLREIKQLRNKHLGKLKSRRSKCIKDSKQYRKYSRAIKRLVYKTKNKISNIIHKITKLYLDYCLKNNIGKVYYGDLDSCTRNTKKKHHGGGKKLHQKLTQWNYGLLIRELNNKLTKYSIKMIKVKEYYTSKKCPVCGTHNKPKGRNYTCECGYVMHRDVNGAINILNDNSQFNINRYKELKYLQIA

SEQ ID NO: 12903 - protein, 478 aa, Actinocorallia sp.
VRIVTGVSRMTAFTYTLKPTAGQETLLRTAGGAARAAYNTLLALVKTRLAERETNPDVRPPWTKFDLINAVNAWRRDLDAQGAVWHRTIPSIVFEEAAADLAYGLASFVDCRKGRRSGPSVGFPVFKKKSRTPYRFRIRAQKGSVAVGAPGRPRAVRLPRLGVIGVREDTRPLRRLLRPGLDGTPRARITAATVRWRRGRWTVAVSVEAPDLHPSLQCSPPEVEAPGWVGVDRGLVALTVAATDEGVETARIPAERIYRRREEGLALRHRRLARTLPGSRRRVRALRQVREYQARTAAMREHKLHEVANLLVNNHDRLVLEHLHVAGMLTNRRLAKSLSDAAFASLARLVVYKAAWRGVLVVEAERWFASSKTCSGCDHRVSELPLSQREFCCPACGLRIDRDLNAAINLAKQGARLCRLHRFLSCPGGGHHPDSGPASSRPGDQRATRTRRRRPNSGEAAVCGSSTARTSPIALPGA

SEQ ID NO: 12904 - protein, 671 aa, Actinocorallia sp.
VSVIRLPLAVDDQAAARLESLFWSMFCVKRALQRSTRSRLAEFWAGGRRRQDDAARWRRELGLSRRDLERIAYAHVDGAGWLKHHVSKALVMHQADEVWTGVERHLFPDASGRRAGRPRVGSWWEYRRIAGRARSHTRARKWETFRLHGSLQGHLDAYRHPALPAETATPAQVVSLAPGTPVLAQPRRLRPPRPVADRPGKCSWWDHDGPLTVVFAGGPDSERGELALPVRLPSGAGRWRWLRHFLGRPQLWHKIDLVRRPCLSAPGGWTYEAHLMILDGGYISPATRERRRCVAALERVGGVDVNVSNLSIVSLPVTLDPADGPVLADQIVLTEVEKAAIERDRRTVRRRARALERSRRASNKAQYELSRRQRKREQRRRAAGLPTRHVDLPKGSRLADRAGRPRNAYRKDRLTVGYRKLRTLIRAERAGRTEAQRARARQMASHLVAVHGVHLTVEACILSSWFRRWGRACAAFTPGMLTSALAVECAAAGGRLGRASTFTTALSQHCLCGQKVNKALADRIHRCPACGLTGDRDLVSAALGAFVTWTDQADPRTASVDFSTSRHALDVFGLGLQGALTESTVTRSRPARRTRGKNGSRTRKRTASARSHPERQWSRPRTGTRQGPHRTDVIGPRTVPTCASGAKEQALVSTSDSFRRVAGPIARSCAA

SEQ ID NO: 12905 - protein, 379 aa, unknown
  TnpB Polypeptide
LWYNIFGDFMEYSYKFRIYPNTKQKNLIQHTFGCCRFVFNHFLAEKMERYKQTGCAPTRFQQDKELTALKKSLEWLREVDATALQSSLRDLDMAYQNFFLRVKNGEKPGYPRFKSKHDHRQSYKSKCVGTNIKVLDKAVQLPKLGLVKCRVSKEIKGRILSATVSKNPSGKYFVALCCTDVEIEQLPSTGVAVGLDMGLKSFAAASNGMEYPNHKYLAKSQKRLARLQRQLSRKTKGSNRREKARLQVARLHEHIANQRQDMLHKLSTQIIRQNDVICIEDLTPKNMAKNHRLAKSIADVSWGEFRRQLTYKAKWQHKALVVVDRFFPSSQLCSACGAQWTGTKDLAVREWVCPECGEHHDRDINAAKNILNEGLRLLA

SEQ ID NO: 12906 - protein, 412 aa, unknown
  TnpB Polypeptide
MRSQKIRLKPTKEQERLMWWYSKVSRNYWNLLVDIDRRNNKGEFDEILRENENKCYYSKFYGREIYTLSLSDYLNLAKMVVNKNYEKYSDKWFWYYQPNQSFIYSFLARELVKIRRLNKGKLNFRSVDKIQPNFNVRCDVFPKKIRPSRIYLKNNGKLQVPTIGEVRFGSVRSDFDLSCKKQVANISFDGKYWYLSYTEDVETQVEELPDVTDGVGIDLGIKTLATMSDGTTVPNIKTFRRVRILTKRLKRLQRKLSRKYRINKCNKHHKTKNIIKLEQQIKLIHRTIRNIRINHIRKFVSELVKKQPRYIAIEDLNVKGMMKNRHLAKDVANCSFYTIKEYLIRKASERGIPVRLIDRFYPSSRLCSTCGNYKPDLKLSQRVYHCCNCGVRIDRDFNASINIANTNEYVLV

SEQ ID NO: 12907 - protein, 413 aa, unknown
  TnpB Polypeptide
MEIVEINRTIKSRIIFQNNEDISKMIASQEAFVQGCNFVSEYMFNHNFPMNTTTLVKLLYHDLREKFSLKSQMAQSCVRHVIAKYRSVQTQLRKQRVWDGYKKDNHGNPVKNYVRKDLDFLWKPIVFKRLQLDLVRNRDYSHKSDNTMSLNTIYGRVTVQAIFNGFEQYFDGTWTFGTAKVLKSGNHWYLHIAVTKEIEKPDFKSKHVVGIDRGLRQLLTIYDEQGRTTFVNGKQILQKRRHYKRLRQQLQSKNTKSAKRRLEAIGQRESRWMNDVNHCLSKTLVDRYGSETIFTLEDLTNVTFDTVKKRAKKNRYEHHSWAFYDFEQKLIYKATASGSQVISCDAHYTSQRCPKCGLIDSKNRNKAKHEFCCQACSYRTNDDRVGAMNIQILGTLYNSGNVKPAFEKLEIVN

SEQ ID NO: 12908 - protein, 380 aa, Shimazuella sp.
MFAKFQLGGDLMHKAFSYRLRPTKTQAMLIRKSIGCSRFVFNYFLGEWNKMYQETGKGLRALTEKKRELTWLKEVDSTSLQNTLQHLADAFQRFFRKQNDAPRFKSRKNRLQAYTSQCNYPKNSRPTIEIDGNKIKLPKLGWVKFVPSREISGRILSVTIRRTRTGKYNISILCEGCYLRSVPARKEAIGIDLGLKDFAIFDDGTKRKPNRFFRHYEQKLAKLQRTMSRRKKDGSNWHKARIKVARIHEKITHARHDFLHKLSTKLMNENQVISIEHLQVKNMVKNHKLAKSITDASWSEFVLMLEYKAKEYGRKLVKVGKSFPSSQLCSCCGHRNKEVKQLQLRAWICPNCNEHHDRDINAAKNILQEGRRLLAVGLTV

SEQ ID NO: 12909 - protein, 200 aa, Brevibacillus sp.
LINGRPLKSKNSYYNKEIARLTSIAMKQTGKSEEFVRTHRIRSLQGKRNRYVHNFLHQASRKIVDLAWKHRCHTIVMGDMKDIKQENPCKMFVQIPHARFVDLITYKAKLLGITVFKQNEAYTSGCSALDEEKVSKKTYSSKRRIHRGLFVSNSGFKINADVNGSLNILRKYLGGKGSPALIQSARDNGCLKHPKRILVV

SEQ ID NO: 12910 - protein, 177 aa, Anoxybacillus sp.
VVNNVISEIGFVFYNHCHWRYNIAKAQRILSRRKKGSARWGKQRLKVAKLHEKVANQRMNFLHHKSKELVITYDAVIIEDLDMKGMSQALHSGKSVHDNGWGMFTKFLEYKIKERGKQLIKIDKWFPSTKKCSCCGKEKEMPLSERVYKCSCGAVLDRDHNSAISIKNEGLRLLVLA

SEQ ID NO: 12911 - protein, 266 aa, unknown
  TnpB Polypeptide
MDGKSVKMRFRAAMVDKDNRNTRLLANKLGTLRVTKKGRKWIAQISVHVPTVPRTGVRVMGVDLGLKVPAVAVTDDDTTRFFGNGRKNKYMKRKFRAERKALGKKKKLKAIKRRNQKEQRWMRDKDHKVSRAIVDFARQKKISVIRLELLANIRQTERKCRKNNQNLHSWSFYRLASFIEYKAALSGIKVEYANPAYTSQTCPSCSVRNKVRDRVYTCACGFKGHRDAVGAMNIRYAPVMDGDSPSAWEPIRSVSGGVMAHPHLKA

SEQ ID NO: 12912 - protein, 377 aa, unknown
  TnpB Polypeptide
MKVNKAYKFRFYPTKEQKQNLANTFGCARFVYNRMLAIRTDEYYNNGVKINYDKSSELLTELKKEEEYKWLNEVSAVPLQQGLRNLQKAFSNFWKKLTKYPNFKKKSYDQSITYAANAFEFKNKELKLAKQSEPLKIVWHRKIPKNTRITSISVSKDNSDRYFVSLFLEEEVNFLPTNDNIVGIDLGLEDFVVFSSGEKVKTPKILRKYQSKLALLQKRLAKKQKASKRRNIARLKVAKIHKRIANKRSDFLHKLSTRIIRENQTIVVEDLNISGMLKLKKLSKSISDASWSEFLRQLKYKALWYGRNIIEIDKWFPSSKRCNECGYILDSLKLDVRKWICPKCNINHDRDINAAKNILTVGMTGIARGESVRPACA

SEQ ID NO: 12913 - protein, 372 aa, unknown
  TnpB Polypeptide
MIRAHKIRLHPTPEQEVYCKKTAGTARFTYNWGLAQWKTMHAVHPGVDYGVMAAKKDFNRLKPEQFPWVYDVAKDVAEGAFANLGVALKNYFNGQKGKRKGQKVGFPKFKSKKRSKLSFRLNNDNFTVDGHHIRIPKLGWVNMAEALRLQGKILGAVVSKMADWWFVSIQVEVEQPPPMHLTHASVGVDLGIKTLATLSDGTQYDNQALLRRDLKKLRTLSRSLSRRQQGSHRWWKAKMKLARFHACIKHTRQDYAHKMTTAIARTYRLIGVEDLNVKGMGKNRRLALSIADAALGDIVRQLAYKAAWFGGQVVKVGRFFASSKTCADCGHVNQELTLADRVWLCTGCGSVHDRDWNAAKNIEAEALRLVEA

SEQ ID NO: 12914 - protein, 467 aa, unknown
  TnpB Polypeptide
MKKAVPMILSEDNFKQIFAFADRYSRLAKLLYNAALFRIRQVFTGWDKEERTNLEKSVFAEIQCAKETYKGFTCRRVLSYKALDKILRANKNPDFFAGLPMQTAQSIVRQATIDFKAWLSALKVYKKDPSSFTGRPRMPRYCRLDKKTFKVTNQDAVLYPSEDGKGCLLKLPNMTENRIPLSYLKDTADLREIVFKPYYGRYIMTFIIEDAVPPCYPDMPNMAGVDLGTDNIAAIACTDGSSVVYKGGAILSANQFFAKQKASAVSILTRGKTYSHAASAFLNNLSLKHDCFIKDQMHKLSAAIIQYCIDHRIGVLVVGTNRLWKQRASMSKKSNQKFVSVPHDKLRWMLSYKAMVAGIDVVWQEESYTSKADCTAGDFIPVYGKVKGHPVFSGRRVERGLYLCKDGYCINADCNGAANILRKAFPDAWAACGDYHFLAAPDVIGFKDLNPAVFPDRQRQQSANKKD

SEQ ID NO: 12915 - protein, 444 aa, unknown
  TnpB Polypeptide
MSNKLVLIDELQNKVLKVRIYPTNEQVSLLNQTFGCCRKLYNEHLQERNEFYIDNILPIKSKATKQEINEVYKTFKPKTEKEWKVIYPYLAEVSSCALQQARRDCDSAFLNFFKSNNGSRKGKSGFPKFKSKHNNRQSYREVMVSDNNFCFEERWVKIPKIGKIDFKDRAFPTWWNRKTKLCSMTIERSASGNFYVAILFEVQKAIRRNTNTSSLGLDFSPSEMYVSSENQTGKDFGYVAQKQAHKKQLRKLERRLARKQKGSSNRNKARIKVARLEEHIANSRKDWIEKETLRLVSSYKRIVVEDLNLKGISAFLRNAKNMNDTSWAMFVSRLQAKGEEYSCEVIKADRYFPSSQLCSVCGFQYKDLKLSERTWICPKCGTNHIRDVNAAINLMKYVPLEERELTPVDSDIISGLAMLALQAETLDEAGKVVQATLPKNVPGL

SEQ ID NO: 12916 - protein, 158 aa, unknown
  TnpB Polypeptide
LNKLTEKRNNKVKDLLHKKSRQLVNKLKEDRIKNLVIGYNKEWKNGINLGRKTNQTFVSIPYTRFIDMIKYKCTLEGINVIINEESYTSKCSALDLEPVKKQEVYLGRRIKRGLFKTSNGILINSDINGALNIGRKVFGDDYFNPANRGFVLNPVKIY

SEQ ID NO: 12917 - protein, 254 aa, Enterococcus sp.
  misc_feature (234)..(234): Xaa can be any naturally occurring amino acid
MYFVKNDKKTIIRCERHRIKVPSLNWVKLKEKGYIPKHDDKHSIKSGTISQQANRYYLSVIVEQDCTAQVLNDTPTEGMGIDLGLKDFAILSTGKTYKNINKSGKIRKIEKQIKRQQRKLSRKYESEKKRVNEKQSKRGEATRKNIEKQVLKVQKLHKRLTDIRRDRVNKIVSELVKTKPAYITIEDLNVNGMMKNRHLSKAEREQSFYAFRKKLADKCKVYHIELRLVDRFYXDQSCLCEVNETRDYGDRKSL

SEQ ID NO: 12918 - protein, 484 aa, unknown
  TnpB Polypeptide
MKTKHGKAIEITDQLSSCAAQTLAQWIGCFTVIRNQKVIQGNANYAAWIEQGRAVDDYPVSNTAVAYLCNELTFLKDIPSQIRRNAGAKYFESLNAAKMGLRSRPTVTPRHKKRNCYVTNELFDVQPLDHNHCIVHIKRSAKKGAAGGYVTGVKMPFSANDAASSLYLSRKGSRFWLSMAYDLELLVDTEDEIRLRLKGMTEEALAAVVEGYDLGVTRQVTGSNSTVYHLPEEAQKKLANLDQRKARYQKKYARVARANDRASEAKKRKRTKGEKKLLDKAAQHSAKKARIQNNNSHHQSKAIAEDTPLVAVFEDIRINNMVRRPKAKQCPDTGKWLKNGAAAKRGLNRAIHGANMGQIRQFTAYKLKDRGKLMIKVSAKNTSLECSSCGNVDKENRKSQAMFLCTKCGHTANADDNAALNIKRRGITLIRSDAFSKEKTVRAVSIRKEKKAQELASSGDGDNVRLALGRATVDDVLNSESISA

SEQ ID NO: 12919 - protein, 392 aa, unknown
  TnpB Polypeptide
MKRAYKYRLYPNKMQQEFLCQTFDCCRYVYNATLAQKIKAYEADKTSLSKFDCIKLITGLKKEHEWLRAVPHVCLPQAVYDMDSAYRMFFKTKQGFPKFKSKHRSKLSCRFPVPFCSVDQETHCIKLPKIGLVRYKQDRRFKGQLRNITVSCDGCGRYWVSCLVETGVPEPKPEPLTIQSKCVGLDLGLKDFVVTSDGRKIPNPRFADVIDRRISRLQKIESRRQKGSRRRASIRLKINRLYARKRNLINDFIHHMVNSILGENQAVFIEGLNVKGMMGNHRLAKSIQNICWSEFVRVLEYKARWLGKTVLKIDRFYPSSKTCGCCGYKNEDLTLGDRTWTCPQCGTVHDRDLNAAINILSEGLAKFLPSVGRFDGRGDGGCEVGEAPICTV

SEQ ID NO: 12920 - protein, 487 aa, unknown
  TnpB Polypeptide
MGKSTTPSFCLTLKLNTSKRDEQILEYRFLCGQRIYNVLVRHCRKQFVKLFRDPGYRELLKERSNKDLSKKEKNALNQRLAGIRMDYGLSKYQLYGYVKLQQHRYKKHIDSRTAQGIASAIWKACEKYLFDNGREIHFKKRDDLCSLESNSNDTGIMYRNGYLVWNKLTIAAPVRSKDTYAKEAIKHRIKYCRVIRKPVGARNQYYVQLILEGLPPVKHPINHGRIGIDIGTSSVAVVGEDFCHLTVLAKEAAPMEQRIRRLQRKMDRSRRAANPDNYNPDGTVVRKPHKFKESNTYRKDRQRLRTLQRKRADVVRQSHERLANQVLQNGNEIYVEKMTFSGLARRSAKTETDKNGRCKKKSRYGKSIGNRAPAKFLKILDRKLSYEENEIHQVNTQTFRASQYNHVTDDYIKKKLSQRGQQINGIWIQRDLYSAFLLMNAAKDLSHADRERCFATYENFVRNHNKCIENLKYSNEKLPSSFGIRAA

SEQ ID NO: 12921 - protein, 414 aa, Nostoc sp.
MYATQKNQLRRLSQQEFKALTALCRLSKNLFNVALYECRQYFFTQRKRLTYESNYHICKSNENYRLLNTDIAQQTMKVVDRSMRSFLGLLKAISIGRCDQKPQLPKYLPKDGYFSLIIPRIKLKNGVFNIPMSQEFKREYGEVKIPLPERLLDKKIKEVRIHAKYKGAWFEIEYIYEYEKIETSVDDNKAISLDLGVDNLAACFDTEGHQFLIDGKRLKSINQWYNKRNAILQSAKDKQGIKSFTNQQARLYQWRNNCLRDYLNKTARIIIDRCLKFQIGKLIVGYNPGIKQEINIGKSNNQNFVQIPFWQLKQKLQALCSRYGIEYLEQEESYSSKASFFDQDKIPVYNADNPSIAKFSGTRIKRGLYRTKDNHLVSADINGSANILVKSKHRLDRERVSSGFLANPLRIKIS

SEQ ID NO: 12922 - protein, 314 aa, unknown
  TnpB Polypeptide
MQVKRHCAVKYRMYPNRAQAALIDRTIGCARFIYNQMLETRIGTYKATGKSCNPTPAQYKDRYPFLREVDSLALCNAQLNVAKAYRNFFRDPKHIGFPKYKAKHRNRQTYTTNNSNNNVTLDEGGRHLKLPKVGIVRVRQHKRIPEDWKLKSVTIEHCKNGEYTATILFEYETQALEPVRPVHIVGLDYASHGLYVSSDGEQADYPRFYRQMEPRLMREQRRLSHMVKGSGNWVKQKRRIAKLAAKVRNQRADFLHKTANRLAARYDCVGVEDLDMKDMSQSLALGKSTMDNGYGMFRTMLAYKLERKASSWSR

SEQ ID NO: 12923 - protein, 370 aa, unknown
  TnpB Polypeptide
MKINKAFKFRIYPNQEQQKLINQTFGCVRFVYNHFLNQRNELYKTEQKSTTYVNQAKELTLLKQELTWLKEVDSVSLQSALRNLDTAFKNFFSKRAKFPKFKSKKNNIKSYTAKNTNHSIRIENNKLKFPKLGFLKVKFHREIPSEYKILSATVSQEPTGAYFVSIITEFEKEIIQVPSNNNIVGLDFSMKELFVSSENQRADYPRFFRLLESKLIKEQRNLSRKVKFSSNWYKQKIKVAKIHNQIKNSRLDFLHKLSTELVKKYNAIAIEDLNMKGMSQALNFGKSVSDNGWGMFTTMLKYKTELSGKQLIKIDKYFPSSQLCSCCGQVNPATKNLNYRWFTCDCGNSIDRDLNASINIKEFGANSLAY

SEQ ID NO: 12924 - protein, 410 aa, unknown
  TnpB Polypeptide
MKLSVKINLNPSSEQHILLLETMRLFNKTCNTISQTAFHNQTFGKWSIQKLIYHDLRKTTSIPAQLLIRAIAVVCGSYKAEKKKMHWFKETSSIPYDTRLRTFHKSESVSLRLWNQRITVPIILGQYQAHRLNGVKLSETGESDLIYDRIQNRFYLVITFDQPETPTQQSSKVLGLDLGIKFLVADSDGAIYTGAQVEQTRNRYAELRKRLQAHNSKASYRHLKKLSGKEHRYCKDIDHCLSKQIVQKAKGTGRSLALEELKGIRDQLGRRPERKRVPVLGNSAPLSVEKPRKHVRKSVRTLINKWSFSQLRLFIAYKAKIAGVRVYVVPAYYSSQTCNVCGHVSKSNRISRDNFRCKNCGHAEHADINAAKVISQRASVNRPTASGVGLTFTRMPYRARCKPTDLSVGR

SEQ ID NO: 12925 - protein, 410 aa, unknown; identical to SEQ ID NO: 12924
  TnpB Polypeptide

SEQ ID NO: 12926 - protein, 474 aa, unknown
  TnpB Polypeptide
MGQASRTTKLLLDLGKRDRGGANSQKRAALLATAEVLNQARAFYLDFFLAHAGKLAERVTYYSEEHLEMRERLISAHELLSWAEGATVETREHPHPWEGWSFTARFPGMPFAYRRSVIKDAIGKARSYLSNRANWEASGKKKGKPGLPGAADHPTLYQGCIMLDLETLNLQEAFVRINVYTGKDWTWMHYPVCSSRYLVQRLLEADWKRQSPTLVLRARSAELHLPQVKQIAAKKVRERKQDPQLVTVAVDLNVRNLAVITVRRAERIIQTVFVTDHGLDAHRYRHLKKIAKKQWQSGVPVKGEHSNRDLWRHIDRQNQDAAHKVAYSIAEVCARYPGCILLFERLRKIKPGKGSKSRRMNRRRANQLRGKINQQAKDKAYLHQIVTVEVNPHGTSQYCSRCGALGERFSYRGGQRIVEQWGKLFFCPVCHFEAHADFNASVNVHRSFYREWHWQPRKGKAPKTPPPSPVENGT

SEQ ID NO: 12927 - protein, 579 aa, Acidithiobacillus sp.
MSKRKKTRYPVEVRATRLTSNKHIANTEKFDKAMRLFDRVTALKNRMSAYCFAHLRDLITDPYAFKAQYKAFNNNADLNAWETQSLFHEVVDFYVNSYQQRMERKQIFVQGSWKKTRYQKNLYRKPKAGEYSEDGRILVHAKGDIKSFELIRRKTHMTGIVKYLCYMNLDTFDPEHMTNTTMQAVLLFCRHYHPQRWQRACRVARAIQDRMIGSMKPIHFTSGAHRRHPVESKSLVVEDQSNGQYRWWYQLRLGKGKEAEFIRLPLLFNAQRKKPEDLRLDAVHVCYVRNGSQFMVGATYEAPPLEFSPTGIGIDTSVGIDVNTKNNLMALSNGQTYDYDRSAISALILLVDKITRNGTPNLTFRERARWEKLCRVNEWRIKRIIHDMLDALQAAGVTDLMVEDLDMRGDATFLEHHALKIKYSRLLRLLRLSHLKDWIGSQAEKRGMRMHRTNPAYTSQECPECHFVHRGNRTTQEVFACMACGFSGPADTVAACNTRFRVLADVPRGPSALLHTFDVYGRAVPKPIARSRLKEIVEKKLHQSVSPGHFTEPLGPGSTNKVGTNTPALVKDKAPSHSR

SEQ ID NO: 12928 - protein, 409 aa, unknown
  TnpB Polypeptide
MKMTFKFRAKPTKTEERWLFSEFRHQKQLQNYMLQMRSQMYNYGSISVSCYDQINHLKKLRENSYYGKHPQDMQVSTIKRVETSIDNFFSRCKDPKAKKKGYPKFKRSVRSLTWSLRKHKVKDKATGTFKRVRQTPIRETGTRYNRLKVPKLGEIKIRQHRPLIGDPKEVTLKKTARGWYCFIVCEVPDTLKCVPKSACGVDVGTHKFLTTSAGETEENPRFYRQAEHKLVKLHRDLSRKTYRSQRWYKAKDALAKQHDIIACQRLDFIAKTVYKLFHHKAFDAVVAEKLKPSNMLKNRHLAKSISDASWGMFFDWCSWVAKRDGKHFHQVPPHHTSQTCSQCCQKSPIKLKLSDRVFHCKSCGNLKLDRDHNAALNILHRAACALRGEVWDTILCETRNPLLQQACWS

SEQ ID NO: 12929 - protein, 403 aa, Haloarculaceae sp.
MAEMRRTVVVKLDIDDSDADLLHETVDEYLWACNYVVGDAWQDEYKPTSKTELHDRTYADVRDQTRLQANLVQSARNRAAEAIKSVVARWKDGKMASRPEFTTPSVRYDRRSATFHDDRVSLSTVDGRIEAEYVLPPEGDNPQTKYLRTDDSEITGATLQYRDATDTFYLHIGTKTDVEFEIPDDGDAEHSTVLGVDLGIEQIAVTSTGLFWSGDFLNHRRREYERVRGDLQRTGTESAHRTIERMGDRETRWVEDYLHRLSKALVQEAVAHGCDRIAFEELTDIRDRMPGVKEFHAWAFRRLYDYTAYKAEAEGIDTTQVDPAYTSQRCSKCGTTLRENRPSQAKFCCQKCGYEVNADYNAAKNIGFKMLRAGQKSPHGGATRHLALKSGTLNVNGEYSPAE

SEQ ID NO: 12930 - protein, 234 aa, Frankia sp.
MSRYRLYLTVEQAAVMEGHCGHARYVRNLGVEQQSWWNPRRGPAPGYHEQSRQLTEARRDNPWLAAGSQTVQQQALRDFATAMANFFRGSHRRPSWRKHGRSEGFRIVAVKPADVRLVNRRWFGVRVPKVGWVRFRRSRAVPAATSYRITRDRAGRWHVAFAVVPDLIGVPGGGWGRRGGPRGGRVRGVVHGGVVALSRVAAWGGRPVAAVATPVRPRGGVVIGVVGCVARSPG

SEQ ID NO: 12931 - protein, 383 aa, Microbispora sp.
VQLRYNFRLYPTPGQRAALARAFGCARVVYNDGLQARQDARQQGLPYISDGELSKRVITQAKKTPERAWLGEVSAVVLQQALADLNTAYRNFFASATGKRKGPKIAPPRLRSRKDNRQAIRFTRNARFSITAGAKLRLPKIGDIPVRWSRDLPAEPSSVTVVKDAAGRYFASFVVATSDVPLPESAADVGIDLGLSHFAVTSDGRKVDNPRFLRRAERRLRKAQQDLSRKAKGSNNRKKAVVKVAKAHARVADTRRDGAHKLSTQIIRDNQAVYVENLAVSGLGRTRLAKSVHDAGWSSFVGMLEYKAARYGRHFAKIDRWFPSSKLCSECGALTEAMPLNVRSWQCPCGAVHDRDVNAARNILAAGRADRLNACGGTVRPAA

SEQ ID NO: 12932 - protein, 314 aa, Ktedonobacter sp.
MIKAHKIRLHPTPEQANYFARAAGTSRFVWNWALAEWNRHYEAGEKPTALKLKKQFNEIRREQFPWTWEVTKNASDQPFLDLGKAFRAFFEGKARRPRFKRKKRSKASFYLANDQFELGDHRIWIPKLGWVNLAENLRFKGKVTGARITKTADWWFVSLTVEIPDELAENRKGAVGIDVGLNRLATLSTGEGFENQKFLATALKKLRQANKRLHRRKLGSKNREKARRQVARLHYRITCMRDDVLHKMTTRIADCYGIIGVEDLNLKGLLKNRRLARSFSDRATWRAGHQGGPLLSLQQDVSSLWLEVGGHAVV

SEQ ID NO: 12933 - protein, 382 aa, unknown
  TnpB Polypeptide
MIAHKIELRPSRAQVAYFKQASGTARFVYNWALAEWNRQYKAGEKPTAYKLKKQFNAIKYQQFPWLELIHRDAHSTPFAQLGKAFVSFFKGVSKHPVFHKKGVHDSFQLANDKFHIEGKRVRLPVIGWIRLREPLRFQGKIMSGTVSRTASRWFLSVCVDAKPALKSKTGNEQLGVDLGIKTIMTISDGRQMQGPKSLGKNLKRLQSKSRQLSKKVKGSNNREKAKLKLSKLHYRISCQRNDFLHKATTMLVRESQAICIEDLAVGNMIKNHKLARHLMDASFGEARRQFEYKSAWYNTTLHVADRFYASSKECSSCGNIKQDLTLADRVYHCEKCGLLIDRDFNAALNLQKQLPMASREVKPVDSTVSLYEAGTKSVRLSA

SEQ ID NO: 12934 - protein, 367 aa, unknown
  TnpB Polypeptide
VINKAYKFRIYPNAGQQILFAKTFGCVRFIYNRMLADKIEYYNQTGKKLNNTPAQYKKEFEWLKEVDSLVLANAQINLQTAYNNFFRDKKTGFPRFKSKKHNRQSYTTNHVNGNISLKDGYLKLPKIGQVKIKQHRQIPNNYILKAVTISKTPTGKYFASILFEYQDQIQEIKPVNIVGLDFSMKELFVSSDGEFANHPKYYHKAVERLAKEQRKLSKCQKGSKNREKQRIKLAKLYEKVANQRKDFLHKLSRQITNAYDAVCIEDLSMKGMSQALNFGKSIADNSFGMFTSFLDYKLREQGKQLVKIDKWFPSSKTCSKCGKKKENLSLSERVFQCECGNMLDRDINAAINIKNEGMGLLLAQPNP

SEQ ID NO: 12935 - protein, 229 aa, unknown
  TnpB Polypeptide
MEGKVKTLSITRRNNRWYVSFVVETEPKLLPKTGKEIGIDMGLQAFLTTSDGQQVEAPKYFRSSERQLAKAQRRLSRRKKGSNRRKKARLLVAKAHERITNQRLDFCHKVTCSLVQRYDGFFAENLNIKGMVRHRYLSKSVSDAAWGMFLSILKSKAENAGRRYREVSPNGTSQRCSGCGETVKKSLSTRIHRCPFCGLLLDRDINAAINIQRLGRSLQGGAATATPLN

SEQ ID NO: 12936 - protein, 308 aa, Rhodococcus sp.
MSITGRWPSGHVPGRWSGGGSPTATPRGCSPDGSGTPRPSGCRSRRRGRCRSRCGSCRARSTGSGFTYRGGQIRLAKQSEPLDIRWSRPLPEGAVPSQVTVSRNARGRYHISILVEDTITEHPSTDGVVGLDAGITSLYTLSTGEKITNPRHEGRDRERLARAQRVLARKEKGSRNRAKARLKVAKIYGRIADRRRDYLHTLSTRLVRENQVIAIEDLSVRNMVRNRSLSRAISDASWSEFRSMLEYKADWYGRRVVAIDRFCPSSKTCSVCGAIASTMPLDVREWACRCGAVHDRDGMRRGTFWPSD

SEQ ID NO: 12937 - protein, 581 aa, Rhodococcus sp.
MAVDDATSEPIGLDDVEIRVGWLLDLIAAAGGELVSRLWRPATFDVLAAGRDRQDRMLPAQGHVAAARLGWNPIYPGGVYAPSRVTRVVTAQVMATLRTLAYRDTAIASLSDRIDAATGRVAPPTEPRDYVPSGFARGVLRQLAARPRDGGPGAARLRITDVQGPPQTSAMARLSAADRQLAQITVAGNELVLTVKLPTSATPAGRVQWRRVRLTAAVPEHMHGRAITDWHLPTLVLDHRGLLWRCAATELVPADDLESATVAVGVDWSPTTLGAAAIAAEGTGGLVSDYRGWTYDDRGLGIKLARLQAEGQLLHAKAARLTRLAATAPPEVRAGLEAKIAVLDGHRTAVGVKRGKINRELAFDFARQVTDYAAAAGAQVIAVEDLTTLESRGHGRVNNNRAAQSARRQAVTALAHTAAAAGIAVVSVPARGSSALCPGCDEPLSRPGGYHSAWCPRCQVGGNRDHMAGVNLAKRALLGGSKVTRRRGQMPAVRVAEHAPVRRCRDKNGPTPGRPRHRRVRRSLPAATPRVGVNPKQQVPASQASVWDTVKPTPQQGDAGSRDTRLSSLSSTPVADSMRST

SEQ ID NO: 12938 - protein, 438 aa, unknown
  TnpB Polypeptide
MQLTHKIALRPTPEQADYFIRACGTARRVWNWALNEWNKQYAAGGKPNAMALKKQFNTIKYAEFPWLKDIHRDAHAQPFAHLAKAWSRFFADIKAGKPAHEPQFKKKGRCRDSFYVANDKFSMDNKTIRLPKIGNVAITEVLRFEGRILGATVSRSADRWFVAVQVEISDTQFYRRRKAHEVSGIDLGLKAAATLSSGESVDAPKPLKAALRRLKIRGRRVSRKLEAGKVSAGFAPHARLPKGTKLPVSNNRRKSAAILARLHARIANVRADFTHKLTARLCRENQAVVIEDLHVKGMLANNRLARAISDVGFGMFRSQIEYKAKRYGTRLVIADRWYPSSRLCSACGWKNEALTLKDREWACPECGAQHDRDRNAALNLKRLATVTALPVASSPSNGDAASGMVPVAAGKVTPVRYECGQQDTSGQEKNRAHIRALS

SEQ ID NO: 12939 - protein, 419 aa, Moorea sp.
MLRLTYEYKLIPSQKQIAVIEDILAVCRKVWNYALRERKDWYKSRKCAVNYCSLQHEYIIPVDQPYPNYKIQAANLTKAKKANPELKRINAQVLQQVLKTLDRAFKNMKEQGYGFPRFKNLYRMRSFVFPQFKTNPINNEWIKLPKIGLVKLRLSRPIPDGFKIKQVRIVRRASGYFAMLSLQSEVSVPDTPPRGHPLGIDVGLDKFLATSDNQLIERPRFLKKLHSKLKLLQRRLKLKKKGSKNKHKLNCQIARLHQKISDTRKDFHFKLANYLCDQAGMIFVVGEACPKDMDLDFRTWAKGMLGKHTLDAGFGQFFDILAWVCWKRGVYFGKVDYRYTSQICPNCGINTGKKDLSERIHKCPECHYEINRDVSAAQVICQRGITAVGQIVLENDCVGGLSGVYNNLDKCFGSSKPKL

SEQ ID NO: 12940 - protein, 401 aa, Microcoleus sp.
MRHQAIKVRLYPTTEQQEILAQHFGCSRWWWNYALNLCIGTYKETGKGLTQVALNKMLPGLKRQEETSWLGECYSQVLQATTLNLVTAYKNFFERRAKYPRFKAKKNRQSIQYPQSVKIVEGCLKFPGSVGVVSCKLHREIEGTIKTVTISQNPSGNYYAAILVELEGDYPTPHTNGKVAGIDLGLKEFAIVHDGIKTSKFANPRHLAKHERNLKRKQQKLARKITGSNSRNKARRLVARVHERVGNVRQDYLHKLSRKLVDDNQVIVVESLNTKGMVRNHNLAKAISDVGWGMFVNFLQYKLDHDGKVLVEIDRWFPSSKLCSKCHYQISELPLDVRAWTCPSCGTHHDRDENASQNIRAEGIRMLSVLGTRTAADGGDVSPKLGRKSKLTQSPVKSETA

SEQ ID NO: 12941 - protein, 444 aa, Microcoleus sp.
MHQTLTAKLKLEVTAEQKEQLARTSLAYREALNYTSGVAYQMGKTYNGTKIQKEVYYTLREKFKLPSQMACNVPRQVGATYKSLRTKLKQNEEATASGRTKKRYKGLDKPPKYVSRTCTLNYQRDYSFVKDQKVSVVTLDGRIKVNYQGYSKHLEMIASGVAKIGAAKLWYSKPTKTYYLLVSMEVEVPELAPTDINRVLGVDVGQRYIAVAADTRNKTQFFSGKKVRHKASRYVKARKTLQRKGTRSATKKLVALSGRERRFIADTNHCIASQVVTPNSLIGLENLTHIRERTKPKKKGEKASAKQRRANSNKARWSFAELHSFIDYKAVLSGSLAMKVDAHYTSQACPCCGHTSKENRPNKGLTFVCQSCGYTLHADLVGARNIALRVLLSRQDWESTGRFSAVPGASSDEAKGERLSRYSQLRWTIDAISTLSETEPSGEV

SEQ ID NO: 12942 - protein, 384 aa, Microcoleus sp.
MITLEFKLKGKQQQYRVIDEMIRTAQFIRNKALRHWMDNSSVKLSDLYKQCAVLAKEFEWAGKLNSMARQASAERAIFAIQRFFANCKSNKPGKKGYPQFKKFSRSVEYKTSGWKLSSDKRSLTFTDGFAAGTFKLVGSRDLHFYAPSEIKRVRVIRRADGYYTQFCIAVERTEALTPTGKALGIDVGLNHFYTDSTGATVPNPRHLRNSEKALKRAQRRVSRMKLGSANRKKAINRLGRKHLKVSRQRKDFAVKTALCVVKSSDFIAYEDLQVRNMVKNHKLAKSISDAAWSQFAQWLQYLGKVYGKTVVAVAPQYTSQDCSTCGTLVHKALSVRTHVCECGAVLARDHNAALNILAKALRQAGVNLNTVGHTEINAWGQTDL

SEQ ID NO: 12943 - protein, 365 aa, Ruminococcus sp.
MQKGIKFRIYPNREQKNFIHQTLGCCRFIYNRGLAMRKEGYENGEKIGYSQTSAMLTELKKQEEFAFLKAADSIALQQSLRDLDRGFVNFFQKRASYPTFKSKHNRFQSYRTVNQKDNIRIVGRYIKLPKLGFVKIRQSMEVEKINHVIIEHTPAGKYFAVLNVDFEPEPRSNAGGTIGIDVGIKAFYSDSNGNTVSNPRYLERSMRKLIREQRRLSRKQKDSHNREKQRIRVARVYEKVTNQRNDFLQKQSTMLVRENQTICIEDLNVKGMIRNHKLSKSIASVSWAKFFEMLEYKAGWYGNEIHRVPTMYPSSQTCSCCGNRNPRIKNLGIRIWECPKCHAVHDRDTNASINILKKGLQMQSA

SEQ ID NO: 12944 - protein, 389 aa, unknown
  TnpB Polypeptide
MAVRKVSQRIPFKPSRTQAALLEQCFGARRFAYSQQVEAFNTYDKDNNPRPKYPSIADMKAANEWLRDSPVPSNALSNTIVDFRKAKAAYFRKAEYGKNRPRFASKSDNIQSFRNGKPMRRMDGNRYPLSRKLGSVRIRRRDSIRYPLESLSSWTVKRESGVYYLVLLFDVDVQPKPLVSGEVGIDVGVKDFLTLSTGEKINYPDRLRQLEEKARWEQRKLSRRVKGSSNYRKQKKAVAKAHAKVRHYREDFQHQVSHRLIEDNQFIGMETLAVQNMARKAKKKLDENGKPTRNGQSAKRATNRSILRSGWSSLVDKLSYKAQWYGRTFVQVDRFYPSSRLCNGCGHKYDGLLLSEREWVCESCGTSHDRDVNAALNILDEALRLIPKG

SEQ ID NO: 12945 - protein, 432 aa, Cyanobacteria sp.
MLLTLTNRLKPTQTESDILRAACHLSKNLFNVGLYTVRQYFFQERKYLRYEGSYHLCKTNENYQLLATDIGQQTLKIVDRAMNGFFKMKELKNSGQYNARVRLPGYLPKDGFFPLIIPIRHRDWAKLSDKGWVYSVPMARAFKRHIGTVSFPIPERVRDKQVKEIRILPKYGAKFFDVAYVYEQEDETQVVGTEVIGIDLGVGNLATCVTTTGKAFVIDGKPLKARNQWYNKRNARLQSIKDIQGIEKLTLQQANLLDKRNHQIKDYLNKAVRRIVDFCLSEGVGKVVVGYNPGIKQDANMGTRNNQNFVQIPYYILRCKLQSLCERVGINYAEQEESYTSKASAPDGDDIPSYNSDNRQTYSFSGKRISRGLYRTKTGQLINADANGSLNILRKHLNLSKADDYLLIGRCSGCVAQPLRLNLEKPLLYPKG

SEQ ID NO: 12946 - protein, 530 aa, unknown
  TnpB Polypeptide
MKRAKTDTFVLELPLVVVSSAERILLGRFESARRLYNAVLGEALKRQRLMRESKSWQKARLLKDQKERSATFRKISSEYTFTSASLSAFGTTCKNEAGWNDRLGAHETQRIAERAFTAMESYGFGKRGRPRFKGINRPLHSIEAKTNTSGIRWKAGIASIAWGDINLPAMLAPAGKDDYQLESLCRNTKYCRVVWRMLNGTRRWYVQLMQEGMPPVKHEINHGKEVGLDIGPSTIAVVAEHVSELAAFCPTVKQPWKRMRKIQRAMDRSRRSTNPKCYNADGTWKKGKRQTVFSVGYNDLREELSDAERRLAAERKRSHGQLVNEILSHGTIIKSEKLSYKSFQKCYGRSVKVRAPGMFVSLLRRKAESAGGGLVDLHTWSLKMSQYDHPTETYTKKPLSQRWHVLGDGSGIVQRDVYSAFLASCVVTTEKDHRHHPSHIESMWSAQESVLRRSGWCFNQPASGSVRTFPTVKPSERVVRHRELTLGHGPDAVAETREPGDPKEFALIPLSLQDGINPWPIREAFHARLI

SEQ ID NO: 12947 - protein, 309 aa, Moorea sp.
VKHKAVKVRIYPTQEQIQILAQHFGCARWWWNYALNQCIETYQETGKGLKQSALNSMLPKLKKEKETEWLKDCYSQVLQSVSLNLSRAYQNFFEGRAKYPRFKSYHHRQSIQYPQKVKQVGDCLKFPGKLGVVKAVIHRPLDGEIKTVTVSKTPSGKYYASVLMEYDYSSSKVSKDGKTIGIDLGIKDFAITYDGENISKFANPKHLVKYENKLAKKQRIATRKKKGSNRCIKARKIVAKVYERIGNVRQDYLHKLSRKIVDHNQVVVVENLNVKGMVRNHKLAKAISDRVAWPLGQSRLGNLCKFSIL

SEQ ID NO: 12948 - protein, 405 aa, unknown
  TnpB Polypeptide
VDSDDAALLEDTVDTFLWSAQYVVDHAFKGEYVTTSKTTLDDETYDDVREKTDGFNGGLVQAARNKAAEACKSVVARWKNGKNASKPTFTSPHVVYDKRTAPFYDDYVSLATTEGRIEADYVLPDDKRDTPHAEYFFSDDYETTGAELHYTNGDWMLHIHCKRDVESDTSKQATPENGTVLGVDLGVNNLAVTSTGTYWTGEEFDHWRREYEKRRGSLQQCGTRWAHQNIQSVGRKEDGRFKQMLHRISNELVAEARENECSVIAFEDLTDIRERTDASWGHKWAFDRLYEFVEYKAEAHGITVDQVDAENTSRRCSHCGFTHPDNRHGEDFECLKCGYENHADYNAAKNIGLRYLRRNQTGGDGGAPLGVRLNSGTVNVNGGYSPAEESARTGVHAEPHDVSRG

SEQ ID NO: 12949 - protein, 588 aa, Streptomyces sp.
MFDERVIGGEGMAERSASGLRVLAPPRVVVPTGALTVRTRLRLSDRDAVILRELAQYLSRLAARDLAERVALGARHTAADFARRKRELTALTSSRWAGTITRRSNEQWQLARRAQAAHLTQLAAEIEAIERRLVAPVGRRDEATRAKGYPTRRVRAAKQQRLQVLRARVSRVAADAAAGRVHVVRGGRDLLHSRLHLDRSGWTLEQWHDRWWQARNRIEADGEAGKTYGNQSLRVGPDGVVVVKLPPSLAERHREHCDRFGRYTLDARCRFAYRAEEWRAQVEAHRAVGYTVRFDGGRCYLAASFTPVEAGPPRGPNDEPLMASALAGGVLGIDQNVDHLAVWRLDAHGNPVGRPVRIDADDRGPASRRDAQVRRVCSELIGAARRVGVTALVVEDLGFDTGRERRGWAGRAGRRLRSLVAGTPTARFVSRLVAMAHRAGLAVIVVDPAYTSRWGAQHWQRSTSTTRVKTSRHEASAVVIGRRGQGLGARRRAEKSVPRGKTEEVGRSRAEARRQAGTESHRPAAHDSGPGFLRAQRTADRPEDGARDAPRRRTRTAVQAAQDRSGQPAGSAFIPVTRDGWTPSPGPT

SEQ ID NO: 12950 - protein, 200 aa, Gammaproteobacteria sp.
LNACVAVPRGVLRSSAGREVGIDLGLTDFVATSAEEKLSAPQFYRGLEPKLAIAQRAGKKHRVRAIHAKIANRRRDSLHQFSTRLVRAYGIIYVGNVSATALVKTPCAKSVLDAGWSAFRTMLRYKCDFAGATFAEVNEAFSTQTCSVCDSRSGPKGIAGLGIRVWTCSECGTIHDRNVNAARIILAAGRRRLAEGIPAD

SEQ ID NO: 12951 - protein, 328 aa, unknown
  TnpB Polypeptide
MDTYRPCYASLCFKEIRGRVRVFIHLTIEGLPKTKRRKDGSRRHQLGRGVVGCDIGPQTIACTSKKEVILKNLAERGMSIKNREQKEAAIQRKMARSRRAMNPENYREDGTIRKGKKTWKKSRRYRRLQKQYRNLIRIAAENRHFAINEDVNHIRELGNVFVTEPGNAKKLQKRAKKTERQEKLSEVKQKDGTVKMIHKYKRKKRHGRSIQNRCPGYFQAQVKAKFERSGGVYIEVPFDYRASQYDHTCGSYIKKLLSQRMYCLSDGTRVQRDWYSSFLLFCIGHSLDKISRYKCKTYFETMYRMYLALEQYIIENHIRVMNSGIKAA

SEQ ID NO: 12952 - protein, 247 aa, unknown
  TnpB Polypeptide
LVITVQNILHLLWRCLTVKIILLNEVSNNVTKQAIKDACHAYKRFFKGCSKFPKFKSRKFSIPSFYQDNVKIQFSDRHVKIEGFAVSKKKNKQKINWIRLAEKNRIPTDCNYSNPRIRYDGINWWITVGIEYEDSVTVPSNDGIGIDLGIKDLAICSDGNKYKNINKTKKVKKLEKQKRRLQRSISRSYENNKQGKEYCKTKNVIKKEKLLLILNHRLTNIRHDHLHHITSEIVKREPSFICIEDLM

SEQ ID NO: 12953 - protein, 246 aa, unknown
  TnpB Polypeptide
MLHLILPDLMYVPLILEQITSQRSYVMITHPQYTKAELSYPRSNGSINREQSMSPSYKSHEKKHAVSKRLRDLSFHYANFVKDQCHKISRSIIDFCMEHQCGTLILGVNLLWKQRSNMNKINNQNFVSMPITLLRTMITYKALNAGIRIIEQEESYTSKADLIANDRIPTYGVDDKDASFSGKRIKRGLYRCSNGMILNADCHAAANIMRKAIPDIWKDTRDYTFLSAPDVYGFHKLNPKGIPVKG

SEQ ID NO: 12954 - protein, 372 aa, unknown
  TnpB Polypeptide
VRLTVGLKLMPTAEQALALRQTLEAANAAANAISAAAWRERTFGQFKLHKLTYADTRALTRLSAQVVVRVISKVADAYKLDRSRQRQFAPLGSLAYDDRILRYRSDDVSIWTIAGRQSIQFVCGPRQRALLVQRQGESDLVYRDDTWFVYATANVVEEPVAEVTDVLGVDLGIVNIAADSDGRVYSGGHVNGLRHRARRLRKRLQARNTRSAKRLLKARRRKEHRFGTWVNHTLSKRIVAEAQGTARAIAMEELGGIRERVSARQPQRATLHSWSFNQLRLFVAYKASLAGVRVVYVDPRNTSRTCPACGLVDKRNRPTQASFVCVECGLAGHADTIAALNIRARGRGVCNASKRRGVESCVESLSGKCRLP

SEQ ID NO: 12955 - protein, 326 aa, unknown
  TnpB Polypeptide
MVCVSSGFFITMKGRLFVPLKRDKYFDVQLSQHTVEQLGHKKVRSLAMTADSLSFCYSEDVKPTLVEKVFGVDRNEKNITFGDREIVTRVDMVGVVEIRQTTREVISSFKRNDLRIRRKLARKYWTRANHRVEQILHAATNSIVETASRNQAALAVENLVGIRKLYRKGSGQGVNFRFRLNSWPHWRAKRMIEYKSAWKGVTVIQLTKSETYGSSSTCSSCGEKLRNPAKDDVEHWRMLWCQTCKVWIDRDVNAALILSTRGRSRLDRSLSQPKEMEESRSQQAITSLPSTEEKGLAGEAVTGNGTTTLILRVDASKLIRRREPEN

SEQ ID NO: 12956 - protein, 391 aa, Desulfobacteraceae sp.
MKITRSSKTSLKSATAEKLKILNEILDEYAQVTNFFIDYFWEHPEIKTKNDIKKEIYGLPETWFTARMRQCAAREALSMVLGAKNTENRRKSSAEREVGELLGQEIFNDPVKPVHNGKKMTLSSQTVRIEKGRNSFDLWLVISSVGKEIELYIPLKKHRQFLRWENIGKTASSVVIHRDYVQISFEIETGEKKEFGKAVGIDAGINHLMTTSEREFLGNDIKPLISKIKRKRQGSKAYKRAKKELSYYIHKTVKDYFINSDLRLAVTEKLKDLKLNTEEKSKSKEFRKTLSNWNYRELLNIIQMRCEENRVFFRSVSPFETSRKCPKCTHTQRENRKGEEFECLSCGYSEQADFVGSLNILHRFLTGRYGAGFKTFLIYFYIFLYNLIYLG

SEQ ID NO: 12957 - protein, 365 aa, Anabaena sp.
MLLSIKTKLKLNKTQEILMAKHAGIARFTYNWGLATWASLYKDGLKPHKYLLKKFFNNHVKPELTWIKEKGICQKITQYAFDSLGESFQRFFKGQSKYPNFKKKGKNDSFTIDAGGKPIPVGGTLIKLPTIGWVKTYEGLPHTTCKSMTISRTADSWYISFSYEKECQPTIKKHDAVGVDLGVKELATLSTGVTFPNPKHYKQNLAKLQRLSKIYCRKAKSSNNKHKAKIKLARHHAKIANLRKDTLQKITTYLCKNHARIVVEDLNISGMLSNHKLSQAIADCGFYEFKRQLEYKAKKFGSEIIIADRFYPSSKTCSRCGHKKEHLSLGQRIYHCENCGFEMDRDLNAAVNLSRLAKACKSTEG

SEQ ID NO: 12958 - protein, 467 aa, Bacillus sp.
MIFNRKIKLETSKEIESVLDGQSKMCNWLYNQLFEAVEEDYKNGKKRKFLNGRNLRNEVPKIKEKHPFLYKVHSSPLKNAALRLKEAYDRFFDPELDNQKPTYRSWKRKWFSLFYDEPNKGFKLLGENRLRITLGKLTEEEHRKAKETDKKAKRQIEIVIGLKEAFQLDEDEKVKTLRITKDLNGYYAVFTVEKITEAVKVKENSFIVFDPNHKNLAVGMDHEGKSYELKALSSTLRYWDKRIDQLKSKRDKCSIYSKLVVTSTSSYWKPSKRWSYLNRALERAHMTRREQIKQVLYSYAHYFSKRYDHILIGDYVPTPDVAKYGSMKRAMLNQTPIGQFRTILEWVQEKNNKHYTKVDEYNTTKECCACGYMENKEPDVRVFTCPKCKTKMYRDINSAVNIGKKARKLLPRLGYVGVENPTYTVEWNWKRQAIVRGKFRLLARGNESLGENKENTSVEEEFLRAII

SEQ ID NO: 12959 - protein, 337 aa, Chloroflexi sp.
MKQKKAYKYRFYPSDEQKHILAQTFGCCRYVYNWALRQRTDAYYQHGERLYYEGTAHRLVTLKKQEETLWLNEVSSVPLQQALRHLDKAFRNFFEGRADYPTFKKKRHQQAATYASNAFSWDGHHLTLAKMDAPLPTTWHRPLPDGCKPSSVTITKDDAERYFVSILVEEDMKPLEVTPKMVGLDLGLKSLVITSDGHTHGNPKFFARDEKKLAKAQRRHAKKKKGSKNRNKARLKVARVHKKIADRRRDYQHQLSTRIIRENQVVCVESLQVKHMVKNHSLAKAISDVGWSEFTRQLEYKAEWYGRTFVKIDKWYPSSKQRTFWPRGSRLLPVERP

SEQ ID NO: 12960 - protein, 386 aa, Streptomyces sp.
MKVVVQVKLLPDAVQAPVLERTLPAVNEAATWVSVVSFEHFGLRGSVRRLRKLCYGKLKARGFGAQAAQHIIKRVADSYTTLRANIRAGNLGAQGSRSRRKAESKPIVFRPYAAHTFDDRCLSWNYDQQTVSIWTLDGRVKKVRFACSADALKQLTGYRQGESDLVCRDGKWFLIATCEIPEAPRFEPKGWIGVDRGINNLATTSDGANYSGRRLDRYRRWQARKKAELQAKRTRSAKQLLKKRARREARHAAHINHKIAKIVVAVASRTERGIALEELGGIRERVTVSRDQRARQSSWPFRQLGSFIEYKARRAGVPFIEVDPAYTSQRCPRCGHTEKANRPTRDSFRCRRCGLAGLADHVAGVNIAERGATAWVFVNVPVPDTA

SEQ ID NO: 12961 - protein, 401 aa, Streptomyces sp.
VRDAVADITANREAAKTKVRRAISRLDISDAEKKRLYTALKRDQWTSEPYLRRMMRKHWRRGRNKTANQIVVRCDQYRTFTLGPGGNVWLAVPGLQRRQLVKIPLSTTIAPTGTLRLILRSGRVEVHYAIDTAGMKSSQRPCGTRKVGVDKGYTEALTDSDGEHHGTELGELLTSESDYRKVKGQRRAKLRAVAEKAEKRGDPAKAKRIRDNNLGTIKRDRRTTAWKCRVRDITFKAVHAVVDKANIIVAEDLTKTFSSRKQLGKNTNRRLAAWTKGITAEALSAVSGRRGSAVRLVNAAYTSQAVPFTDILGVRKGDRLYCTECGTVWQADHAGAINIEQRDGDPDITLYTPHTRVKQILFDRADRQRSELLLDQDSSTRQLCRCGERIIRPRCSTPSNE

SEQ ID NO: 12962 - protein, 405 aa, Halobacteriales sp.
MEINRTAVVKLSVPDDRRSDLKRTMNTFQDAAQRFVDRGWDGDDSGYVITAGNHLQRLIYDDIRDETDLHADLCVGAANHAADVLSSVVERMKDGERTSKPAFTSNTTVYNTNAITYFDGYCSLAAYGGGRVHAEYVYPDDSVQAEYMESDEWTKQGAKLRYDYQIDTYYLHVSVKQEREETSEEAGNQTVLGVDRNVDGYLAVTSTGAFIGNADLLNHKRREYERRRARLQQQGTRSAHLTIQSIGDTFANWSEEFIHQASKELVNEAVSQGCTTIVFEDLKGIRNGISDTSKFQQWAFNELKRQVEYKSKAGGLSVETVHPQYTSQRCSKTGCGFTHEDNRDGDEFACQKCGKELHADYNAARNIAHKFIQNRHKSGSGGATYHLALKSGTVNGNGEYSPSTV

SEQ ID NO: 12963 - protein, 443 aa, Halobacteriales sp.
LFEWLAAHAPLWNQITYRRRQQYFAEDGDIWDVEYTDLYAQYAPVLGKATCQQLARKNSEAWRSHFELLSQYHDELYPSVTEKPSPPGYWGSRDDGYELYGLVRNDLYTFDWDDHRSTLEFGVGSVLEDRYGFEHNERITLEVRGKPHWRGDDSRLELIYDEHADQLRVQHPVRIQSDDLREQRQAAFTHTLDSENTTQSAAIDVGANNTLAVVTEDGDTAVYHARPEFERFQTQSTRIATLQSQLPEGQWTSTRIKRIYADRSRKRDHSRDAAVKHAAEWLLDRNVETVYVGDLTDVLATHWSADVNEKTHAFWSHGELTNRITLTLGDVGITVTEVDEYDTSSQCPACASETVTRDGDSFWCNDCGLEAHSDIVGAWNILQSEVGPMARPAALSAERDRDAPTDGAYWQWNDHDWIPADFGEQSRSLDQPSVSKPASSQPG

SEQ ID NO: 12964 - protein, 440 aa, unknown
  TnpB Polypeptide
MHIHRTYRAKILNHRQVEDSLDRHGWSASKLWNVANYQSRQVWEDTGEIPDDSDLKRELKTHSKYKGLHSQSSQRVLEELAEAFNSWYGKRKTDSRANPPGYRKRNYYDSEGHRVHEEHPRSTVTWKQKGIRHDTKNGRVRLSKGANHKEHPRAWEYILVDYETRPEVTVENLQQVRAVYDKAKRRWELHLVCKHEVETSDAPGDETAGVDLGICNFAAVAYSTEEADLYPGNRLKQDGYYFPKEIAKCDDSGGEEATRLHAKWSERRTHFFHSLAKRIVERCVEQEVGRINVGKLAGVRDDENGESKNWGKHGNLDLHGWAFDRFTSILEYKAKVEGIEVVEVSERDTSKTCCVCGREDESQRVERGLYVCEEHDEAFNADVNGAENIRLDINNSESNSESSASLDGDRSTGWLAQPGVYLYDLSSGFQPQAQVADCKP

SEQ ID NO: 12965 - protein, 306 aa, unknown
  TnpB Polypeptide
MRNFSNLRTPRNSFVGVCQNQSGFKLILTGKRCQTLKLSKIGNIRIRCHRKTEGDIKQVVIKKEQSGKWFAFLITDEQKEIKQKEIRKVVGIDTGLIDVLWDSDNVKTPNPKYLNRYAERLASCQRRMSKKKKGSNNRDKFRIRLARRYEKLANTRTDFVHKVTRYYADNYDAVGMEDIDYSTIARGRFGKSFLDACCGQIRQQMAYKVESTGGRFVAVDYKGTTIRCSQCGTEVRKEIWERTHNCSHCKISIPRDYNSALEIKRLTLIEIRQELSESTPEEMIALHHKVQQLSMNQEALTSTSQC

SEQ ID NO: 12966 - protein, 361 aa, Cytophagia sp.
MKSLKIRLELNNKQKTLALKHAGVARHAYNWGLDVCNKAFENKEKRPTGIDLHKKLVAEVKSKYDWYYEVSKCAPQQALRDLDTGFQRFFKKVSKYPKFKKKGRKDSFYLEGNIEVKKNRIKLPHFGWIKLSEKIKDVKNIKNVSISRQADFWFVSFKMEHQTQKIRFKKHSFVGVDLGIKTLATLSNGMTFENRRPYKIYKRKLKIEQRKLSKKFQKGKKEQSKNYYKQQKIVAKLHYKIACIREDALHKLTSYLSKNHEKIAIEDLNVKGMSKNHKLSSAILDGGFYEFRRQLTYKCEWYGSKLVVVNRFFASSKICSNCGHKKENLTLKDRVYHCEKCGLRIDRDLNASVNLAKQVVS

SEQ ID NO: 12967 - protein, 295 aa, Streptomyces sp.
MPAGPRGDPARPPRRGQLSPGCGRSSRFSFMDTPGFGRGRKRSSCGAGQGKPVRRQGRPESTPNCGRCLAEPLGIVRPRPLAEGAPPSTVTVSQDAAGRWYVSLLVEDPTVQPLPAVETAVGVDIGLDHLLPLSTVEKAAKAYAHITGRRRDNLHKLTTRLVRENQTIVIKDLTVRNMVKNGKPARAISDAAWAEFRSMLEYKAHWYGREVIAVGRWFPSMRLCSVCGTLQDKMAPNVRTWTCDCGTTHGRDVNAARNLLAAGLAVSVCGAGVRPQRSSPGGQSAMKRKTPRREP

SEQ ID NO: 12968 - protein, 376 aa, Sporosarcina sp.
VPKSNLKHKASKFRIYPNQKQITLINKTIGCSRYVFNTYLDLWDKTFKKTGKGLSYGKCSSKLTQLKKSVTWLREVDSIALQSSLRDLADAFDRFFKQQNKYPKFKSKKNPVQSYTTKMTNNNIAIIGDKIKLPKLGLVRFAKSREFGGRIINATVRRTTTGKFFVSLLAEEVIQEIKPTHSTVGIDLGLTDFAVLSNGEVIKNSRHFRKLEIKLAKAQRVLARRAKGSSNWNEQRIRVAKIHEKIKNSRSDFLHKLTTNIIKNHDVIGIEDLRVSNMLKNKTLAKSISDVSWTEFRTLLEYKANWYGKTVIAVAKNFPSSQLCSCCGNKNKAVKNLAIREWACSSCNTKQDRDLNASINIRNEALRLTVGTTEIA

SEQ ID NO: 12969 - protein, 357 aa, unknown
  TnpB Polypeptide
VRQTFQFKLFWCKRLRHLYRTINVAAEIWNHAVALHRRYYRLFKKTLPKARLQAHLAKLRNGKMPHWKAVGSQSVQAITDRLYLGWEAFFRGDIKRPPTFRKRRKYRSFTLKQCGYRVLGHGRIRILGRNYRFNQSRAVAGIIKTLTVRMDALRDIHITFSCDNVPQPAEAPKTGLSAGADFGLKDFLTLSTGERIAAPQPLKARLRRLRKAGAALSRKQKGSKSRNRARLDVARLHRKVANVRSDWQWKQARMLLVMFDILVFETLNIKAMQQLWGRKVGDLGFADFLSKAGWMAKKLGKDLIKIDQWEPTTKSCHLCGYRQDMPLITRTFQCRSCGNVEDRDLNAAYNILEAGRF

SEQ ID NO: 12970 - protein, 393 aa, unknown
  TnpB Polypeptide
MYKAIKYRIYPTNSQKELIHKHCGSVRFIYNLALEAKTMAYVGSKVNLSRYDLQKQMVDLKKELPWLKECNSQSLQVALLNLDTAYKSFFKGGGFPAFKKKSNRGSFNVPQNIIVSDNQLIIPKFKEGIKIKLHRDIVGTIKQCTVSFTPTGKYFVSILCNTGKEKPSKPKITEANSVGIDLGIKDFAVTSEGEVIQNNRFLKNNIERLKVLQRRASKKKKGSSNRKKANKRVALLHEKINNQRQDFLHKTSSRLVSENQTICLENLCVSNMIKNHCLAQAISDVSWSEFNRMIEYKADWYGVNLLRIGRFAPSSKTCECGVINKDLKLSDRVWECKSCNRVNQRDLLAARNIKKFALNNISGQELSEEPVESPTLVGAMKQEAQPIGSAVGG

SEQ ID NO: 12971 - protein, 408 aa, unknown
  TnpB Polypeptide
MLRALHYRLLPTKRQHRALESILESQRQLYNAALEERIDAFRKARITRTYFDQTRALTAWRQDDAEARALPANLQRETLKRLDTAYVGFLRRTKKTGKVGMPRFKPQSRFHSFGFRSFSGITWAAGRLRFKGFPGGLRVHLHRPIPVDAVIKCCNFRRGVKGWFVGFVVELPTPPLNPVSRAVGIDLGISSFAVLSDGLAIPSLRAARQAERKLRILQRAVSRKHIGSKGRRKAGIEVRRCHAATRRRRLNHLHQSSALLVRNYQAIAVEDLPVGALSRGIFAKDVRDASWGRFISMLRYKAENAGARIIFVSHMNTSRNCSSCGASVPKALRDRMHSCPQCGLSIDRDLNAALNVLNRAGVGPGLRNVANVGMRAGGNLLPFGSDLVAAQDESLPPVQSHLACCCCE

SEQ ID NO: 12972 - protein, 418 aa, unknown
  TnpB Polypeptide
MNYNYRYRLKPTERQRETLDYHRDTCRQLYNHALYRFNQIPEDEGTVKQRVRTIRDELPNLKDWWNELTDVYSKVLQPTVMRISRNINSLGKLKEHGYNVGELRWKSPREFRSFTYNQSGFELDKKSGQTVLSLSKLADIPIEVHRSLPEAATVKEVTLKKEKSGEWLAIFGIEMDVEPPPKPSLEEIDADEMVGIDVGILKYAHDTNGTAVESLDLSDERDRLEREQRALSRKEYESNNWEKQRQRVAECHLRIKRKRRDFLHKLSAYYAREYEVVAVEDLTVKEMLESSRNGRNTASAAWNTFTSMLAYKCEREGTHFVEVEPRGTTKECAKCGVETEKPLWVRKHSCPACGFEADRDANAAWNILSRGRSELGVGHSEGTPVETALPTDTNSVSAKRVVEAGSPYLKEPPKAASR

SEQ ID NO: 12973 - protein, 369 aa, unknown
  TnpB Polypeptide
MKKVLDDLCDYRRYCWNQGLALWNDMYDSALILEDKTLKPSERKVRDELVANKEDWQYQLSARCLQLAIDDLGKAWKNFFDKAMPDWGKPKFKSKKAPRQGFKTDGAKIVKGKLRLDNPRGITNWCDIRFKGAKSLDGDLKVVSIYRENGKYWASLPFEADVVKKVKTNQKTAVDLNVGHFDYTEGQVKTLPRNLSALYKRIKHYQRLLARKRMVSGKNAVQSNNYAKTKAKLQRDYRRVANIQRDIIQKFTTKLVTDYDKIAIEDLTVKQMQMSHVASKGLHRSLFGYFRQVLDYKCQWYGKELFLADKFYPSTQRCSRCGFVKTGEDKIGLDGNMKRKTKHNEYICYECGAIMGRDENAVMNLLALI

SEQ ID NO: 12974 - protein, 397 aa, unknown
  TnpB Polypeptide
MSRYRLLPTPTQEAVLRSHCAHARFVWNLAVEQHQHWHPGRKSAPGYLEQCRQLTQARAEHSWLAEGYQMVQQQALRDFAQAMTAFFDLQNPAGRPSWRKAGRHEGFRIVGRGRQWNIRRVSRHVGEVRVPKAGWVRFRWSRAVPRGVKSYRVTLDRAGRWHISFAAIPDRIQAPCNGRVIGIDRGVAVSAALSTGELLHVPSLTGRQRTRLRRLKRKLARARRGSTRRKLVKHRIARLQARETDRRKDWVEKASTRLAREFDLIRVEKLNVHAMTRSARGTAEAPGSNVRAKAGLNREIMRSGWGRLMRRLEDKAPGRMEKINPAFTSQRCSGCGHVAAESRKSQALFACVVCNFTVNADVNAARNIAAGHAVTARGGDGNARPVNREPHLLLQPA

SEQ ID NO: 12975 - protein, 370 aa, Lachnospiraceae sp.
MGEQVMNRAIKCRIEPNKGQRELFDKTFGSCRFLYNRMLSDRKLSELTGERTEIRPASYKKEYPWLREVDSLALCNVQLDLEKAFRDFRKVKGRGYPGYKSKHHSRRSYTTNVVNGNIRIEGKMIRLPKIGMVRIKIHREIPEGWKLKSVCVSKEPSGKYYASLLYYVPESENQAEGTVKEKRYLGIDYAMDGLAVMSDGTRAEYPKYYRQAEAKLAREQRKMSRCVRGSRNYEKQKHKVAVIHEKVKNQRKDFLHKLSRTLADEYDVIGVEDVDMKAMSCGMHFGKSVMDNGYGMFRTMLTYKLEEQGKELVKVDRFFPSSKLCSRCGRVKTDLTLSDRIYRCTCGNCMDRDVNAAINIRTEAMRLKVS

SEQ ID NO: 12976 - protein, 372 aa, Clostridioides sp.
VIAVKKAYKFRLYPNKKQQELINKTFGCCRFVYNKYLAKRIDVYKNNKETFTYKQCSSDLTNLKKELKWLKEPDKFSLQNALKDLDNAYKKFFKEKAGFPKFKSKKINRFSYKTNFTNGNIMYFSQHIKLPKLGMVKVRDKQVPKGRILNATISKEPSGRYYVSLCCTDVDIEAFENTNNHIGLDLGIKEFCISSCGEFIENPKYLKKSLNKLVKLQSELSRKTIGSLNRNKARLKVARLQEHIANQRKDFLQKLSTKLIKENDIICIEDLQVKNMIKNHKLSRSISDVSWSEFIRQLEYKANWYGRQIVKVGKFFASSQICNKCGYKNEEVKDLNIREWICPSCNETHDRDINSSINILKEGLRLITIQNK

SEQ ID NO: 12977 - protein, 363 aa, unknown
  TnpB Polypeptide
MPSYLRRSAIQHALGSVSSYETRIGLWKSGKLTGKPKLVCENHAMPVFYRDVMYRNAEESDDFAYLKLYDGHDWKWFCVNLLHTDMEYLRKNWSGVKASAPTLEKRYQKYFLRFSYTEEVALSKADVKNQTVCSVDLGINTDAVCTIMRADGTVLGRKFINFPSEKDRMYRVLGRISRFQKIHGSRQVKSRWAYAKRLNMELSRKVAAAVTIYAMESHADVIAFEYLEMTGKKSGKKKQRLHVWRKRDIQTICEHQAHRAGIRISRVCARNTSRYAYDGSGPVLRNPGNHRLCVFQTGKQYNCDLSAAYNIGARYFIREHLKTLPETERSLLEAKVPAVKRRTSCVYVDLRTLSKELGNLTAA

SEQ ID NO: 12978 - protein, 381 aa, Pseudomonas sp.
MANRAYKYRFYPTSEQAQLLAQTFGCTRFVYNYVLRWRTDAFFQRQEKVGYLEANAALTRLKRSGEFPWLNEVSCVPLQQCLRHQQSAFKNFFSGRTKYPAYKSKKHRQSAEFTRSAFSYRDGKLYLAKSRTPLDIRWSRPLPSEPSTVTVSRDSAGRYYVSCLCEFEFEALPVTPKMIGIDLGLKDLFVTSDGERIGNPRHTAKYAARLAKAQRRLSKKKLGSKNRSKARLKVARIHAKISDCRMDRLHKLSRRLINENQVVCVESLAVKNMIRNPRLSKSIADVGWGEFARQLEYKGEWAGRQVVAIDRWYPSSKRCSCCGHTLVRLPLDIRSWTCQECGTEHDRDVNAAINIRAAGLAVLALGENVSGIGQVPLSSSL

SEQ ID NO: 12979 - protein, 535 aa, unknown
  TnpB Polypeptide
LVPYIPTAPVDHGCSASHPITWHRSACSLAGYSSVATPSDDPVPRRSTRATAYPYSPHSRSYSGRYDAVASSLRYGSASSTTGAARPSSAPSGRNRLTASRTPSSIGIQTCRSAMRTRRGGLPRRQQESTLHLLHHASFTLAVTPGCDNQVMRRAYKFRAYPTRRQEQRAQALLHAHRHLYNAALEERREAWRHGVTIRYGDQSAQLAEIRRADPDRQGRWSFTSQQQTLRRLDRAFQGFYQRVQAGRRAGYPRFKTAARWDSVDFVDGDGARWRDPEDRWAAAYFQGVGQVKVKAHRPVVGRVKTLRLKREARRWYVIVVAEQQPIPLPATGREIGLDVGVARFAATSDGQVVANPRFVAAIAAELAAVQRSVAGCRPGSGNRRRAKRKLAKLHRTVANQRRDFHHQTARKLIDTCDVIAVEDLAITNMTRSASGSVQAPGRNVAGKAGLNRSILDAGWGQFLAILLAKAEGAGRRVVKVNPRGTSITCCLCGARCARPRQDTVVCPVHGCMDADLNGACNILTRAGLGSGRAA

SEQ ID NO: 12980 - protein, 384 aa, Lachnospiraceae sp.
LLKSFKTEINPSKEQIVRINKTIGTCRYVYNFYLAHNKELYDKGERFISGKSFSVWLNNEYLPNNPDKQWIKEVSSKSVKKAIEDGCAAFTKFFRHQSGYPKFKKKDKSDVKMYFVKNNPKDCACERHRINIPTLGWVKLKEKGYLPTTKDGWTIKSGTVSKKAGRYYVSALVEIPDARMADNTNEGIGIDLGLKDLSTVSNGRVYKNINKSGRVRKLEKQMRREQRCLSRKYENLKKGEVTQRANIQKQKLKVQKLHHKLDNIRTDYINKTIAEIVKTKPSYITIEDLSVSGMMRNKHLSKAVASQKFYEFRTKLKAKCDENGIQLRIADRWYPSSRICHCCGAIKKDLRLSDRIYKCSCGYIEDRDYNASLNLRDALTYEIA

SEQ ID NO: 12981 - protein, 390 aa, unknown
  TnpB Polypeptide
MSRKTFKYRLYPNKEMTSKLYWTLDRCRELYNAGLSERRDSYKYTGKGVTCYEQINDLPEIKEMRQEYKDIASHVLQDVLKRLDKAMQHFFRRVKQGEKAGYPRFQSMDRYDSFTYPDLAGWKLEGNQLHLSKIGIIKVVLHRAIQGKVKTVTVKREGEEWYVCFSCDGVAAEKLPVCYEEVGIDLGVSHLATLSNGVMIEHPRYYRRAKKKLEQVHQAVSRGKKGSHRRTKAKQQLSKAYRKVRNQRRDFLHKESRKLVHQYQVIVFEDIKARNLTRKPKPKQDETGKYLPNGAAAKSGLNKSILDASWGMFVAMCSCKAEEAGRTLLKVDPKYTSQICSQCGTVRKKDVSERWHSCECGCELDRDVNAALNILARGKQTLLVGTQPTP

SEQ ID NO: 12982 - protein, 409 aa, unknown
  TnpB Polypeptide
MPLITLKAQIHADSRIEAVLKDAMFCATKVYNGLLWHLRKEYKETGRVNISRKNLNRILKELPRTKGYYSMSVQLTRDEVREAYKSFFVLKKKGLTQHQVPGFRRKGQFSPLKYVQSGFKVEGEKVTLSLGTGREDGVRQVSFRISHRPGVEYERVQELSITYDKISGRIEARLVVEVKARENNGTGRAAVDLGETILMACAFDDGTATLYSGRLIKAIRRYWQKVRASLKQNSRRWREIAHREKKQVEHLLHVATSHLIAECVRRGVKEIAIGNLNGIRGSVDYGDRLNQRLHAWPYRKLVNMLKYKGALAGIIVRDDVDEDNTSKTCHSCRVIKTSNRKRRGLYACSCGWKAQADVNGALNIYERVFQVSPVKGSSGRVARPVVVSYHLGWHGVVEPKRRTDLRASA

SEQ ID NO: 12983 - protein, 543 aa, Rhodococcus sp.
MMATAAPADRSADIAAPDPSRLVIRAYVYVLDPTPVQVEALRSHCGAQRFAYNWALSQVKANLDQRTAERSYGIPDAELTRPMSWSAYSLRKHWNTVKNDVAVNTDTGKVWWPENSKEAYSSGIANCAAALSNWSDIRSGKRKGSMGFPRFKGKRALLSCRFTTGSFGLVIDGGDRRHIQLPRIGVVRSAESTRKLARKIVAGTARIRSATLSYRRGRWQVSFSVETTLPARALPPATTRTAAAVGDRAVGRSVVGVDVGVKHLAVLSTGEMIENPKHARKRAKRLRRLGRRASLRVGPDRRTGQQPSRRWLRTREQIRTVHARIADSRRDHLHKLTTRLVRDFDTVVVEELNIAGMTRSGGVYKRGLNRALNDAGLAEIRRQLMYKTEWTGTGLHVADRWYPSSKTCSNCQVVKAKLPLKVRVFTCDACGFRADRDHNAALNLAALAAIVDGGASSASCGRDVKDARQKPTIRPAARRADGIAAGTPHSGERGRGNPAAHAECTNDTQRERYRLAYSSSFAGRTTKPTANVANASMVPTNEL

SEQ ID NO: 12984 - protein, 257 aa, Escherichia sp.
  misc_feature (217)..(220): Xaa can be any naturally occurring amino acid
LSGLTKTSSGSGLLFPDSKKRGQNDAFRYPQGVKLDQENSRIFLPKLGWMRYRNSRQVTGVVKNVTVSQSCGKWYISIQTESEVSTPVHPSASMIGLDAGVAKLATLSDGTVFEPVNSFQKNQKTLARLQRQLSRKVKFSNNWQKQKRKIQRLHSCTANIRRDYLHKVTTTVSKKHAMIVIEDLKVSNMSKSAAGTVSQPGRNVRAKSGLNRSILDXXXXVQAALAWRSGACCSASVHKPALRVLWSYSERKSPVTK

SEQ ID NO: 12985 - protein, 463 aa, unknown
  TnpB Polypeptide
MKRTITNNYILENNIDDIEKLGQDFASDINYFYSRFSGVKNLNNLNFREIRDTILKELDHLNLTSHYLQRCLNTALGNIKSMWSNTFRFIKSNISANKNLTKEEKHFLLIVIKITPFVDYVVNTNKSFNELLKSKYFSNWKKKNPTYIIDERKIRQYLKRQIRKLKSKIPYTKKKFFKINSFLYNFKNNKFYMTNPYKKRNRFELVSVNKNTYKSEATVHFNGNKVRIGFPIDVKQKKLNNDMVNEIGIDKGFIDLITTSNNTTYGQKFCDIVKPHIDKYLETQKERGKYWSLYHKYKDTDPKKAENIKKNNLGYIKFNKNKNLTKETKKKFINNVINEFIKNEKPTEIIVEDLSWDKKSNKKRYRLGYDLSSWDKGYLQERIEFKGYENSITVTKVNPAYTSQICSCCGKIGERNGKQFRCDSCKTVLDADYNASINIKNRKETSIKTYMKPSEVLEILGLV

SEQ ID NO: 12986 - protein, 375 aa, unknown
  TnpB Polypeptide
MKKTAIKVRLIPDEKQQRLLWMHAGTRRYAYNFAKNYSESYYKEHGKSISAYDIRKVFISQYDEIPWIKDVCKVAACEAILDYGKARDKSFKDFEDGFHTSFKSRRDLYQGFAVDARKIKIDGKVYLPKIGWISVNQTPKRRKYGNARVVFDGQFWYLSFVLEISEIEVELTDEVIGVDLGLKSLAVVSNGDIYENINKTKKVKDLEKKKKSLQREMSRRYKEGAKVQSKNYMKSKKEHLRVSRKLTNIRQNHLHQVSAAIVKTKPKAIVLEDLKVSKMLKNKCLAKPISEASWYTMRQFITYKAERCGIKIVLAAEWFPSSRLCSNCHEKFNEVEQGRTWGLDIREWICTCCECKHDRDLNAALNLKWYYDNQV

SEQ ID NO: 12987 - protein, 407 aa, unknown
  TnpB Polypeptide
MLIYEYKLDARKEQFQAIDNAIRLVQFIRNKCIQLWMDGDGALQNDLQVYCSTLASQFDFAKSLNSQARQASADRAWFAIVRFYDNCKNKKPGKKGYPTFQHDNRSVEYKTTGWKLEPDGHHISFTDGCGIGRVRMLGSRDLESCPLPQIRRVRIVRRADGYYVQFGIHAYREVEHVPTGKHVGIDMGLNAYYTDSEGTTVDNPRYLHKAEKRLKRFSRKHSKCAKKSHNRKKAQKKLAKAHLKVQRQREDFARKAANALIPSSDMVAYEKLSIHNMVKNPHLAKSISDASWGAFLRWVNYCGAIQTVPVIPVAPQFTSQDCSACGNQVKKSLSVRTHICSKCGVVLDRDHNAAINILDKGLMVLSGRQEPVRRASHETLLDSPASTGSSRGELSKRTGRKKNSPSF

SEQ ID NO: 12988 - protein, 282 aa, unknown
  TnpB Polypeptide
VRRVSIRFAKDSWSYKKAVGSAAPVKLALSLPGGRREVWIKPHKRFWLYLWKVLRKEAELASTLMLKRRGKWYAIFAFDVAPKRKPPAEAVAFDVNENIVAAARLSLLATVNRIASWNRQYVNPAVYSIETDFGRLAKRYEAVRNAKLEELKRKYPFAGRDEEERRQNVADTREFRRFTRRLREGRRKEGRVRQIAREMTKSPAVTITEELGKNPQEEMIGVEKKVKKRELRHRIKQTPFRKILRAVEDKAREVGSAVFYVSSFRNSKVCPIHFPKLEDGDD

SEQ ID NO: 12989 - protein, 456 aa, Lactobacillus sp.
MIICSAKGGEVMKRTSSLKYHFGIKLRFYPSDKQKEMIKQNYGAQRFVYNQYVGAGRLIYHVKNASKVAQVNSGIPFMMRPMTKYEVDQAQTMLETQELIAKHKNIRDKYEFLRAKEIDSLAIANAIQNYRKAWKNYHQLGYGIPTFHKKRSDWSYQTNCTYPGAEEAYLDNGSVRFIDTKHVKLPKLGNVRISGLRPVIKDRLLKHVATRIGTVSIKKTADDQFYLYLQLGSDIAFTKKYAKTQSQIGIDLNLDNFLTTSNGAMVANPRFYRKSQRRLIQAQRVLSRRLRRAKKEGRSLRAAKNYQKQRLVVAKLHDKIRRQRQDFLHVLSTALIKNHDLVVAEELRSKNLLKNHALAQSISDAGWRTFLTMLEYKANLYDKDFITIDPKYTTQRCHHCGSIMGQNGHKKLTLNDREWTCPICHKEHIRDWNAAINILEKVQGIWSNHTRMKKAA

SEQ ID NO: 12990 - protein, 397 aa, unknown
  TnpB Polypeptide
MLKAYKYRIYPTKSQRTMMERTLDLCRWTYNQTLAYRKNAWEKEGKSISKYETNALLPIWKSDKPELKDVYAQTLQNVQERVDLAFKAFFRRVKAGEEPGYPRFRGKGWYDSFTYPQPEKGIKVLAEKLHVPKIGDIKIKLHRQIEGRIKRLTIRKAATGKWFACFSVEIEDLPKPPWKDGSIVGIDVGLASFATLSNGEKIPNPRFFRDEEKELARVQRKLSKAAKGTLDRKAALKVVERVHERIANKRYEFVHQVSRGLVNRFGLIAFEDLNIKNMLQNHCLAKSISDVAWNMLVTVTSYKAENAGSIVVLVDPRNTSKMCSRCGILVEKTLADRVHNCSECGLSLDRDWNAAINILRLGLQSLPINGKKPRPSRRGEVTQALLTSRPFLRRWVA

SEQ ID NO: 12991 - protein, 405 aa, unknown
  TnpB Polypeptide
MIVLRAYKTELDLNNVQKTTCLRHAGAARWAYNWGLARKMEAYRNGEKVPTAIDLHRKLNVLKRGELSWMYAVSKCAPQEALRNLDQAYAHFFRRAKEKKAGKKVQVGFPKFKSKKDGVGSFRLTGAIHVFENAIQLPRLGRLRLKERGYLPVEGAHVLSASLSERAGRWFVSVQVEKNRPELMETAKPVVGVDLGILALATISDGTRVENPHALKSDLNKIKRLQREVSRRQQGSANREKARQKSAKAHMRVANVRKNALHQVTSLLARTKSAVVLEDLNVSGMMKNHHLAQAIVDVGFYEFRRQMVYKGQWYGCKVILADPFYPSSKRCSHCGHTKVKMDLSERVYICDHCGLRIDRDLNAAINLEQLTTGSSPERNACGEDVSPGFQAVLVEAGTEQQSAAV

SEQ ID NO: 12992 - protein, 405 aa, unknown; identical to SEQ ID NO: 12991
  TnpB Polypeptide

SEQ ID NO: 12993 - protein, 452 aa, Deinococcus sp.
MTITLNHSLHPTDTQAPALDQRFDAAGAAWRLLALHARSEAAGEPLSMQEAAQRLRSQVRWPTGHGRIPQRSGAAWRAEFNPVADDEGWTALLGRHALDTLVAAFRRTLRDVGAQAPLSAISATPPSGLRLRALVRPVSSLCVEVVGVGPVLAPVFTLPGPAGLAVDVWRQQLGVRLRETRETLTRRLLAGDAQADEEYLRHVARYGEMEARLAVPLAAPCTGPVTLTFLEEAELEQCVRPGEPAQYRVHWNFRISDLAQPPDPGLIAVDPGIRTLYAWATRYGVGRFDSPLSGSWVAPLPAPLRGQVDRVLDVGLARLSRQELLHCRQVRPVLDAATSLFLGHRYLALEATDLAGMRRRQLDYPAFAEFSGLDLHMQFLREVVRHSDGIRQGLDIGPAGTTVDCAACGGANTMRYSGRLGRCTACGTRRHRDENGALNVYTRAARQLGWAA

SEQ ID NO: 12994 - protein, 457 aa, unknown
  TnpB Polypeptide
MAQEAAAQVRNDVYSALRTAHEQKEPIPSVKALREQMKTAPAGTALGRAKQVQHAIDDAYAMFRSYRSNFFAWAKDPASRPGKPRPPRFYRRGQRARMHFDYQEFKVLENRLYLPASMGLGPLPLVERNGEPLLNPDDRLVEVRVEPCRSRQWVHLDMVIRRAEPAKKLALAGSLLVDLGVKRLATCLDDRNLLAFFIGGEVAKAILRRGAKWHGQLAREAALGARHGKKGARALAARSARQMEDLMKKVALFLVTYCVANGIGRLAVGRNKDWKQEVNLGKKQNQLFTFIPHGKLIEALRAKCARAGIEFVETEESFTSKTDHVAHEEMGPKPEGYRWLGSRSPRGCFRSSMGFVLQADVNGCIGIGRKVGGEKWLGDFIERLGPSPGTRLVPRKLHVNGRHVPVLSPGVRTPHPRGLSSRAWISTKVALAKAGLIPGLQRVAPATHIPQVFPKAA

SEQ ID NO: 12995 - protein, 457 aa, unknown; identical to SEQ ID NO: 12994
  TnpB Polypeptide

SEQ ID NO: 12996 - protein, 372 aa, unknown
  TnpB Polypeptide
MEKKAYKYRFYPDNEQIELLAKTFGCVRYVYNYILKYRTDAYYTAKESVSYIGANARLTAIKKNPELTWLNDVSSVPLQQCLRNQQTAFTNFFAGRAKYPTFKKKNSQQAAEFTYRAFTYKDGNLCIAKCKTPLAIRWSRDLPSSPSTITITKDFAGRYFVSCLCEFEPVLLPVTDKVIGIDLGITDIVITSDGEKSGNPRHTRTYEAKLTKAQRKLAKKKLGSSNRRKAKVKVARVHAKLTDCRKDFLHKQSSKLVNENQVICVETLRIKNMIKNHCLSKSIADASWGELTRQLEYKSNWAGRTFVAIDQWFPSSKRCDCCGHIVEKLPLDIRSWTCPKCLTALDRDINAANNIKRQGMSLIAFGATVNPL

SEQ ID NO: 12997 - protein, 417 aa, Rubidibacter sp.
MITLTYEYKLKPTKQQAEQIVHDLEVCRKVWNYALRDRKDWIASRKCSIDACSLRSEYIIPANEPYPSFKVQCQRLTQAKKANLDLASVNAQALQQVLRRLDQAFERRQKLSAGFPRFKKAGRMRSYVFPQLGKVPLAQGRVKLPSLGWVAIRQSRPYPEGFVVKQARVIKRASGYYLMLSFQADIAIPGPPSVGHVVGVDVGLEYFLSTSDGLQVVRPKFFVELQRQLKLLQRRLKRKQMGSANWKKAQAKVARLYERIANTRKDFHFKQAHKLCDVADAIVVEDLNLIGLSRGVLGKHMLDAGHGQFLNSVLPWVAFKRGKAVVKEDARGSSQECPACGAVVKKNLSDRWHQCSCGCSMPRDVASGIVLRNRFLGRGAHGLENAPGDDLTGVPFGASSQVSVNGESPAIRKALAG

SEQ ID NO: 12998 - protein, 418 aa, Clostridium sp.
MLLSHKTTVELNNAQSNIVGHMCYAASKLWNACNYERRNYKTLGLAQYPDWYYQKKVHKDNFWFKQLPAQTSQEVCKLLDGAWKSFYKLQKTQGILNPRPPRFKQKPMSVTLQQMGIVHESGSDTIRLSIARQMKEYLRSAYNIHDNYLFLKNSIFKNMDTIKQIVIYPSVKDKCEVIVVYEIPDTAIMPDNGRYLSIDPGIHNLLTCYDSATGETFIAGRRYLSICRRFDKEIARVQSQWSMQQSRNGVKYPKSSKHISALQRSKKSSVRDYLHKATRAIVSYCEAQDIHTVVIGDITNIRRGKNFGSVTNQKLHALPYRKIYQLLEYKFSMKGITLIKQKESYSSQVSPLQPEVSKQYAVKSSRRHRGLYQDGDYSWNTDCVGAYNILRLHLQEKDPALIPDPFNIKIPYVLKVAV

SEQ ID NO: 12999 - protein, 488 aa, Clostridium sp.
LTESYVLTLKLNTSPEQDQWLAHVFWCGQQIYNVLVRHCRKQLRKLILDPEYRELLATRRKDNLSKKDKNRINQGLANIRRGYGLSEYQLHAYISVQQHRYQKYIDSMTAQKIASSVWRSVEKYLFDNGKCIHFRKYDDFDSLEGKSNTSGMRFKDGRLHWHWQVIQPQIRTDYDREALRSHVKYCRIRRKPMGTKYHYYLQLILEGRPPVKHSAGHGTAGLDIGTSTAAVVTEDSCLLTVLGSDAKDCSSQIRRIQRAMDRSMCATNPGNFLPDGTVRKGAQKWIRSKHYKRLQFRKKSLERRNADAVNASHHRLANEIASKADTVYVEKMFFHGLARRSKSATKKADGRFRSRKRFGKSIGNHAPAAFLKILESRLASSGGELIKIDTVSFRASQYNHVTDDYVRKKLSCRGSFIGSHYVQRDLYSAFLLKNSNDTGTAADRQKCIDTFPMFLITHDACMDIFLAENKKYPSSFGLRSYERYKCNC

SEQ ID NO: 13000 - protein, 208 aa, unknown
  TnpB Polypeptide
VGIDMGLTAFVHTSGGDSFPAHKYLRRLEEKLQRLQRRLSNATRRTPQYRKFLRALRKCHHRIKCQRNDFLHKLANGLLPRYDLLFIEDLKVANMSRRPKPKQDEETGKYLPNNASAKAGLNKSILDAGWGRFFQILRYKAEALCKSVVAVSPRYTSQACSACGQIVKKPLSTRTHRCSCGFVADRDFNAALNISRLGLESLFAGVAN

SEQ ID NO: 13001 - protein, 319 aa, unknown
  TnpB Polypeptide
MPSQVNQQVLRKVLKDWKSYFEALTAYRQNPERFKSQPKQPGYIKTPYTTVTFTNQVAKRSDIRGKMYITFPRCLVPVCVGKSEGSYVRTEVKPCYGGYMIYVTFQDAVKTPEVPKNPTRILGLDPGLDNFLTALTNFPSAPFILDGHWLKSINQNFNRKRAVLMSELTRGLDSTKSVKNSARLNRISKNRACQIEDFFYKAAHYILDFCLKNRVEVIVCGHNKDQKQGINIGAGNNQHFVSIPYARFFWILTCVAAKAGIPVIETEESFTSRASLIDNDPLPVYKEGKDAEYRFSGKRISRGQYESKNGTPDHEEKVV

SEQ ID NO: 13002 - protein, 398 aa, unknown
  TnpB Polypeptide
MQIKQAYKYQLRPKKEQENTMKRFSGCCRFLWNRALALEKASYAKEEKRLGYYKLAGLLKDWKKEEETEFLGEAHSQILQQTLKDLDRAYRNFFAKRAEIPKFKRRGIHDAFRYPQGFKIDEGNSRIFLPKIGWIRYRNSRKIEGEAKQVTVSLSAGKWYVSIQTEREVEDPKHPSEKVIGIDMGVARFATLSNGSCIKPLNSFRKQERILAKLQRRLSKKIKFSNNWEKQKRKIQKQHQKIANVRKDFLHKETTNISKNHAIVVVEELQIRNMSRSASGTLENPGKNVRAKSGLNKSILDQGWYEFRRHLEYKMRWRGGELRTVAPQFTSQKCSCCGKVDKASRRTQSKYKCTSCGYEANADHNAAINILAAGLAVTACGASKMLAMKQEPTCGRLC

SEQ ID NO: 13003 - protein, 463 aa, unknown
  TnpB Polypeptide
MTTVTRTLYATPCSLDAIRPVCKTMAFVRADLWRRYGALGNVGKSASDIRTEVTAGGWYADLMVDGTIRAETTKDVVNDILTYKAAACAKVRQAITKRTPDQAGRKHLYTLLKVDRWLEDRYLHRMMRKHFRHGVGHCDNQFIVRSDKHESRIANGRLVVTIRVAKKYGGDIVLTTTSSGKGVDLRGCNLRIILNGDVVEIRYATGKAAGRPCGSAEIGVDKGYTEALTDSDGTHHGEKFAAVLTAFSDAHTKTGKARNRLHALEKKHRKAGRIAKADRIKANNLGRVKLDARRDRAQKKLRNIAYQAAHSIVDKAAVVGSEDLSSPIRGKVQWKKFNRRMSGWAKGVLAQALDEVCTQRGATHVVVNAAYTSQMDSFTGLLEGKRVGDKFHRANGDVLQADFNAARNVRNRIQDQEITRYMPHLQVKQILLARSSGATERQEASVGRRKPRQRSADKSIAQL

SEQ ID NO: 13004 - protein, 386 aa, Okeania sp.
MDFESIHLKSLRIRVYPEKHLHQIWKKWLAASRYCFNQAIAKMRKHGLISKYDLRKVVLNNESLPDWIKESPYHLKVNAIYDANAAFKTSRKSGTKQPSCGKFRSIRDRIQSIKFRVEDFKKGTWLPSATKGLNILASEVIPTTNVEYQQKQKGGIYKTCVREQSWDAETQLVYDKKRWFAVFPKDFKPEISKSQSIIALDPGVRSFLTGFDGEKFIDIGKGDITRIFRLAQHIDRLISHKTALKSRQNKYKRQRLNKKINRLFIRIRNLIDEVHKKVAKWLTTEYRVIFIPTFESSQMVAKSGKKKRKLNSKTVRQMLNWAHYRFKQTLKFHGLKRGATVIDVTEEYTSKTCTKCGHVHQNLGGSKHFKCPHCSHSISTQNFYMN

SEQ ID NO: 13005 - protein, 265 aa, Streptomyces sp.
VTQQVKRELEERTRAWYGEQRRISYVQSSAALTEWKKTEELAFLAEVSSVPLQQALRHLQTAFGNFFAKRAKYPRYKSRKKSRSSAEYTQSRPLPQGSEPRTITVSRDAAGRWFVSILVEDTITPAPAANAAVGIDAGITSLVTLSIGEKIANPKHERRDRARLAKAQRDLSRKAKGSANREKARRRVAKVHARIADRRRDFLHKLSTRLVRENQTVVIEDLTVRNLLKNGKVARAISDAAWTDLRMMLEYKCAWYGRELVVIDR

SEQ ID NO: 13006 - protein, 520 aa, Streptomyces sp.
LRVSQTDAAVLREVGAFLGGLAARDLAVRCGQGVAHDAAAWAVRKRELTGPSSARWAGSITKATNDQWALARRGQVAEIVWLRGQITRIEARLACPLGARADKRAGQVRGYGSRAEWHAKARRLHALKDRLRTAEADWAAGRVHVVRGGKQLAHLRHHLGQAGLEQAAWRERWRAARMFLAADGESGKRFGNETIRITGNGQISIRLPAALAHLANAPHGRYVLDATVVFRHRGEEWADRIGANRAVAYRIHHDVSRGRWYVTASWQRAAVPALPIDAALAKGVVAVDMNDDHLAAWHLDVHGNPLGEPQRYFYDLSGSTQHRDAQVRHALTRLLHHTRRCGAAAIAIEDLDFTDGRSREKHGRNKRFRRLLSRFPTAKLKARLVAMAAEQGIVIVAVDPAYTSRWGAQYWQQPLTSNIRKPTRHDAAAVAIGRRALGHPIRRRTAPPPHDRSDRAGHRTAQAPPEVRRREEPRPRIPGPRTRCAPPGRGAKAGDQRAQHRSEHAAEQPSWQQDSIPLSL

SEQ ID NO: 13007 - protein, 595 aa, Actinomadura sp.
VGEAFGVGAAERGALPDRLEVGAGRADAGPGGEDRHRPVPGHGTRPGPGAPHGRVLPGVLDRPDTRSGTAGGPRRGRSDGDGPGGRRGGDRGRVRAERETPRAGSAAGRPDGRGDRGRAPRPPHRVRAGAPVRCAGGVRPQDRGDRRHRGRGRPGARHDRSSHLVLCASVRAALGQAACRSGLGRSGGGVTVRQGYRVELAPTPAQAARLGQHAGLSRVVENFCLEKVKAALAQREAEQSYGVAAADLTPVPWSAPALERLWRAEHAGRYPWFTAEGLSSRVPKEACRVRAAGFKNFFDSRSGDREGARVGFPGWRKRRHGSRFRYDADRARPVHQRAVHLPGIGKVRTREDMTWLTSRITGGAARVIGATVKEQAGRWWLSVQIEIDRTEVNRARHAPRGAPACGIDIGVKTFATIVDDDGTVTEIHAPKPLKAALRKLRRANQDLSRKAKGAANRAKAARRVAKVHLDVAHQRADFLHKTTTTLARTERAVAVETLNVAGMTRNRRLSRALSDLGFGEFHRQLAYKADWYGAQVWAADRWFPSSRLCGDCGTVNAALTLADRTWQCGCGTVHDRDVNAARNLLTAMQQDQQVV

SEQ ID NO: 13008 - protein, 428 aa, unknown
  TnpB Polypeptide
LKRVEQHVIKVNHSWFRYCDSITNHSRKLYNSVQYVQRQGFFYGHGTQSQPKLDKMFQATENYKALPSKVAQLVLQQSADAWKSFFEALKTYKENSSKFTGRPSPPGYAHKRNLVKFNTQAVGRREFKKGFLVPSMSPLSLPVKPGLKFEDLCEVRIVPKTGCFVIEVVYDAQDISGLSSSVNPGIAAAIDIGLDNLATIVFNQPSIQPIVVNGKPLKSANQFYNKQVAKLRSLLPSGIGTSRRIQNVVRNRNHFVCSYLHQCSRLVVNELLALGVTSVAIGKNEQWKTNINLAKKTNQKFVQVPHARFIEILTYKLEAVGIKVIVGEESYTSKASFLDWDNIPIYTPDSKTKNNFSGRRVKRSWYVAQDGSKIHADVNGAFNIGKKVIPTVFDSLKSIIQRDRGCLVVHPRRITPTFRRGHAQTGVA

SEQ ID NO: 13009 - protein, 432 aa, Lactobacillaceae sp.
MKRQSDKKTENAFIRTLVYRLYPSKADQVRFQSYCDYRRYIWNQYKDESDHAYQRYRYEKTYYAKLGMKVKAKDFCSKYPTLIRTKKQINHDKKAWEYQYPSKIALMAMTDYDNAMSNFINKAMPDWGKPKFRSKRNPRQGFKLPAKSFKLSGKTITVAKGRKDKKHGNLVLKTRQEFLDYPTGTVSFYMEKGRYYVAVPYIIPKEKLKSNTEFKGTAGIDLNVNHYNLYDGQHQVIDLNMKQLKFYYERIKHYQRLLARKRKFDKKNIGSHNYLETKTKLQRDYSRVVNIQNDFLQKLVLKLCQKYERIIIEDLDVKHMKMGISSKGLHRSMFGAFRHVLTYKCEQYPNELIVADRLYPSTQICSKCQYRKTGDEKITLWGNKKHHTKHNEYICYQCGAELDRDENASINLYQYLESKWYKEKSRTEKQTV

SEQ ID NO: 13010 - protein, 431 aa, unknown
  TnpB Polypeptide
MQLVEQHVISRTDSRFAAIDAAAFQSKNLYNAALYEIRQAFIHHGTYLNYGETDRRMQSHEAYKALPAKVSQQVLKQLDDAWTSFFEALEAYKEDPSKFTGRPKLPKYKDKTKGRNLLVYTLQALRGGRSKRGVRGLIRPSGLPIEVTTRQQHIDQVRIVPRNGFYVLEVVYSCEPPKSAVDPAYYAGIDIGMDNLVALTSNQLGYVPVLINGRPMKSTNQYYNKRKAELQSKLGHTGTTKRMERMTNKRNRRIDHYMHTASRWIIDDLVAHGIGTLVIGKNDGWKQEANMGKRNNQHFVPIPHARFISILSYKAELVGIRVMLTEESYTSKASFLDRDEMPVYNPEQTAKPTFSGKRVKRGLYRAKDGTLINADCNGSLNIIRKVAPDAFQQVEGVEDGKGHKPVVHPVRIVVAPLTKPKREILACNKTR

SEQ ID NO: 13011 - protein, 285 aa, Bacillus sp.
MKNKISNQEWKDLRTRQLYSRGDKSKKGNLNMRITVDDCGQGWLEIANPLGRTNGKTKSPRIKVPIMIPYRFYHQITNVVMGKQIGVNPKGKPIIEHQKYSVEIIRKQNEFYINITFDETEIGRVLDFKETPQSDVIAGIDVNPDRIAVSLCTKQGNFKGSKIFYLHNLNTFSTNKRATIIGQIVQQIKTRLLENNVGGIVLEDLKFQQSHDTDKYSNRNFHQFTYKKMLNSLIRMSLRNGFSVKTVNPAYTSVIGKLKYSQNFGISVHEAAAFTIARRGLELQE

SEQ ID NO: 13012 - protein, 351 aa, Clostridioides sp.
  misc_feature (129)..(200): Xaa can be any naturally occurring amino acid
MYPNKKQQELINKTFGCCRFVYNKYLAKRIEVYKNAKETFTYKQCSSDLTNLKKELKWLKESDKFSLQNALKDLENAYEKFFKKKAGFPKFKSKKINRFSYKTNFTNGNIVYCGQHIKLPKLGMVKIRXXXXXXXXXXXXXXXXXXXXXXXXXXXXXXXXXXXXXXXXXXXXXXXXXXXXXXXXXXXXXXXXXXXXXXXXRKTIGSLNRNKARLKVARLQEHIANQRNDFLQKLSTKLIKENDIICIEDLQVKNMIKNRRLSRLISDVSWSEFIRQLEYKANWHGRKIVKVGKFFASSQICNKCGYKNEEVKNLNIREWICPSCNETHDRDINASINILKEGLRLITIQNK

SEQ ID NO: 13013 - protein, 391 aa, unknown
  TnpB Polypeptide
MAPNSVVSRTYPRLPYAAFDKNGEPLNLDDVLNGIRADAGLVAHYALEEMTEQNLALVTYFDGIKPAEAGRQMNLKLPVEVKSLFKSGASRLERMFREQVVSNLRSWAARVEVMTQTHTKYVSAGWKRTASKSKPASMSPRLALSATDKGYHKNFSVTPERITLDMVVQGRWVTLHFPTPPQLLEVGCEPGVLDIWIDKNDRVVFGFHGQTDPGRPNFSERYVIGVDVGITNPAAYVVWDTEKKQVVERSLLGQRARSLSNKIKRGKTQVASLKRKGKDEEAVSHRQHLSNRRKELSIFIAQELADVSWRYSNAIVSFEDLSHIKNTMKHGRWFLGEIYRRTRDMVEADGGRAMKVNAAYTSRRCHVCQTDLDMNNYSEPRCTTCGITHHR

SEQ ID NO: 13014 - protein, 403 aa, unknown
  TnpB Polypeptide
VSPTDESLLRETISEWKEGCQIASDKAWECCHSKSDVQQLAYDDIREQTTLGSQHAILACHQAADNIKSCISCRRDGRKAGKPTYTSPTITYDSRTMTVFPEKEAVSLTTHGNHSRVRADLVLPDDDDGYQHQYVSSEAWESTQSTLHYRNGEWYLHLGFRKHRPHADKTETTENGTVLGVDLGVNEIAVTSTARFFSAGQLNHDRREFKRVRTDLQEHGSRNAHRTLESMRGRETEYVTHVLHAVANGILQEALNYDCDGIVFEELDGIRRRLPNAAWHSKWAFDRLYQYVQYKAESEGLFVDTTSPKNTSKRCAECGFVHGANRPSRDRFDCQNCETRNHADYNAAKNVAEMYLRREQQSSCRRGVSQYALKSGTVSPDQGFTPYPAESTDKPSPQQSQRA

SEQ ID NO: 13015 - protein, 413 aa, unknown
  TnpB Polypeptide
MPIRTYVFRLRPTRAQHAALETVLTDQRRLYNAALEERIGAWRNGKVSIGFNDQTKSLTRIRGFDESYGGVPYNISKWTLKRLDDAMKAFFRRVRSGQKPGFPRFRSAARWASFGFHQKDGLRLKGNRLLFSGGITDGIRVKMHRRLPDGAIVKSAIFTKEVGIWRAALSCEVPVSAANDGGTTIGTTIGIDVGVAHLATDSNGRHYVNIRAGGDRARRVRRAQRALARCRRASRGRGKVLARLKREQRSLRNARNTHLHDVSSAIARSASTIFVEDLRLRNMTRSARGSVAEPGVNVRQKAGLNRALADAAPGRLIQMIAYKAESAGGMMIRVDPRNTSTTCSSCGKMNAAQLSRTRYRCSCSLDLHRDHNAAINIRERGIIALHEAARGLGDANVTGCGERRPVNADPLAA

SEQ ID NO: 13016 - protein, 435 aa, Haloferax sp.
MTGPTPPVTGIIRTVKVKLDVPTERCDDLHQTKDQFLHCANRAADWAWRYPHDYCVTSYLEAHDALYHSLREETELVANLVQKGIRRGIEATKAGVERLKNGDKTSQPHFKAWSILYDKRSATFHRDRVSLATVNGRVECGYVIPREPDSTPIGNYLLNKEFEFRMATLQYDKSTESFYLHARMMQAIDEIDSSTPQSTDAKHQTVLGVDLNVDGSLAVTSTGAFIGNADEMNHRRREFEKTRGSMQQSGTRSAHLAIQSISNREHRWMQDQLHRASNLILEEAVAHGCTHIAFENLTDIRTRMGGVKRFHAWAFRRLYQYVAFKTEVLNVGIRQVNPAYTSQRCSKCGFTHKSNRRSKHRFVCQKCEYELNSDYNASKNIARKLVKQLHSGQTTSSGGAPSQCALASGTLNLNGEYIAYSSTEAEGESTDKPMK

SEQ ID NO: 13017 - protein, 564 aa, unknown
  TnpB Polypeptide
MVKSKEKKYLKTFSIHEKDLSLVHKFTHIILQYKHLENILNLLIAHEFNNKDNKVEVSKQKSKEMFSLLLNKIIMKAVLKSNPGGEKTSYNIAQVNNYFNSQHVNFELFNQAKLACFHLNDKNIGEIVGRLHKDWSNFFVTLKKFNSNKSNNNLQKPSYPKPKKLSKVYNYSVPLEVSKFSMAKADKGLLGINLGNKMVYVKFFNFNKDKFNGNKPQYLNKKINSVTVSLSHGHIYYNLQYIDEKQNLKDNIKNKDLDNFSKKEENSKIAGLDIGINNIASIFVNDNTTKSIIISGKELISYNCNFNKRLSKINEEISNEVIQYKEIINKQGNKQLIPEKYSQKGKLLQNRKSQLFERRKLYMDDYMQKLSKKITNYLCVNKVDSLVISRNLSFTKTTGEIKMVKKTKQKFYQIPFGRLLNLIKSKLTEKEINIVEINEAYTSKTSSLTGDIVKVQAKSKGKKEILPNDLNGSRGSKIKGNLNNPLGRGLFKDMVINKIINADINAAVNHIKVGINKLTINNIGYSNIKINKELSKYCNPIKIKSNHEFDKLLKTYQIVDIQKV

SEQ ID NO: 13018 - protein, 349 aa, Anaerolineae sp.
MYKGQYRLHSQTIQALAQKLEANVDTARELRKTEPEARYPYHPKQYQTATWKESAIHWTEDGKLLLSNGRNTPALVLPVPGEYLDADICRVELTWRANHYELCLTIDTGLVNPPLRESGQIAGVDLGEINIAAVCTEAGDALVVSGRALRSAKQLRNKRHSCLTALLSRCKPGSKRYRRLAKSKGRASAKLERQQRDILHKASRQVVEFCRENDVMALAIGDVRDIQDKVDLGAKINQKISQWTHGQFVKYLSYKAREYRMSVGQIPEDYSTRTCSFHGGVAKHAPRGRVYTCSGCGAVINRDVNGASNICSRALYGEYSKVQARTIMYLRPIKLGRCRAFDTGQSCLL

SEQ ID NO: 13019 - protein, 394 aa, Nocardia sp.
MRSAFKCRAYPDPEQAAMLSRTFGCVRLVWNKTLADRRQRYAACGQRVTYKESSAALTDWKKNPDMAFLGEVSCVPLQQTLRHQDAAFKNFFSGRSRYPRFKSRSGRQSAHFTRSAFRMREGELFLAKSGAPLRFVWSFDTDLADLDPTTVVVSREPDGRWYVTFVVDIAAGTEIAPTGSDVGVDLGLKDLAVFSTGERVGNPKHLERKARNLARYQRRLARKKRGSANRDKARRKVARTHRKVRNARADFLHRLSAKLVRDYDLIAVEDLNVQGMMHNRRLARAIGDSGWGELRRQIEYKAARSGRTVAVVDRWFPSSKMCSDCGNILEKLDLGTRVWTCPDCRTRHDRDINAARNILAAGRAVARDFPGDACGADVRRSGFARARSATKQET

SEQ ID NO: 13020 - protein, 259 aa, unknown
  TnpB Polypeptide
MAAMKKTEEYRFLKEADSIALQQSLRHLDTAFQNFFKQPKTGFPRFKSKKRNKNSYSTVCINGNITLSNGYLRLPKIGQVRLKQHRIIPEEYRLKSVTVSQTPSGKYYASILFEYEDQVQEKELQKFLGLDFSMHELYRDSNGKEPAYPRYYRNAEKKLAREQRKLSKMQKGSNNRNKQRLKVAKLHEKVSNQRKDFLHKQSRQITNAYDCVCIEDLDMKAMSRSLNFGKSVSDNGWGMFTTFFEIQTGGAGEETCEGG

SEQ ID NO: 13021 - protein, 383 aa, unknown
  TnpB Polypeptide
MPLSFTRALRLKVRSEAYPWLNAAAVEVNQVFNYCNETSLKAATRTDLKRKWLTGFDLCALTAGATEYFEKIGSDTIQSACNEYAQKRKAAKKLKLKWRVSRGAQRSLGWIPFKAASLKRKGRGVRFAGKCIRVFERERLEGVKWQGGEFAEDAVGDWWLCLPVKVEAECSVAPEEEVGIDLGLKTIAVTSDGDRLEAGRWTHRYAEKLASAQRRGHKRQAKRIHRKIARCRADALHKFSRQMVDRYQHIVVGDVSSQKMVKSRMAKSVLDSGWGMLKRFLAYKCEYAARSFEVVDERYSTVTCSHCGALSGPRGVNGLIVRSWECCNCGTLHDRDVNAARNHVIGSRCRTSVRGNKLSYSLIPPSNAYRVREAAMESARTAA

SEQ ID NO: 13022 - protein, 379 aa, unknown
  TnpB Polypeptide
VKLVKTVKCKLQVNPEQAEVLLETLRRFANACNDILCVSQENHTTNKVKLQHLCYRTIKERYGLQANLVIRAIARVAEAARKKLKPSKPKKFKPTSMSLDQRTFSFNEKRWEVSISTVAGRMKFPLVIGNFQREFLTGQKPTSATLCYRRCMKAFYINIVVNREMPLPPQNGNVIGVDRGIYNLATTSSGLRFSGRQAMHVRRRYARLRQALQAKGTKGAKRLLQRLSGRKRRFIADLNHRIAKAIVNSCKPGDVIVMEDLRYIRERIRAAKEQRLLQHSWAFGQLGKCIEYKATERGIRVVYVDPRHTSQRCPRCGCTNRSNRHGHLFRCTSCGFVGHADIVAATNIRQVFLDTLADGPPSVGPEAASSRKPRAFAMG

SEQ ID NO: 13023 - protein, 408 aa, unknown
  TnpB Polypeptide
MKQYRTYTIRLFPNKEQIQQLQGLSLARNTLYNMLIDIEEQTYTETKHIKTEFDLDRDITVLRKNNPLLNQLNSKASQRVAKEVYSSYKSFFNLIKKDNTARPPHRIDNENKFHTVVYNQTGWKFISDSLVKLNGIVLQYKGIPNIKYEELMVKEVKLKYVNNKYLLDLGVENTVVEPVHINAENKVLAIDLGVKNLANGIDNTGKWVTLPNKAKKTNQYFRKQISKVQSKIDKCTKGSRKFKKLKKVKTKLYTRKNAQIKQTLHIQSKKLVNMNYKTIVVGDLTIKKLMEKGSNKLTKTSRSFSESSIATFMEYLTYKCQAKNTEVITIGEQWTTQQNCLTGKLFKEKIELDDRTVQLSDTIVIDRDLNAAINILKRYEQNHLALLTAPLDVSSVVNKYNLLTNTCS

SEQ ID NO: 13024 - protein, 196 aa, Bacillus sp.
VDVGLKELFVASNGMKERNINKDAKVKKLLKRKKSAQRDMSRRFKNGVKIQSAGYEKAKAEHLRLSRKITNIRNNHIHQATATLVKTKPMRIVVEDLSISNLLKNKKLSKALSFQKLNFFFQCLSYKCEKYGIEYVKADKWFASSKICSCCGVKYDHSVQPEGQWSLKIREWRCVPCNSHHDRDVNASINLSRWVK

SEQ ID NO: 13025 - protein, 324 aa, unknown
  TnpB Polypeptide
MLVKGVSFSLESGIPSEAKPLLEDFRLAVNNAIRAGLQARVTSRNALCKIAYRDFREQHPRMYAQHLVSAFEVAGSVLKNHRRRFRKDVSCRTPFVKRLMMKAENQAYKLNRKSGVIDLPIRAGCRVELKLIVSQYHRKYLDDMSLSLGSLTVLPDRVIVTFRKVAPKPYAPDSVISLDTNERSLDGLFVEGDVAKAVKADFSEVAIIQRRHHDRRKRLQKKKSHDRRTSRILCRREGTREHRRIDYRLHQVADSVLEFAEERKSAIVLEDLKGFNPKRSKELNRRLSMWPRRKLHQIIEYKAQWKGVPVVKVDPRNSSRTCPI

SEQ ID NO: 13026 - protein, 404 aa, unknown
  TnpB Polypeptide
MKKDKNIVHRTRVYYVTPSQELINEARLSNNLYNQALYILRQAFANKEDIPSKFDLNKILLYKEYECEEYDNIHKMVAANAQTICCLAAQNFKAFLMSLRAFKKNKSNFTGVPKIPGYNKKEQEFMIILNYQQCAVKNGMMRFPGKLNLDKIYVGDLDIAHVRIFPGKKKYKVEVVYKVESLPKKTKGNIAGIDLGLDNLATVAINKRGIRPLLINGRPLKSMNLYFNNKRDKVQSELKKCNDRYMSNKLETLYRKRNNRFNTYMHKASKKIIDYCLEHNVKQIIIGHNKLQKQESKLKNFVAIPTFRLIELIKYKAEYQGIEVIETEESYTSITSYLDKGEPIKDNANKARRQHRGLFVSNKGKKINADVNSAYQIMKKVIGDKVIKPIGKGALFIPKKVTIA

SEQ ID NO: 13027 - protein, 396 aa, unknown
  TnpB Polypeptide
MNVIQHTAVRFRAYPTREQAAMIERTIGCARFVYNLMLETRIAHYQTTWESCNPTPAMYKDAYPFLRDVDSMALCNAQLALQKAYRNFFDHKRAGFPKYKSKHHAKAAYTTNSINNSIRLSDNARRLRLPKLGWVTVRQDKHIPADWKLKSATVEHTRSDKYIVTVLFEHESQMPDPTPPTRIIGLDYASHGLYVSSEGEHAQYPGYYRDMEPRLAREQRRLSHMVKGSANWRKQHVRVARLFEKTANRRRDFQHKTANKLVANCDAIAVETLNLQGMTRKPKPKTDPHDPNRYLPNGRTAKSGLAKSTLDNGYGMFCDLLRYKLDHAGKRLIRVDAWYPSSQLCHACGYRNREVKDLTIREWVCPQCGTLHDRDVNAALNIRNEAERMLSERHDP

SEQ ID NO: 13028 - protein, 456 aa, unknown
  TnpB Polypeptide
MKGLKQMNIIKTAKCKILNYTSIFDDTINIYRSALSFYINVCYKEWDYISTLKSKYRINYIERITHKTSKSPDIKYDFDSSFYKFPSYLRRAAIAEAIGYVSSFKSQLKNYNENDKKAKQPTLNLNPSSYPVLYDKGNWIKLSDGKARIKIYRNNDWVWLDINYDTKSLYSSKKYRFTGYEELSPTIRKYGKKYFLNISFKSKVKLTDSKDIACSVDLGINTSATCSIMTSDGTVMARSFINQASEKDRLNSLLGKLSKATRNSGIKNSKPNLWRKINNIKKHIAIDTMNKIIAFAQANNATVIVFEHLGKMRVPKGFYGARRLRFKLQYWTKQFIYRKTLDKAHSLGLRVSRVSPKNTSRLAYDGSGFVSRGEIDPTKLYKNKPSKNYSICKFTTGKIYNADLNASYNIGARYFIREIIKPLSEKTRLQLEAKVPLLAARNQHTLSTLISLKAAC

SEQ ID NO: 13029 - protein, 485 aa, unknown
  TnpB Polypeptide
MRHTTFRFALDPTPAQAALLARHAGASRFAYNQCLRMVTDALAAQRADPRVMVPWSGFDLINAFNAWKRSEDAGRVFAVATDGAATKQVTGLAWRGEVSAQVFEEAAIDLGRALAAYDGARNGSREGRPVGFPRRKRKGRCRDSFRLRNKTDRRTGQASLRVGDGHPRSVTMPTIGAIRIHDDTRRLRRLLRPVHHLEPQTGTQVLAPRAKLLFATCRRRGNRWYVSLNVHAPDLHPQRRHPPRRDRDHGGWVGLDRGLAAFAVAATSNGSEVRRWHAPKPLQRNVANLRRQSRALSRTKLRSINHAKAARRLSKSHARITNVRRSFLHEVSSRLVQTHDRLCLEDLAVANLVRNRHLGRAISDAGWADFARKLAYKQAWRGGQVMIADRWLPSTRTCSRCGLVKQRMGLAERVFSCDRCGLTLDRDRNAAANLAAWAERQHARAPDRQAGGRVINAPGGEGAGHRGGDGATSLVEGGTSAHTVA

SEQ ID NO: 13030 - protein, 376 aa, unknown
  TnpB Polypeptide
MVSVYNAHMQLTIKIKLLADAAQKAALLQTMAAFNLAANDAARAGFDNNVFSVPSIHKLVYFDLRERYGLTAQLAVRAIGKASACFRRDKTKCPHFKPRSAVVYDERIMRFKGLTAVSLASLDGRLAIPIVVGGYQAGKLQAAIKTGQADLVYIQGVFYLLVSITLPGSNKQETSSILGVDLGVASIAVDSEGNVYTGKDVEAYRIKTQRMRDELQACGTRSAKRHLRRIANKESNYRRTKNHQISRNIVDFAKARHSDIALENLKGIRDRTRFKKSQRARMAGWAFFQLRNFIGYKAEMAGLAVLLIDPRNTSRTCNECGHCDKANRKSQAEFECLSCGHLAHADLNAARNVRDKGYVSKPIVTNVDQRLLSVAS

SEQ ID NO: 13031 - protein, 311 aa, Bacillus sp.
LHCVPKVDDNGYWTIPMNVAFRKKFGSIKIRMPKNIRNKKISYIEIVPKQKGRFFEVHYTYEMHVSQMKKPSTTTSNALSCDLGVDRLVSCVTNTGDAFLIDGKKLKSINQYFNKMIRNIQLENMENRISKRVVTNKMAALWHKRERQINGYISQTVGLLFKKVKAFGIDTIVVGDNAGWKQKSDMGKKNNQTFVQITFHKLLAAIENKCIKEGIRFLKQEESYTSKASFLDKDPVPVWSKNDKTYYHFSGKRMTRGLYQSKAGTCIHADINGALNILQKSRVVELDESLKVKTPILLEVQKRKAVASRIA

SEQ ID NO: 13032 - protein, 436 aa, Anaerosalibacter sp.
MIFNRKIEVIFTKEDELILDGQSKICNWLYNYLLEMTIKDYKENNNDKKLLTGRNLRNQVPILKQEFIFLNTVHSSPLKNTAIRLKETYKKFFNNETGYPKFKSWKKHWFSLYYDEPNKGFKLIENKNLQISLGINKENKRIKVIGKLKENLNLRNTDKIKNFRLCKQQGNKFYAIFCIERKDIDKKETNKWIAIDQNHKNFFVAIDNTGVSYEFEKLPQTKYWDKVIDEIKSKRDLCSRKSKLIETETGRSYYLPSKRWTKLNNALDNAYHKRREQIKSSCYSIANWIAKNYDYVAIGDYTPTLNTATYDNMHRSMLNQEIIGEFRNILKWVMERSGKHYSKVDEKDTTKNCCICGNKEKKDPQIREFTCQKCKTKLSRDINSSVNIAKKDKLLSGSDYVDWDLYNSTYTAKWNFKKSKILFTGHTLEKSNIWMN

SEQ ID NO: 13033 - protein, 374 aa, unknown
  TnpB Polypeptide
MIWDNIEWKYSFPKIVRKGKKLVVIRGSKVRIPIIPKDRAFKKRLRDELMKDNPYAAHWVDAVIRTAYSIMENWRKRYLKGRARKIKPRIRRRFAKCKITLMKIDYEAKTIRITLKQGEYLYVSWRSTWFEKRVRDWIVGEVIIFDDRVVIPFKGSEEIYVRRVIGWDSNELSLDGYEPSIGFIHVDLRPLQSIKITYERKKAIAQSRGRRELYEKYVRRERNREKDFINKLSAGLRMLFQNTIHVFEDLDKEDLVSRKRAKNMRKRNYRTPWKRIHKKISEVALTAHVDSSNAYKECPRCGYVVETQEGQIFECPRCGLKMSRHRVASVNIRRRYLEGKRRGKRKTSMRGFPHSNEPEETMKVELWVGASPSG

SEQ ID NO: 13034 - protein, 519 aa, unknown
  TnpB Polypeptide
MSTLTRSQVRHAAIETDAVKVARVEAVAREWQRLVRWQVHQLLAPEAITLAARPRSVVKAFRASPERSEFSTLGSHLQQEALTHACAIAAGGWEQAAQKVRSQIARRRSAGKISDLEAHEINWLLRWPSHLGEIMAGGVIVPDDARFAANDHGALDRWLRAALLRARPEQPRIRRALWFLADAMTYRAALREGEHFPSWISLPSLEKGHPVRIPLAGAGISHLADGKTLRVSVERDTRGRKRIVLRYAITSEVAARTGALIGGVDKGITTVLTVTESDADHATSHGTTYGTELTKVTGRLVQRNRGRLWAAAKAADEKTARHLRRHNLGNAKRERRRRKAEARLRSLHNLAIKDAFRAHPDVSTLAVEDLGFSRHTDRGSSANRRLARWAKGQLQVDLERLSEANGVGLAVVNAAYSSQACPACSWTERANRQGPRFRCRRCGTAGSSDAVAASNLRSRASDPEITRFMAHVAVKQVLLRRAADRAESLGLHLEPEDHGAAPGMTTARHVTESPVPNAA

SEQ ID NO: 13035 - protein, 442 aa, unknown
  TnpB Polypeptide
MKQLVTAKLKLSLTQEQKQLMREVCLAYRDALNYTSLVAFEKGKLSGAAKLQKLVYQDLRCNYNLPSQMACNVPRQVAATYKGLWTLVKQNKEAIALGRTKKRYKGLDKPPKFVSRTCTLNFGRDYSWAKGQKVSVITLKGRIVVPYVGYDKYLEIIRTGVATVGAAKIWYNKSSKNYYLLVSLELEIPDINPEKITRIIGVDVGRRYLAVTTDTNNQTKFYSGSSVIHKANRRQKVVKTLQRKGTRSATRRLISLSGRERRFVADTNHCLAKKIATPGCLIGLEDLTHIRERTGSKAKGKLASVKQRRANRNQTKWSFAELHSFIDYKAVLVGSLAIKVDADYTSQGCCKCGYTSRENRPKKGLTFLCQACFFEIHADLLGARNIALRTLVSRQDWEATGRISAVPDVSDCEAKAERLKRFSELRWSLDAIPDLATSGRGS

SEQ ID NO: 13036 - protein, 462 aa, Micromonosporaceae sp.
VKAVQAYRFALDLTPGQERTASAHAGAVRVAHNWALARVKAVMDQRAAERTYGIADADLTPAIGWSLPSLRKAWNAAKGEVAPWWREYSKEAFNTGLDALARALRNWSDSRTGRRAGRPVGFPRFKSRRRSTPSVRFTTGAIRVEVDRKHVVLPRLGRLKLHESARKLARRLDNGTGRIMSATVRRDAGRWHVAFCVEVDRADRRPARPASVVGVDVGVRHLAVLSTGELVPNPRHLDAAQRRLRTLARRMSRRQGPDRRTGQRPSNRWRVAQTQLGRAHARVAHLRRDGLHKLTTRLAREHGTLVVEDLNVAGMLRNRRLARHIADAGFGELRRQLAYKTEWNGGQLIVADRWYPSSKTCSACGAVKTKLALTERTFTCTICGLILDRDLNAARNLAALAALAAEVDPAGSGPVAGRGADRKTPLAGPVAVKRQPGTATTDQTGTVPPQGGTTNHVLTKAH

SEQ ID NO: 13037 - protein, 485 aa, Micromonosporaceae sp.
VCPSLRPSWRGGPCPPRGRGRHPGGRVRTIQAYRFALDLTPAQERMVLAHAGAARVAHNWALARVKAVMDQRAAERTYGIPVADMTPAVGWSLPELRKVWNAAKDGVAPWWRECSKEAFNTGLDALARALKNWSDCRTGKRAGRAVGFPRFKSRRRTTPRVRFTTGTIRVEPDRRHVVLPRLGRLKLHESSRKLARRVDNGTARIMSATVRRDGCRWHVAFCVEVDRAERRPARPASVVGVDVGINHLAVLSTGELVDNPRHLVAAQTRLRRLGRALSGKTGPDRRIGQRPSKRWQRASARLGRTHARVANLRRDGLHKLTTRLAREHGTVVVEDLNVAGMLRNRRLARHIADAGFAEIRRQLAYKTSWNGGRLIVADRWHPSSKTCSGCGAVKTKLSLSERTFTCTACGLILDRDLNAARNLAALAREVDTAGSGPVAGRGADRKTPPAGPVAVKRQPGTAPAGKTGTVPPQGGATDHVLTRAH

SEQ ID NO: 13038 - protein, 398 aa, unknown
  TnpB Polypeptide
VKRLQAFKFQLRPGGQQEREMRRFAGACRFVFNRALARQNENHEAGNKYIPYGKMASWLVEWKNATETQWLKDSPSQPLQQSLKDLERAYKNFFQNRAAFPRFKKRGQNDAFRYPQGVKLDQENSRIFLPKLGWMRYRNSRQVTGVVKNVTVSQSCGKWYISIQTENEVSTPVHPSASMVGLDAGVAKLATLSDGTVFEPVNSFQKNQKKLARLQRQLSRRVKFSNNWQKQKRKIQRLHSRIANIRRDYLHKVTTTVSKNHAMIVIEDLKVSNMSKSAAGTLSQPGRNVRAKSGLNRSILDQGWYEMRRQLEYKQLWSGGQLLAVPPAYTSQRCACCGHTAKENRLSQSKFRCQACGYTANADVNGARNILAAGHAVLACGEMVQSGRSLKQEPPEMI

SEQ ID NO: 13039 - protein, 405 aa, unknown
  TnpB Polypeptide
MILTEKEIIYSTDERFDLIKELCHLSKNLYNASLYDVRQYYFETKLYRSWKSQRPIFTKNNNPDYYALQSHIAGEVFKQVGEQFINFFNNKSNKKKRIPKYKDKNGYNIVTFPKLTISRRIDFDEDKQVYTYTLCKQSYNLKIQSTKPNIKMIKFVYDKNNDLIKCFKIYEVEQPKLKKDNSRYFSIDPGLNNIVSIYNNIGIRPLLYNGRPIKSINQYYNKTNAKLRSELPNNVRSSKRLRQLSFKRNNKIDYEMHKISTHIINEAVKNNISKIFIGNNIGWKNEINMGRRNNQNFVNIPHTKLFHQLSYKGALKGVEVIFTEESYTSKASFFDKDELPIYGESDNHKFSGRRIKRGLYRDSKGNIWNADLNGAANIMRKCSDKAYKGIRKTKELMKQPILVTL

SEQ ID NO: 13040 - protein, 416 aa, unknown
  TnpB Polypeptide
MRKKEVENLNPTITRTHKIRIYPNEHNQEVFQKYYDYQRSVWNRAIDERNAQYKIYKEMKATGLFTQKELNKNYFPNINNLRKMEKFDWEYNFHSRIRDVQFEALCQAWDNYFNPNMPNHKKPKYKKKKDVESHKKFFSRDLRIDGKWLFLPNSRYSKPEYRFTKIRMAEPLRFDGKITSYFSVSVKNNKWYITITVETPLEEKVVLSKQSTGIDVNIGSIDYLKKDGLIKEYDKFYLLPKSLLRQYDKIKYYSRLISKKRNKNPYYIHSKSYHEAITKLNNAYTKVYNIQEANLNNIVKYFFTNYNRIVIEDLDVNSMKMNKRLCKSLHRNAFGRFKRKMIAKAEEYNVEFILADRYFPSTQTCSECGHVKIGDEKLFLWGDKYGNDHNTYVCYNCGTIQDRTENAILNLNHYGR

SEQ ID NO: 13041 - protein, 398 aa, Kribbella sp.
VSRFRLYPTTEQAAALLAQCGHARFVWNLALEQWSMWTRDKPPAPSHGERCRQLTTARAAFGWLREGSQTVQQQALRDFDQAVRDFYSRTHGRPTWRKAGQHEGFRITGNQASRVIKLNRKWRAVNVPKVGWVRFRASREVPPARSYRVTHDRVGRWHIAFAWVPPVIQAPGNDAVVGVDRGVAVSAALSTGELLQCPELSRAEKDRLIHLQRRLARSRRGSHRRARLKAAIAKFYARAADRRKDWVEKLSTDLARRFDVVRVEDLHVAQMTRRAKPKPDIERPGHYLRNGRRAKAGLNRGILNNAWGQLLIRLEQKAPGRVQKIPAAYTSQTCHVCGHCTARNRESQARFRCVACGLVANADTNAALNIAAGRAVSARREAPFRASPKREPQPATSV

SEQ ID NO: 13042 - protein, 385 aa, Duganella sp.
MCCFAGACRFVFNKALALLKENHVAGEPFIGYVTMAKHLTTWRNDPKMPWLREAPCHPLQHALKHLDQAFCNFFAERAAYPCFKRKGDQASFRYPDARQFKLDQSNCRIFLPKLGWMRYRNSRHVVGELRNVTVSRVAGKWFVSIQTQLEAEPCAPVVNSAVGIDVGIVHFAKLDDGAHIVPVNCFERHRKRLARYQRQMCRKVKFSRNWRKAKARVRRLHARIANIRRDFLHKASTAISKSHAIVCIEDLQVKNMTRSAKGTAQQPGKMVRQKQGLNRSILNQGWGEFRRQLLYKLAWNGGILVAVPPHHTSQTCPDCGHVSPESRRTQARFQCVGCGYTNHADVVGAINILERGLRLLACGELAQSGHSVKQEPTEVTTQFAA

SEQ ID NO: 13043 - protein, 325 aa, Microcoleus sp.
  misc_feature (175)..(175): Xaa can be any naturally occurring amino acid
MEKAYRYRFYPTVEQETLLRRTIGCVRLVFNKALAARTEGWYERQERVDYVQTSAMLTNWKKEDNLQFLNEVSSVPLQQTLRHLQSAFTNFFALRAKYPNFKKKRNGGSAEFTKAAFRWKDGQVFLAKCSDPLPVRWSRNLPDGCEPTTITVKLEPSGRWFVSLRIDDPTEAKLXSRKDHLHKLTTRLVRENQTIVVEDLAVKNMVKNPKLARAISDASWGEFVRQLEYKAKWYGRTLVKIDRWFPSSKRCGSCGHILERLPLNLREWDCPNCGTHHDRDINAAQNILAVGHTVTVCGANIRPDGHKSKGQLQNTRKGRKQKPKS

SEQ ID NO: 13044 - protein, 409 aa, unknown
  TnpB Polypeptide
MWAKILLTLVMGGMPPFTSEKFINYYIFTIIMKSVAIIKLKIPQRNELIETMRRYSQSAQKVIDFGWNIQTDDKRELHDLTYYKIREMTNLPAQLVCSSRDKAVEVLKAKPKSKPIIKEFLTIRYDARSFSFKCNNKGYYVSLSTIDGRIKIPVDIPEYFWKYLDWKICSADLIMKKFGLFLHICVSRNITPMISDGFLGVDVGINNIAVTSNKQFFNGKQIKSKKLIFKRLRAKLQAKGTSSSRRLLKKLSGRENRWMTWINHNISKRIINCSEGTIVIENIKGIRNNNRGKRLNFWLGNWSYYQLHKFIEYKGILKGKRIIKVSPYHTSKICSKCGQISSRSKNFFVCKHCGYSLNADLNASFNLAKHHSMSDGVSVAVTQPYSRSDEVKNSSRITATEFMAKSTHL

SEQ ID NO: 13045 - protein, 550 aa, Mycobacterium sp.
MIVGMRTCGQAAKVAGLTGGVQLPGKPKPDGSQTLSRYVDVGADFESHRAVVESVSVLFKLYDGDAAGYAVNGSLGAEVASGWLVTAAKFEVEWPAEPERAALVRSHFGARRKAFNWGLGRVKADLDAKSADPEHESLGWDLGALRKAWNLAKHEVAPWWATNSKECYSAGLADLAQALSNWSASKNGRRQGRRVGFPRFATARRDPGRVRFTTGTMRVEDDRHSITVPVISALRSKENTRRVQRHLASGRARILNMTLSQRWGRLFVSVGYALRTPSAGRTPTQPTVRAGVDLGVRTLATVATIDPATGVETVVEYKNPAPLKATLAARRRAGRELSRRIPGSHGHRAAKAKLTRLDRRCVHLRREAAHQLTTQLAGTYGQVVIEDLDVAAMKRSMGRRAFRRSVSDAAMGLVAPMLAYKTTRHGSTLIVADRWFPSSQLHHRCTHPNGTPCRLVGKGRIDKHLICPQTGEMVDRDRNAALNLRDWPDYASCGPVGTTAPSVPGPTESVGTGHGADTGSTGAGGASVRPRPRGAGRGEAKTPTPQGDAA

SEQ ID NO: 13046 - protein, 405 aa, Mycobacterium sp.
LLQQLDPTPRIPQLSGLAGALAGLGALIDISLAHPLVQRHRVHTEIGGDLLDRYTVVAVASDPHDVVAELSGVRPGHKDILPAHPSRASQLRCHLFVQQTQMTLEKLNRRHGRIKLPKLGWVKFRMSRDLARETIRSATLTREGRHWFLSLLVDDGHRTPEEHAAPGAAVGVDRGVVAAIATSDGNLIDCDFVTPGERRRLVALQRTLSRCAKRSANRSKVRAELARVRARERHRRQDFCAQAAHQLAAANAVVVLEDLETRNMTRSAKGTLDKPGRNVKAKSGLNRAILAKGWHQFALALSSASRYTGTAVLTVPAAYTSQRCSHCGHVDPKSRESQAVFRCTHCSHHQHADVNAAKNILAAGLAVTACQDRALPAGRARSLKQEPAGNREELLHQHPHPAPAA

SEQ ID NO: 13047 - protein, 539 aa, Mycobacterium sp.
MVAAGPAGVRIRTRLHLSAGEAAALNEIGQFLGSVYRQELTGRIALGHMDRQGRTRWRTERKAAVTVVSSSRWAGALTRAVDDQYQLGMRSLTAHVTDLRSAIDVLEQRCALRPGELQPDHGDGPSRSRRIRGYATAAERFTKSRRLAVLRQRLAAAEAALAAGYPSITMGGNRLWRTRQNLKDAQITEQVWRCRWDAARIFLTADGESGKAGGNETIRVDEAGRLRIKVPAALADRFGSHLQLAAPVSFNHRDAEWADRVRGRRAVRYDITFDPDKNRWYLDASWATATDPVVALDDLRGGRVLGVDVNADHLAACVLDPSGNPVGEPVTIAVATARLRVSRRDGRVRAAITALLDHATTAGCTAIVVENLDFADARATGRETMGRGNRGKTFRRTVAGIPTARFRDRLTAMASRRGVAVIGVDPAYTSRWGRQHWRKPLQQQTSDPTAVTVHHSAAVAIGRRGLGTPIRRRPAGLRTQQRMDAHTPPARPERKPSPHGGAVVPAHPHAIKVCGSTGQHPPPAANTVRAAQDSLLITN

SEQ ID NO: 13048 - protein, 420 aa, unknown
  TnpB Polypeptide
VSLGDEGSLTLTVKVRVRAEPGAFRELMSLMYRYREALNHAIKVVIENETLTLGKVHRLLYDILKEKYGLPSKVAIDCYREAIAIAKSWLNNSNKGRMPRAKTMRIWLTHKYSYRINGNHVELLGGLKLEIIGWDMRYDGYPSGDARLVFKDGKLVLEVSKHIPKPQKYVPRGVLAVDVNEKHIVIGNSKFEYRFKTPIEQALRYKRLAENLQKKYSSPKYSAWLRRRDIKRRVSYYHSKARHIIEDWVKKTSHEIVASAKQHQYAVAREDLTGLIESLKKLPREHRVSLLILSYRKISEWIDWQCEKHGVPAVVIEPKGTSTRCPRCSTKMMENGYRVFKCPRCGFEADRDTAAVLNIEIKALAQMGGSLTTPTALQMTDVSPNRCREPMNRPKGTLALKGGEEVRSGVERGCGGPAGI

SEQ ID NO: 13049 - protein, 397 aa, Cyanobacteria sp.
MEQTLTIVCKLQPTPEQAVKADDLLKAFADACNYVNEQVKPGIFSKTTIQNLVYQDIRARFSLSANQAVRVCARVGANRKTAKSKGDTVKSFSPTSADYDARIFDFREKDQTVSLTLLGSRERIPVVLANYQAGKLKGRKPTSAQLCKHSDGQFYMHIQVTDEVPDPVEGDKVIGVDLGRRDIAVTSEGDQWDGKQTTETRDKFARVRASLQQKASKGTRSTRRRAREGLKRLSGRERRYQTWLNHNISKVIVLSALQGNAIIAIEDLTGIRERTNELPRNKAERRRSNSWAFFQLRLFLSYKSVKYGVKLITVNPAYTSQTCHKCLHIHPVKGKSYRSGKSFKCGHCGNHCDADENGSKVISIVGAAVNPLGGSVLFCNLADHIRATESPRLLAVG

SEQ ID NO: 13050 - protein, 411 aa, Burkholderiales sp.
MQRLQAFKYELMPNGEQARDMRRFAGSCRFVYNKALALQKSNYEAGGKFVGYVAMANLLPEWKKEFHWLKESPSQTLQHALKNLERAYKNFFEKRADFPRFKRKGMGDSFRFPQGFEIDQANSRIKLPKLGWIKYRDSRDILGEAKNITVSQSGGKWFASIQTEREVEQPVPVATSAIGIDMGIARFATLSDGTFVAPLNSFKKHEARLKRYQRAMSRKVKFSKNWQKAKRRVQTIHTRIGNARRDFLHKTTTTISKNHAMVAIEDLKVRNMSKSAKGNADKAGKNVAAKSGLNKSILDQGWFEFRRQLEYKLNWNGGMLVAVSPQYTSQTCPACGHVAKENRQTQAKFECVDCGHTDNADVVGALNILARGHRVAACGEEGSGLARKRKTKPASVKQELTEATRREVTHV

SEQ ID NO: 13051 - protein, 275 aa, unknown
  TnpB Polypeptide
LAWRKSSGARRSLGWVPFKKSGITYAHGQIRYGKVWLSLWDSYGLKDFDLGAGTISEDARGRWYINICATPKRKPVQQLSLFNDAIAIDLGLKAFATTSDGAVIETQQFYRGMEGKLAVAQRANKKDRVKAIHARIANRRKDFHHKLSTKLTDSYGAVFVGNVNAAALAKTNQAKSVLDAGWRAFRTMLQYKCDRAGVWFDEVNEAYSTQTCSCCKKRTGPKGLEGLGVREWTCSDCGTAHHRDINAAKNILAAGHGRLAGGIPVLAAQAAALQG

SEQ ID NO: 13052 - protein, 397 aa, Moorea sp.
MLFKNGKYLNNADLDKVMKTNVHFKAMRSACAQQTLHGVVESFKSYKALKKKYDKGQLTDKPRVPKYRKKGGLAVVSYPARWVKLVKGQLKFTLGKQIKVWFGIDHFLLPMPSNIDHKSIKEYRFVPKNGCFYIEFVYERPAPEAVEVTNNVLGIDPGLNNWLTCVSNVGKSFIIDGKKAKSQNQWYNKRVAAIKKGKSQDYWDEQLASLTEKRNRQMRDNVNKVARLVINWCQRNLVSTIVFGWNKRNKDSINIGKKNNQQFVQIPTAKLKSRIEQLCIEYGIKFVETEESYTSKASFLDRDFLPVLGGKPEGWAASGKRVKRGQYLSSKGSLINADCNGAGNILRKVETQLGFPLAKVCRAALNLPQRYRLDSLSKSYREATSRSAVLTREVKSA

SEQ ID NO: 13053 - protein, 437 aa, Moorea sp.
MIVLEFKAYGKQKQYLAINEAIRTAKFVRNSCIRYWMDNKGLGKLDMNKYCTVLAKQFPFANELNSMARQASAERAWSSIARFYENCKNKIPGKKGFPRFKKHCHSVEYKTTGWKLCPDKKSIIFSDKKGIGKLKIKGTWDLWRFDKKLIKRVRIVRRADGYYVQFCIQIDINESVPATGSTIGLDVGLKYFYTDSNGNTVPNPRFYRKGEKRLKFYQRRVSRKNKGSANRKKAINKLARTHLKISRQRVGVACAKRIEHAKGLARCVVRSNDLVAYEDLRVRNLVKNHCIAKSINDAGWYQLRKWIEHFGAKFGKITVAVNPAYTSQNCSNCGEEVKKSLSTRTHVCKCGCQLDRDSAKPTLREHNAAINILKRALGTVGHTGTLVLNQNALGDLSSTFPGSVRVREASPTANLVEQDGSLNKESPRLMTGECQVR

SEQ ID NO: 13054 - protein, 405 aa, Micromonospora sp.
VLTGRRYLLAFTDEQAAYAEQVGAVCRAVWNTGLEQRREYRRRGAFIGYVEQARQMAEAKKDPDCAWLADAPSHTLQQTLRDLDQACTTHGTWKVRWRSKTRTAPSFRFPDPKQIDVRRLNRRWGEVRLPKFGPVKFRWTRPPGGVIRNATVCRDGGRWYISFCVEDGVSEAAPNGKPPVGVDRGVAVAVATSDGGLDDREFVTPGEAARLKRLQQRLSRSLRVHGRNRGSKRRDATRAQLGRLHARIRARRADFAAQTAVRLVREHGMVAVEGLRIKNMTASAKGTIEQPGRNVRQKAGLNRAILSKGWGGFLLKLEHAARYHGTHIEKVKPAYTSQTCNACKHVAPESRESQAIFRCVACGHQDHADVNAAKNILAAGLAVTGRGDLAVGRSVKRQPPERLAA

SEQ ID NO: 13055 - protein, 407 aa, Cyanobacteria sp.
MMIIYESKLEGTKHQYEQLDQAIRTARFVRNSIIRAWMDGQVKSRNDAYTYCKVLSDHPLFPWANQLNSQARQAHAERAWAAIERFYRNCKAKVPGKKGFPKFKKYQVRDSVEYKVSGWKLSEDRHYLTFTDGFTAGTFKLWGSRNLHYCQLKQIKRVRVVRRHDGYYAQFLIDHTREESKELTGKQIGLDVGLNHFYTDSFGEKIEHPRFLRKDERKIKRLQRRLSKTQKGSNNRAKARNKLGRAHLKVSRRRNDWVCKLAQRVIQSNDLVAIENLKVRNMLKNHCLAKSISDAAWYRFREWLEYFGIIYGVPVIAVNPSYTSQNCSNCGHKVVKTLSTRTHRCLNCGYIADRDENAAINILKSGLRELSTTVGRTECQVSREISLCSDVETQPSKATQRKRKAKK

SEQ ID NO: 13056 - protein, 400 aa, Cyanobacteria sp.
MLVFEAKLEGEKHQYEKLDEAIRTARFVRNSCLRYWMENKGIGRYELSAYCKVLAKEFPWANKLNSMARQASAERAWSAIARFYDNCKKKAKKKGFPRFKKHQTHGSVEYKTCGWKLSEDRRTIAFTDGFKAGSFKMWGTRDLHFYQLEQVKRVRVVRRADGYYVQFCLDVERVEKRTPTQKNIGLDVGLTHFYTDSDGQTVENPRHLRKSEKALKRLSKRLSRTPKGSKNRAAARNRLMRAHLKVSRQRKDFAVKLARCVIQSNDLVAYEDLQVRNMVKNRRLAKSISDAAWSAFRDWLEYFGKVFGVVTVAVPPHYTSQNCSNCGEIVKKSLSQRTHRCPRCGHVQDRDWNAAINILELGLRTVGHTGRLNASGDIDLYLGEETPPSKPSRGKRKPKQ

SEQ ID NO: 13057 - protein, 392 aa, Cyanobacteria sp.
MYAISRELKLNNVEVSLMRGLAGFRRWVYNFGLDLLIASWDFEGVKASDAKRIDAIKKVFTQVTMQKPEYAWMKNYPSTVYQSAFIDLKDALSRWRKGQCGFPKKKSKKKGDSFTVYKTSGVYPVKGKPALPFTNRVVIAAGKHIKLPGLKVFRLKERINFICSSQTFTVKRVADRWFVSFVLDAEKIPPTIHPIQRVGLDLGVKCLATVSDGTRYEMPITTKKAKIKLGKLQWRNRNKVLGNRKLLIKASGKARRYYVKLAQQHWHLANIRNDTTQKMTTDLSRRAYNIRIEDLNVSGMIANRKLATAVSNNCFDEIRRQLVYKQAHYGTKIELVDRWFPSSKTCSRCGHIQDMKLSDRVFNCQSCGHSQDRDENASINLENAPLDRVRLA

SEQ ID NO: 13058 - protein, 484 aa, unknown
  TnpB Polypeptide
MSSGGNPRGVPVRDPDPLQSFRELIEKRKKSNKRVVRLRLLPEKHEEEILFDIGLTSVRLWNELNYEKRQLFFKNDLTLEKRIEINRKYYHKYKKILGVNAGQIINKNEEAWESFFELLKLKRQGRLPPHIRKISPPGYWKDRLTGKKKIHILIRNDRYYLEPVNKGEGRLILKDFKLNIRYVGRIKWEGKQGRLEIIYEAGRWFAYIPIEVGEKPSKSNPQEYIKPSYKDKKNRIFNPKSIKQRDPIGDKKAFIDMGLNNLFAIVVSDGSALLVKGGVIKSEYYWWKREISTYQAVRDLLKNAGIHKWVEYHEKYLKALYKRDERLRHLYRTAIRFLAETLWSRGVKKIYIGYPMMLSQNNGNEYNINIWWYRKIILWIIDVFMEYGIDVEIVPEDYTSQKCSICRDIHKNGRIYRGLYICRKTGKKINADINASLNIARKIGYKITITRKIERYLVSHNGVKPLIPLQRANTRDPEVRNPAL

SEQ ID NO: 13059 - protein, 419 aa, unknown
  TnpB Polypeptide
MSQCILEVVKVSKAFRFRLYPPAEQAAWLDRWSDSLRFLWNLAHEQRLDGLRYAKRRYFSAFDQINYLTELRADLSWMAEVPRNVSAQLLVELDEAWQRCFKKLARMPNWKARGRDVINLCEPHPKVWRLKNNGLHFPKLGIVRIVVHRPLEGTPKTCTIVRDGDQWYASIVCVIEKADPVPSTKPAIALDRGIINFVGDSNGKLIENPRRLKRALTRLAHAQRVVSRRKKGSRNREKAKLRVMRLHRKVRRQRDDFVHRLSHHYAESQGRVIVERLNVKGMLRNRRLARDIADAAWGKLVQFLRYKLAWNGGTLVEVVAAYSSQTCSVSSCGYVDANNRHGEVFHCLKCGHTEHADTNAAKVLLLRGTPGDATGAACGGYAEVRRPAKQELRVVRRGQRSAQGLGSSFKAKAPAFRPG

SEQ ID NO: 13060 - protein, 374 aa, Clostridium sp.
LIKAIKIRLFPTKEQEILMLKTIGCSRFVYNWALNRCNELYKQGIKYNMSDIRKEFTQLKKKNNFKWLNEVSNTTMVESMRNLDRAFKSFFKKIGKYPRFKTKRKSRQSFYVRYDNLYFKENVCNIEKVGKVKFKTNYKIPNCKYSNPYCNFDGKYWYLSLGFKVEESQTTLNQDLSVGIDLGVKDLAIVNCLDKPIKNINKSVKVRKLKKRLKRLQRQVSRKYEANKQGNKFIKTNNIIKLEKEIKLIHRRLSNIRLNHIHQATNMIVKLRPYRVVMEDLNISGMMKNKHLAKAIAEQCLYEFIRQMKYKCEFNRIEFIQTDRFYPSSKTCSNCGYVKKDLKLKDRIYVCPECGLEIDRDKNASINLGNYKIA

SEQ ID NO: 13061 - protein, 382 aa, Anoxybacillus sp.
MCDDLCFKSKNLYNYANYIVRQEFINNNEWIRYNSLDKMLKHEQVYKELPAQTSQQILRLLDQNWKSFFKAIKDWSKNKEKYLGRPKLPKYKKKNGRNVVIFTNQQCKIKDGYIKFPKTDLKLKIKVTEGLQQVRIIPKGSVYVIEVVYKKEIPDMTHESNRVVGIDLGLDNFATMVNNIGETPIVINGKGIKSINQYYNKQKAYFQSILKKQNGLDWSKRLEKITLKRNNKIKDFMHKASRYVVNWCMERHIDTVIIGKNDNWKQEVNLGKRLNQSFVQIPYNMFIQQLQYKCEEVGIKVVLTDESYTSGTSFLDGEAPTKENYDKSRRIKRGLFKSNKGILINADVNGAYQIIKKVSPNAFNKSYGVEAVVLQPSKISVS

SEQ ID NO: 13062 - protein, 392 aa, unknown
  TnpB Polypeptide
MATQTLSLKLPFLRLNAAKAAEFARLQALNTATANAIVAMPREERSALTTAHFADVELGSAWMNQTIRNARARTGVKRFTMLPLATNNQNWTLHKVGAAYSLGFGLVRGVKKRIPLEVYGAHAVRAFDALLEGTAKKGGLTLWRSRRGLWYALVSVTMEVPVAGNQGGWVGVDRGQNHLAVASTPGGLVRFWTFGLVRQARRHYAAKRRRLQKAGRHKTIKRLEHKESRLVRHVNHVISKQLVRFAQDQGCGIRLEELRGIRTNARQRTETKRQADKNRDYWPYYDLETKVAYKAALAGVPVDKVPAAYTSKSCSRCGAIGQRERHAFRCPRCGYRGHADHNTSRNVGRWVGLSCPVTLEKGDAAMAPVVSPGAVDDSLRAPYATDPARGTA

SEQ ID NO: 13063 - protein, 405 aa, unknown
  TnpB Polypeptide
MLVRSLAFRLKNPLSNDAKFLMEDFRLAVNNAIRFGLQTGVTSRNSLNRLAYSDFREEYPGMYAKHLVCAFEVAGSILKNHRRRVRKGLSSQTPFVRKLFMKAENQAYKLDRENGIIDLPIRAGLHIRLELVVSDYHRRYLDDESLSLGSLTLFSDRVVVTIRKHAPKPYAPASVLSLDTNERSLDGVLAKEDHIVTVVRAEFREVSVIQTTHHDRRRMLQKKKSHDRRTTKRLCVREGMREHHRIDYRMHEVANAVLSFAEEQRSMIVLEDLTGIRPSKGKKLNRRISIWPRRKLHRIIEYKAAWQGIPVIKVDPQYSSRKCPVCGRIQDSRKGTEFVCGCGWHLDRHINASINLLQTAASEKAAGGLWFSPGAFQHDVVMVLCGPGRTVRPEPNGTSNVRVSV

SEQ ID NO: 13064 - protein, 174 aa, unknown
  TnpB Polypeptide
LLQQRVSKKQKGSNNWKKAVAKVAKLHEYVANARKDFHWKIAHQLCQQAGTIFVEDLNIIGLSRGMLGKHCLDAGFGQFFQILEEVCFKHGVYFQKVDSKKTSQICPNCLTETGKKELSERTHVCQHWGYTTDRDVAAAQVVLIRGCAAVGHTVKMLGEGKVVGLPVNQDSSPL

SEQ ID NO: 13065 - protein, 454 aa, unknown
  TnpB Polypeptide
MLKAYKYRIYPNEEQKTIFAKTFGCVRLVWNLMLKEKLERYQRISELKNSQSLSGDLRNAYSTLTAYNNKEKIPRTTPAKYKSEYPFLKEVDSLALANTQLNLEKAFKNYFKNPKHFGLPKFKKKKNKQAYTTNNVNNNIKIDFENGLLYLPRIKNGIKIKLHRKFEEKIKSVTIVKTTSGLYYASILVETENVKNKVKEPRAIESHFWSKEQAQPLNSSEKCLEHTINRVCGIDLGLKDFAIITNDTGIYKIEHPKYLRKAEKRLKRLQIALSRKQKGSKNFEKARKRLAIQYEYVSNARNDFLHKLSKAIIDDNQVIVVEDLNVKGMQKTDLAKPVSDSGFGTFVRYLEYKADWYGRQLIKVDRFYPSSKLCSVCGYKYKELKLSDRYWQCPICGTYHDRDINASINLYKVGMEQPEFKPVEHALVDDRIPFGIPKKPSCDEAGSRTFYKVR

SEQ ID NO: 13066 - protein, 550 aa, unknown
  TnpB Polypeptide
MRKLMPAHTVEVELAVLERQNWKMQRVGEHLRIIRNTVLGQLLKNYNQMTRTKEYKRTIKKYHALCKLIEKAEEPAELQKLKKEKEELNEKLEELRNQYNVTFEYSRKYGEYLHNTKYTLPDAVTVLSVCEMAWNSIEGLLFRDAEKVHFYKKDDWATFQGKQAERCIILKRNPDYTFYVKFNKMKFPLIVKKDDLYIKETLANIVHCMKHRDEMDRRNMALYNLGLPLISTYRVCNNRIVRKIIRGKTRYFVQIVLEGKPVPRRKKDSSLRHTYGVGRLGSDVGTQSLGTVDNNNVILENLAERSENTFSHEHKIYLLQRYMDRSQRAMNPQNYDKNGTIKKGKKAWVYSKRYQKARARLKELHRKAAESRKYAHNEEVNRMRTMGNELIIENMNIKGLQKKAKEVTINQKTGKFNRRKRFGKSILRRSPGYFIKQAKYRFETSGGIVKEVNTWTFKASQYDHILDGTSKKKLSMRWHELPDGTKIQRDLYSAFLLYCSGKDLQSPDKALCDAFFERFLELHNRCVEDIKTSRKVVMNSGIRFSGKSVA

SEQ ID NO: 13067 - protein, 227 aa, unknown
  TnpB Polypeptide
MPKKDWKLKSATVSQSSDGKFYASVLFEYESDINYQVDFNNAIGLDYASNGLFVDSNGRRGTNHKFYREAQKKLAKEQRKLSRKTKGSKNYYKQLLVTNKLHRHIANQRSDNLHKLSTEIANQYDVVCVEDLNMAAIGNKGFKNGKATYDNGYGMFLNMLEYKLSDRGKTLVKVDRFYPSSQLCSCCGNRKKLELSDRKYICTCGLEIDRDLNAAINIKNEGLRLLA

SEQ ID NO: 13068 - protein, 404 aa, unknown
  TnpB Polypeptide
VKLRVKVDHAIYSALKEVEEEYSEVLEDAINYGLVNKTTSFTRIKSGVYKTEREKHKDLPSHYIYTACEDASERLDSFEKLKRRGRSYTEKPSVRKVTVHLDDHLWKFSLDRISISTKRGRILISPTFPKIFWEYYNKGWLIASEARFKFLKGNVVEFYVIFKKDEPKPYEPKGFIPVDLNENSVSVLVDGKPMLLETNTKKITLGYEYRRKAITTGKSTKDREVRRKLKRLRERDKKVDIRRKLAKLIVKEALESMSAIVLEDLPRRAPEHMIKDVKDKQLRLRIYRAAFSSMKNAIVEKAREFGVPVVLVNPSYTSTVCPVHEAKIVYQPDGGDAPRVGVCEKGKEKWHRDVVALYNLRKRAGDASPVPLGSKESHDPPKRWLRAKSLHSIMIEHKMIEMKV

SEQ ID NO: 13069 - protein, 652 aa, unknown
  TnpB Polypeptide
MRKKKKKKNKSFFEKKEKGSFITIKTSLKSILKNYDVNFPIINNIVLECNEIVIRTYQFIRLYILYKFYRNEDIPNFDKDTILYFIRACGIRDKRGKKATNKKLEDELNEFYENQFKNCINKPKFNLKNKSYLTPYLAQQIQTSFNNNLKEHFITRIRRFMNITNPDNKLDKNNFCKIKNLILLDKSDKIPEIISKINNLSQPNKDILSRKYMDFSNEIKNNYLPKEYDKCYGYDVKVNPMKYLFYTIKMNKTIEDINKEIKNNKNLTDEEIRCKTKKLFQPISLRKTIIPSYITLDTNVILSIFKNSGESNMNKETKKNKDKIWDKIFRINKRVMKMKDYEYKTIQTDGIGVSICFQKKGKKYKENSKIDDEDNEMYISDLTIEDLEKCKTKKLVSIDPGKKDLVYMVDDNKNKLKYTSCQRRIESLSKRCNKIIQTEKIKKGIIEKETILSKYNCKTVNYEEFKKYIIEKTKLNDELRSFYEENLYRKLKWRTCIYRRKSEDKFLNRIEEKFGKNLLLCYGNWSRTKQMKYIMPTKGIGLRRIIRKKYDVVLIDEYKTSKLCNHCGNELENYNNIHRLLVCKNCKGNIKANKSNGSESKKITFMNRDMNACMNMLEISHKWIKFRERPNKFKRKPLDTCFSNEKILTCIQ

SEQ ID NO: 13070 - protein, 398 aa, Streptomyces sp.
MSGNHEKRAFKYRFYPTGAQAAELSRTFGCVRKVYNLALGARTEAWTRQERVNYNATSAMLTAWKKTEEPAFLNDVSSVPLQQTLRHLQTAFTHFFAKRAKYPRFKSRKKSRKSAEYTTSGFRFRADGRLTLAKMADPLDIVWSRPLPEGAEPSTVTVSQDAAGRWFVSLLCEDPAIKPLPAADEAVGVDVGLDHLLTLSTGEKVASPRHERRDRARLARAQRELSRKAAGDGANRRKARRKVARVHARIADRRRDHLHKLTTRLVRENQTIVIEDLAVRNMVRDHTTARAVSDAAWAEFRRLLEYKAVWYGREVIAVDRFFPSSRLCSACGTLQGKMPLSVRTWTCACGTRHDRDTNAARNLLAGLAASACGAGVRPQRSTPGGQSATKQETPRRKP

SEQ ID NO: 13071 - protein, 446 aa, unknown
  TnpB Polypeptide
MKPKCRKKRAKPQPGEPQRITKAVTHIRLLEANVGKLAALDALAPVYLALCQQYVTLFCTDEAPNKLRAPLFQTPLSERWHRVAIQQAAGIAQSWRTNWAQAYQGYLEELEEYREQEAEGSLDPKAKEPVWREWDVPTLRQDCIQANVNVVKLEVSEDSTFDYWLKISTLEFGKPLLVPVKLADYHRQALKDKMINTSVQLNKHPDGWWLTLSYDELVTVQIGVSAPVVGIDVGITNFVTTSDGKHYGSFHKKLKERHKRDREKRRRKAKLRACLKKKGVKKLPSTSSRSSQRLSRHVRQEINRAINQCFDEHPDAQLAYEQLSVSTMKFKARSMNAYLYASNLGHIPKQIEWNANKRGIQATKVKSAYSSQQCQVCSYTHRKNRPDQQTFCCQVCHFQTHADLNAAVNVERRLGDRQLQACKNKEAIKALLMKRHEAWKRLQGWS

SEQ ID NO: 13072 - protein, 412 aa, Pseudobacteriovorax sp.
MQYFRYKLKLNKTQEAIINQWIGSCRCLYNIALEQREMNDYKELRARSFASLEIRSQLDSKKKKTWKKYKGINWASQDKELPLLKEEFPWFKDVPSQTLQQTIKNLDGAYKRFFEGIGSYPKRKKKSRPFGIKFPQGFSFQDHNNPKKGYITLPKIGRLRYLKSRDLEGKSRSVTLRKEGNDYFISVLCDIGDKYDSIISSSKSIVGVDRGIAKTLALSDESEHSLDLEKLKSIEKKIAQEQIKFSRKTKFSSNWYKSKYRINRLHKKATYIRQDFTWKSAREIAKNHGVIALEDLKIRNMSSSATGTVENPGKMVAQKSGLNRSILRMAWYDWSKKLEWQAKKHGSKVIYCNPQGTSQTCNKCGHRNPLNRVNQSTFICQNCNHSTNADLNAAMNIKDKASGQGVYSLKAS

SEQ ID NO: 13073 - protein, 379 aa, Microbispora sp.
MCGMARIVKRAYKYRFYPTPEQAGELARTFGCVRLVYNKALEERTRAYTLQGRRVSYAESSAALTLWKKTPELAFLGEVSCVPLQQALRHLHAGFANFFARRARYPTFKSRKKSRASAEYTRSAFRWRNGRLWLAKMDDPLDIVWSRPLPEGADPSTVTVSRDAAGRWFVSILVEEKIPPLATTEHVVGVDAGISALVTLSRPIDGLTDEDGKVANPRHEWADRKRLAKAQRSLARKAKGSANRAKARLRVARVYARISDRRRDFLHKLSTRLVRENQAVVIEDLTVRTMVRNHCLARAISDASWRHLRSMLEYKTAWYGRELLVVDRWFPSSKLCSACGVLAGSMPLNVRTWQCACGATHDRDVNAATNILAAGLAER

SEQ ID NO: 13074 - protein, 363 aa, unknown
  TnpB Polypeptide
MSLITKTLSVRVRDKHAKVLNQMAFDCNQVWNAANALSAEYAWIPIPGVGYLSGNTSEFDLHAELKGLREERGLTIGAATAQSVISQHAKSRKQFKKNKLAWRCSGGPKRALGWVPFKAAGIKFVSGQVRFCGHYFKVWDSYGLSQYELGTGSFSQDARGRWYFNATVEVESSVSPGKKAIGIDLGLKTVATCSDGTQFERVRLVDDYADRLAIAQRAGKTARVKAIHAKIKNRRKDALHKFSTAMVEQYGAIFVGDVSSSKLAKTGMAKSVLDVGWFMLKTQLNYKAIARSVVFEEVDEKYTTQTCSSCGALPDSRSKGIAGIGIREWTCAECGATHDRDINAAKNILARGHARLAGGIPGL

SEQ ID NO: 13075 - protein, 392 aa, unknown
  TnpB Polypeptide
MLKGFKTELRVTDEHIIKIHQSIGICRFLYNSYLAKNQVLYELYKEGKIDKKQAFMSANDFDKYINNEVKVLEEFKWINNCGSKARKKVIVNAEMAYKRFFKGQSKFPRFKKKKNQDVKIYFPKDNKTDWTVQRHRVKIPTLGFVELKEKGHIPTSAKVVNGTVSMKAGRYYVSVLCDVVNHNDYSSIHNEGIGVDLGIKDLAIVSNIDEPFKNINKTEDIRKLKKKLKRFQRQVSKKYEMNKDGKKFIKTKNIIKLEGKIRTIHQRLSNIRLNYIHQITNILVKSKPEYITIEDLNVKSMMKNRHLSKAIAEQSFHEFRRQLTYKCLWNNVELRVVDRWFPSSKICSECGSIKSDLKLSDREYICKDCGIILDRDKNASINLMNAKDYIVA

SEQ ID NO: 13076 - protein, 382 aa, Acidobacteriia sp.
MESILGRLNWLYNQALERRKTAYQEREESLSLYDQYRWLTQLRAANEHGLGEIAVGASRGMLRRLDQAFQAFFRRVREGEAPGFPRFRSIRRCVTIDVAGPHNGMVRSQNGRYLIRVKGFPRLWAYSGRRLPLDAPLKALRLTKRGRQWEAALVYEVERAALPASVSAVGIDMGVRKRMTCSDGTRYARGRRNRRRQRKLQRALARCQQGSRNRGKRRAALARQARKEHVRERNACHRATTEIIRRHGLIAVEKLQIKNMTRSAKGTAAEPGSQVQAKAGLNREVLAQNWSLLFSQLRYKAGWAGRELVEVNPQYTSQQCSRCGSRNRPGKSETYRCRCCGLVADRDVNAALNILAAGVIAAGAQTWAVGPCVAPEPYAEAA

SEQ ID NO: 13077 - protein, 413 aa, Clostridia sp.
MMARRVEKHKIRKSDPHFDLFKHFCHLSKNLYNHGLYLMRQEYRNTGKVLKYTQLNKILKTDTVYPDYKNMPTAQCAQQTLRVLVSNFKAYQAALRSYHKNPDKFTGKPKLPGYLRKDGYFNLYLTNQNCRFKNNIIQFPKVFDGFEMVPFFIQNKNFRTFQQINIKYDQGCIIIHIVYTTNTPNAKPSNGHVVGINIGVNNLACVANNFGADAFCINGKPIKSINQYYNKRQADMKSELMICNHAHKSNRLNRLSNKRSAKIIDYMHKASRRIIDWCVEHDVTKVIIGHNNGWKQNINFGIANSQVEKQVRQNFTSIPFKTFIDMLCYKANDRGIAVEMVEESYTSGTSFIDDEKPDACYYDKSRRVKRGLFKSNNGLLINADLNAAYQIIKKEVPMKWDRGCVLHPVMLTC

SEQ ID NO: 13078 - protein, 397 aa, unknown
  TnpB Polypeptide
MVSGTEYHRRTLITRLSIRNEADEQLLHDTINEWLDGANIGSDLAWETCNTKSAVRNLAKDKIKQDTELGDQHATLACHEVASSITSCIERRKNDKKASQPHFTTPSMTFDRRTLTVFPDQEKITLTTLGDHSRVHADLCLPDDEDGYQHDYLDSDEWEYTESTLHYRDGDWYIHLGYRTPKDEAPESTTENGTVLGVDLGVNQIAVTSTARFFDAGELNHYRQEFENTRGSLQQTGTQSAHRTIEDLSNREERYVKHVLHGVSNGIVAEAVEHECEGIIFEDLTDIREDLPFAAWHSEWAFRKLKDFVEYKAEYEGLFVDTVKPRNTSKRCNECGFTHESNRHAGEFECVSCGKTNHADYNAAKNVAELYLRRGHQPSGRRSVSQYALKSGSRTPS

SEQ ID NO: 13079 - protein, 422 aa, Alkaliphilus sp.
MAKGKTKNILFGIQKQQLKHLSADEYKAIRDLCFLSKNMYNVALYNIRQYYFLEKKYLSYESNYKLCKDNENYILMNSNSAQQIMKVADRSFKSFFGLIKLAKKGNYQYEQISLPKYLKKGGFFNLIFAEFSLKNGFFTVPMSTSFRRSYGKVSVKLPSNLSDKKIKEVRILPKSNARFFEIQYIYEIEPSQETPNIDNALAIDLGIDNLATCVTNAGKSFIVDGKRLKSINAYANKVNAKLQSIKDKQKIKGTTNQQKNLWDKRNRTVNDYLNKSARMIINYCISNDIGTLIVGYNPTIQQESNMGKKNNQNFVNLPIGQLRDKLGYLCKRHNIAFVEQEESYTSKADFLANDTVPTYKAFDSGIYTFSGKRIKRGLYQSSTGITFNADVNGALNIMRKSKATKIDLQSEEYLSPTRLKVS

SEQ ID NO: 13080 - protein, 477 aa, Okeania sp.
  misc_feature (44)..(44): Xaa can be any naturally occurring amino acid
MTDLYETDFVQWTEEQAKALSEHNEKALDWENLKEEIDNLGKEXRSYGSVGIPVPLGRGGCQEYKLILDKQQIEIIEHTLDVCRSVWNYALRERKDWLNSRKSPVNVCSLEQEYIISADIPYPNYYQQAKALTEAKKTNERLKSVNAQVLQQVLRTLDRAFADMQSKKLGFPRFKNKYRMRSYVYPQMLKDCLQGNQIKLPQLGWVNFRKSRDIPDGLGLKQARIIRRASGYFVMLSMQLDVNIPDVPFHGHPLGIDLGLDKFLATSDGELIDRPRFFNQLHRELKLLQRRLKNKKKGSKNRNKLNQKISRLHQRISDIRKDWHFKLAHHLCGQGQSIFLEDIDFRSWGRGMLSKHCLDAGFGQFVTILKWVAWKRDVFVAEVDKNFTSQICPNCGFHTGKKTLDLREHNCPECGYKTHRDVAAAQVVRNRGVKENALGHSVLENACGDGLTGALPSQESVKQEILNVSLRIAHYTA

SEQ ID NO: 13081 - protein, 406 aa, Symploca sp.
MIVYEAKLKGSQHQYERLNEAIRTGLFIRNSCLRFWEDGNAKSRNDLYKYVTRLAKDAEFPWAKKLNSQARQAMAERTWAAISRFFDNCKKQIPGKKGYPKYKKNRPNHGSVEYKVTGWKLSENRDRITFTDGFKAGGFKLYGSRDLNYYQLEQIKRVRVVRRADGFYAQFCIDYDRSEEKKPTGKTVGLDVGISAFYTDSDGNKIDNPKYLRKSQKALKRLQRRVCRKFKKNSTHSSNYNKAKQKLAKKHLKVSRQRKDFAVKSALCVVRSNDLVAYEDLKVANMVKNHKLAKSISDASWTQFRTWLEYFGKVFGTVTVAIPPHYTSQNCSNCGTTVKKSLSTRTHKCGCGTVLDRDENAAKNILKLGLRTVGHTGTFQSQYWINASGQTSLWCLDESQDTKFAG

SEQ ID NO: 13082 - protein, 301 aa, Microbispora sp.
MRTAYRVRAYPTAEQAAALNRTFGCVRLVWNTVLAWRQARYRAEGVKTSYAQTDRYLTELKRDGGHDFLYEVSSVPLQQALRHQHKAFANFFAGRAKHPRFKIPNPRHLERKAKNLARYQRRMARKQRGSNNRAKARAKVARAHTKVRDARADFLHRTSARLVRDHDLIVLEDLNVRGMVRNRSLARVISDCGWGEFRRQLEYKTQRYGRRLVVIDRWYPSSKTCSACGHLLPALPLSTRHWMCPGCGTRNDRDVNAAKNILAAGRAVSACGADVSHSGSSRMRSAVKQEAQPARAGVPRL

SEQ ID NO: 13083 - protein, 385 aa, unknown
  TnpB Polypeptide
MIQHYTYNYRLYPTKKQSILLDKHFGCTRFIFNYYLNKEQNYYLNNKENIEAKRVKGFLNYYDNAKDLTNLKQTTLWLKEVNSQTLQSTLKNLESAYRGFFQKRSKFPRFKSKKSRQSFCVPQHLSIKNNRLYIPKFKEGIKINLHRDLVGDFVTASIVKTKTNKYFVNITVELDIKELPKLNTDLGIDLGIKNFVITSNGEVFDNKHFLKKVESKLKFLQRQASKKVKGSNNRKKVNLKVAELFEYIINCKKDYLHKVSTQLIRENQTIYIEDLNIKGMLSNHHLAKSIQELSWYEFIRMLEYKAKWYGRSIIKIDRFYPSSKTCNNCGYIKQDLTLKDRNWICPKCHTEVDRDYNAALNILKQGRNCLVKPMELSSNNIEAVK

SEQ ID NO: 13084 - protein, 550 aa, unknown
  TnpB Polypeptide
VRTRLRVSAQDETVLWAIGSHLGSLAGRDLAARCAQGHLDVKGKADSRAARKRALTAECSSRWAGAITRTSEDQYQRGEQNLRDEQATLTARIRRIEARLAVQVGGNQGRASGYATRAERHAKTIRLKALKARLARVERRLKSGAVSVVRGGKDLLRKKNNLGDAGLTEEQWHREWNSARLFLTADGEKGALWGNYTIRWNPDEGWVEVNLPAPLTHLANQSRGRYRLSCPVGFSYRSDEIAAQAASGAVRYDISFDVAGGRWYIDASWKTSPAPAVPLDELCQQAVVSVDLNDGHLAAAVVTPDGNILGTPTTIGLNVAGLPSFTRDGHLRAAITGLIAVAKSNGARAIVIENLDFAEARSEGRERAGNRPSRGKRGRSFRRTVAGIPTAKLRDRLVQMAFNAGLSVIVIDPAYTSRWAAQHWLRPLREHHPKTTGHHAAALVIGRRGLGYRARRRVTGNQTAPEEAARPAQTRPGTKLATKPAPRKPAAPRGPRQPPGTKTGRPHRTTAGNQATQDRSGPSATEGSNPASSTGTVARDRTWYRHWKGP

SEQ ID NO: 13085 - protein, 408 aa, unknown
  TnpB Polypeptide
MYNMYIHYYNVKKYNRQKEVQKLKGYKYRIYPTKEQQEIIDKTFNCCRYVWNGFLALKEFRFKEFGEKLNYNKMSALLTQIKKSDTFLNEVDSTALQQTLKQLESTYKNWFEFVKENGVRYSPKVVERLKRKNKKPTIIDSEAHPKFKSKNNPKTSYKTTTCKIKGNQVLIPKVGLVDIIWSRKFNGKILSATISKTPTEKYFISFCIDETTSKLQPVTKEIGIDLGLKTFAVCSDGQEFKAPKPMWKNISRLKKLQRKLSKKKDRKSNRYKKLKLQIALLHERIANIRKDFLHKLSTKLIQENQLICLESLDVKEMSKDKRISKAIMDSAFGTFVIMLNNKGKMYGRNVVQINQYYASSQICSACGYQNALVKDTSIRKWVCPQCGEEHDRDLNASINILVEGRKIH

SEQ ID NO: 13086 - protein, 454 aa, unknown
  TnpB Polypeptide
MRRKKKETENPIPTIIRTHKIRIYPNEHNQGVFQKYYDYQRSVWNRAIDERKAQYKIYKEMKATGLFTQKELNKNYYPNTRNLRKMEKFDWENNFHCRVREVQFDNLCQAWNNYFNPNMPNQQKPKYKKKKEVETHKTLSLRGVRTKDKWLFLPKSQKAKPEYRFTKIKMAESLRFNGRIVDDFSVSVKNNKWYVNISVETPLEEKSAISKQSTGIDVNVGSIDYLKKDGQEAEYGRFYLLPKSLLRQYDKIKFYSRLISKKRNKNPYYIHSKSYHEAITKLNNAYTKAYNIQESNLNNIVKYFFTNYNRIVIEDLDVNSMKMNKRLCKSLHRNAFGRFKQKMINKSKEYNVEFILADRFFPSTQTSSMPLLSKKSIIKWIFSSESSGLKSSKSEALVARSGYTLTTTHPSQPNFLLALIILLIVLSLYSSFAAEGFIHTATSGFEPSRPSKNL

SEQ ID NO: 13087 - protein, 412 aa, unknown
  TnpB Polypeptide
MRSQKIRLKLTKEQERLAWWYSKVSRNFWNLLVDVDKRNNKGEFDEILKENGNKTYHSNFYDREIYHLNQSDYRNLANIVVAKNYEEDEENWSWYYQQNQSFIYAFVARELIKIRRQNKGKLKFKGIDTSPPSFNVRCDMSANKKRPSRIYLKDNGKLQIPTLGDMKFSSVRDGFDLSCKKQVANISFDGKYWYLSYTEDVDTQDIDLLKYTKGVGVDLGIKNLATLSDGTTVPNIKYFRRVRILEKRLKRLQRKVARKYRINKCNKHNKTKNIIKLERQIKLIHRSIRNIRINHIRNFVSDLVKQQPEFIAVEDLNVSGMIKNKYLAKDIVNCSFYTIREHLIRKAKERHIAVRLVNRFYPSSKTCSYCGHYKKTLKVSQRVYHCDNCQETIDRDLNAALNLANTDEYVLA

SEQ ID NO: 13088 - protein, 380 aa, unknown
  TnpB Polypeptide
MRTYKFRLYPNKVQQSELQLHLHWAKDIWNEMLNTTKQKYENEKKFSNINELNEIVKLSEYGLYSQVSQDIFKRLNKSIHGMTARKKKGLNAGFPRFKSIDRVKSLTYPQHGFSLNEKKLKVTPFGEINIKKHREIDGKIKTLTLKRESSGKWYAILITETELKSTPNNNGIRVGIDLGLINFAMLSDGTAIKNPKHLKKYEERLKKKQQKLSYKDKGSKNRIKAKGRLSILHETVRNTRKDFLHKLSTKLVHSHSFIALEDLKSQKMSEEGHGKSINDAGWGIFTNMLSYKAEDAGCEVVFVNPKNTSKECNNCGTIVKKDLWERQHNCPNCSLSIDRDLNAAINILNRATVGITGSNACRDETIVSSMKQEAHDFNHG

SEQ ID NO: 13089 - protein, 371 aa, unknown
  TnpB Polypeptide
MSVIYNKKIEITFKKNDIVILDNQSKICNWLYNHLLEICIKDYLHNDNSLKLLDGRNLRNYATNLKKEYPFLKTVYSAPLKECAYRIKRAYVKSFTSNAGLPNFRSWKKKWFSLVFDEPYKGWEVKEEGNIISISLGKIPNLPVEEGKRNPSVLGKLKVPMILEQNEKFKVFSLVKKDNKFYGIFTIEKLLPSVNCPQTKWISLNLETQYFFVAKNYKGEILYFKQPDLIKYWDNQIQDIKFKRDNCKTKYIKYTANGIKFTIRSSRWNKLNHTLNIARNTKQEQLKNILYQISIYLYKNYDLVIFTDYNSSTKPTGLFKRILKWTSEKQQKHFIINSECNDEICSSDNTASSIIIGEAYFNKGINFNKIS

SEQ ID NO: 13090 - protein, 483 aa, Desulfitibacter sp.
MGTATKTVKIKITDANKGKLEMLAKTKEEANNLLAFYIGVLNDHPEVINSESFIKEVEALTNRTLNNPTPKIPIEEHCIEPPSILKRSIIAHAVGKMKGYQANYERWLASGKKQGEPKLPSYKMNPSFYYSDCKLDIDDIQDQFVRLRVFDGNQWSMVNYPVKLTKQFKDMYQEHEKHLEHKEKLDAYAEILTTNGISKKEAKHLAVEIIGTNPHYKMGSPVLSFKRGNWYLCFPFEKKIHMKKLDNHLKDKQEPVTLAVDLGINHLAVITIKKGEQLLKTEFISGKQINDLRYSALQQITKKQRISGKPVKGEHSNKNLWSYVSNLNEDTAHKVSRQIVNLAKEHGVDVIVFEHLKNFTQKKGVSKAKRMNLKRNYWLHGKIINYTRYKAYHEKIYTVERNAFMTSQICYKDTQVGERFSPKSVNGKSLIVFEDKSILNADFNASMNLHRKFYKTFPRINIKETEAKQKELSNYITQNLVAI

SEQ ID NO: 13091 - protein, 402 aa, Pseudomonas sp.
MQRLQAFKYELMPTGEQQRQMRRFAGSCRFVFNRALALQRGYYEQGQKKLGYAGLCKRLTEWRHDPETAWLKDAPTHPLQQTLKDLERAYTNYFAKRADFPRFKKKGQGDSFRYPDPKQIKLDQANSRIFLPKLGWLRYRNSREVMGAVKSVTLSLACGKWYVSIQTEREVEQPIPNGPAVGIDMGVYRFATLSNGSFYEPLNSFKRYEAALRKAQQALSRKTKFSSNWMQAKARVQRIHARIGNARRDYLHKTTHTISQNHALVCIEDLQVCNMSRSAAGTTEQPGKNVRAKSGLNKAILDQGWSEFRRQLDYKLAWNGGWLIAVPPRNTSRTCPCCGQVSADNRRTQAQFRCVECGFEENADVVGAINILRAGHARFACEVSGAVMPPAAGTHRSDSAGA

SEQ ID NO: 13092 - protein, 214 aa, Halobacteriales sp.
LNDRYGHTGRLRLEIAGVPNWPDYKKQDRLDLWYDETDSTFRASQPVTVPDDARATPLADEKAALDIGANDLVACTTTIGEQYPYEGRDLFDRFRETTREIARLQSKLPKGRYSSERIRRLYRKRTRRRDHAREALCRDLLERLYEDGVDTVYIGGLTDVLETHRQSKPTSGPTTSDRSRNPPNDWSVPPRNTASRWKSGRKPGPVKSARSAVR

SEQ ID NO: 13093 - protein, 265 aa, unknown
  TnpB Polypeptide
MDSLTTVTVTNQDAVLYPEESGVSLKLPLIKERILLSNISGRSTLKEIKIKPYYGRFLLCLTMEEPDITETLSMPHVCAIDFGTDNFAAIVCDDHSSAIYKGGAVLSNTQWFHKQRAKYISIITKGHSQMNATSARLKDLSFHHANFTKDQCHKISRNIIDFCLEHQAGTLILGVNPLWKQRTNMGTASNQKFVAMPISILRTMISYKALNAGIRIIEQEESYTSKADITMNDYLPTYGKDDNNATFFPVHVLHVGFIVVRMGRS

SEQ ID NO: 13094 - protein, 132 aa, Nostoc sp.
MGEVLDVGMGMLRSSIEYKLSEAGGIFVEVPTQKVKPSQTCPNCGNQKKKELSERIHDCPCGFTCDRDVAAAMVMLNWSQSLRGVSPSEASGVATGTGTGLDKRGSDGSTSTHCGGFKQLAEMKRQKPRPSS

SEQ ID NO: 13095 - protein, 408 aa, Nostoc sp.
VKTSYQYRLRPTKQQVIQLDRWLDMLRCQYNYLLADRFRWYEENRCSINSCSILVCHLPELRNNPTYNSQQDSLPQLKAYRPWYKEIHSQVLQNAAKRVELAFDRFLGGDCNGKRSGRPRFKGANQYKTFTYPKVKSDCIDSGFIILPKFGKVRLVQHRPIPDGFKIKTCSITKKSDGYYVTLSLEDDTVPTIKPDFNPDSIIGIDVGLKEFLTTSENEVVAIPQYYRKSQKRLRVIQKRVSRRKKGSKCRQKAVKQLGRQHKKVADKRKDFHFKTANNFLKKYDVVAVEDLNVKGLARTRLAKSILDAGWSNFLSILKNKAANAGLLVVPVKASGTSQDCSNCGVKVPKKLHIRWHNCPSCGCSLDRDHNAAINIKNRAVGHSVLKAQRLLSNSRIGCEAYTQSVLR

SEQ ID NO: 13096 - protein, 327 aa, unknown
  TnpB Polypeptide
MIRLLKSFKTEINPTEEQKIKIHKTIGTCRYIYNFYLFHNKELYTLGKKFMSGKSFSVWLNNDYLPNHQEYSWIREVSSKSVKHSIEDACTAFSRFFHHQSGFPRYKKKGRSDVKMYFVRNNPKDCLCERHRIKIPTLGWVRLKEKGYIPTSRDGYIVKSGTISMKAGRYYVSALVEVTDPVRDSCFSDGVGIDLGLKNLAIISNGTVYRNINKTARIRKLEKQLRRAQRKLSRKYENLKKGEPTQKANIRKQKLKVQKLHQRLENIRTDYINKTISEIAKTKPSHITVEDLNVSGMMKDRHLSKAVASQKFYEFRTKRNCTYHYKR

SEQ ID NO: 13097 - protein, 414 aa, unknown
  TnpB Polypeptide
MSAVMSVMPTRGVAFRIKGELPPEARFLLDEFRLAVNGAIRVGLQAKVTSRNALTKLAYKDFREEHPRIYAKHLVSAFEVAGSVLKNYRKRLRTGDASRVPYVRRLMMKTENQAYQLDRGRGVVDLPIRAGCHVMLELEVGDCHRRYLNDHSLRLGSLTVLPDRVIVAFRKEAPRPYAPESALSLDTNEQSIDGVFVKSDEAKAIKTDYQEISIIQQRHHDRRRRLQKKKAHDRRTCGRLCRREGRREHHRIEYRLHQVANAVLSFAECRKSAIVLEDLKGFKPTWNKELNRRLSFWPRRKLHQIIEYKAQWRGIPVVKVDPRNSSRTCPICGSIQDSRMGTEFECGCGWHLDRHINASLNLLQTAISKGLEVAGGLRFNPGAFQHDVMMILYEPAMAARSELNGTSCVGAVVS

SEQ ID NO: 13098 - protein, 265 aa, Oscillatoriales sp.
MAKHAGVARHAWNWGLATCKEIYEAGGKLPTAIDLHKRLVAEVKSQNPWYDEVSKCSPQEALRNLNKAFKRVWQVKGTGFPKFKKKNVKDSFYLEGIKVSGYWVKLPRIGWVKSHEQLPPVNPKNVTISKRAGDWYISFKIDVEPQATPKVRERIGVDIGIKTLATLSDGTTYPNPKTYRHAKKKLAKLQKELSRRQKGGKNREKTQLKLAKAHRRIADIRSDHLHKLTAYLAKNHGEVKIEDLNVSGMLKSHKLAGAIALWWVL

SEQ ID NO: 13099 - protein, 412 aa, Oscillatoriales sp.
MQLVEKHIISKNHYLFKEADYLCFLSKNLFNYANYMIRQQFFATGEYLNYYSIQKRCQGTPDYIALPAKVSQQVLLRLHESWQSFLSANQEYKKHPEKFQSRPQIPKYKHKTLGRNVVTYTGQAVSQTALKRGLIHLSKTQIVLTTQVKDVCQVRIVPGLAHYQIEVVYSAPENPVKTNKSGGIAGIDIGLNNLATVTANKQDFQPLIINGKPLKSINAYFHKKRAALQSLLAPKQKTSHQISRLTHKRNCKIDNYLHNASRWLIDHLVANSIETLVIGKNDHWKTGINLGKRTNQNMVSIPHARFIQMLTYKAQLVGIKVVLVTEEYTSKCSFLDQEPLCKQEVYQGRRIHRGLFRSGNGTLINADVNGSLNIIRKAFPNAFAEGIQGVVVPPVRVTPYKMVGAGKCNICL

SEQ ID NO: 13100 - protein, 300 aa, Bacillus sp.
MTLHNKAYIFRLYPTEQQAHLIRKTFGCVRFVYNKMLAERKEVYEKHKGNKEELKKQKHPTPAKYKVEFEWLKEVDSLALANAQLNLQTAYKNFFSGQNDFPTFKSKKNRKSYTTNRVNGNIMLLNGHIKLPKLKLVKIKQHREIPQDYVIKSCTISMTPTGKYYVSILTEYEKEIVQKEAETVVGLDFAMSELYVSSEYEKANYPRYYRQLLERLAKAQQVLSRHRKGSERWNKQRIRVAKLHEKVANQRKDFLHHKSKELVNNFDVVAIEGLSMKGMSRVLGFGKSVADNGWGCSRLS

SEQ ID NO: 13101 - protein, 571 aa, unknown
  TnpB Polypeptide
LRVLRDPFVVAAPAGARIRTRLQVTAAEAAVLRQVGEHLGGLAGKDLAVRCADGNSDAQVKAYSRRFRKQELTAGSSSRWAGAITRTSEDSYQLRMRNLKAEVQSLQTRVKVITERLARPAGGEDDQGRPGYADQAERFAKQQRLQVLSARLAACEATLGSGRLSVCRGGWRLAHSRHHLDDADLTAEQWQEQWRAQRLFLCADGEADKAWGNETIRWNPNTLSLEIKLPAPLAHLANSRFGRFTLAAPVDFPYRRAEAAAQAAGGAVRYDITYNPAKKRWYLDASWKTDPSAPLTLEQVQYGPVVAVDVNVGHLAVAALTSDGQPITAPFTIALELAGLPATARDARIRRAISQILRVAADHRCGAVVIEDLNFEESRIQGREQQDNRPRRGRKGRTFRRSIAGIPTGQFRDRLVQMATNANITVVAVDPAYTSRWGAQHWLPTLKAQFHNQLSGHHAAAVVIGRRGLDQRAKRKGERVTDPHQRMKRATPPHGVARVGELRNPLGGPSRTVAPGLIKATAVQGQRTRKDSRRPSRDGSKTEKPNRQTSTKATQDRSGPPTIADPLSRRV

SEQ ID NO: 13102 - protein, 381 aa, Marinobacter sp.
MKKRAYKYRFYPTSAQEQLLARTFGCLRFVYNAVLRYRTDAFYERQETIGYIQANAQLTALKKDPELAYLSRVSSVPLQQCLRHQQTAFKNFFEGRARYPRFKSKRHRQSAEFTRSAFKYRDGQLYLAKSKEPLAVRWSRDLPCEPTTITVSKDSAGRYFVSCLCEFDPRTLPVTPRMTGIDLGLKDLFVTSDGYRVGNPRHTAKYATKLAKAQRRLSRKKLGSRNRAKARMKVARIHAKLSDCRMDNLHKLSRKIVNENQVICVESLNVKSMLRNRALAKSISDAGWGEFVRQLEYKADWAGRQVVAIGQWYPSSKRCSGCGFVMDSMPLNIRHWTCPKCSAKHDRDLNAAINIKAAGLAVLALGENVSGMESVSLSGSL

SEQ ID NO: 13103 - protein, 357 aa, unknown
  TnpB Polypeptide
MILTYRYRVKDKTSAKYLRRMAGAVNYAWNFCCATQREAESRWRAGAVSRWPSRFDLGRLMTGASVDLGIHSDTLAAIARQFAQARNAARHCPAWRSRKKGSLGWIPFNAARAFRVNDGCGVVVVLGRKYRLWYSRRIPDDAKIKTASFCEDSRGRWYFNIQIEVAEASAKTGTAVAIDLGLKDLAVLSDGRKIEMPAFYRSHEQRLALAQQRGQKRRATALHAKTKNCRRHFLHEQSTWIVREHGHVIVGDVNAADLAKTRMAKSVFDAGWSTFREMLRYKALRHGVSFEVVDERLSTQTCSDCGAIGGPKGIAGLGIRQWTCGHCGSSHDRDVNAARNLLAGAERRPPVAEIPSL

SEQ ID NO: 13104 - protein, 487 aa, unknown
  TnpB Polypeptide
MLRRAVAVELEVTKEFNKLLYGVESAYLGIVREVVEYAVKHNVTSAVKLQGIFYHKYRLEYPSLNSQLVIQAIRQASEIAKSFIAQRKKGLASKPYPEVRSISIRFVETTWNYEEFVKSIAPVRIAISLLGGRREVWLRPHKRFWLYWWRVLNGEAELASTLIVKRKANKWYAIFIFEIKPRREVPQSVVAFDINENTVAVGRIDLPSTVDRVVDWNRRYTTPQLYMIRTDFGKLAKRYKAIRNAIIEKLKPHFTLPSGNYVNVTNTREFRKQVRKLRERGRKVGRVRHVANELTRTPAIIITEELGENTQESMINEIKRNETRHRVKQTPFKAVERAVGDKALERGSKLIRVSSYRNSRVCPIHFTRLGETNDWHTLYCPVGHYVNRDYASVLNMAWKTTPGSWTKAFWWNMRKRMDWREYEGESNSLIPYEIVKYIHAALKTFTASEQSPAMPARAKPMNHHRIQNEGGGEETTQKRRRSDNLRS

SEQ ID NO: 13105 - protein, 206 aa, Okeania sp.
MDNKDVKRNDLQKLCSQLAKDANFPWVKKLNSQARQASGDRAWQSIQRFYNFCRLKLSGKKAVRPRDDDSRKGTRTKRGYPKFPSECCANKKFTRFLRNAAQTIEYKTTGYKLSPDRKKIEFKDGFKAGVFELWTSRDLVWYSEQQISLVRVVRRADGYYCQFLVNAERKETHNFEGNVVGIDLGLNAFYTDSNGSAVENPNIMSG

SEQ ID NO: 13106 - protein, 520 aa, unknown
  TnpB Polypeptide
MARKKAEHPPVHRTDLLPSNLTASKQAKVLDLLVHYRAGAVLLGREQWRLFHETGRFNKNHDVDKTTFAAVIGAANRVQMCRYQVVGQLQGWVSNRANKFRAVVNRSTLPPDTRHMLHVINRMGAWFLRADIAMKETGEIIPEDVRRLARSIMRQVMGRHRRPDLSRISMRLDHRAACLAAPTKARQAGKVGWWVNLSTMTAASKIAVPLLTYDYCAKRPGRVTNGVQVNRDREGRLTFGVVTDLGEACAKSRADYDGRGVLALDFRLSTLFATSEGQLLGQGWLKRLRRYDALLNLIAASQQRAGRRPRDSKRYRALVADVRGFLCTEVGRVMNRLVEQGKPKELVLERLDFRNPDLSRRLNAILRNCGRSVIQAKLADFEDRFGIRSTEVNPAYSSQSCNACGYVDKRNRRSQSRFVCLWCGHIKHADLNAAPNIGQRRALAIGSVFQSKASVLAEVVRAFGERRVRSMRPGRTGSRGAPADPRQTNPYFGGVPLSVVRSSKRREASAKSGTTQALAA

SEQ ID NO: 13107 - protein, 406 aa, unknown
  TnpB Polypeptide
MNQFVPLNKNCQKTYCQSYTCSLADKWANGGIKKNKSIGTYKIKINPTIDQQVILNKWINSSRYTYNKTIHKIENEKQKVNFYKIRNQIVPKNKIRSSERWLLDTPKDIRANSVKEAVTMYKSAFSNLKNRNIKYFKMGYRNKKKLQMESISIPKSAVQPSDDNKHIYLYKRYLKDPIKLTKEKLPLIETEIKLLHNKRCNYWYLCIPINYNIKTENQGDIVSIDPGVKTFQTLYDPTGKVIQIGSNDMKTTLVSLYKKIDKYKSLLTRSNKRRKRNIIKRIKFYYNKFNNLISEIHNKTCRFIYLNYNNVLISNIGPIKSERKTCNRQLLSWSHGLFIKKLTHHMHKNGKKINIVTEEFTSKTCGNCGWLYNDLSNKDIYKCNSCNLKISRDVNGARNILLKHLM

SEQ ID NO: 13108 - protein, 432 aa, Aeropyrum sp.
MARVARTVIVRSAPLPRKKFNALVELEGMYRNMVEQLVMHAVRNGIRSFIRLKALKYREMRKLYPHLPSHYAYTTCQDASTRAKSFLRLKKRGLTRREHPEVRSVVIWLDDHLWKPIGLTFIRIVTHKGWIKVELEPHRQYWRYVNRGWRLASEAKMKLDRKNRRIIVYLTLVKEVDEYKTRGYLPVDVNENNVTILVDGAAILFETGMRKLVLGYYYRRKKVQQKYDELYGVKSRIKRMILRKLRERKKKQDVRGKIANIIVRTAYEKQYAIVIEELGKRPANNMIRKVKDKQLRHRIFQASFRGVQRAIEEKAREYGVQVVYVNPKNTSRLCPLHNAPLAYSNGSRGGRCRKGGEQWHRDVVATWNLLLRALRGDGSAAPSPAGPTLDGGRVPFGPTATHEPTRVPKPVWARWNTLPQIQNSTTINRMKR

SEQ ID NO: 13109 - protein, 355 aa, unknown
  TnpB Polypeptide
MPASCGTWRWSRRTATGRAGRHRGPPSAADSWPRPGPGPGWSGGRRRQQALRDFDQALRNWWAATHRRPRWRKAGIDEGFCVRDVTVERLNRRWATILVPKLGPVRFRLSRPLPARFGMARVTLDRSGRWHVSFAAPQPVLERDPTGLAVGLDVGVVATLTTSDGAHRHAPGLRPGEAQRLRRLQRRLARQHKGSNRRAATKAAIARVKAREADRRRGWIERTTTALVRSFDLIAVEDLAVKHMVRSAKGTVESPGVNVAQKRGLNRAISAQAWSMIRRRLTDKAATCNVTVVAVDPSHIAALRCLRAHQPRQPPEPSGVRLPGLRASGQRGRERGAQHPRRRAGGHSAWRDIPR

SEQ ID NO: 13110 - protein, 371 aa, unknown
  TnpB Polypeptide
MKKVIQIQLKPTPEQAASLEKTMRRFNEACNWLAVRAFERKLANRFGLHKLYYYELRERFGLPAQMACLVSANVSAAYKTDTAKQVAFRPLASMPYDRHLLRYQDLTSVSMSTLDGRISLPMVMGDYQAEQFAQVKYYAELVRRKDGKWFLMAVIETDDLPPLDTDDFLGVDLGVENLATDSDGAIHSGDDVEQVRIKHQTLKQALQSVADLAANHRRRKRIRKKLKRIGDREARFRRNTNHCISKRIVAKAKGTLRGIALEDLKGIRQRTRFRKPQRNRMGSWGFDQLRQFVRYKAAQAGVPLKIVDPKYTSQMCSQCEYVERGNRSSQARFCCKRCGLIDHADCNAARNIRARALVNVPIVSTYSVAAG

SEQ ID NO: 13111 - protein, 490 aa, unknown
  TnpB Polypeptide
MVFVYTVGLKPTNQEKEQLNKRFKQAKSIYNLTLKELLKRNNKTKKDPLYKKAYKLPKGAERNKILKDLDKVYGLEGKFTGGKIASEFRKNLGLEDYLYSKICTQLGFRAWLAFSKMKFANGANRVNFSKQINSLISGYSDQGIYIDEDFICFGMKQKKKTLIKVKINFKRDQYEKQVFQNKLLYWRLIRKEINGRYNYYLQAVMDGFAPGMGLEGGRGSVGIDIGTSTVAVSSEVQTELEELFPDKKRFERSSEIARLNRSLDRKRRDTNPDNYNEDGTIKKGKKIWTYSSRYKKDLTKLSELKRKEALSRKLSHRTLAKKIVSYGDRFVVEKMNFVGLAKRAKETKVNKKTGKFQSKKRFGSTIGHRAPGLLIAFIKERAEKEGKVFIEADTRSVKASQLDHTTGDYIKVSLSARTKTVDNFKVQRDLYSAFLLQHVKDDKKTVDLELCSKNFERFLSNQDRTMRELETNLGSAGKKEFFKDELLKVI

SEQ ID NO: 13112 - protein, 443 aa, unknown
  TnpB Polypeptide
LLKKKFTIVTQLHTSLNKDLIDYIDKTLPSYSKAVRESFHNIKNSKSFNKSNYNSYLQQKYDITKRTANSIISDAQGRLNALIELKRYEQKQLKLKISNLEKNIIPKLVQKRGINSNLLNCGKKVSFIKQRNLRLKIVSKKNKLNCLKQKLSNVTYQIENKKLKLCFGTKDLLKRNYQKFKQKRDSQLSFVGCKLEPGCNQQLQLIFNPKNNQFKIKLRKDFGFKKSKRKNKIVEGQVYFRNHKNKIISILRNKNSPLTYKIIKNNNRFYLYCTFEIQLEKEDYLTRSSYGTIGLDFNKGFVTLAETNNFGDLIDTDVFRYRFRSGKKTKTDLQKIANEVVQLSREKGKDLCIENLNFKKTKSKTDSKIGKQYNQMIHSLAYSQFINLMENSAFKNSVRIIKVNPAWTSWLAKKLYCPTMKLNIHIGAAYVIARRGQGYKESL

SEQ ID NO: 13113 - protein, 401 aa, unknown
  TnpB Polypeptide
MIISKKVRLLPTKEQEEKLWQSVGTARFVYNWTLNRQLENFKNGGKFIQDGELRKEITQLKKSELSWLNEVSNNVAKQAVKDCCNAYKRFFKIKDKHYSKSTIEKAKRQNRKLTVYDLEGHPKFKSKKKSKASFYNDPIKLKVKEKKVLIEKIGWIKTNEQIPSNIKYNNPRITYDNKYWYISVGIEVYKKEEELTDISLGIDLGLKDLAICSDGKVFKNINKTKEVKKLEKRLKQKQRQISRKYEMNKIKKEGGERCQFIKTKNIEKLENTTKLIHRKLANIRNNYLHQVTTSIVKTKPYRIVIEDLNVSGMMKNKHLSDSVRKQCFNKFRQYITYKAEINGIELIVADRFYPSSKTCSECGFIKKDLKLKDRIYSCPHCGAIIDRDYNASLNLSMYKLA

SEQ ID NO: 13114 - protein, 487 aa, Microlunatus sp.
MARFEVPDGWAAQAYKFALDPTPTQVRAFRSHAGGARKAHNTMLGLVKAVMDQRQAERSYGIPEHDLTPSLNWSLAGLRKQWNARKDTVAPWWGENSKEAYNTGLDALARALEAWSKSRKGQRAGKAAGFPRFKTARSRRSVRFTTGTIRVEADRHHVTLPRLGQIKTHESTRKLARRIEAGTARILSATLSEDSGGRWHVSFQTLVQRTFAVPNHVGMGVPVVGVDVGVKADSLLVVATPEGREIGRVPAPKSYAAAQARLRALQRRAARQQGLYDQVTKTKRAPSKRWAKQQRRIARTHAHAAAVRRDALHKATTRLAQRHQIITVETLNASGMRSAGGAYKKGLNRALADAALAEIRRMLGYKTRWYGSTLVEADRYYPSSKTCSGCGERKPSLSLAERTYVCEHCGLMIDRDLNAAINLARLGEAQTLGEQSLAGSGPVTGRGATRETEPAQAGDAAGHEASTRHDPTGVDQSGTASPQGEAA

SEQ ID NO: 13115 - protein, 401 aa, Bacillus sp.
VKIRNSRSGNIFSPRKRNEVCGVLRHKAYKFRIYPNQEQEILISKTIGCARFVYNHFLQLWNTSYAETGKGLSYHKCSAMLPMMKVEEETSWLQEVDSIALQSSLKNLADSFTRFFNKQNGKPQFKSKKYPVQSYTTKYVNDNIAVNGNLLKLPKLGQVKFANSQDVSGRILRATIRKYPSGKYFVSLLCEEKIAEFPKTNSSIGIDLGILDFAVFSDGRKVDNHRFTAKMEKKLKREQRKLSRRALLAKKKGIDLLEAKNYQKQRRKVARMHEKVMNQRTDFLNKLSTDVIKNHDTICMEDLNTKGMMKNRKLAKSISDVSWSRFVKQLEYKAKWYGKKVIKIDRWYPSSQICSACGHQAGRHPLSVREWICPFCHSCHDRDVNASINILKEGLRQLSLT

SEQ ID NO: 13116 - protein, 368 aa, Streptosporangium sp.
MAQTVKRAYKYRFHPTPEQAEELARTFGCVRLVYNKALEERTRAYTLQGRRVSYVESSAALTAWKRTEELAFLNEVSSVPLQQALRHLQAGFANFFAKRAKYPAFKSRKKSRPGAEYTRSAFRWRDGALTLAKMDAPLDIVWSRPLPEGAEPSTVTVSKDTAGRWFVSLLVEEKVSPLPPVAASVGIDAGLNHLLTLSTGEKIANPRHERRDRRKLAKAQRALSRKATGSANRARAKLKVARVHARITDRRRDFLHKLTTRLVRENQTVVIEDLTVRTMVKNHSLARAISDASWRQMRSMLEYKAAWYGRELVVIDRFFPSSKLCSACGTVRDKTPLNVREWTCACGAAHDRDVNAAANILAAGLAER

SEQ ID NO: 13117 - protein, 459 aa, Verrucosispora sp.
VKVIQAYRYALDLTPVQERAVLAHAGAARVAHNWALARVVAVMNQRAAERTYGVADADLTPAIGWSLPALRKAWNAAKDEAAPWWRECSKEAFNTGLDALARGLKNWSDSRTGKRAGRPVGFPRFKSRRRSVPSVRFTTETMRVEADRKHVVLPRLGRLKLHESARKLARRLDNSTARIMSATLRRDGGRWQVAFCVEVDRADRAPECPGSVVGVDVGVTHLAVLSTGELVDNPRHLSAAQARLRRLGRALSRKTGPDRRTRQRPSQRWARASARLGRAHARVSNLRRDGLHKLTTRLARTHGTIVVEDLNVAGMLRNRRLARHIADAGFGELRRQLAYKTQWNGGRLVVADRWYPSSKTCSGCGAVKTKLPLSERTYTCTTCSIILDRDLNAARNLAALAAEVDTAGSGPVAGRGANRKTRVRGLVATKRQPGTATADQTGTVPPQGRTTDHMLTRAH

SEQ ID NO: 13118 - protein, 410 aa, Shigella sp.
  misc_feature (141)..(193): Xaa can be any naturally occurring amino acid
  misc_feature (318)..(377): Xaa can be any naturally occurring amino acid
VKRLQAFKFQLRPGGQQEREMRRFAGACRFVFNRALALQNENHEAGNKYIPYGKMASWLVEWKNATETQWLKDSPSQPLQQSLKDLERAYKNFFQKRAAFPRFKKRGQNAAFRYPQDVKLDQENSRIFLPKLGWMRYRNSXXXXXXXXXXXXXXXXXXXXXXXXXXXXXXXXXXXXXXXXXXXXXXXXXXXXXSCGTWYISIQTESEVSTPVHPSASMIGLDAGVAKLATLSDGTVFEPVNSFQKNQKTLARLQRQLSRKVKFSNNWQKQKRKIQRLHSCIANIRRDYLHKVTTTVSKNHAMIVIEDLKVSNMSKSAXXXXXXXXXXXXXXXXXXXXXXXXXXXXXXXXXXXXXXXXXXXXXXXXXXXXXXXXXXXXASVARAVVIQRKKTACHKVNSDARYVDIQRTPM

SEQ ID NO: 13119 - protein, 463 aa, Clostridium sp.
MGTIIKTVKQYSYELDDDILQELKFIANQYKNVKNYVYSRYSGINSIPLLGKERQIRDEWTKIKFYEQWKLPARYWKLALTEAMGNIKSQWSNIKNEIKEKVKVNENLSNKDKHYINYIVKFNSYYHKVLNHIGFDIPKIFKNKNLNFKYLNNLIRRYTRKYKGHIPYSKVGKTFSIDTGLYSYKNDCINITSTKKGKRLSVELTDNNKYDRTMIVKIIDNRIVINCPLKIKTRKNKDTNIIGIDKGYRYLFAVSSNNFYGEGLNNILSKETERLNKVNSQRNRFWALYSQYLDQGNVKKAKTIKENNLGKVKYNHNKQKHDQIVKSYINYSLNQLIKEEKPTEIVMEQLDFVNWNDKYPKSIKRKLSRWIKGYIRERLEFKCDFYSIKYTYINPAYTSKICSFCGSFGKRDGDVFTCPKCGETHADTNASKNILNRKYDNDITLYTNYKKVKDILENRLKVS

SEQ ID NO: 13120 - protein, 421 aa, Sphingomonas sp.
MSYRGFTYPLKPAPAQESVMAQTAGVCRLVWNLALEQRRDHWRRYRAVTGSTLNFVAQCRELTALRKEVEFVNAVSQNAAIYALRSLDRAYLQALKGEAGFPGFRKRGVHESFTFYGREVRVEKINARWAQVKLPKIGWVRARMHRAVVGDIAEATVSRTAKGWQVSLLCKTGPAVTDVGGAVGIDRGVAIPLMLSDGTSFALPARVSKIGEQIRKAQHHSSRGLRGSKRNALAKRRVATLRALQARVRKHWAHETTTSITRQYGTVVIESLSTKIMTKSAAGSIEEPGVNVAQKRGLNRVILNVGWRQIETMLSYKAYRLIKVDARYTSQTCSACGTVDKRSRKNQASFVCTACGYRGNADLNAAVNILRRGSAPVVEAGTSQSLKRKPAGRKAGDPDPGQVDASRNTKGRNQKPQEPRP

SEQ ID NO: 13121 - protein, 469 aa, unknown
  TnpB Polypeptide
MLTNYIYKLRPNQTQCLKMANWVDMLRSQYNWCLGDRITQYNQQFIQGNYSDLRTKSEACPLTSFVSKNGATGNPWKDSKFDKEGKVKNPRRSAGDIQITALPELKIARPWYGGIDSTVLQQNVKRLDIAYKNFFEGRGFPKFKSRSNFTSFTFVMGVKLQGSKIYLPKVGWMRFHNSRSIPNGFIIKACTVRKRQNGWYVSIRIEDKSIPDYIPKPLDDVAKIIGCDLGITKLVHLSDGYQIDNPRFSTTKKAKRTLRIRQRRVSRKIQGSNNRKKAAIRVGRFHQNIRDKRQSYQWKVANKIVSRNADVIALEDLNISGMMRRCKVKTDKGRFLKNGQSRKKGLNRAISDAGWGDLVLKIEYLAAKQGKIVIKINPKHSSQECRNCGHTDKSNRHGEKFICVECGYHEHADIGAAKTIRDRVLSIVRGDSAKLGVQHLNAQKISPRSKSKRGEFGNPSDRDIKEAIS

SEQ ID NO: 13122 - protein, 318 aa, unknown
  TnpB Polypeptide
VHSQTLQCALQDLDHAYINCFQGRAEPPNFRKKFLDDSFRFPQGFKVDGSRVYLPKIGWVWSWKSRDIEGTIKNVTVSRRGEHWYVSFQTEMDVPQPLHPATAAVGIDLGVVCFAARSDGQLIEPLDSFRKHEERLANEQRKLSIKVKFSNNWIKQKRVVNRIHQKIANCRHHFLHQHSTEISKNHAVVVVEDLKVKNMSRSASGTLEAPGKNVAQKSGLNKAILDQGWGMFRTFLEYKQVWRGGETIAVAPHYTSQKCAECGHVSRENRPSQALFSCVACGHTDHADVNAARNILAAGLVERLNACGPSGLQESQVL

SEQ ID NO: 13123 - protein, 404 aa, Streptomyces sp.
MIRAYKFLMRPTARQEQALGEMLRDHCSLYNGALQERRDAYRHVSKTSVKYGVQSAQLKDIRAFDPERQGRWSFSSQQATLRRLDKAMQAFFRRVKSGDTPGYPRFRGVNWFGTVEFPKDGDGCRWDSTPHDPVTRIRLQGVGHVKVNQHRSVAGRIKTVSVKREGRKWFVVLTAEQARPEPLPPTGSVVGIDLGIVGFLADSNGEFITNPRYGRRAAAKIKAAQQALSRFPRRKAKDRTGNHRRAVEKVAALHGKVRRQRLDHAHKAALGLVRMHDFIAHEDLKIRNMVKAPAPKPDLENAGSFLPNGSAAKAGLNRSISDAGWGVFLTILHAKAESAGREVIAVDPRNTSRTCPECGHVSAENRPTQEKFHCQSCGHTAHADTVGALNVLRAGLVRRGANPA

SEQ ID NO: 13124 - protein, 367 aa, Vibrio sp.
MKERAYKYRIYPTSEQVDLLERTFGCVRFTYNSILRWRTDAFYNEQTKVNYNAASSQLTELKKNPEFNWLNDVSCVPLQQSLRHQQTAFKNFFEGRAKYPQFKKKRSKQSAEFTKSAFKYVDGRLYMAKSKQPLDVRWSRELPSAPTTITISKDNAGRYFVSCLCRFEPKPLPISKNTVGIDLGLKDLVITSNGFKSGNPQHTKRYAKKLAKAQRVLSKKQKGSANFHKARKKVARIQAKIADCRRDFAHKLTTQLVNENQVISCESLSVKNMVKNRKLAKAISDANWSELVRQLEYKADWYGRTVVKIDKWYPSSKRCNCCGHVVDSLPLHIRNWRCPECSTQLDRDTNAALNIKAVGLTALACGA

SEQ ID NO: 13125 - protein, 313 aa, Vibrio sp.
MLRATKVRIYPTSEQAEFLIAQFGAVRFAYNKALHLKSHMYRKHGVTLNPKKDIKPLLAVAKKSRKYHWLKQYDSIALQQSVINLHQAFDNFFNPKLKAKYPQFKRRHGRQSSYHCVGVKVLDGAIKLPKMKPIEANVHREIEGVVKSITVSLSKTGKFYASILADDGVEALTPLHTVRTVTGVDLGLSHFAIESNGRKTANPRFVKRAEKNLRRKQRQLSRKAKGSANRAKARILVAKCHEKVANARADFQHKLSRTLVDENQAVIVETLKSANMMKSRKLAKHIADASWHSFVAKLEYKLQNLPDRLKPHK

SEQ ID NO: 13126 - protein, 415 aa, unknown
  TnpB Polypeptide
MYKAYKYRIYPNKEQQEKMFQFFGCTRFIYNKCIEWYSDAYKQWKENETPISKTPLVTYFKKDYEFLKDCDNAALAYARENFNKAINDFFKSRNGKRKGKRLGFPKFKKKGVSKYIYKTCDAHGGIKFNEENNKLRLPKIGWVKIIKHRGFNGIIKAVSVECTKSNKFYVSIMVETDATFEKIQIPSNRQIAVGLDMSLSQFAVSSNKKDNMINKYCRNYRQEEKRLAKLNRQMSRKVKGSKNRDKARIKYARLCEKVANRRKDYIVKMALYYAKRYENIVIEDLNMQAMSRTLKLGKSVMDLGWGTFTTWIKWQCEKYHTNLIVVDKWFASSKICNACGEKNSLLKLSDREWVCPHCGTIIDRDYNAACNLQDYYLKNINTAGIVEINAYGDETSTFDSMPNASIVDEIGSPSL

SEQ ID NO: 13127 - protein, 462 aa, unknown
  TnpB Polypeptide
MEAEGRRAVVRRRTYAARVYPTPAQAALLHRQGHTARALWNLLHSWYTCRDGGIASRPSIAEIDRQLRDARADPLPGWEWLAELPCQATQQVLKHYLRAWDHFQKGLARPPKVKKRSARLAIDVPQASKLRVTRLSRRWGEAAIPLIGRVRFRWTRPLPGISRGCPGRITGARLIKNPLGWHIAFRVEDAASAVPTNSCPPVGIDRGVAHTMALSDERYLDMPPLLSEKEQRRLRKLELQAARRRASRKPGAAMSNRERRTYDQIAALRARQARRREDWLHNKTTELSRNHSLIAIEDLRIKNMTRSPRGTVDRPGRQVRAKAGLNRSVHSMAWGRAGRMLAYKCPSHGGELVQVPAAYSSQTCACCGHISRQNRRRARFRCEACGHTASADTNAALVILQRGLAARSGTAPGYGVAGRGAFAAGRAVKRQPPTKQSADRFCRVESPIAQIGVGYQEPMERN

SEQ ID NO: 13128 - protein, 369 aa, unknown
  TnpB Polypeptide
MCYNRLVKLIAQVKLKPTGEQHQALLKTLESVNDAANYISDHAWETKTFRQYDLHHLLYYDLRSRFNLTAQIVVRVLAKVADAYKLDRRIKRAFNRHGSIAYDKRILSWKAADRLVSIWTLDGRLRVPFVAGDRQLEMLRHLSGETDLVYRDGCFYLFQTCEVEEPPEGDPAEFLGVDLGIVNIAADSDGQVYSGGQVNGLRERHSKLRAKLQSKDTKASIRLLKKRTKKERRFATHVNHVISKSVVAKAKDSGRGIALEDLKGIRDRITVRKGQRRQHHSWAFNQLRQFIEYKAKLAGVLVALVDPRNTSRTCPQCGTIDKRNRPSQSIFSCVSCEYSAPADTVAAGIIAGRAVVNRPHFSPIPGGAG

SEQ ID NO: 13129 - protein, 394 aa, unknown
  TnpB Polypeptide
MLKAYKYRIYPTQEQAVLLAKSFGCVRWFYNLALNLTSETYQKTGKGLSRNDIINLLPSLKNEYEWLTEPPSQCLQQVALDLSSAFLNFFEKRAKYPNFKKKGQKQSIRFPQQVKLDADYLTLPKLGKVYCKVSRLPEGKLKSITVSLTPSGEYYAACLYDDGKDKPVSSSEGKAVGVDMGINHYAITSDGTKHGNPKYYRKYEIKLTKKQKQLSRKQKGSKNRNKARIKVASVHQKITRCREDFLQKLSRKLVDENQVIVVENLAVKNLVKNHKLAKSISDAGWGQFCTMLKYKAEWVGKIYIEVDRFFPSSKTCSHCLHQVDNLNLDIRSWQCPKCQTIHDRDINAAVNIRDEGLRLLAGGHLATASGERVRPSKGTAFTRRFSAKEESPRL

SEQ ID NO: 13130 - protein, 474 aa, unknown
  TnpB Polypeptide
LVLNIGGYRIVGTLRNHADEITYKRKEDVKMRLTSSYKMKLTGDLKALETSITIYREALRMLIPIINGNWETLVEYDFANQKYNCIEKWVHNTQTNQAVYDFDEQFPKLPTYLRRSAIAKALGIVSSYRSNLANWEKEPRGQAPRLSLTHYDYPAYYKGNLFRNFDPVRQTIELKVFKNGDWVYEVYQLKTSDCTYYQTHLTGKKQNVPIIQKKGRRFYAAFSYEENVSLIPEESIRTICAVDLGLGTDATCSIINQDGTVYARKFISFSKEHDRLHTQLGRIKRNQKRGSRYNKTLWRKVAGISQDIADKTVEAILDFGNEHGVDVFVLEYLDFKGKNTVKRAHFWRYKRIYKVLAQKAHQTGLRVARVNARYTSRLAFDGSGWSKRGCEIAPETPYALMEFPTGKTYNADLNASYNIGARYFIKHLLKTVTATQRLALEAKVPQVAKRSTCTLSHLINLRSEFAALTAKTQA

SEQ ID NO: 13131 - protein, 388 aa, unknown
  TnpB Polypeptide
MLVNKAYSFRLYPTQSQAELLAQHFGCCRFTYNHFLRERIDYYAANKGKKKQGLTYHDTTKILTVLKNTPEHVWLNAVNSQALQQSLRRLDVAYNNFFNKRAKFPKFKSKHDKQSFLVPQGFKIDAESCFLRIPKFQPIKAVFHRPIEGEMKSVTISKTTTGKYFASVLCEVEQKVKSKKTGKQIGIDLGLKSFIVTSAGETAEAPKFLRKSEDHLKFFQRRLSRKVKGSANRNKARHKVALIHEKIANQRKDFIHKLSARLVSENQAIFAEDLNVKGMTANHCIAKSVSDAGWSEFIRQLKYKSEWSGTTFGQIDRFIPSSKRHVTCGWINQSLTLKDREWTCQGCGEVVDRDWNAAQNILLFGTIQIASDRRESTLSEKRRIKALH

SEQ ID NO: 13132 - protein, 349 aa, unknown
  TnpB Polypeptide
MVQRQLKLKLTKAQEATLAVWLNNLTGVWNWAVRKIELDAKDGIYYTPKDFQNILADHGKKLDIPSHTIQGILSNAHSAWKRCFKKIGKKPHLKGQRNKLNSIPFPDPIRPPKKNRISVPGLGPVRFYKQELPAEKIKCGRIVKRSSGWHLCLFIDAAPNEITITGNAQVGIDPGFKTLLTLSTGEKIEHPKELQGGALRLAQSQRGHDKKLTARLQEKMANQRKDRNHKLSRRLVSENELICFSKDNLKGMSKKFGKSVSSAATGQLRQFISYKSSQCGRRFVEVPSRFSTMTCSSCGVLSGPKGLSGLAVRQWTCTVCGTAHDRDCNAAMNTLIAGAGIALEREVRI

SEQ ID NO: 13133 - protein, 461 aa, Symploca sp.
VIVILLNYQYRAYPSTQQKLELNYWRKLAQYWYNWQLGERFQWWEQNRCALNSCPLVCHLPKLKDNPDYYSQKKLLPGKKKDLVLVRNSGELLDFTRLPSQTLQEVCDRTKKAFERFVKGDRNGKRSGKPRFKNSTQYRTLKIEGQAVTIQRIEKRWLWISIAKLFGWLKIRLHRPLPDGFKLKNFLLTKKADGWYASLALEDPTVPVFNPDKIVPTWDNSMGMDAVLHEDDYLATSDNTKLPSLKSFRKSQARLAKVSRRKSLKKKGSKSRRFLAKRESREHQRIARARKDHAYNTAHELVCSGKYVFFYEDLKLLNLTKRNKAKQDKDGKYLPNGQSAKSGLNKSWQDAAFGQFFSVLDYIASKAGAVTRKCNPAYTSQLLSYRDEFVFTDCGIREWYDEKENLLVERDVNSALNLKRVGLGMFPTIKRRRGNRVVVASTTNSTSKEVLESLRSQKPTP

SEQ ID NO: 13134 - protein, 390 aa, unknown
  TnpB Polypeptide
  misc_feature (352)..(352): Xaa can be any naturally occurring amino acid
MYQVRRVNIGKTKQLDELAHECGNLYSQTVIFFWRTVRHKGIWLKPKHLMRLFISKKLHAHTADACVQAFFAGLKSWRERKKDGDPDAHPPRKRKRYFRIEYKRSAMVLKDGKLRLSNGKGNEPLVLTWPWDLPNTVVIHWTGTQYEAIATYEQECPYGPFMPGEVAGVDLGEVHMAVAHDGTHTHILNGRYLRSKVQYRNKLQAKLNSRIDGRMKKGSRRRKKLIASKKRQLRKIKNQIKDVEHKQTSKFITALHQAGVQTLVIGDVRDIRQDNDVGHTNNQKIHQWSHGSVRFKLTYKAERLGMAVALQDEHYTSRTCPQCRYVRSKVKGRVFRCPKCGWTYHRDGVGAXNIRQKYLGSFPVVGAMAPPIGMRYKPHAGIARKEKVYL

SEQ ID NO: 13135 - protein, 356 aa, unknown
  TnpB Polypeptide
MIQRQLKLRLNTSQAKQLETWLFQLTGVWNWAIRKIEQDAKDGIYYSQKAFHNLLADHGKKLGIPSHTLQGMLDTAWIAWQRCYKKLAKKPKLKGKRNRLSSIPFPDAFKPPTGIRIHVPGIGSVRFHKQDLPLGKLKSGRIVKRASGWYLCLCIDTQPNSIPAVGTESIGIDPGFHTLLTLSTGEKIAHPHELRQTAHRLAQAQRGSRKRLSARLQERLANQRKDRNHKLSRRLVIEHQTIAWSKDNDKALARIFGKSVASAGHAQLRGMLAYKCTASGRQFLEVPSKNSTKTCSACGSLSGPTGYAGLRVRQWTCADCGSAHDRDVNAAMNTLIAGVGITLEHRRKAVPGIPAL

SEQ ID NO: 13136 - protein, 385 aa, Rickettsiales sp.
MQVNYAYKFRLKPNKQQKMLLLQHFGCNRFVWNYFLHQRQEYYQKNKEDIEAKRIKGNCSYYNDAKELVKMKKQEEYNWLKEVNSQTLLSTLQHLDTAYKNFFKKQTKFPNYKKKFDNQSFTIPQHIRIENGKIYFPKFSEGIRLKEHRKLEGKICNATISKTSTNQFYVSIIVEKNVEPLKISDKNVGIDVGIKDFCILSNGTRYENIKPLKKQLKKIKYLSRQVSKSKKASKKREARKLKLAILHQRIHNQRLDYLHKITKSITDENQVIVIEDLNVKEMMKNQYLSQSISDVSWHEFKRQLEYKCKWKGRQLVIIDRYFPSSKTCNHCGYINQELTLNVREWECPQCNSKLDRDLNASINILQQGLNIAHGIGVKSKGSCLQ

SEQ ID NO: 13137 - protein, 431 aa, Hadesarchaea sp.
VQSVSSARFITPPLTQRKRELLEYLLNQFAASVNFCIQRCLEHGITSRASLHHIAYEEWKSKFDLATHWFHSTGQVATQTLRSWRKLCRQGRADPKRPPVYDARTMRLELWGEDNASGICRFHGKAIQIRIRRGEHLWLPLVVTEHHERMYLKDWREGRLNVGEITVSAFRDRANVFVPFKQEVEPKKIQGVCGIDINERSVDLTILKSNEQPKHITLDVSKLPAIRHSSQLKRKSIQKKLDAPPQRPVQKQRLKAKYWRRERNRTNQIIHIISKKIAEIADQERVAVAFEGIKGIRGSMRSKRKSENGKALRKDMRRRLNQWPFRKLQFYAEYKVARQGLPTVEVSSYRKSKLCPMCGQYNRPNGHAYGCKACGFEASRHLVASWNIAKDGARHVPADCWQMQPMAERLVAAEKPSVEPERIPLQFVTGF

SEQ ID NO: 13138 - protein, 440 aa, Agathobacter sp.
MQIYTTYKVKIKHYNYIFKDTVSVYRSAVDYLIDVCNANWDDVSVIDGSLNKQRYIETLVHATKDNPVPMYDFDTKFYKMPSYLRRGAINEAIGKISSYRSNLANWENSPNGKAPSVPKAGFVFPSMYRTVMYNQTDDYEAQIKVYIRNTWDWITVDLRKSDMDYIYRRCKNRKACAPTLQKRGKEWFLDFPFEEKVKLCEKSVYDQTVVAVDLGINTAATISVMRSDGTILGRYFCKLPKETDHLAHSINRIKKAQQHGNYKTPRLWAKTKGINHDIASKTANYIMDIAVLYNADIIVFEHLDKEGKVRGSKKQKLKMWRSQEVQSIVTNKAHRLGMRISHICAWGTSKMAFDGSGTILRGKDGGFTTYELCKFQNGKTYNCDLSASYNIGARYFIREILKSVDESSRLRIEAKVPQCCTRSTCTFSTLISLNAVLTSA

SEQ ID NO: 13139 - protein, 381 aa, Streptomyces sp.
MKLRYQFRLYPSTRQRIELAKAFGCARVVWNDALRIRQDAYKQGEPLPSVVALAKQVITEAKKTPEREWLGEVSAVLLRSSLRDLQTAYSNFFASLKGTRKGPKLEPPKFKRKTSRQAVRFTRAARFSITKEGNLRLPKIGDVEVRWSRELPSDPSSVTVIKDAAGRYFCSFVVEAEDKPLPELDLEETDTGIDLGLSSYAVLRGRKVASPKFFRRQEKKLRRAQRKLSRCQKGSNNRRKAKLVVAKEHARIADQRRDFIDQETTRIVRESQAVYLEDLAVKGMAKTHGKSVHDQSLGMFARTLEAKCARYGRTFVKVSRWFPSTQLCSRCGSIEGPKGLEGLKIRAWTCSCGAHHDRDENAEINIRREGRTLVAEGRPDT

SEQ ID NO: 13140 - protein, 308 aa, Nocardia sp.
VQLRYNYRVYPTPGQQVLLARAFGCARVVYNDALRARRDAYVSGEKISDTEVQRRVVTEAKKTPKRAWLGDIASVALVQACQDARLIKDAAGRYFASFVVQVTEQPLPETGSEVGIDLGLTTFAVLSTGKTIASPRFLRHAERRLRKAQQSLSRKEKGSKNRAKARVRVAKAHARVADTRRDWAHKHSTTIVRDNQAIFVEDLAVSGLARTRLAKSVHDAGWGMFTRMLEEKAARYGRTFAKVDRWFPSTRMCSVCGVLSGKKPLHVRKWTCTCGTVHDRDLNAAENILAAGRAERLNACGGAVSPAA

SEQ ID NO: 13141 - protein, 394 aa, Nonomuraea sp.
VRRSFTFLLRPTRHQEIALAACLEDHRQLYNAALEHRRIAYAKAGVSIRYGDQSAELKHIRGDDPNGQGRWSFSSQQATLRRLDKAFGAFFKRVKAGRTPGFPRFKGWGRFDSVEWPKDGDGCRWDSQPQHPTATYVRLLGVGHVRVHQHRPVRGWVKTIRVKRAGSRWFVVLSCDEVPAEPLPATGASVGIDLGVASLVTTSDGGQVANRRHLAATAGRLAAGQRDLARKKRGSKRRRKAVARVAALHAKIRRQRLDGAHKAALALVRAYDVIAHEDLRISNMTRSASGTVERPGRNVAQKSGLNRSILDAGWGVFLTILADKAESAGRELIAVNPAGTSRTCARCGHCAKDNRVTQAEFACTACGHAAHADVNAAINILRAGLALRQAAQAA

SEQ ID NO: 13142 - protein, 387 aa, Homo sp.
LLKVFKTEIDPTEEQKIKIRRTIGTCRFVYNFYIAHNAERHENGEKFMSSAAFRLWINNEYLPRNPDKSWIKDVSSKSVTQAINNAQSAFKRFFNHQGHFPKFKKKGASSVTMYFVHNNSKDCKCERHRINIPTLGWVRLKEKGYVPTTKDGYVISSGNISMKAGRYYVSVRVEVSDIRQEQSLNDGLGIDLGVKDFAILSTGQTFKNINRSARVKKIEKRLKREQRKLSRKYENLKNSKKGEATLRANIQKQRLTVQKLYQRVDNIRTDYINKTVAEIVKTKPSYIAIEDLNVRGMIKNRSLSKAVASQRFFEMKTKLKYKCGINGIELRVVNRWFPSSKLCHCCGQVKKDLRLSERVYRCDCGYIGDRDLNAALNLRDAKTYEIA

SEQ ID NO: 13143 - protein, 194 aa, Microcystis sp.
MEKAYSYRFYPTPKQESLLRRTLGCVRLVYNKALHVRTQAWYERQERVGYTETSSMLTDWKKQEELDFLNEVSCVPLQQGLRHLQTAFTNFFAGRTKYPNFKKKHQGGSAEFTKSAFKFKDKQIYLAKCTEPLAIRWSRQIPESCEPSTVTVRLHPSGRWHISIRFDDPTIKPLPVTDKAIGIDLENSIKKMIQ

SEQ ID NO: 13144 - protein, 416 aa, Microcystis sp.
MAIKRITFRLYPNQAQNDKLHYWKKLHCSLYNACVYHRKTEYQKFGKNVNYFDQQNCLPELKKCWPEYKELGSHALQATVKRVDFAFQRFFKLKSGYPKFKASRHYKGWTYPDGAGWSIDSSGHHGFLTLSNFDGKIKIRGKARDWGIPKTCTIMFKQGKWYASITVECSPTRATTDTGSIGLDFGVLHAIADSNGNLTENPRFLKSAQEKIKKIAKKSRRKRNPKRGVKASRRSRKSARAVGKIQSKVARQRQNWHHQVAVEIVRCNSLIATEKLNLKGMTQKTKGKRKRQKSGLNRSILDVGIGNLKSLLKEKVTEAGGFYIEVPTQKIKPSQTCPNCGHQKKKSLAERVHSCEKCGYSCDRDVAAAQVMLNYARGLERASLDAESPSSILCGSMRQLGTKKRQKLQSQRSGLE

SEQ ID NO: 13145 - protein, 403 aa, Microcystis sp.
MFVLEFKVEAKTKQYQAIDDAIRTAQFIPNKCLRYWMDNKGVDKYDLSAYCRVLAHDFKFAGELNSQARQASAERAWSSISRFFDNCKKKVAEKKGYPQFKKFSRSVEYKTTGWKLLNPKTIHFSDKKEIGTLKLKGTWDLGYFQQSDIKRVRLVRRADGYYCQFVLSCDVKEDVEPSGKCIGLDVGLASFYTDHEGNKVDNPKFLRKSEKKLKRLQRRLSKKKKGGKNSQKARQRLAKAHLKISRQRKDFAVKLARCVVRFLDVIAYEDLRIKNLVKNHCLAKSINDAAWYQFREWIEYFGLKFGKITIAVPPNYTSQNCSNCGEVIKKSLSTRTHQCKCGCVLDRDENAAINILKKGLSTVGHTGTFGLDPINAWGENTSTFSEAILSKQVISVNQESPRL

SEQ ID NO: 13146 - protein, 329 aa, unknown
  TnpB Polypeptide
MEKWKHGKKASMPHFTSPHLVYDHRTATFHDEYVSLATVDGRIEADFVLPDEKRDTPHAEYLFSDEYETTGAELHYSNGNWMLHIHTKTDVEPDTSAQDATENSTVLGVDLGVNNLAVASTGTFWTGDEFDHWRRVYEKRRGDLQEHGTRWAHENMQAVGRKEEGRFKITLHRISNDLVAEARDNGCSVIAFEDLTDIRERTGASWGHKWAFNHLYEYVEYKAAEYGIDVEQVDPENTSRRCSECGFTHPDNRESESFECLKCGYENHADYNAAKNIGLRYLRRNQTGSGGGAPVGVRLNSGTLNANGEYDPPADESARAGVHAESQPL

SEQ ID NO: 13147 - protein, 503 aa, Vulcanisaeta sp.
  misc_feature (360)..(496): Xaa can be any naturally occurring amino acid
MEQVLWEVQGVLGVNAQAVMQKNNEDWSSFFTLLNMKKEGKLPPHMKRVSPPGYWKDRDTGRRRLIIVVRQDRYEVDEQRRVIILKDFGMEIKFVGRLRWFGRQGRLEIIYDDTRNAWYAHIPVEVGVEVTKTGKKSKHIVKGERRFIQIATPRGNRVAAIDLGINNLASVVVDDGTWLLYKGIRTKEDYFYLQRLISRIQSLRDALKDKLLSDAIDELNHEMRRLYRKLRRRLLHLYRNFAKHLIEKLHELGVSTIYLGYPFNIAQQKGNKFTSNMWSYRKLMEAIELKAQEYGIRVFIVIEYNTSRYCAYHGVKVKRQPRGVVHCPLGHRLHSDLNGALNIMRRAIGKIPLVIKKPLXXXXXXXXXXXXXXXXXXXXXXXXXXXXXXXXXXXXXXXXXXXXXXXXXXXXXXXXXXXXXXXXXXXXXXXXXXXXXXXXXXXXXXXXXXXXXXXXXXXXXXXXXXXXXXXXXXXXXXXXXXXXXXXXXXXXXXXXXGQAENPG

SEQ ID NO: 13148 - protein, 442 aa, unknown
  TnpB Polypeptide
MKLSMTYRVRTRGFNHLFDETVRLYRQAVSFFVDVCLTEWNLISTEKLQKERVNLVESLTIQTKQNPVVSYDFSAEFYKFPSYLRRAAIAEALGKVSSYRSNLANWEAADSAKRREKPSLPQVGYVYPAMYRSGMFIRTGMYQAAVKVFIRNTWDWVLVDLRKSDVDYIEHHCKNYTECVPTLQKRGKKWFLDFAFQTAVKLPDTDIRNTRILAVDLGLNSTCTCSIMTPEGAVLGRGFLSLPGEYDSLEHAIGHIKHAQKLCARRTPGLWKQAKGINDDIAVKTAQFIVDTAVKYDVDCIAMEHLDLAGKKRGSKKQRLHLWRAKYVQTMVTDKAHRNMIRVARICAWNTSRLAFDGSGRVMRGKEADLPSYSLCRFPTGKQYNCDLNASYNIGSRYYIRELLKTLPATAGQAVTANVPELAHRSKCTLSSLIKLNAALAA

SEQ ID NO: 13149 - protein, 407 aa, Escherichia sp.
  misc_feature (262)..(313): Xaa can be any naturally occurring amino acid
VKRLQAFKFQLRPGGQQECEMRRFAGACRFVFNRALARQNENHEAGNKYIPYGKMASWLVEWKNATETQWLKDSPSQPLQQSLKDLERAYKNFFRKRAAFPRFKKRGQNDAFRYPQGVKLDQENSRIFLPKLGWMRYRNSRQVTGVVKNVTVSQSCGKWYISIQTESEVSTPAHPSASMVGLDAGVAKLATLSDGTVFEPVNSFQKNQKTLARLQRQLSRKVKFSNNWQKQKRKIQRLHSCIANIRRDYLHKVTTAVSKNHXXXXXXXXXXXXXXXXXXXXXXXXXXXXXXXXXXXXXXXXXXXXXXXXXXXXRQLEYKQLWRGGQVLAVPPAYTSQRCAYCGHTAKENRLSQSKFRCQVCGYTANADVNGARNILAAGHAVLACGEMVQSGRPLKQEPTEMIQAIA

SEQ ID NO: 13150 - protein, 527 aa, unknown
  TnpB Polypeptide
MARKKQQRIENSEKEVRSIKISSRWLNPGKLQKIKDYDKKIMDLKNEISQFVHDNIVEIFFDKSVVSSQYVLFENDWLDNWELQRIMQRICDDYSTMIKQKMDNWEPSYYVGNEVTYYKRNTKHHKKGDVKTVERVYRPNKLTKLMCKLKKVRDVEAFSERDDKIVKHALDKNLYNRVAKYVDNVRTRILKNAKVIEYTTGTHDKPYSPHGKNGKSLSSYIFKNEDCKEFKWWFCYKNRKDKIYLPLQINEEYHKDMPLNVEAKVRINKNDIEIIITKEAPALEFKKSKKIVGMDLNSKSNFAAFDDGSKYDYDRKWVSKFAKFYKKLEKIGMKNITPSQQRQLEKALRRNEWAVKLLIHEILNDLALQGVTDIVMEDLDKFPSTFIRSEEFEIKYTKLLSLLRLSNVKKWLKGQAEKRGIRVHITHAAYSSQQCPLCHIADRENRLTQEEFACVTPECNYKNNADTVSGINLKSRLTNVLLRDELHNFDKYGRMEAKAMSRPKVKAILMNPKNYPALNNAVVLDRD

SEQ ID NO: 13151 - protein, 521 aa, unknown
  TnpB Polypeptide
MGTLTKSVKYSSKYLNKQKLEIIKEIDSDIRYLKNTMSEYIYLNIYGLLNDRKEFLQRYKNFRLFPMLSGWEVQTIFKEVCIKYETLYDRLIKNLRCKVQKGDIIVEKYKKKTKNNQVGDIKRVYIKKSVSKFQKLIKYALYVEPDALENAIKGKQELEELWVELNKTPARLRAFKNLIGTLKIGLFKRFKLIELKTGTYSKALKECSGKNNSSELVFDESNAKYKHWFKYKVPNDMGKHIWIPLQINNEYHARKDFVADSQYLIKVVGNRVDIITTYSEEEPEFHPQQKIEGMDLNSKNNFAVISDGKVFDYDRKYIKQVIKTLKKFDKIGFNNLSETNKEKLSKLCRRNEWYFKKLINSILTYCEQQNITDLVIEDLQLFNATFICSVEFEIKYSRLIRLLRLSNIKNWILTQAEKKHIRIHTTPSPYTSKMCFVCGCDEDANRPTQELFECVDCGFTMNADMHASLRIKERATEDVLRRKLHDIDDYGRMVAKDVEVEQVRKVLVKFHKDKVKNAIII

SEQ ID NO: 13152 - protein, 222 aa, Moritella sp.
LKLIAYKYRFYPNNEQAVMLSQTFGCVRVAYNSALAFSKAQYELGNKTNYNDWSKNLTQLKKNPDLLWLKDISSVPLQQALKHLNKGFQSFFKSGFGYPKFKSKHNYQSASYMSNGFKWDADKQSLLLAKMKQPLKIKWSRYFTGKPSSLTVSKTKSGKYFVSILVKEAIKQLPIVNKTVGVDVGIKDLAICSDGVKFNNPRLINRYAKKLAKASRKDSEFP

SEQ ID NO: 13153 - protein, 366 aa, Moritella sp.
MLKLIAYKYRFYPNNEQAVMLSQTFGCVRVAYNSALAFSKEQHELGNKTNYNDWSKNLTQLKKNPDFLWLKDVSSVPLQQALKHLNNGFQSFFKSGFGYPKFKSKHNYQSASYMSNGFKWDADKQSLLLAKMKQPLKIKWSRYFTGKPSSLTVSKTKSGKYFVSILVKEAIKQLPIVNKTVGVDVGIKDLAICSDGVKFNNPRLTNRYAQKLAKASRKLAKRKKGSRNFKKQKLVIAKIHEKIANSRRDFTHKMTSTLINENQVIGIESLKVKNMVKNRKLAKHLHDANFGEIARQLEYKADWYGRKLSAISQWFPSSKMCSECGALYAGQWSLAIRTWTCACGAVHDRDHNAAINIHKEGLRLAA

SEQ ID NO: 13154 - protein, 394 aa, unknown
  TnpB Polypeptide
VCRFRLLPSPEQATVLAEHCRHARFVWNLAVEQQSHWQPGRPAPCYNEQCAQLTAARAAFDWLAAGSQTVQQQALRDFAQAMRSFFNGTHRRPTWRKAGKHEGFRQVGVKPQHISRLSRRYGQVWIPKVGWVRFRWTRDIPDTAKSYRVTLDRSGRWHIAFAVVPESVPGPDDGSVVGVDRGVAVSVALSTGELLRAPGLRAGETKRLRRLQQRLARARRGSNRRTRTRLAIARLRARETDRRRDWAEKTSTDVARRFDTIRVEDLNVRAMTRSARGNVKCPGVNVAQKRGLNRAIRSQGWGLLVARLKYKALGRLEFVPAAYTSQRCSACGHVAPENRKSQAVFQCVACSAGRCNADVNAARNIAAGRAVTARGDLGTSRSANREPQLCSPTA

SEQ ID NO: 13155 - protein, 245 aa, unknown
  TnpB Polypeptide
MKLLSIAIPCYNSQDYMENCIESLLVGGEEVEILIVDDGSSDRTAEIADAYARKYPTIVKAIHQENGGHGEAVNAGIRNATGLYFKVVDSDDWVNKEAYVQTRSAKQHLRKASRRERRHVKHVNNVISKQIVEEARKKGVRVICLEDLTHIRDRIKAGKRVRTRLHRWSFHELQEMIIVKAARAGNETIKVDPRFTSQTCNACKQIAKRRKHTLVCQCGNRAHSDVNSARNLRDLGYLLIAQELK

SEQ ID NO: 13156 - protein, 462 aa, unknown
  TnpB Polypeptide
MMLVFCTALRYSFKRQLEGQRIGDLEKVVAHKYHLNSRQAKDAVESARQTIVSQHELVKLHHANCSKKVEVLVKKLKNPKLSERNVKALNSKLAKRQRTLDYWTAFLNSNTFPPVTFGTKEMFLRRCKGLISKQEWSDRRNSRLYSRGDKSKGGNPNLRVVFKDGVSFLEISTLEKTKTNRAVKVLMPIYLPQKLSKKTGAVNGINYRKLFIDSLDRGEAYQVEILKRDGKYYAHITFEELEGKVIYTGHLSVIGTDTNPDGYGLTEVSKQGNYQGHAYLKQHELTFCRGNRRENLCGELSAQAVGKAEKHHCGMAVEDLKFKDDRDLSSKLARVSSQFVYTKLLRMLERRCLRHGVEFVKVKPQYTSKIGLYKYCHQYGLDVHNGAALVIARRSYGLKEAVPKLLQDKLVPKKKLAAFKKMNEWGQWSKISQQVNKLFKNRKEVNTPGLWLVRRKLLLGIA

SEQ ID NO: 13157 - protein, 436 aa, unknown
  TnpB Polypeptide
MTMIEAYKFRLYPNEDQKVLLSKHFGTVRFVYNWALNYSQEQYKTNRKFLGWQSLAVSDGFRELKASNLWMKEVNSQSICNSMAHLGRAFDNFFKDKADFPTYKSKYDHNQSFEVPAGLKIDFKEKKIQIPKFINRKSCDNRIKVVISRHVKKGKIGTATISRNACGQYFVSFLVHTSDPYPELDKQITKERSLGIDFGLKHFINFSNGEKVDSPEYFKHTLDKLRRAQRKLSKKQKGSKNKEKQRIKVARIHQKIKDQRKDFLHHLSTSLVKDSQFDVFCVEDLNLDGMKRIWGRKVSDLSYYDFQRMLEYKCVKYGKVFIKIGRFEPSSQICSSCGHRQKLGLNDRTYVCQKCGAVIDRDTNAAINIRDFAIQRSLATSSGHVPVNTDGTSGINACGVGSSGKCGASCACETSDCEAGMFSHIKRESQRSSVVE

SEQ ID NO: 13158 - protein, 406 aa, Thiomonas sp.
MQRLQAFKFALMPTGEQQRQMRRFAGSCRFVFNKALALQKERFDRGEKKLGYAGLCKMLTEWRNSVETPWLSDAPIHPLQQTLKDLERAYTNFFAKRADFPRFKKKGQSDSFRYPDPKQIKLDQGNNRLFLPKLGWLRARFSREVLGAVRNVTVSQSGGKWFVSIQTEREVKQPIPQGDAIGIDMGIARFAALSDGTFYAPLGSFKRHEVRLRKAQQAMSRKQKFSNNWRKAKARVQRIHSRIGNARRDYLHKTSTAISQNHAMVCIEDLQVRNMSKSAAGTTEKPGRNVRAKSGLNKAILDQGWFEFRRQLDYKLAWNGGWLVVVPPQYTSRTCPCCGYVSAENRQTQAQFLCVACGFEENADLVGAINVLRAGHARFACEVSGAARPPAAGTHRSDSGAAGCRA

SEQ ID NO: 13159 - protein, 430 aa, unknown
  TnpB Polypeptide
MLITKTIIIPIHYSTTKLKQNILDNTTKNITFCIKNISELIDYDTELTRKRVRKLVRKNEIEEKTKLSTGFIEQCIGKVIESHKSYRRLHDDWLRKLEDVLRRNDEVYLWKFLQKEPIPPKFNHKIPCRIDVQTGRIEWNKKSKLSPLWLHISTLIKYKTIDIPLNPAKYHLEQLKDAEIRDFEIIKKDGKYYVHIPIQKTFENKKISSVGGIDQGLNHSAGIVLLPSDKNGVPFEGLICDEKKQAILRKYDEIVSKLQNAKKYKKLKQLRNKRLNVAKEYDWQIANQITKLSDGVVIGIGDTNFRQMQFRGNGMPKLRKLISKWSYSRQRKFITMKRAENGYNTLLVSERSSNDCHVCNSHLVTRKWLPSGESYILCHSCGLKKDADINAAYNIAYETVSRCQDERLKAQMTMWKTHASVQYGNLSNYR

SEQ ID NO: 13160 - protein, 359 aa, unknown
  TnpB Polypeptide
MVKQTLILRLETTKEQHEELLNTMTAFNNACNHVAEVAFERKLANKVAIQPIVYFEIRKQFHLSAQMAVRAIAKTIEAYKRDKTIQPRFRLDGSMVYDQRILSWKKLDRVSILTIKGRTIIPIRIGEYQKARLDRIRGQADLILRKGMFYLCVIVDAPEPSKYDPIGTIGIDLGVINIAVDSDNEIHSSKQIEFVRKRTATIRSTLQSCGTKSAKRHLKKVSGKESRFRRNTNHIISKRLVAKAKDTTRRISLENLEGIRKKTVVRKAQRSRHSSWSFSQLRSFIEYKSALKGVSVVFVDPRNTSRTCPSCLYVSKKNRRTQAEFKCCVCGFAGHADSIAAKNIAARADVNQPIVASVV

SEQ ID NO: 13161 - protein, 410 aa, Cenarchaeum sp.
MYSESHIWLNAGIEARIAGLSFIDTTKIATICQTIPQAWVHGAIREGHKMEGRSHVKYGRKTYPLYSAVPLGKRSKGDVVYFPRCSMPFKLQKGRLPDTSQTYKLVDVTNNTDKERQLELHVTIREHVPYSVAAGIHAGIDMGGKHTLIVGKSDGTIDMLTLREKDTLRNIARIQKKMSHCKLHSHKWRSLHAQLQSVYKKMGNKQEDKLRKFSKKLMRQCDKIIMEGMNLRTMTTKGKGQKNKNRMMRQGKCGEARSWLSQRALQYNTEYTEIDPKGTSQQCCMCGSTNTWRDGSRFRCYDCGVLMHADINAAFNILFTFYTVQWSKRAQAVYTLQNKAGMVLRGKIHLGTCTLPPSVNDVMAGTGCPKVGHQSPTNKERLNGAPLNGGSPPTPVVTQAGKMMGHVPTF

SEQ ID NO: 13162 - protein, 416 aa, Cenarchaeum sp.
VYNWAVKRLLADPTLTTYDLSREFTKVRRSVSWLQTVERIYQNTAIHQARTAADVSNKYGNGELSFRARKRDNTKAVSCDVQPRFVDNRHASLPGLGVVELPEEQPYQFPHNWLYGSRSFHLVQVTPKSWGHVKSCDHIYRLHITYDVPVPERRAKTGVVAGIDRGITNPTVVCKTDHNTSCIISYDTATAFRTNRTWNDGVRRTISHRNKHSHTTHKMKRKREKYNRGNANDREYAEWLLAKKICEGVDVIYVEQLNLEAMSRRGGRHKRGMNRGMRFIRHSMVLRKIRIVAERLGIRVVGVNPKYTSQECSVYGYTNKENRDGETFKCLKCDHMANADGNASVNIIQRGTGMKVPAGEGIALERREMGRTRKPPVCAVPDAKRRENQACNRPKTSNAMKHLGIYAYVTCAYPGR

SEQ ID NO: 13163 - protein, 452 aa, unknown
  TnpB Polypeptide
MKKAKKVTRIAYSDDLNPAKYEALTEIAKRCGSVRTEVWHNYGSVSGLFAKFRPVRDEWIAVEHIKNLPQRIWRVTLSDVLSDIKANREAAKVNVKSHIFRNIDKDKRKDLFKILKNDSSWVNNSYQRRLMRKYWKHGKNHTHNQIVLEPGSYKCFHHNGKNYIEVISLKRGKRIAIPIGTNYPITGQIKLILRSGQVEIHYTIDNTDDRACGLPGTSIGIDKGYTEVFVDSDGNFHGEGLGKILSDETDSLNKKYQKRNKIGAVLEKLQEKNPKKAKRIIKHNLGRKKLDRRKKRHQGKVKTIIFTAANNIIGKAETVVCEDLTKTFKSKNLGKNTNRRLSGWVKGLMASAIDIVASRRGSRVVQVNAAYTSQICSQCGCFGKRVGDKFHCTEGCGAVMQADVNAATNILARLHDDELHRWLPFTKVKQILLKRCRRPDETAHPGLQLQLS

SEQ ID NO: 13164 - protein, 514 aa, Okeania sp.
VKARFKYRIYPTPGQKYRLAKLFGCVCCATLREGVVWNDSLACSQEKYKSGEKKSYLSELQKQFITQAKKTEYREWLSEVSVIPLQQSLNNLNQADQNFFQLGTFHATSLGKRKGKPVKPPKFKSRKSKQTAKFTLRGFKIHQDKVSLSSLNKLQIIWSRELPTISEARLLAKFLLLGNILQERRQEVLSSITVIKDSANRYFLSFVVEINPETLPQSELSVGIDLGIKTFATLSNGEKVDAPKVLKKRIKKYRKLSKSLSKKTRRFKRYEKARLRVAKFHAKLKDTRTDFQHKLSTEIIYQNQTIVLEYLNVSGMVKKRCDPTTTLALALGKLLCKRQLLCKRQVASGQIPRRRKTQAIGSRVGVRRKGMLTKRGNADQERERAPRDRKSSRTISDLGWRKFRKFLEAKGEKYGRDFRVISRWEPTSQKCSCCGFHGGKLDFSVREWECLNCGSKHDRDENAAINILVAGGHSETLNGRGGKLNPPPSPLGRGVRGVGPAAYETSTRRGAKAQ

SEQ ID NO: 13165 - protein, 395 aa, unknown
  TnpB Polypeptide
IFLSERIQLKKSLQLYGLCHRAKNLYNQANHVIKTTLDTEGKWVRYVELYHNVKDSKNYKELPAQTAQQVMRLLDKNWTGFFRAIKDWRKIPEKYRKKPEPPRYKRKDGESIVIFTNQQCRIKGRFLHFPGKANLDPIKINKDRISHFQQVRLLPRGTYYVLEIVHEKEKKINPVDEKRIISIDLGLNNVVCVVNNAGLRPWVVKGGAIKSINQFYNKMRSKYQSIKDQQGIKFQTKRLRRLTRKRNNKISDLFHKLSRFIINYCLTNGFGTIVIGYNDRWKENCNMGRKNNQNFLNVPFHQLVQQIQYKAELDDIQVIKVDESHTSKCSFLDGEAIEHHDHYMGRRIKRGLFKSKKGKTINADVNGAYNILRKAFPKGINPDGIEGLGLVPYSV

SEQ ID NO: 13166 - protein, 480 aa, unknown
  TnpB Polypeptide
VEFIKGFVNKVLMKMVSAEGEVKGLKNENSRGTRPQEKNKSGKIFLSERIQLKKSLQLYGLCHRAKNLYNQANHVIKTTLDTEGKWVRYVELYHNVKDSKNYKELPAQTAQQVMRLLDKNWTGFFRAIKDWRKIPEKYRKKPEPPRYKRKDGESIVIFTNQQCRIKGRFLHFPGKANLDPIKINKDRISHFQQVRLLPRGTYYVLEIVHEKEKKINPVDEKRIISIDLGLNNVVCVVNNAGLRPWVVKGGAIKSINQFYNKMRSKYQSIKDQQGIKFQTKRLRRLTRKRNNKISDLFHKLSRFIINYCLTNGFGTIVIGYNDRWKENCNMGRKNNQNFLNVPFHQLVQQIQYKAELDDIQVIKVDESHTSKCSFLDGEAIEHHDHYMGRRIKRGLFKSKKGKTINADVNGAYNILRKAFPKGINPDGIEGLGLVPYSVKITELKQSANLISATNEVPKAIKVDGIVVEGYNLVSRKMKPN

SEQ ID NO: 13167 - protein, 373 aa, unknown
  TnpB Polypeptide
MFPTRQLSDILKNKRKGGEKLQALTVAIRIFPAAELEALLLAEAKEYTEVINYLTIQAYVLDSFPKLTTAHVEAKLPSAVLNQAIRDAKSIFAKYRKTGILPEVKKPCYYVNNQNYSIKDGKIGFPLFVNGKAHKVWLPIDLREREQQLLSGSKPGLVRVIKKRGKWFAQITIQKQVEKVAASGKALGVDLGLKVLAVASTTERKTRFFGYGCKAKCIRRKYRAKRRKLGKLKKLKAIRKLNNKEQRVITDLNHKISRRIVDFAKQEQSGIIRLEKLTGIRETTRARKSTKNEIHSWSFYQLQRFISYKAALAGIRIEKIDPKHTSQYCPQCGEKNKANDRRYICKHCGYTDHRDRIGSLNIAKCEPLADGLA

SEQ ID NO: 13168 - protein, 601 aa, Rhodococcus sp.
MTGPGSTAPRQFAFTTRAHMAVDDATGEPIGLDDVDTRVGWLLDLITAAGAELVSRLWQPATFDVLAAGRDRQDRRLPAQGHVAAARLGWTPIYPDGVYVPSRVTRVVTAQVMATLRTLAYRDTAITALSARFDPDTGVVAPPTEHSDYVPSGFLRGVRRQLAARSRRDGGAPAVPLRITEIQGPPRMAAMARISSADRQLAQITMADRELVLTVKLPTCPAPAGRAQWRSVRLTATIPEHLHGRTITDWHLPTLVLDHRGLLWRCAATELVPAADLESTTMAMGVDWSPTTLGAAAIVAEGSGGLSSDYRGWTYDDRGLGIKLARLQAEGQLLHAKAARLTQLSATAPPEVRAELEAKIAVLDAHREAVGAKRGKVNRELAFHFARQATDYATAAGAQVIAVEDLTTLETRGHGRVNNNRAAQSARRQAVAALAHTAAGVGITVVSVPARGSSAQCPGCDEPLSRPGGYHTAWCSRCRVGGNRDHVAGVNLAKRALLGRNKPTRRRGQTPAIRVAEHAPVRRCRDKNGPTPSRPRHRRVRHSLPDVTQRLGVNPKQHVPAPQASVWDTVKPTPPHGNAGSRDTRLSPTPATQVADSMRCT

SEQ ID NO: 13169 - protein, 402 aa, Escherichia sp.
  misc_feature (19)..(19): Xaa can be any naturally occurring amino acid
VERLQAFKFQLRPGGQQEXEMRRFAGACRFVFNRALARQNENHEAGNKYIPYGKMASWLVEWKNATETQWLKDSPSQPLQQSLKDLERAYKNFFRKRAAFPRFKKRGQNDAFRYPQGVKLDQENSRIFLPKLGWMRYRNSRQVTGVVKNVTVSQSCGKWYISIQTESEVSTPAHPSASMVGLDAGVAKLATLSDGTVFEPVNSFQKNQKTLARLQRQLSRKVKFSNNWQKQKRKIQRLHSCIANIRRDYLHKVTTTVSKNHAMIVIEDLKVSNMSKSAAGTVSQPGRNVRAKSGLNRSILDQGWYEMRRQLEYKQLWRGGQVLAVPPAYTSQRCACCGHTAKENRLSQSKFRCQVCGYTANADVNGARNILAAGHAVLACGEMVQSGRPLKQEPTEMIQATA

SEQ ID NO: 13170 - protein, 395 aa, Halobacteriales sp.
MTGTAIKTLEATLAPPTANKERRLQRTVATYRRALEDAFESGCDTQTAVNDVVTPYNLTSYAKDALKSYVPKLRDTYNASELTDDHPIRFTNRGWALDHSPERTHEFCWNVPQAGGGTSFWIPLRINPEQRDLWTDLLNGDVSVGEFRLHRHRTSWRLHVTVEYEIPEPETPDDPTPVGFDIGEGNLLVGCAVKQGKPVDPILVDGGRARHLRKEMHTTLTRLQERNAEQWRIDERFDYYQNALTDIVEKASRKAVEYARGFEDPVIVMEDLSYIRESLDYGKWMNRRLHAWAFARLQKRIEDKARDAGIPVEYINAAYTSQACHACGHIGNRDGDDFRCQNNGCWVTEYHADLNAVARLRLAGSQKSAISGDGGEYRRPRRPVGREPALEISRQ

SEQ ID NO: 13171 - protein, 485 aa, Halobacteriales sp.
MCRLQSNYLNRKPDGIIGVSGPPQRTNEYTAKPVSDRYRHCLFDWLAAHAPLWNQITYRRRQQYFSDDGNVWEADFGDLYDDYAPILGKATCQQVARKNSEAWRSFFRLLSKYRDDGDSTVTEKPNPPGYWGTRDDGYELRGLVRNDLYTVDWGETRSTLEFGVGDVLKDRYDLDHQERLTLEINGNPQWNGDDGRVELVYDEAADRIRVKHPVRIQPAHLREQRQDGFTHTLQPENATQAAAVDVGANNTLAIVTDHGETAVYHARPEFDRFCRFSERIADLQSHLPDDRYSSRRIERLYDDRGRKRDHARDAAVKHAAEWLLARNVDTVYVGDLTDVLDAHWSTSVNEKTHSFWSHRQLLNRIDLTFGDVGIDVVEVSEADSSSSCPACRSEAVRRQGDEFRCQDCELEAHSDVVGAWNVLQAEEGPMARPAVLRAGRCRDASPDGGAYWEWNGHEWTPAVFGERSRPVDRTSVGEPASSQPG

SEQ ID NO: 13172 - protein, 415 aa, unknown
  TnpB Polypeptide
MLKELNYELYMLKNYKYRIYPNKEQKELFEKHFGCVRWVYNYGLEKKIKTYKNSKQKISCFELIDELPKLKKENIWLKEVTGQALQMALRNLDNAFTDFFKQKNAFPKFKNKNSNNSFQLPQNVRLQSNLIILPKIKGVKIVIDRTFQDKIKTTTISKTPTGKYFASILVDNSLDLPEKQKINKAIGIDVGIKTYATLSTGEKIENPKYLKNSLKRLKVLQRRMSKKVKGSKNRNKARLRVALQYEKITNQRQDFLHKLSSKLIAENQGIALEDLNVKGMGKNHKLAQAIHDCAWSEFMRMLEYKASWYGKTVKKIGRFEPSSKICSCGEINNNLTLADRTWTCKKCNTYHDRDILAAQNILKFSGLGKSVGPVELLPLGRAVKQEVLNISHERRKRRVRSGLKRRTATYSTKLT

SEQ ID NO: 13173 - protein, 351 aa, Cerasibacillus sp.
LYPTKEERELFERTLELCRDLYNHALEQRIFTYKKRGVSITPFQQIKELPHLKKVLPEYKEIHSQVLQNVLKRLDVSFQNFFRRVKNGEKPGFPRFQGKNRYDSFTYPQSGFSIEGDKLKLSKIGSIRIHLHRKVEGKVKTCTIIRKNGRYFVCFVCEVEKVFHFTGKQVGVDVGISHLAITSDGEFFDNPKHLRKSEQQLKRLQRIVSRRKKGSNRRRKAVRLLAKKHEQIANQRKDTNHKVSRMLVDQYDLIVFEELNVKSMVKNRRLSKAIHEVAWNQLIIFTSYKAAYADKQVKVVNPHNTSQMCSNCGRIVKKKLSERTHVCSCGYTDHRDINAAKNILKLGLEAG

SEQ ID NO: 13174 - protein, 333 aa, unknown
  TnpB Polypeptide
MKLEECQCYLDRNYIVLVVEPRSTYYIPFTPNEFYDQLKTEKYGEITLRLNDERTVDIFIPFITEVELKEPTSLTSIDVNERSIELITISAHNVKITRVDSSEISTTHYSYSLKRKTIAKNIDNGEKYQPRVRKKLLNKYGRIERNKNKNDIHAMANIICDIVNEENSIVVMEDLTDIRDSSARQKNVTQWQKKKSKHMRRRLNRRNFKQFQTYLDYKATSPGHLVEYENPRDTSRTCLKCGKKTTCTTQIFKCSHCGYSIDRQVQVPINIAEKYLKKKLTQWEEHKDVASSVPAERQLMKMVLGELREFRDLIVRDVSQLDERYPFISFVAT

SEQ ID NO: 13175 - protein, 379 aa, unknown
  TnpB Polypeptide
VNDVIRSYKIKLYPTKEQEQLMHKHIGCCRYIWNYMINLQCSNYESGNKYMSAFTMINLLKPLKNDGEHKWLCEVSNQSLATVCQDVDKAYQRLFKKQAKKPKFKSKKRSKQAFPVRGTIWFKDNVVTIEKLGKVKFKSDFEFPQGRGNKFTNTRISEINGKWMLSFGMECENQAPELNDYSMGIDLGVKDLAIAECNGQIVFHNINKSKKMRALNKKLKHLQRAVSRKYEANKQGKKYIKTKNIEREEQKVRNIHNRISNIRNNYIHQCTHALISMLPKRVVVEDLNVKGMMKNKYLSRAIQEQCFGEFLRQMQYKCEWNGIEFVMADRFYPSSKTCSCCGVVKTNLKLSDRIYRCESCGLVIDRDYNAAINLSRYVA

SEQ ID NO: 13176 - protein, 377 aa, unknown
  TnpB Polypeptide
LERQSKTLVKTVVLDCYANKYSRRALREIEGAYREMLVEMVEYAVKYRASQETLHKVFYEEFRVRYPWLPTRVIKGAYRDATRRAKSFRERKKRGKVYKDKPEVRRVAITYSDSQDWRLEGGAVKLRTHRGWVELHYRNHKQLYRYLYSGWRLASELRFKTLGRKVVAYLTFTREFEVGYDPRNVVAVDVNENNVTIALFKGGVLSDVYRAEIGLGRIVIAYSERRKRITLGRSTKVREVRKKLRKLREKERKLDVLRKTAKFIEKLAVENGAVVVVGNIDEKAKERMEEDAISKLRHRIHQWSVKKLIELLDEKPIHVVKVSERGTSSRDPFTGRRVKRFEPLVIRSAVKGLKRVKVMKIVLRVAKVSGGLLKETS

SEQ ID NO: 13177 - protein, 372 aa, unknown
  TnpB Polypeptide
RITVGNREFIYAKVLRKPSNSKDKWLTFMAMLLESWQTKSYFAYTVELKLRDEEIYGSVSFEVPPPKLKYTKENGVIAIDTNASPIHLAIVELSKNGELVSYESISLYHLLGLSQNSKDYQEWLLAHQIVDLAIQKGKAITIENLKSLKKGYRGDGQAKLRRRLYHWNAKKFLQKLKRLASLKGIEIIEVNPAYTSIIGMLKYAPQLNIDKDIAGAYVIGRRVLGFKEDTPENYEKLLKDREYLEFAYKKYEEKERELKELIESETNQYKKNALRNRLRTIENGKNILNNLIQSLQGEPSSCKEANGRNSKQGEAQKASQVAWQVLRVALLFPILGRIPPRDLSPLKPILVEGAWNRVRKRLVPLEAEGTPK

SEQ ID NO: 13178 - protein, 306 aa, Rhodococcus sp.
VTLPGIGMIRVHEDTRRLRRLVAKGRAKVLYATVSYRAGRWWVSIALDAADLHPAHHHRPRERGDSGGWVGIDRGLAVFAVAAAADGIETARIDTAPKPLTAGLVRQGLLARSLARKQKGSRNHREAAARLARHHHRVANIRRHFAHQVANKLVKTHDRLVIEDLHVSGMLGNRRLARAISDAGWSDFARLLAYKQAWRSGIVVTADRWYPSSKRCSSCGTINRGLSLADRVFVCACGFRADRDRNAATNLAQWPAVEQDFLRTPDPRAGGRVTKVRRREGADRHTAVGETGSVDAETDACAPVGA

SEQ ID NO: 13179 - protein, 714 aa, Streptomyces sp.
MWSVLRSWGRFSVGNWRLRVECVTFPGGGRWYWQGSSAAGGGGGGVGVLRYVAEPFVASGPGGVAVRTRLKQLTPADEEVLRLVGAHLGSLASRDLKARCRDGLEHSARTWAVRKRELTAVSSSRWAGSITKATHDQWALARRCQLAHIQNLEAGIRTLTHRLSQPIGQKGTKKTPGGYQSKREWHAKSRRLGVLQDRLAAARADREAGLVHVVRGGKRLARTRHHLETAQLTEPVWRGRWEAERWFCQADGESGKRHGNETIRVSPDGEVSLKLPAPLAHLANAPHGRYVLACRITFTHRGEEWADRVTADRAVAYRIHYDTGRTRWYVTAAWQIPPAPAIPVEAALASGVIGIDMNADHLAAWRLDVHGNPIGAPRRFSYDLTGTAEHRDAQVRHALTRLLHWVRTCGVKAIAVEDLDFTAEKTREKHGRNKRFRRLISGMPTGRLRARLASMADATGIAVIAVDPAYTSRWGAQHWQRPLTSTTRKPTRHDAAAVAIGRRALGHPIRRRTAPPPHDRSDRAGHRTVQARPGVPGREETRPRIPGPRTRSLRAGRGANAGDQNAQHRPGRSTEHGPWQQGSLPLSLQERSCRAGAALFGRSRLSEARRRPGGMMSQDADGPHREFASLCGPSVGTASVAGAGGCQAPARAAIRALRAASFSSNFRASASRPFMYRPSSSCAFRPSGPRPSISITFRKRSTGWSTSSWWMRRL

SEQ ID NO: 13180 - protein, 378 aa, Thermus sp.
MWVIQAFRFELDPNATQRRALAQHVGAARFAYNWGLERVFKALEEGRKIPTSVDLHRAWNEWKRENAPWWQEVSKCAPQEAFRDLERAVKGWRAGRARKPRFKRKKLTPDNGARLTGAIRVHPQHIQLPRIGQVRSKEPTDKLLRLLEAGKARIRSATLSREADRWYVSLACEVERPDPEPKEGEPVGVDLGLNAFAVLSDGTRFEAPKPLGKLEKRLKRLSKKLSRKQKGSNNHRKASLALARLHRRIANIRKDFLHKLSTGLARTKPVLVLEDLSAKALMRSRLSRSVADAGWGSFRRMLEYKAKWYGSQVIVAPRDFPSTRLCSSCGYLAPKMPLHVRVYRCPACGLEMDRDWNAALNLRAYGLAHLTGPTGRPR

SEQ ID NO: 13181 - protein, 278 aa, Thermus sp.
LSYPRFKGKGRYDSFTFPQAGSTGVKVQEGGKRVFIHGIGSVKVKLHRPLEGRLKTATVKREGEHWYIIFVSEVEPQPLPENHTAIGIDLGTNPYFLVTSEGEMVEAPRHYQKAQAKLARKQRGLSRKKRGSSRWRKAKRELAKLHRKIANQRKDFHHKVARGLVNRYGTIVHEDLNVLGLARSHTAKGVLDAGWAQFLSVLAYKAEEAGRRVVGVDPKYTSQDCPVCGHREKRPLWVREYTCSACGTPLHRDVAAAQNILARARAEPSGMDTARAVP

SEQ ID NO: 13182 - protein, 369 aa, Thermus sp.
LSYPTRPQARDLERTLELCRQLYNAALQERRDAYRKVGKAVGFYEQKRHLPVIRRDLPEYKGIHSQVLQEVIQRVDRAFQGFFRRVKQGQKPGYPRFKGRNRYDSFTFPQAGSTGVKVQEGGKRVFIHGIGSVKVKLHRPLEGRLKTATVKREGEHWYIIFVSEVEPQPLPENHTAIGIDLGTNPYFLVTSEGEMVEAPRHYQKAQAKLARKQRGLSRKKRGSSRWRKAKRELAKLHRKIANQRKDFHHKVARGLVNRYGTIVHEDLNVLGLARSHTAKGVLDAGWAQFLSVLAYKAEEAGRRVVGVDPKYTSQDCPVCGHREKRPLWVREYTCSACGTPLHRDVAAAQNILARARAEPSGMDTARAVP

SEQ ID NO: 13183 - protein, 340 aa, Streptomyces sp.
VIRAYKFVMRPTVRQAQALGEMLRDHCSPYNGALQERRDAYRHASKTSIKYGQLKDIRAFDPERQGRWSFSSQQATLRRLDKAFAAFFRRVKSGEKPGYPRFRGVNWFDTVEFAKDGDGCRWDSTPHDPVTRVCLQGVGHVKVHQHRAVAGKVKTISVKREGRKWFLVLSAEQVQPEPLPATGAVVGIDLGIASFLADSSGGFVPNPRHGAKSAAKLEAAQQALCKFPRVRRDKRTANHRRAVEKVAKLHRKVRRQRLDHAGVFLTILAAKAESAGREVIAVDPRNTSRQCPECGHTSVENRPAQEKFHCVSCGHRAHADTVGATNVLRAGLVRREAAPA

SEQ ID NO: 13184 - protein, 291 aa, unknown
  TnpB Polypeptide
MSDLTKTVKLRINITPEQTELFRQMTEQYRQACNFVSQYIFDNQFDLAYLSLNRVLYAEIRSRFGLKSQMAQSSIKTVIAKYKTVKQQLLQRPYKYKDEKGNWKYITKTLEWLWKSVFFRRPKTDLVRDRDYSFVDKGQTLSINTLGGRVKCSFFGEHFSAYLDGSYSLGTAKLVELNGLWYLHIPVTKTIEDFEKEKVRHVVGIDRGLRFLAVSYDEQGKTEFVSGKKIATKRRKFQEVRRQLQSKGTKSAKRRLKAISGRENRWMSDVNHRISKTLVQTYGEGTFPRFG

SEQ ID NO: 13185 - protein, 466 aa, unknown
  TnpB Polypeptide
MSLCVQLSLQGVAVLVIGGGRIAYRKCCQLEQEGAELVVIAKQFDACFQGAAYPCITDSYRPQQLQGKMLVLACCDDLISNRQICEDAKQAGIFAMSVRQNCGASMHALAVEETAEYVLAAGTKGASPLLARQMLKEMNAVVKKNYASRIAMLRKLRQYILQHIQKEERPQLLSRLVRLSQRDLYCIEQALQGKGLQLVCFHGVKEDVSQELENFCAAIEHRKTNLVAAAAFLFEGVSDTSAQPVAQWLQIVKSLHIPVTLEVESMNILNHIVGIDLGINHLAVSFDDEGNTRFFSGRAVKEKRAKALALRKRLQACGTKSAKRKLKKLREKETRYVTAVNHAVTKALISQYGAGTLFIIEDLTGIRTATEQVRLKSRYVMVSWAFYQFREMLEYKAALSQSEVLAADPKYTSQSCPVCGNTTKANRSRKRHEFCCTACGYRSNDDRTGAINIYRKGFNTLFAEAC

SEQ ID NO: 13186 - protein, 412 aa, unknown
  TnpB Polypeptide
VYTFNKDKLQEDEIYKTNTVVLYPTESQKEFLDKCIDLYRFTYNWTIEQKEIHYKRYKDGLEDSALIQDKTLIKRFSEFRKSNDWLKIIPMHTLRNAIYDAIDAYERFFTKRIKTKPKYKSKKTSKKSFAPEIQHTVFYFKKSGVHIAGLHYGETIQTKINTDLCRMSNKRFRSARIVHNSMDRYILTYVTIEKKPIITTDMIDNKYNRAIGIDLNVKNLIVTSYNDGEIFKAIDMTHKEKQIKHYQRLCKKDFDRTKRINQERANLDQELLDKSNNAKKRSIILAKKYKKISNTNDTYIKTIAKKVVSRLPKAIVMEDLKIRKIQKENKYVAKYISKVPLYKIRKVFEYNCEKYNVPFILADKDFPSTQLCSRCGHKKDLKGYKYYVCNNCGLRLNRDINASLNLEKLAYC

SEQ ID NO: 13187 - protein, 470 aa, Clostridium sp.
MEKGNLTQMRVVKNDINKNNDIFSKIDNYCWLSKNLYNRCNYLIRQLYITTRKLHNKEDITKEQKTFVDNIHKWVNDYNIKVENGQTKGKKKMKLSQQWYGEYFEKETLNKYILNEIDYKSLQSQSAQSILKRVDSTWTSYFNSLTDYYKNPNKYKGKPRMPNYKDSKNGRYMFILTNIQVKIINNTLFFTPKDLKKYTFQVPLADYERRHSKDCDLKEVRFVPNNDIYTMEIVYKIKDKPKIKEKKGKMIGIDIGVDRLATVCNSIGVKPFAINGKLLKSINKFWNKQIADYKSKLKKVNNKYSSKKYLKMCRNRNNKMSTYMHQSASYIIKWCVQHDIDTIVIGKNDGWKQKCNVGKETQTFVQIPFANFIEKIKYRAEALGIEVILQEESYTSKSSFIDEDYIPTFKKDDNKANFSGSRKLRGLYITKDGIKIHADLNGAYNILRKYDSSFTYNNDYLHPYIITPNN

SEQ ID NO: 13188 - protein, 444 aa, unknown
  TnpB Polypeptide
MKITSSYRIKLTGDLKVLDASIRIYRKALRFVIPIVNMKWNKIEQLNYTKQCMTYTEKLIHSTKNNQAQYDFDEEFPKFPTYLRRAVINDAIGIVSSYRSNLENWEKDPKGQVPQLSLTHYTYPAYYKKNMFRNFDPVSQTIELKVYKNGDWVYEEYQLKTSDCRYYQKYLAGLKQNVPIIQKKGRRFYATFSYEEHVQLVKEGSIDKICAVDLGLGTDATCSIMDEDGTVYARKFISFSEEHDRLHTQLGRIKRNQKRGSKHNKTLWRKVSGISQSVADETARAIFDFGYEHGIDVFVLEYLDFKGTNPVKRAHFWRYKRIYKVLAHKAHRHGLRIARVNAQNTSRLAFDGSGWSKRGREISPETPYSIIRFANGKTYNADLNASYNIGARYFIRHLLKTVTVTQRLVLEAKVPQATKRSTCTLSHLINLKSELAVLTARTQA

SEQ ID NO: 13189 - protein, 508 aa, unknown
  TnpB Polypeptide
MRASTPSFVVSVKVHLPKQIENHLEKSFNIANSAYNEALGLGLRRIKAMRANPRYQELLEARQSLAESTQRLKKSKGLAWQLKLYDKALSNLRLGYGLSEFSLSKYLTNRRNEPNSPYKHLSAAELQVIAREVYQTLEKVIFYKVKPDKVKFRSKYNLNASFRNKINNMGTRIVPSEKTDVAYTLFIHKRRTFVDISTKAFNEHQQLSLTRAEKIKYVQIVRKTIRGKRMYHLQIVCEGYPLAKVTKGDGVVGIDPGVSTVAYASKENVELVDLVPENITIREKLIKSLDRRIERSRRANNPDCYYSNGAIKRGVRFKRPTNRAKRLILRRQKAYRSLTQERLKLQGELVNRIVSEASIIRMEELNVKGLQKRSKDIRINPKTNRPHSKKRFGKAILKAAPSYFREALKTRANGLGIEFEIINPQKVKPSQYNHLTESFEKKALSTRIFDLSDKWTGVQRDLYSAFLIGHIENGQYDQTISEEFPNFYKKMKEFLAKQKPSRLDWYLK

SEQ ID NO: 13190 - protein, 440 aa, unknown
  TnpB Polypeptide
MKLTGDLKALDASIRVYREALHFVIPIVNTHWDELNNFEYTKQRMTHTEKLIHSTKDEQARYRFDEEFPKFPSYLRRAVINRALGIVSSYRSNLANWEKEPKGQAPQLSLTHYTYPAYYKNNLFRNFDHVHQTIELKVYKNGDWVYETYELKTSDCRYYQKYLAGLKQNVPIIQKKGRRFYATFSYEENVSLIPEKSIDKICAVDLGLGTDATCSIIDKDGTVYARKFISFREEHDQLHTQLGRIKRNQKRGSKRNKTLWRKVAGISQSIADKTASAIFDFGYEHGVDVFVLEYLDFKGKNAVKRAHFWRYKRIYKVLAHKAHRYGLRIARVNARNTSRLAFDGSGWALRGREILPETPYSIMQFPTGKTYNADLNASYNIGARYFIRHLLKTVTVTQRLALEAKVPQVAKRSTCTLSHLINLRSEFVALATKTQAQAVW

SEQ ID NO: 13191 - protein, 232 aa, unknown
  TnpB Polypeptide
VIIKKHGSGKWFACICVEQTIQAKKKEGRKAIGIDVGIKHFLTDSEGRKIENPKFYQRTLQRIKIVQHWLSKKRKGSKNREKQRVKLVKRYERLVNQRDDYLHKLSRFYVNNYDVIAVEDLNIRGMVRNHNLAGKILDASWGKFLQMLSYKAENAGGVVIKINPRGTSKEGDKNLDRDYRAALNILMRGWGSPKTLAEMRPLLVNVPASLIVEAGSPQALAVGSSPTFVSRQ

SEQ ID NO: 13192 - protein, 428 aa, unknown
  TnpB Polypeptide
LGYKAPLPYITTYKPAKHGIIGNMNTKTVKRAYRFRFYPTPEQENMLRRTLGCCRKVYNMALDARSTAWALRHDSVSYEDTSRMLTDWKKTKEYAYLREVSSVPLQQSLRHLQVAYRNFFAKTGDYPRFKAKHEGGSATYTVSAFAWDWEHRALTLAKMREPLHIRWSRTLPRKSRPSSVTVSLDAAGRWHVSILVEDAIIQPAKNGNMVGIDMGLEHFAILSNGEKIDNPRYLRKHLRKIVLAQRKLARKKKGGNNYRKARLKVAKAYAKVKDCRTDFLHKLSTRIIRENQTVVIEDLAVKNMSRRCKPKTDPDNPGQYLHNGQKAKSGLNKSILDAGWRQFRTMLEYKAEWYGRQLTVIDQWYPSSQICHTCGYNSGKKTLDVRTWECPYCHTMQDRDINAAKNILSAGLAVRACGDPRTAEATLR

SEQ ID NO: 13193 - protein, 296 aa, unknown
  TnpB Polypeptide
VGVDVGLTNPATAVVRDITTGEVVESSFMNRRVRSLENKIKRAKTQIAALHRKGRSSDVDPHRKALSNRRKELAILIGQEIADMSWKYGNALVAVEDLSHMVNTMKHGRWVRGMIIDRITDMVESNGGRVMTVNPAYTSQKCHQCGTMLDMTDYHTPICTICEVGWDRDKNAAANIAGKLKDKHKKSCATRKKHASSKRRKNSKGLLRPLKHPLKKTGSTPKAPQNRPKSRDNHMVHHAQCVVRKREEVYPTLCAAGWSLCHSNVRVPAVGPGKASDKKPHDYPTGRHRLNDLCLS

SEQ ID NO: 13194 - protein, 385 aa, unknown
  TnpB Polypeptide
MLKTYKFRLYPSKKQELKLNQFIELARFSYNKQLELKINEYKINNKNLSQFDLNNNLIKLKEENKNLTQLHSQVLQNINQRINYAFNNFFRRLKSKENPGFPRFKGKNKYDSITYPQSGFKLENKLYLSKIGKINIVKHRQLEGNIKTLTITKTSSNKWFACFSAEKEVKKQNRIENHIGIDLGLKHFYADSEGNLINNPKYLRKSELKLIKTCKNHSRKKKGSKNRLKSRLKLAKLYERITNQRLDFLHKQSRVLTNNYSNITVEKLNIQKMQQNKYLSKSIADVSWNKFLQLLSYKVEETGGKLIEVDPKGTSQYCICGNKVEKSLAVRIHKCNNCKIEINRDVMSAILIKNKAFDTAGSAEINAWGNVSCRNVDEPRISCIF

SEQ ID NO: 13195 - protein, 473 aa, unknown
  TnpB Polypeptide
MVSKDLLNVVLELLKLKSEYLYRHCLEVGDIACLIGRNIGLDSQKCVILKQSGYLHDLGKLGISDMILMKPGGLTEKEMEQIRLHPYLTVKTLKNVVNGNLEKTFCEDLFKTILYHHEDSTGNGYYRKTSREIPLLAKILRIADVFSAVYELKLQNLSKRKSEVLRKAFLEAKWLYNWLVSDTERLRIPANKVSMVKVKAGDIFEQRELNILGSQIKQEIADRLKDNLRVLGKLKKNGCTVGALKYKKFVNSIPLQQYGVTYSLEFAQNRVRIQRLGKFRVLGLHQIPTDAEIANAVLVRKPSGYYLHVTCYLPKNSHISLNTVGKDIGIDFGVSRKLTLSNGIKIDFEVHETPRLKRLQRKLAKTQKGSRNRERILFFLRKEYEKLNNRRKDAQNRILAFLKIYRRVAFQDDWVKGWSGLFGRQVHSSGIGGLKSRLRTSLETPVAVERMETTTRMFCLWEKARSLPVGQGN

SEQ ID NO: 13196 - protein, 190 aa, unknown
  TnpB Polypeptide
VIGIDLGIKDFLIDSNCNKIANPKYLKQSEKKLVKLQRELSRKQIGSSNRNKARIKVARCYEHIANQRNDFLQKLSTQLIEDNDIICIEDLQVKNMVKNHKLAKSISDCSWSEFTRQLQYKADWYEKTIVKIDEFYPSSKTCSCCGNKLNELTLDVREWTCPNCGVVHDRDINAAKNILKEGLNKLNQIG

SEQ ID NO: 13197 - protein, 393 aa, Acidilobus sp.
MSAGGEGELTLTVRMKVSPEPEGEQALLDLMRRYRDALNYSIRAIIASKALSLSRAHRLLYEDLKERYGLPSKIAQGCYREAITIAKSWLRNPRRGAVPTAKRLSVWLTHGLGYRVKGDHVELIGGYRLRVIGWDRRYDNFPNRGARLVFRDGEFTLYISKRVPRPAKYAPKGVLAVDVNERQVVVGNSSVELRVETPVERALRYRRLAERLEEKYSSSRYMAWRRRSGIRRRIRCFRRKARNIIEDWARKTSHMIISLAKQGQLAVAREDLTGLMESLRRLPKEHRTALVILGYRRLAFWVDWQTEKNGVPILIVDPAGTSTTCPRCGAKLVEVGHRRLRCPRCGLEADRDSIAILNIERRALGKMGGSLATPTAPQVTDVNPNRWGEPPHL

SEQ ID NO: 13198 - protein, 292 aa, Candidate divison MSBL1 archaeon
MRITFEVPVSSPTRKKESFLESVSDKFPKMVLWFLTVFEMEGLDFRGTSLNRARKVVKELCYPAGERDSKYDCKGAVRFPHSHYYDTAITEAIQKWNSFLSWREKSGTGKRVPEIRAYAPVLDALMFELDLENGWITLKTGRGEKNVHVPITVPNKSHYEDLNEEKISSIRLKKKDDRFVFLLAQKSFSPKKPSPNELGEGPVIGIDLGERNLASLVAVRLGSQRPEIVNVKFFGGKEAKKLEHREQHVRKRLQERGKSGEVPGRGRKANDKKKDTCEEEGRKANDNKKDTM

SEQ ID NO: 13199 - protein, 400 aa, Azotobacter sp.
VILAHKIALTPNNAQATHFARAVGVARFAYNWALAEWGRQYEAHKTDPAQPKPSQAALRRQLNAIKREQFPWMLEVTKNAPQMAIIQLDEAFKHFFAGRARYPKFRRKGLHDRFTLTNDQFVLDDSRIRIPNLGWVRMRESLRFTGKILSTTISRVADRWFVSISVDTQDLSHLPKAENQGAVGVDLGVSALATLSTGEVVTGPKAHTALLQRLRRLSRSLSRKQKGSANAKKARTRLARLHARIANIRQDALHQLTTGLTRRFPVIGIEDLNVAGMLRNRRLARSIADMGFFEFRRQLDYKSDLRGGQVVVADRWFASSKTCSCCGHVLESLPLAVRTWTCPACQARHDRDGNAAFNLRNYAVSSMASACGGEGAGLGGNARVKPAPMKQEVSAKATYG

SEQ ID NO: 13200 - protein, 562 aa, unknown
  TnpB Polypeptide
MLERRQMQMHTLKLLLRTTAEDDAFLASVFLAVTKVHNKIVCEGKKRLRMLRRDKRYRYAKSHYGTTKEQCEKLENKIAALEKKLTASEDKSERRALRKQLKDLKSEHRAADVIRKNYGSEINECLIRYGLTKSAMEIYATQWLNQKYKGTLNSQQIQVEADRVWGGMEKVLFHDGKDIHYKKYRDIRSVRGKQNSTGFRFNKDLLSVQYGKSGVIPVAYREKLERAVAGEIKNKDLSYKMDSLSGEVRYCELVREEFHDGYHYYANLYLDGDAPKKIRPGNGRCGIDPGVSTVAAASEKELFLEELAPRYREYDKQISKLQQKSDKLRRELNPEYYNEDGTVVKRKPKEKRIWKTSPEYEDVMRKIRILYRKKTAYISISHATLCNKLLKSADTFRVEEMDFRALARRAKETSRVDTTTTLTKPDGTTQEIRKFKRKKRFGKSITSRSPGLFLEILKRKCAQYGLDLQNTDTRSMKASQYDHTSDTCQKHNLKDRILILSDGSVVQRDLYSGFLQQHADAELKHPDRKSCIRDFPTFMKMQDALILRMRSEGISMKHCFGF

SEQ ID NO: 13201 - protein, 405 aa, unknown
  TnpB Polypeptide
MTTVITAKVRLYPSQEQATQFKAVTKEYQRLCNLVSQWYFDNYCRVNRKKFNQEMYHYLRVESKDINSAMVQSTYRTVEARYKTVRQQLFQHPYHFQDKNTGKWYRFNRDLGWLYKPIKFSRPQADYVRNLNYSFVEQGSKISMNVLGQRIKVAFNGDYLNFFDPNYKLGTAKLVQLKSHWFLHIPVTIETDEWKKEHNQHIVGIDRGLRFLATTYDEQGKTSFFNGKTVMHKRDTYQKIRADLQAKGTKSAKRRLKKLSGRENRWISDVNHCLSKTLVQKFGANTLFVLEDLTGVSFERTNLPKTLRNQNSSWAFYQLEQFLTYKAHLNNSEVVEVSAAYTSQRCPKCGTIKKSNRNHKLHEYHCTNCGYRSNDDHIGAMNIQLLGTQYISGQEQPKFELTTNA

SEQ ID NO: 13202 - protein, 337 aa, unknown
  TnpB Polypeptide
MAEANACCNRLSEWAWENQTFGQYALHKSRYATERAASGLTAQVVVRCNGKVADAYKLDKQTQRTFRPDGAIAYDDRILRWYAQRGQVSIWAVGGRLALPFVCGDHQRAMLVFQQGESDLVLHGENFYLLTTCNLPDPPLVETDGVLGVDLGIVQLATDSEGRAYSGETVKACRRRAKRIRALLQSKGTKNARRHLQRMRQRTANYQRWVNHNISKQLVQNALSSRKALALEDLKGIRQRASVFSREMKWQMGNWAFAQLGSFVVYKSKVAGLSVTFVDTRNTSRTCSACGHCAKENRKSQSQFLCLQCGRAMNADLNASLNIAARATVRTPIDAHA

SEQ ID NO: 13203 - protein, 545 aa, unknown
  TnpB Polypeptide
VKATVEARIEGARFVPVLAAIAALWGPLERLLFQKLHAGGSQSPAERVKAVKREFIADHRLSARQFNGMRMNLEGKVDAWRETQKERKAQLAEAIRKLGKRIGKLAATRAALTRAIAAFKPSRTLATPQAFKDRRARVDFQVHQKKRRLETLAARLRQVEARMAGTPSICFGGRALFRKQFHLEANGFASHGEWRESWRERRTSQFYAVGSGDEKRGNGECQFDPDQGVLRLRLPHALEARFGTHLTVPVDFSRHSDLRDALAKGRAISYRFLRRENGQWYVQATTTRDPVPFVTRRERGAIAADLNAGHIAVADLDRFGNLAGHREIPLDGRGLSSEQAGARIGDAVASLVLQAKEAGKPLVIEALDFRKKKCALRELGKRTAAMLSGLVFAKFQETVQSRCEREGVELIRVNPAFTSTLGFAKFGGYEISTHVAAAMAIGRRGLGFGELLKARTASPRLGAALNERLREIAKGRKAGEHVWKAWKELTPWLRAEMRKRRRPRSVPSGGASHPGRGSPQPVTVRSSRRFGVRTPAVLAVGAAAP

SEQ ID NO: 13204 - protein, 409 aa, unknown
  TnpB Polypeptide
MSIKRYRYRAYPKEGQKQLVAALFGCVRVVYNDALVYSQEQYKNTGKKPTSGELSARLTHLKQTPGKAWLKNVSAVPLQQSLRDLDKAYTSFFSSITGKRKGVKVGAPRFRRRSNRQAARFTSQVFKVRQTSHGVGFVRLPKIGEIRFNLSRALPSPPTSMTLIQEADGRYYVSFVVETTPSPTPEPSAYAVGVDMGLKDLAIAVNSNGVSTVFPNIRPLKQAEKKLARLQKQLSKKKKGSNRYAKQRLRVAKAHTKVRNVRTHYLHHVANQVVNENQVITLETLTITGLARTRLGKSVLDASWGHLTRLIAEKAAAYGRTLIRVDRFAPTTQTCSICGTPNGRKPLNIREWSCTECQHRVDRDRNAAANIMLAAGLAESLNEHCGDDVRRLFADAVIVDTVHPPRATW

SEQ ID NO: 13205 - protein, 455 aa, unknown
  TnpB Polypeptide
MGKVRTSLSLSRFDVINSSKEKVIKDLAEMIQQIQDAESSFIASPEYQDLAENILSGRVRVSGKKNYCGRGVVPNVVFPCNSYNMNEMLRASIMSRAETYTVSYGLFAVLADNPAEIGVRRVKKLFRDRYPNSRIPRDSEVSSHIHRFNNKNQQTARLPSSPAKIDLSACDGHYLNVSYTNREITLKFRNLPTAGRQVSLRFTVPEGDRFRGYKISKPVVQIVNDRLVFKFTIENTVPDITPNKVMGVDLGKAEPFVATVIEESLQWHSAPFFTTDRIKDLSHKYDDLMSRAAHLKDKENRCRSSKHSDKADALARHQRGIRDKARRVKDEAIHQIGHEIAETAYSMNAEVVMENLSWLGSKGGRWNFREIQDAITNACIRKGVPVSFVSAKDTSNTCTRCGSSVRHAGRDNVCTSCGFRINRDVAASREIALRGTNKKLREPLRQRRLGVPAPH

SEQ ID NO: 13206 - protein, 391 aa, unknown
  TnpB Polypeptide
LLKAFKYRLRPTEVQTELINKHIGSSRFVYNLALETKTMAYAGNQVNLSCFDLIKQLPDLKKECIWLKEINSQSLQEPIRNLDNAFTRFYKGQGNFPKYKSKKKGKQSFHIPQNVIVENGKLIIPKFKEGIEIVLHRETKGVIKSATISRTPTGKYFVSILCDTGEDCKQKSKIKKETTVGIDLGIKDFLITSDGEVSGNPTYLRKAESRLKYVQRKYSKYKGKRTKNKLANLHEKVANQRRDFLHKESFKLVSENKTICIEDLNVKGMLKNHCLAKSISDVGWSMFTKMLEYKCEWYGVNLLKIGRFEPSSKTCSNCGGVNRDLTLKDREWTCVKCNTKHDRDINAAVNIKNFALRNYVSGTDTKTRNELPTLVGVLTSEAQPIASGVGG

SEQ ID NO: 13207 - protein, 547 aa, unknown
  TnpB Polypeptide
MELIDKTYKFDLSSANSPKFEILLEKAKNLLVFRNEISQKVCTNSQFYITKSKFDWVTHFRKKIELCNNQDVTHAIIEVYKNYANKKAAYKKATTVKIQDKMNTILYKKNGKNFKKGDTRIFDVVMKSTKMTMIVSYLSKYMNDGLLEFLRTSKSDDKDKQDFRDMVLGYVDGKHGDRILVLAKSKQERIIKKIFEHAIEFESLTFVSCTEQKQNIITKNKNTQSIYNAFITIPGQPVEDGKITIPTKLSKKHHGQIGHYYKDANKKDQRNTTYTIIFNDKKGIEIALTRKKADETVIGKTNYYGVDVNVKHNLFCDKHGHEIDYDRDIFNDYVKFLRYCDRKLNAKAKKNGEKRKGIKLSNKDAFLKKTWEIRVKDMLKRKSNKLVIRAIELGMDHIVLEDLSHMGRGYSKSLEFEGFKYSRLIRLLNIASLKAIIQSIGNKHGLQVTFVHASYTSQTCTCGCIDKRNRKIQEIFKCIVCGLEAYADAHAGDLIEDRMSDDVLRSKLMNCKNGVYTPKKLKRKTIKEILIACYDTNTSTKNQDVIK

SEQ ID NO: 13208 - protein, 400 aa, unknown
  TnpB Polypeptide
MLIAHRIALDLNNVQATYMSQAAGTARFAYNWALSEWKKQYEAWKQDNTLSKPSQEALRRQLNSIKRKQFPWMLEVTKNAPQMAIIQLGQAFKNFFAGRSRYPKFRKKGRDDRFTLTNDQFSIDAFRIRIPRLGWVRMRESLRFAGKIMSATISRVANRWFVSITVDTEDNSHLPRAENQGAAGVDLGVSALATLSTGEIISGPGPHKALLSRLKRLSRTLSRKQKGSANRGKAKIKLAKLHARIAAIRTDALHKLTTDLTRRFHSIGIENLNVSGMMKNRHLARAIADMSFYEFRRQLQYKAEMRGGQVIVADRFYPSSKTCSGCGYKLASLPLSVRKWKCPGCGTDHDRDLNAAINLKNMAVSSTVTVCGEEGSGSSRKTRVKPSSEKQEASSGFNQK

SEQ ID NO: 13209 - protein, 412 aa, Oscillatoriales sp.
MYRAVKVRIYPTEQQESYLAQYFGNTRWLWNYLLNATTNEYKETGKGLSKAAMDKLLPNLKKEYEWLGLAYSQVLQRVTFNLSSAFVNFFEGRAKFPNFKSKQGKQSIQYPQNVKLMPEDSVIKFPGNLGLIKTVFHQELPEAKFTTVTISRKADGKYYASILFNQVDNPVVASRDAIGIDLGLKNFAITSEGSKYDLPKKQLAQLEKNRKCKQKKLAKKTDKNSNKRRKANLLVAKVSSKIARVREDFLHKLSRKIAYENQVICVEDLAVKNIVKNPNLAKAISDQGWGMFLTLLKYKAQRFAHTYQEIGRFFPSSGLCNQTLLPMPMLQKGYDSLGVRFVDCPHCQKQHDRDINAAINIKNEGLRLLALGTSAAALGGDVRPKSSGRKKSMKTEAIPNELGSLNCTVRSV

SEQ ID NO: 13210 - protein, 145 aa, Blautia sp.
  misc_feature (7)..(7): Xaa can be any naturally occurring amino acid
VGACHDXKQKKRVALCHEKIKNQRKDFQHKLSRELAERYDAVCVENLNLKGMSGGLHLGKGVQDNGYGQFLFMLGYKLEECGKHLIKVDRYFASSKICSVCGHKKKELALSDRMYVCECGNRMDRDVNAAVNIREEGKRIYKECA

SEQ ID NO: 13211 - protein, 434 aa, unknown
  TnpB Polypeptide
MLEAVKVVLDPAPAQERLFQSHAGGARFAYNAGLAHVKAALDAGEKPEWTYYSLLRWWNANKDILAVGEDGEPWWKKNSKESYARALESLAKALSNWSKSKRGVRKGRRVGFPKFKAKDRVTPKFACATGSFGLIRNDPIGLWVPRVGRVHCMENVAKRVGDAKVKRMTISQRAGRWYASLTVEREDKPVAKHPKSGAVGVDLGVKHLATLSDGTVIENPRYLQKSERKLKRAQRELSRKTKGSNRRAKARAKVARLHARVADQRLDAMHKLTTRLAEKYSDISVEDLHVAGMVKNHHLAKSVSDAAFGEFRRQLEYKTARSGSALHVVDRWYRSSKTCSNCGRVKAKLSLAVRTYRCDSCGLVMDRDLNAAINICVAGSAPETLNAHGATVRRGGQTGRATRVSVKCEPSVHHLGAVSLGAGGRKGALQTTVR

SEQ ID NO: 13212 - protein, 256 aa, unknown
  TnpB Polypeptide
MKLVERHIINRNHANWQEADKLAFKSKNLYNFSNYLCRQHFFETGNRYTLPTLYHLVKNSESYRAMPTKVSKQIIKKLVETWKSFVEAKKDWLKHPEKYKSEPRLPRYKDKVKGRNIVIYHHESIYKADLKQGRCHLSMSNISVPTKVENIAEARIVPSCNCYILEIVYESPEVSLIQSEWVAGIDLGIDNLVALTSNQPGFKPMLVNGRPQRESKPILQQAQIPTPKQPEKRKPNQPTDTSSHLSPQSICGKLPT
